United States Patent Application Publication US 2007/0061916 A1 - sequence listing, part 10

SEQ ID NO: 45340 - DNA, 553 bp, Gossypium hirsutum
  unsure (1)..(553): unsure at all n locations
  Clone ID: LIB3582-020-P1-K1-C8
gacattttccaactctcaccaatctctcttaacagttcttctcatcttccttcttcttcatccaggtaagtttcctccttctacttcttctgtttttcatcttttatttcaattgctgtgtccgtcgcatatttctcttctcagggctgctgtttcatttcgctcaaatcttcctcttcgcagggtcttggcttaagtaattatgcaacaactggaaggattattccaattgtgaaagcctcaccacgactttcttcttctcccacctccatcaattttctaacagcaaatcacttacgcaggcactgactcgtgctagggtccccatagtaaagcttatggatccagtgactggaatntcctgtgacatatgcgtaaacaatgttttttctgtagtaaatacaacgcttctacgagattatgccaagatcgatgtaagattatagcagntggcttttactgtgaaacactgggccaagaccagatgagtgaatgcaacttaccaaaggactctatctagctacgccaacgtagacctgctatccttccatgc

SEQ ID NO: 45341 - DNA, 562 bp, Gossypium hirsutum
  unsure (1)..(562): unsure at all n locations
  Clone ID: LIB3582-020-P1-K1-D2
ggaaaaaacctttgaatgtggttaaaaatggggttaaaatggttgaattttacttgtgtaggaactgctggtgtatggaggattagtgctttgaacgaagccggtggatggaaagatcgaaccacggtcgaggacatggatttagctgttcgagctagtctcaaaggatggaaattcctttaccttggtagcctaaaggtgaaaaatgaattgccgagtacattgaaagcgtatcggtaccaacagcatcgatggtcttgtggtccggctaaccttttcaggaaaatggtcatggagatcattaaaaacaagaaagtttcgacatggaagaaagtacatgtaatttacagcttctttgtggtcagaaagcttgttgcccacattgttacattcattttttactgtgttattttacctgcaactgtacttgtgcctgaagttgaggttccaaagtggggagctgtttatattccttctatcattaccattctcaatgctgtcggaactccgaggtcatttcacttactggttntttggatcctttntgaaaacgtcatgtcat

SEQ ID NO: 45342 - DNA, 559 bp, Gossypium hirsutum
  Clone ID: LIB3582-020-P1-K1-E1
gttcctcttcggacaactattctcttttgcttgtgcctttggtttttggacttgacaaagtaaaaatcccaggtttgtgagcttattatggttctttttgtttcattctttcatgtttgtagacttccttttaagtattattgcaagactgtccactttttgcatacttgttctttactttttcttttttcaagctttactgagtaaattggtgttgtatacttggtcaaatgtttaataatagtgacttgataataatgtagcaatttcgtgaaatttaagtgaaatttaaaataaattggaaataaatgggaataaatggaaaataaatagacttccctgtgcttgctgtttgctcgaaaaggaaataaaatagtatgaacatgaaaaaaaaaacaagatagtcccctactttttgtcttcctttatttgtttgtctccttccgtatttatgggattcaaaataaaataactggcattaaaactagtggagaaatcaaatacaccaagaaaaacttttccttttgactaaacattcatagaaattaaatgatttccc

SEQ ID NO: 45343 - DNA, 555 bp, Gossypium hirsutum
  Clone ID: LIB3582-020-P1-K1-E11
cccacgcgtccgcccacgcgtccggtttttttttttttaaggaaagcgaaaaaaaaaaatagagaaagtttgacctggaaacgttacttctggctctccgcattgcatttacacattcttaattcccttaatttgttgctgacaattctttcctttttcataatttattactcaaattaaggagtaaataaatgtaattctttgcttatgtttatcagcaaatgaaggttgatgtctcttgtttgtctcctaaacttgccagaaatcaagttctttaaattctgctgtcacttgtaatgtaaaattaactcaactttacattgtagtttagttcatcagagggaaatttaataccatggtgagattttgttttcaatctttaataataataactgaacaaatagcttcctaaaagcattaaccaccaggaagcctagttgtttctttgcatttgcatgtcacttcttttgccttctttgttctgatattgtgcttatattgttccaatattgtttacaatgtggtcgccatgaaatcagagattgttgatatatc

SEQ ID NO: 45344 - DNA, 422 bp, Gossypium hirsutum
  Clone ID: LIB3582-020-P1-K1-F1
caagcaaacaaacatgggaggcaaaggaaggagaaggagagagaagaattatagagctgctcatggtggtgcggccagactccctccgcctactgatccctcccaagtcgaggctataccttctaaactccgcaaaatcatgaactaaaccacagatactacttctcacggggagcataaagcagaagaaaggactgctgagaaaaaaaaaaaaccaagcggggaatgaagtcaagtagaaagctaatgaaatcaaagatggaggcaatgataagcatttgaagaaatctaaggattcagatggcgcctaaggtacaatgctatatagcaatggtgggaagaaagatatgaaaggaaagaggaatcaagtgactgatctccggtgagaagcaacggttgataagtaaactagcagctctaaa

SEQ ID NO: 45345 - DNA, 564 bp, Gossypium hirsutum
  Clone ID: LIB3582-020-P1-K1-F4
ctcttcaactctgggttttgtttgtttccccagaaaattctgagatggcttggcttcttattcttgttcttgttttcgccgtttctcaagcaacagctgatgaagaaccatatattggagtgaatatagggacagatctatcaatcatgccccacccaactcaagtggttgctcttcttaaagctcagcaaatccgacacattagactgtacgatgcagaccgaggcatgctagttgctcttgcaaattctggcattcgagttatggtttccatccccaatgagcaacttctcggcattggccaatcgaattccactgcagctaattgggtctctcggaacatcgttgcacattatccagcaaccaacatcacggcaatttgtgttggttccgaggttttgactactcttcctaatgcagcacggatccttgtcaatgccatgaagttcgttcactcggcccttgtggcatcgaatttagacaaccaaatcaaagtttcatcacctcttgcttcgtccataatccttgattctttcccaccttcccaagccttcttcaatcgct

SEQ ID NO: 45346 - DNA, 560 bp, Gossypium hirsutum
  Clone ID: LIB3582-020-P1-K1-F6
ataacgggatcggggagcttttggagattctaggaagcattattaatggttttgcgttgccgatgaaagaggaacataagttattccttgcgagagcattgattcctttgcataagcccaaacccgtggctacttatcatcatcagttgtcttattgcgttactcagttcgttgagaaggattataagctggctgatacggtgattagagggcttttgaagtattggcctgtgactaattgtcaaaaggaagttctcttccttggagaacttgaggaagtacttgaagcaacgcaatctgctgaattccaacgatgtatggttcctcttttcaggcagattgcacgttgccttaatagccctcattttcaggtttcggagagagcgctcttcttctggaacaatgagcacattgtaggcttaattgctcagaaccggcatgtggtattaccactcatcttcgaggcgttggaaaagaatattctaggacactggaatcaggcggttcatggattgaccgtgaacgtgcggaagatgttcgtggaagtggatgcagagttg

SEQ ID NO: 45347 - DNA, 561 bp, Gossypium hirsutum
  Clone ID: LIB3582-020-P1-K1-G11
cggacgcgtgggatgaaggtgacattaatgaaaatgacactatggaccacactgatgctgctttacatgaaaattgtgaagaaaaacaggtcgagttgaagaaagttgttgataacctcgagcaacagctaacggaaatgcatgaagaaaatgaaaaattgatgggtttgtatgaaagagcaatgcaggagagagatgagttcaaaagaaggttttcttcttcaggaagtccaaacagaatggagcctagagaattcgaatgccctgaaaagctagttgaagttgatggaggggaagacagcttggataaacctcatgtccagtttgactcaaaggatttagagggtggaactgctcccgtttgctcacttatgcaggatgcaggtgaaagtctagagttgaatatgcttggtgctattgaagtgatcccaagtgtcaaagatgtacattccaatcttcaatcagaagcagggaattatatggaaatagaccaagatattactgctgcaaagttgtctgaagatttaaattctgcaagagcaattctgaaacaggcacttg

SEQ ID NO: 45348 - DNA, 568 bp, Gossypium hirsutum
  unsure (1)..(568): unsure at all n locations
  Clone ID: LIB3582-020-P1-K1-G6
cccacgcgtccgccatctccaaatacaactatagaggcaaccattactccggatggtcagtatgtgatctcagggtcaggggatggaaccttgcatgcctggaacatcaacatgcgaaatgaggtagccgcttggaacagccacataggtgttgcagcttgcttgaagtgggctcctcgtagggccatgttcgttgctgcatcaaccgttcttacattttggatacctaacaactgttcaaaaccagctgcagagaccggttccactgatgcacaagccgggctgcagtttgagcaagtcggccaataaacccagtgcctaatccccggtaaatcatcaatgaactcaatgcttttcttgttggaaataaactccaatgtgccattataaaaaaaaaaaaaaaaacaacttaatgtattcagattgggcatcagttggtaacatttagaaagtaaattaaatgttgagaatattttgtgttatggatttaaaccatttggttggttgttaagtaggttttgtaatataatcaaaactgggaatgatctaaantggtgtcatgaaattg

SEQ ID NO: 45349 - DNA, 562 bp, Gossypium hirsutum
  unsure (1)..(562): unsure at all n locations
  Clone ID: LIB3582-020-P1-K1-G8
aaggagagtagcagcggagggattttccggcgatgggagatgataaatcgacgatcgtgatggggagtagagatctagagcttctaattccggtcgctgattccgtccacgatgattcctccaaacattctgcttctttcgctccttcgcatcattccggccgcgaggtttctcttgttctcccccatttcctttagaagagctttttggttgttgattgagctacatttatgatagaattcgatttaacctggttgagagttgtatttgtttggatgatttggtcgttagtagagagaaattggacgtttcaaagtgatatttaatttaagaaattattcactttagaataagtatgacattgaattctttgttgtgtaataggattgcaaattcatttactgcaactgtttagaatgaggaaaatgttttcccttttaaatctctcctccttttaattatcaataataaacgtgttaccacaagataagattcgtgaaaatgattcccctttctcttagaagcttcgaatgtacggcggngctcttctttnnttttcttt

SEQ ID NO: 45350 - DNA, 564 bp, Gossypium hirsutum
  unsure (1)..(564): unsure at all n locations
  Clone ID: LIB3582-020-P1-K1-H12
acgacagaacacaagttttacactctcttgctcgtgcagtccagtttcttgataaagtcaagtcaatctctaaaacattccaacacttttttgtcacaatatggatgattactacacaaggagtcatgttccagcttttgggagctgggattggaacaatgacctccctttcactcagtgttttgaatcagctagacaagcagggttgcttcgttacagttactctgaggatcgtgatttgtatgttgccggtgatctttatgataacgatgttgttactcctgccatgatcgttgttcctcgcagaaggaagaaaggacgacagtcaaatgataaagaagggaaaaggcaaaactgggagatcaatgacgtgaaggaatcaccaagccccacttctctgcaccgcccaacacccaaacccgttgatgaagacctctataaaatctccccacacctcctttacgctaaacccagaaagaagagagggttgagcttctttgctagctgcatggttcctacatgtgtgtngtgaagctgctatttggccgcagcccaagtgcatgc

SEQ ID NO: 45351 - DNA, 567 bp, Gossypium hirsutum
  unsure (1)..(567): unsure at all n locations
  Clone ID: LIB3582-020-P1-K1-H2
agaatcacttcctagtgtttctgaaacatttaaagttggaccctgaagcaaaattccgagtgcaaaaggaaatattgaagtttctatcagttcaaggtctattctctgcatctcttggtaatgaagttacttcatttgaattacaggagaaatttagatggccaaaagcaaccacctcgactgctctttgcaaaatgtgcatagaacaactccaatctctgctagcaaatgctcaaaaggttgaggagccccgatctttggctaatggacttgagcctaatgaccttggttcctacttcatgcggtttttcagcacattacgtaacattccttcggtttctctatttcgaactttgagtgatgatgacaaagagtcagtcacaaaattgctagaaatggagagtaaactntataaagaggaaaggaactttaggctcagcaatgatgcaaataaagtgcgtgcattgaggtatttgctcatcctattgctactccaagtacttcctccgccctgggaattctgcgatgcagcctctgagcttaccaatatgtgtaagaaagttttta

SEQ ID NO: 45352 - DNA, 521 bp, Gossypium hirsutum
  Clone ID: LIB3582-020-P1-K1-H6
acgcctgcggtaccgatccgcagattcgagctacgcgtacgatgaaaacacattacctgctacaaagcctggatcaggaatggttgttgctgtcaagaagcttaaacctgaaggttttcaaggccacaaagagtggttgactgaagttgattatctcggccaacttcatcatccaaatctggttaagttgattggatattgctctgagggagagaaccgacttttggtctatgagttcatgcctaaaggaagcttagagaatcatctttttagaagagggccacagccgctttcttgggtggtgaggcttaaggtcgccataggtgctgctagagggctctcctttcttcatgatttaaaatcccaagtcatatatcgtgattttaaagcttctaatatattgctagatggggagttcaatgcgaaactttctgattttgggttggccaaggcagggcctactggtgataggactcatgtctcaactcaggtcatgggtactcacggctatgcagcacctg

SEQ ID NO: 45353 - DNA, 496 bp, Gossypium hirsutum
  Clone ID: LIB3582-021-P1-K1-A12
agaaactaacgcttccaaataccaaaaagtcatagtaacggccttaaaaatacgtatcgaacagaacacacgaattttattcaatgtggtggagatcggcttctttcattctggacagacagcaacatcaaaaccgcaccgttgcaccgagtcccgaatccttcctcctgtcatctcctcctcccatggctgattctcccctaaatcctaaatctaacatttctgcctattaccagacccgtgccgcccaccacgccgttgtaacgagcgattggcttgctcaggcccaggcggctgtcggccgtcattccgacgacggtggttcgctgggagatgataagggagctgccccgattggaggaggaggaggaggaggagaagaagaaggaagcgggaaggcgtttagtgttattgatgagttcaatagctggaggaaacagcctgctttggctgaggctgtggcggctattcgcgcccttgcggcggttattaggac

SEQ ID NO: 45354 - DNA, 530 bp, Gossypium hirsutum
  Clone ID: LIB3582-021-P1-K1-A4
cggcccggaatacccgagcggacgcacagtaacaaccacatcaaccgccgagatatgtttcaacgaatcgaagctcggagtttctttacttaggcacactagttaacactagagtagacgcagctaaagccaccatttcaagcaatggcggcatcaagctaggtgtttcatcgccaccgaaccaaaagcttggctcaccggagctaaacccattgccgccattgccaaaagttcaaacctttcaaagtggtgaacagttccttcaaagtccatcactgggttgttttgaaaacaccattgaagttgaagaagatgagtttttttcgccaagagggtcttcacatggcaaagaaagcccaccgtcaccaccaaaacaactgccgaaaccagcaccacaggaaccagcagtcagagtagagtcaagctcgagaagggaatttaatggcgataactatggtagtcgaagcttcaattcaagaacagcttcatacccatattccaactcatgttcaccttctaactcggtcttg

SEQ ID NO: 45355 - DNA, 539 bp, Gossypium hirsutum
  Clone ID: LIB3582-021-P1-K1-A7
gacgcccacgcgtccggaccattaaccctgcttggaactatatttgccttatatgaacactgaagggctgagctgccgtgattgtgacatccttcacaacagccccaaaatgagtgtcaaatcaataggctgcgcgcctctgctaccccagacccgaattatatccatagcccgcaccatctataggtagaccgccaacgtggctacagaaaaacaaataatcattctgcacttagctgctttggatcacaataatgattttttgttgtatcaaagcagtgaatttgacatccatacacatcatgcttaggtgtattggtgtcaatgttggactgcgataagaatatgcgctgacagatatgtatttaacatagacagtatcacagaagataatattgtacatcagaatgttgctagtctgatgttatcaattattacggggagattatttcaattcattctttctggtttggtgtttgtaacaattgtttactctcaccacttcttggtcagctagcacggatccgctcaaggaataa

SEQ ID NO: 45356 - DNA, 485 bp, Gossypium hirsutum
  Clone ID: LIB3582-021-P1-K1-B6
taaaagcatgcgtatatgacaacatgcgtgccagaggtcatatagatgctccatgactagcatgcacaacaatagcgtatagtgctgatgataaaaggctgactgcatgtgggacgaataaaaaaggccagctagccattgctgaatgcgaatggaagctgaggtgccgcaaaaagatagagcaggagcggaatttgaggaaatgtatgtggggggcggtgctcggcagtgtgagatacctttctgacgctggttgatgaccatgttattaaaatatgggaaatggataaggatgagctgttgacaactatcgatgccggagacttaccagcacacccacatatacgattcaacaaggtgttgaaatggatggttttgaacagaatgagggaataattctaatggcagcaacaaatctgccggacattcttgatccagctttgaccagacctggtagatttgataggcatatatgtgtcccaaat

SEQ ID NO: 45357 - DNA, 404 bp, Gossypium hirsutum
  Clone ID: LIB3582-021-P1-K1-B7
cttttgcagtcccttgttttcaaagctaaagctcacttaggactttcttcaagcactgggtctactcatttgaacccaatctcaagacccaacagctctaacaattcccaaaacccacttcctccattgtctcccagtatcattccgcgaaatgggctcttagaattttcgaagaaagcgccttcatggtctcctgctagtagcccaaaatcaagtccctttctttcttatgaaaatatccgctctgggtctctcttagttacttcaaagactggggatagcggtactgatttaatcgatgagaatcaaatgagtgactatttttcatttttgaatgattctgcctcttctaggaatgaggactttatggttcatagaaggaggttttcaagaagtgatgcatg

SEQ ID NO: 45358 - DNA, 527 bp, Gossypium hirsutum
  Clone ID: LIB3582-021-P1-K1-B8
gctccgcatacctgtggctcaaaagtcaaaaatgttggaatttcaaccttcaaaggcagtggtcagaataatgaatcgagaggcagaacaaataatgcatttctttccaagaatactattaaagtttcttatgtgccaaaagacagggaagagaccatgatagaatcttcaaatgttcataatgttccacttgcctatgcctcagaaacaagtgagaaccatttggggtcccctgctattcagaaattattcaagaaatggataatgatattgctctcacaatccccacatcaagtgatggatgaagttacgggagttggacctcccccaagggacacatcagaaactcaaattggcacccaaagcaatggaaaaagcgagatcctaaagatggtttggagccatttctgggatatggatgtaaccattaaattacccatattattatttattccattgtacatggctgtcagtttgatttatggggctgaagtttcaaaggagttaactcctctatgggtatttgg

SEQ ID NO: 45359 - DNA, 525 bp, Gossypium hirsutum
  unsure (1)..(525): unsure at all n locations
  Clone ID: LIB3582-021-P1-K1-B9
gaccgactcatacacagacgcgtgggtttatggctgagatcaaaggtgaacaaattatggcgagaaatggagggccacagggcgacggcggcgagccagtgctgccgagagcgtcttccagcaccagactaaggtccagatccgacccctttttggtggtttgccggtgttttagtgttataacgtctctcactgcgattctctgcattgccgtcaatgttctctctgcctttcgatctttcaagaacggagccgatgtttttgacgggatttttcggtgttacgctgatgtaattgccttctttgtggttctggcggaaacagaatggggattcataatcaagttctggaaggttttggagtactgggctggtaggggtatgctgcaaatcttcgntgcagtaatgacaagagctttccctgattatacagtaaagcaacaggatctggttcttcttcagaacatagcaagctatatgctccttgcctgtggtgtagtttacgttttctcgggaatcttaagca

SEQ ID NO: 45360 - DNA, 509 bp, Gossypium hirsutum
  Clone ID: LIB3582-021-P1-K1-D11
atttctttgaagtataccatttgaaggtgatttttatatgttaggctgatggtcgagaagtttttgtagggttgatatatccatgcttgctcggagcaaggatgttaggaagcacagtgtttccttggcttcttaatgcttctcttcgaactgaggattgcttaacatgtgcatttgtcgtacaggctcttcttttatctataatagcttatgattatgaggaaattggagttctcgtcacacagttttctttataccatgcctgcattggcctaattctgcctttgcttgcaagattgagaaccatgtatgtgccaaatgagttgcgtggaggaatgataagcctttctctggctcctgcaaatgcagcaattttgtttattctcatgcagagaggctattataggaccattgagaactcaacaatgatagtgtttgctgcggttgggttattcatggcggctgggtgcatgtatgttttgaaacgggaggcattcaaaggggatatg

SEQ ID NO: 45361 - DNA, 273 bp, Gossypium hirsutum
  unsure (1)..(273): unsure at all n locations
  Clone ID: LIB3582-021-P1-K1-D12
accaaagccaccaccgncnccaaaaccaaaaagaaanccagnaanaccgnagcagcncacnccaacancaaancnncaagnagcnccacgnngacccagagnnangcnacncaacaancncnncagcaccagaagcngagaccaaggncaagaaccccaaggangngaaagaanngncgnngaacccgacggngaccgcngnncagagnaaccannngnccaacaaaaagcncaaaagnacccaaaggaagagccncacggagcgcgaaaagg

SEQ ID NO: 45362 - DNA, 305 bp, Gossypium hirsutum
  Clone ID: LIB3582-021-P1-K1-D2
gcgcccacgcgtccggcaaggggaagccatgattagggttttcaagcttccaagctccatggtgatggggtattgttgtgtggtagcttggttcgagaaattggtcaggtaaatggtaagtgaaagcatttatggatatagaagaaaatttggagtgaacatgaaatttagctcaattaaatgatttcatcaattaaacattgtgtataccagaatgtgttagtgaattacatatttgtaaattaacattcgaagttcggtaagtgatatatgaaattaacatgaaaagatttataattgttatt

SEQ ID NO: 45363 - DNA, 524 bp, Gossypium hirsutum
  Clone ID: LIB3582-021-P1-K1-E3
gcgttttcattttagtgctttgaactagtttagaattggggatatcaaaatccatattgcttttacatgattaaatgaggatagttttggatttgaccttcttcatcgtattctcatccagtttagataattttttgctaattacgtttattgtcatatctttttttacttattctttataaatatgccagttaccttctgttgtgcctttattgataccttaattctgctacatcgggggatggaaagatctggatgctaggcatttgactgtagaaatctggctgagacattcaaatgtcaaggtaatagggccatgcagtcaaagctatactctgatgcgatagaattatattctcttgctgtttctctttgcgatgatcatgcagtttattattgtaatagggctgctgcttatactcaaatttgcaagtacaatgaagccattaaagactgtcttaaatccattgaaatcgatcatagttactgcaaggcgtacagtcgtcttggttcagcatattatg

SEQ ID NO: 45364 - DNA, 515 bp, Gossypium hirsutum
  Clone ID: LIB3582-021-P1-K1-F8
aaaaaaaacaaacaaaaaaaaatccttccccttcttctcttcttcttcctctgctaggggttcaaggaccctcttagcgccgccaccggtccgtcaccgtatacggtggtcggcgttcctaaagtccctttttcggcggttttagccccgctaaacccgattcgaaggaaaagtgtccgaatccttccaaaaatcaaaagaatggaagagaaaagaacaaaaacgacggcccttcacctccctatccgcgacggtgatattttcggcgaacccgaaggtttggctgcccaaactccgatcgtgggcatgaggtgagccctttcttccctttttttattattttcatatataaaataaaaaaataaagagaaacaaagaagaacttaagagtaaaaataaataaaaatagaatatatcaaatgtaaatcaccttaaaatattcgatcttctttgatttctttctattaaaaaatctgaagaaaaaagaaaagaaaaacccccctcaaaatacaatc

SEQ ID NO: 45365 - DNA, 511 bp, Gossypium hirsutum
  Clone ID: LIB3582-021-P1-K1-H7
ctctgtgcccttagctctacttctcacacttttcacttttattatctactcctcacgttggccttggttcttcaaaattccaagatctcaacttttccttcaaaagctgcattttgtattaactaatgatgatgagtagggttccgaaaccaaagccaagaagatctaccatgtccttatgtcacttctgcaaatcaaagccggctgttctgtattgcagcgctgactctgcaaggctctgtttgttctgtgaccaacaggtccactccgccaatgccctctctcttaagcatgttcgttcacagatctgtgacggctgcaaagccaaaccagcttcttttctttgctccatcgataaccttatgctctgccatgactgtgattggagctcacatagcaacaacaacagcagcagcagcagcagcagctcctgtgtttcggccatgcacgagcgtgctcctgttgaaggtttttcaggtcgtccttcggtggttgaacttgcttctctttt

SEQ ID NO: 45366 - DNA, 536 bp, Gossypium hirsutum
  Clone ID: LIB3582-034-P1-K1-A10
ctttgaaatggtgtttgtttacagtcctttaaagccaaaagtgttttccgagtgaaaagcactttttggaagcacagctaaacagggcgtaagattgttcttctccccatagatccttcctccacaagacgttgttcagttaggttcccatagcccactccacctccatccatcaaagagcataaacgggaacatttcttaccaggtgagtctgatctcttctttttaacgcctctattgccaacaaatgagctaattgattcgccaatctatgtgcatgtctgaaaatgatactccgatatctggttttatccctctaaatagctctgatgtatgctccgatttctgatttatcaactagatctatctgacattgaatctccttctattgtcaccactgtcaaacccatgtccacctctgctcgtactgccatcaaacatgttaaggcttctgctacaaaaagccgcccaacccccgtgtgcagtactatcttcgagaacaagaccttccccacagcgtctctcgttacaatctc

SEQ ID NO: 45367 - DNA, 538 bp, Gossypium hirsutum
  Clone ID: LIB3582-034-P1-K1-A12
gagtttatgaggcaattcgctgctgagcctgcactttcccagccacaagctcattttgacaatatattgcctcggcttgctggtgaagaagagatacaaagtactttgctggacacatctccaagggatgtactccttcctaagccagttgaggttgtacatgaccatgcaagctttgaactctcccagtcacctacatctcgtttgcagttgcaagaggcacctgaggacgcatctgtttctgatcaatttgaacaaattccacaaatatgtgaagaggacttcctggaaattgatgatctcacctccaatgttgagaaacctgtggagaatgggctgcagttcaatgactgggatggactgggagaatttgatctctaccatgatgctgcaatgtttctacaggacattggacctattgaacaaggaatagttccattctcatatactgaaaatatgataaatcaagtaagttacccattggaaccgcaattgcaacaccaatcaaataccaatcatatggatcaaagactacagt

SEQ ID NO: 45368 - DNA, 479 bp, Gossypium hirsutum
  Clone ID: LIB3582-034-P1-K1-A2
cccacgcgtccgcccacgcgtccgaaaaaaagaaaaacctttttttttcccttttagtttctaaacagaggggttcccactgatgttccggaatcgagattgtggaatatattacatttgcagatcaaatgccatctctaagaatgaaggccaagtcaagcacgggttctttaagagaaaaaaatggtctccgtgtgtgtcagaagtctagcgtgatttgtaaaagaccatgctgtcatgtcagagtttcccaacaaggagctgaattcagttcatgcattcaaaactctcatgatgattcatcaaatgtagacgtggcccctcaaggttttgaaactgatggggctgatgttcagcaactaattttggatgaagaaaattctgagcttcaaaaacagctctcagtttttgtcgattctacaacagtggggagaatggaaactgcccacggctgtgcctcaaacttagagacaatattc

SEQ ID NO: 45369 - DNA, 542 bp, Gossypium hirsutum
  Clone ID: LIB3582-034-P1-K1-A7
aattaacctaaaccggagtacgaatgctttgtttctgatccataaactaaagtttcttctggggaagctcgcgtctgtcaatttagagggtctcagccatcagcagaagcttgcattctggattaacacttataattcctgtatgatgaatgcaattttggagcatggggttcctgagttgcctgaaacagttgtagcactaatgcaaaaggctacaatagttgtgggaggccacttactaaatgcaataacaatcgagcatttcatattaaggctgcctttccatttgaaatttacctgtcctaaagctgcaaaaaataatgaggtgaaagcacgcaatatatttggtctcgagtggtccgaaccttttgttacatttgctcttgcatgtggaagctggtcaatctctgctgtgagagtatacaccgcggctcattgtcaagaagagttggaaacagctaagagagactacctgcaggcagcggtggggatttcaagaacaaacaagttaacaataccaaagctattggattggtatctgc

SEQ ID NO: 45370 - DNA, 553 bp, Gossypium hirsutum
  Clone ID: LIB3582-034-P1-K1-B2
cccacgcgtccggctagattcacatgggaaaagattgaagacttgaagatggaacactgctatattgcacctgattatgctttagaagctcgattatttcagaaagggagcaaggaagctgaagataaaaccaggtgttggcagctgccatgggttccgccaccaattgaagaacctccttcggaagaagagattgcaagaaaggctgctataaaggaaagacaaggacaaagattgagagaaatggctgaagcgaagaggtcttcgagaataaatgaactcgaaaatcaattgcatggattggaatttcttttgcaacaacttgcacaagttgaagaggaagaaatctcgtctttcctttcaaaaaccgattatgtttctaaacaggaaatagaatcaactcttacgaaagtgtcacagtcattaagaaaagcaaaaggtgaatcaaaggttgaacaagctgaaaatgaggagaaggcagattcttctacaagtgataagtatcctcttatcaacgttcctgataacatgcttacgcccgagcagctgaagg

SEQ ID NO: 45371 - DNA, 542 bp, Gossypium hirsutum
  unsure (1)..(542): unsure at all n locations
  Clone ID: LIB3582-034-P1-K1-B7
gaaacagcggcactcaccaggcgcagatccacaacccacagttcgatcccacctcctcccacgatgacttcttagaccagatgctctccactctcccttcttgctcctggtccgacctcaagtcaccttgggacccgcctaaatctgatgaaacgccgccttctaatcctgacaataatgctgggtttcactacgatgagattctagcctccaagcttagacaacatcaaatcaacggcggcggcggagggactactgcagctatgaagatgatgatgcaacagcagatgttgttaccgggaagacccatcgccgccgcaggtggaggagggttgactatgccgttgcataacgatatcgttgatgggtcttcgtttaagtcccccaatcaacagggtggggagggttccgtgcaagctttgtataacggtttcggtgctggacctttgcatgggactaataatcagtcaccgaaccagcctcagcattntcaccatcctcagggaggcaatatgcagacacaaagctttggagcaacagca

SEQ ID NO: 45372 - DNA, 549 bp, Gossypium hirsutum
  Clone ID: LIB3582-034-P1-K1-D1
gcgcccacgcgtccgagcagccaagcgatggatccagagaccgagttcctttcatcgaaacgacaaacgggaaacgaatgggaactcttcaaagaaaacgtgagacctttgaagagaggccgaaacgtcgatctcttaaaccacgctctcaaagctcacaccaatgatcaactcaagaaatctctccttgaaaaccgaaggagattgattgaggcaatagatgagtaccaaggagacgatcctctccagccttggcttgattgcattaaatgggttcaagaggcattcccaccaggtggagacttctcaggactggtattgatctatgagcaatgcgttcgtgctttctggcattcggatcgttataaagatgatctccgctacctcaaagtttggttggaatatgctgagcattgtagtgatgctgaggtcatttatagttttcttgatgccaatgatattgggaagacacattcagcttactatatagcatatgctttgcacatggagtccaagtctaagatgaaagcagcaaatgatatactcaat

SEQ ID NO: 45373 - DNA, 523 bp, Gossypium hirsutum
  unsure (1)..(523): unsure at all n locations
  Clone ID: LIB3582-034-P1-K1-D10
atcttggtctgtcgtacaaaagcttgtccttgagccttcctagtagcaacgaaaaattttccttccgtatgtttacttatctaagtttgtcctcatgcaacttaagagaaatcccaacattcttgaaagattcaaagtttttgcagcatctagatctttccagcagcaaaattcaggggcctcttccagattgtttttggggacttggagaggcttcgttgacatatctgaatctttcgcacaactttctgacaagtttccaaggatttccgtggcagaggttatctatactttgacatccactcaaatttgctccaaggatcacttcctgatgcagtgttgtggtcaggatatgttttactttcaaacaataagttgaccggagagattcctttttcaatctgcaacaacagtgatatgataattcttgacttgtctatcaacaggttgaatggcaaaattccacattgtttgggaaaactcagctactatntgacggtttcagatttgtggatgaacaact

SEQ ID NO: 45374 - DNA, 538 bp, Gossypium hirsutum
  unsure (1)..(538): unsure at all n locations
  Clone ID: LIB3582-034-P1-K1-D11
aactatttggtaccgtgcacctgaattgcttcttggtgcaaagcactataccagtgcagttgatatgtgggctgttggatgtatttttgctgagcttttgactttgaagccactttttcaaggtgcagaagccaaatctacaccaaatccttttcaactggatcagctggacaagatatttaagatcttaggccatcccaccctggaaaagtggcctacgcttgcaagtcttccacattggcaatcagatgtgcagcacattcaatcacacaaatacgaaaatgctggacttcacagtgttgttcatctttctccgaagagtcctgcatttgaccttttatctaggatgcttgaatatgatcctcgtaagcgtataactgctgcacaggccttagagcatgagtacttcagaattgagcccttaccaggtcgcaatgcactggtacccagccaaccaggagagaaaatagtcaattatcctactcgtccggtggaccagaatactgantttgaagggacaaccagcattcagcaacca

SEQ ID NO: 45375 - DNA, 545 bp, Gossypium hirsutum
  unsure (1)..(545): unsure at all n locations
  Clone ID: LIB3582-034-P1-K1-D5
cccacgcgtccgcccacgcgtccggtctggtccccttagcaagagcctcatagtatgttcacctttgaacatgactgaagaaggcatggttaccaacaagcaaggcatagggtcgatccttggatctgacgctgaaacaccagcagcagcttcacttagaagaactttgtcagccgacatgtcctccaagaaatggctgaatcaacatggattgtctcccctcaaaaagatagcatcatcccaggaatttgtttcacaggagcgtggtaatcgagttgttcactatttcttgaaggattccgctggggaatccatccgtgctgttattggtactgagaggagtgttaggcacatgttttatattgttgctgaggagtttgtgaaggtatatggtgctgagcattcaattcatgctggtttcaaatggaggtcaagaagagaggttgtggattggcttacatctatgctctcaaagcagcatcttgagggagatcgatctaagtctccgaaacatgacacactgctagctntgcgatctcccgatt

SEQ ID NO: 45376 - DNA, 488 bp, Gossypium hirsutum
  Clone ID: LIB3582-034-P1-K1-F12
catttttctttttcctctcatttccttataactttccctttttattacttttttcttgtgtgtatatgtcgtctcctcttttcaaccaggaagagagttttttttctttagaaaaaaaaagaaagaaaagaaaagaaaactcactactgcaaagagcaacaaagaggaaagaaaaggggagaaagagggagaaagagaccacccacagattccgtgggaaagagagagggaaagggaaagaaaagaaaggagtgagggaattgaagaaggctttcagtaccacaggaagagaaaacgatgtctaagagctttacatcctttcatactctgcaactctaacaagggaaaaaaggtgaaggacagaagagttcgagggttggcagaaggagagcaaagtagcaaagcaaaggatatataggatcatgaagaagaagatattgatatgggaatagctacatcaccagtcacgccatcaattcttcatcaaa

SEQ ID NO: 45377 - DNA, 497 bp, Gossypium hirsutum
  Clone ID: LIB3582-034-P1-K1-F3
gtgctgatacaatgttgcaaaaagacactctggctgggtgtaatgacagttgctgtggttcatctgagcaacaaatggcttgtaacgcaaggaatcttgtcttccctttcgaacgtcgtgggctgcttgggtcgtcaaagaatctcccagctgtaccggctactgctgtgccttccactgaacagatcattgctctccctactaccagaagtagtggtagtttccctgcagtgcctaaggaaactgggactaaatcggaacctgatgatgagtcatctgaaactaatttggagcctgctgaccagtcttcacaagctgattcgaaacctgttgatcagtcgtctgaaacctctaagggcgagacaactgctgaaaaattttctggggatttgtggaaatatttcatcatcattccttgcatactagtctttattgcatttgtggctttggctttcatgtgtcgtaaacgagcagcaaaagcgataggtccctggaaa

SEQ ID NO: 45378 - DNA, 416 bp, Gossypium hirsutum
  Clone ID: LIB3582-034-P1-K1-F9
ccgctacggaattcccagagtccgacgcgacgcgctacgcttcaagagaataaaataataaaaagatatgaaggacatgctcggatacaaaagagcccatgttgtcctcagtggcgaaggacaacaagattaaaatgactatactaaggtaagatacgactatgtctattacgaacaaggtgttttctaattgcatcagccctactatgctttcactgcacataatatcgcatgagcttaatctatactcattatcagtgcggaagacatccgataccaatttgagaaaatggcaaacacataccatatgtacgaactatcttaggacatatctggatatccttgttgactgttcaaaagctaagatagatgctgatcttaaacttaattataacatggagagcgcgaactatctt

SEQ ID NO: 45379 - DNA, 489 bp, Gossypium hirsutum
  Clone ID: LIB3582-034-P1-K1-G2
caaatgtccatcttatcttctgccctcagtttgacgatttcactctttcagggaagctgattcattgaaaaacttgtcatttctttaagcttcccttgtcaaaactatcctccaaaaaactcttcaatctggttcacgcacccactcaacctgtatttgattctcagcatactccggaactcccccttccagagagagtcaccttcgattataactgccggccagttattttcaactcctattcggactgctttgcggcaagcaactgcttcagcggcgaacgcggagacgaccctttggtgggtttctgaacaggatatgataactagcccttcttcattcatgactactactcctgatgcagaaagattattcggtccatcaaacacgccgtcgaagttgatcttgacaaactaccgagtctccccatatggcccagagtgcgcaacagaaaatccgacattgacgaagggtgaattggtcaaaaac

SEQ ID NO: 45380 - DNA, 258 bp, Gossypium hirsutum
  Clone ID: LIB3582-034-P1-K1-G7
cggaattcgcagggtccgagcgccacgacgctcacgcagtatcgtgtcatcagtatcgcggtggcctcgatctagaggattcaactctaccaaggcctccatgccatggaataggtcggctatcgtgtcacctaacttcaatacaacggtcgtcacatagacaacgtcgatactgcgaaaaccctgactggacccacattagatgctgagcatactatcacactatctctagcgggctagaatctcgactaagtatga

SEQ ID NO: 45381 - DNA, 502 bp, Gossypium hirsutum
  Clone ID: LIB3583-008-P1-K1-B11
cccacgcgtccgcccacgcgtccgatcactgcccatgggttggtcaatgcattggaatacgtagcgatcgattcttctttatgtttatatcaacctcaaccatcttgtgcttatatgtctttgtttgttcttggatcaatgtgctcgaaaaggaagctggcaatgatagcaatatttggaaggctatgtcgcatgatatcctatccattattctcatagtctactgcttcatagctgtatggtttgttggtggtcttacagttttccatttctatctgatttgcactaatcaaactacgtatgagaacttccgttatcgatatgataaaaaagaaaacccatataacaagggaacaacaggaaaatcttggtgaaatgtttttgtccaagattccaccttcattaaatgattttcgttcatttgtggaggaaagtgagcatatggttatgggatcaatgatgccaaactttatgaaaggtcatattagctcaaaagagaaaa

SEQ ID NO: 45382 - DNA, 494 bp, Gossypium hirsutum
  Clone ID: LIB3583-008-P1-K1-B8
attaaacatgctaccaggagcagaacaaaacatgttaaaagacagagagaagtgcgtgtcaaaagacagagatatatccactacacttttaaaaacttttatttgtgaattaaaatataggtctagaggcaaataatttgtcttaagatagtaaaatatatttggaataattaaaatatttttagataattatttaattgaaatactattatttttcattatttaaataatttacaaaagaacttatccaaatttatcacctaaaaagatctaccaattatatattctgattgattgaattagaaagcaattatcatatatggtatccttacaagatacaatgatctcatgttcaagttctagtttatgtgatttataaaattttaaaggcttaaataaaaattggcccctaaactatagtgttttttcccactaaggtacctaatttttttttgttagaagtagtatctaaactttgatttcgttaacaattt

SEQ ID NO: 45383 - DNA, 506 bp, Gossypium hirsutum
  Clone ID: LIB3583-008-P1-K1-C12
acgggatcctcctccatttgtctctttatttttttttttcaggtgaatgttgcatggatggccatgctttcgaatatttatctgaaaaattcagggcttctcccctgttctgatgtatgtttaacaatatataccatttatgtgaatattttcccaactactacaacaaaaacaaagcacagccttataagagctgatgactacatgctgatgcttgagaatccccctctttttttggtatatttttgcttcatgcccatgggattttaaattcaattgattcaccaggtgcaacaaatttcatatccattcagctatcaactcaagttatctttcttttccttttattagacatgttttcacacttgctgtacacaatattctactttactctcaaatttatgaaactttcacttcgattgcttatttattttcttagaccaccctcatggaaacatattttgatctttctgtttcaagtatggacatgtattaattgatgagtg

SEQ ID NO: 45384 - DNA, 507 bp, Gossypium hirsutum
  Clone ID: LIB3583-008-P1-K1-C4
gcgcccacgcgtccggtggacagtctattgatgttattaagaatcctgcttcaaagaaggatatgtcaacttgaacagagaatcttgcaagcacggatccttcttctgatgacaggggaacgaataacagcaatgatgcctctggtttgagcttgctgcatgatgatgggcagtttgaagcttcttctgtgtatatccctcctgatcaaacgagaatgattcagaacatcaattctctaatttcagagttaacattggagaaagaagaactgacacaagctttgtcatttgaggtatctcaaagttcaaagctgaaggagttgaacaacgagttgtctaggaaacttgaagctcaaactcaaagattagagcttctgacagctctaagtatggcaagtgagcatatcccagcaagacaacccgagtctcaaataatgcatgataatactccatatgccgacgagggtgatgaggtggtggaacgggtgttaggatggattatgaagc

SEQ ID NO: 45385 - DNA, 499 bp, Gossypium hirsutum
  Clone ID: LIB3583-008-P1-K1-D1
cccacgcgtccgcccacgcgtccggctttgttgctaaaaggtcagtggctaacattcctttggttggtctcatcagcaaatgccttggttgtgtctacgttcagcgggagtcaaaatcatcggactttaaaggtgtttcaggtgttgtgactgatagagttcgtaaagctcaccaggatgaatatgctccaaagatactgctttttccagagggtacaacaacaaatggggattaccttatctctttcaagactggtgcctttttggcaagagcacctgtggtgcctgttatattgaagtacccataccaaagatttagtccagcctgggaatcagtaacagggggtaatttgatactatcggatattggactggctgagaagcgaatatatcttgctacactcaatggtaataatagcatgcctagtgttttgcgtcagaaagatgattgataatttcttggccttgctccgaaatgatatggctcatctgagtttct

SEQ ID NO: 45386 - DNA, 500 bp, Gossypium hirsutum
  unsure (1)..(500): unsure at all n locations
  Clone ID: LIB3583-008-P1-K1-D12
cccacgcgtccgaattaatataactctctttttgaaaaattcatactttctctttggttgctgagaaaaaggaaggataggaaataaaatagcactatatttattttaaattctgcggaggatggtttactgtaataattgctccagaaacgtttctggagaacgcctcgatgaaggtcttttgtcgtgttctttctgcgggaaggtgttggaagaatacaattttgcaaccgaacctcaattcgttaaagattcagctggccagagcaaactgtccggaaattttgtaaggtctgttcaagctatttcagattcacgtaggcgtactttggattatgcttctgagcaaatgagtggtatgaagaatgcattacanattgatgattatagtgatgatgttgttcatacggctagacgcttttatgaaatcggccttgagcggatttcactagggggcgcagatcagagctagtacaggctgcatgtctntatcttgcatg

SEQ ID NO: 45387 - DNA, 328 bp, Gossypium hirsutum
  Clone ID: LIB3583-008-P1-K1-D4
acgctaaacataaccaaattaaggggtctgctgatgtagtagttaaagctgaatggctcgtgcatctccaagtgttgaaacttgaaccttaaactgtctgtcttctcatttggtctgatgcttgttctacaaattataccactgatgtaaatgttgtcccaactactacaacaaaaacaaagcacagtcttataagagctgatgactacatgctgatgcttgagaatactaatcttttttcgctatatttttgcttaatgcacatggcattttaagtgcaagtgcttcaacaagcgcagcactcacatattgattcacctatcaactc

SEQ ID NO: 45388 - DNA, 249 bp, Gossypium hirsutum
  Clone ID: LIB3583-008-P1-K1-D6
cccacgcgtacgtggacgcgtgggcaaagatatgggatcactaggttatccagccatgtccttaaacagacttggaaagagatggctcaaacacttgcataagctaatattggaaacagctgatttctattattggaaatatgaactataactttacagttatgatccaagttttaatctgattgatatggattgagtgtatgcatatgcggtgcaatacacttaataatgcatactgtttatttttgt

SEQ ID NO: 45389 - DNA, 503 bp, Gossypium hirsutum
  Clone ID: LIB3583-008-P1-K1-E11
cccacgcgtccgcccacgcgtccgcccacgcgtccgcaaacttgggaaaaatatgatatctgtggatggggcagagacctttagtcttattgacaagaaatctttgaaggttgagaatgtcgtggacttcagttggtcaccaactgatcccattattgcactttttgttcctgaacttggaggtggaaaccaacctgctagggttagtctagttcaaatgcccgggaaagaggaattgagacagaaaaatcttttcagcatcagcgattgcaagatgtactggcaaagcaatggcgattatcttgcggtgaaggctgatcgctatacaaaaacaaagaaaagcacatacaccgggtttgagctctttcgcatcaaagaaagggacattccaattgaagttttggaacttgataataaaaatgataagataattgcatttgcttgggagcccaagggtcacaggtttgctgttatacatggggataatccaaggcctgatgtta

SEQ ID NO: 45390 - DNA, 511 bp, Gossypium hirsutum
  unsure (1)..(511): unsure at all n locations
  Clone ID: LIB3583-008-P1-K1-E3
gcgcccacgcgtccgcccacgcgtccgcccacgcgtccgcccacgcgtccgaaacacacctgtataatgtctgagtgggagatgttttctttacattgtcatccttgttcttctcttgaattcagctcagacattgtgccataccaaaggtatcaaacttaaaaggaagcaccatcacaagcaatcaaatgtgacaggaacccatgtttcagaacaaccattcatgcaatgggttaaatttgttggtagccttaatcactcagttttcaggacagcaaaaaacaagcttttcccttctcgtaccattaccgtcgacaagaatcccaaatacggtgacttcaccaaaattcaagatgccattgattctcttcctttcattaaccttgtgagagttgtaatcaaggtccatgctggggtctacacggaaaaggttaacattccaccattgaaggccttcataacaattgaaggagcangggcagataaaacaattgttcaatggggagacaca

SEQ ID NO: 45391 - DNA, 498 bp, Gossypium hirsutum
  Clone ID: LIB3583-008-P1-K1-E8
aatgcatattttgcatgcctggctccctgtatgccatttgcaaagctcatcaagagtctggtggccttggcgtatggcgtgcgaggagccatgcatgcatactgatgtcttaatcagggaaaaagaaaaagagttaggatttccatgacaaaataagcttagggatacagaaaaggaggactctgatgtttcactctattttcctcatttcctagggagaattcaactaccaaactgtaatatgcttttaatttatatatgaaaagaatgaaaagttgtagtgggaaaatgctattcttctctctctatcttttttctttgtacaacattttcaggaccgtataggaactgttacaatgttatggagaaacagggattagttctcccaaaagaacaatagaggcagcaagtcaagaacaagagctcagggagcttggggtgctttccatgtttgaggctttagagtagaggctctgaaacgttgtcttttgtcccaac

SEQ ID NO: 45392 - DNA, 501 bp, Gossypium hirsutum
  Clone ID: LIB3583-008-P1-K1-F8
attgggggaagcagttggttgcagttggtgataaggacagcactgtagaacttggtggtggttcggagcgtattataaccagaaaatctgatgagagaattatgtcaaaaacacttggttctagagaatattcgcgctactaccgccaaagtcctcgcccatctcctgcaaataacatggcgattactgctgccttagcctcaaggtacaggagtatgggcttagcaactgtgcagtcaaaggaacaaatcgtgaggatgaaggtgatgaaagcaatgaatagatcaggagtggaaacaatgcggacaaaagttggcatgaagaataatgtcattcaaaacttgcctaagaatgtcccatattagttggtaactctcaagcttcatatcataactactggagtagtatttgttttcttgaaaaatcaggtgctttatattcctgtatgcatctaaaagtatgaattacatggctttatttgcagccaatatattgtatgaa

SEQ ID NO: 45393 - DNA, 506 bp, Gossypium hirsutum
  Clone ID: LIB3583-008-P1-K1-G1
gcggttcggatttttccaggtaattaaccatggaatttcagaagacttgatgaatgacaccatgaatgtgttcaaggagttctttgagttaccggccgaagacaaagccgacctttattccgaggagttcaataggccttgcaagctttacacaagcagtgctaactatgatggtgacaaggttcatctatggcgtgatagtttgagacacccttgtcatcctttagaagaatgcatcaaaatttggcctcaaaagccaactagatatagggaaattgtggctgcatattcaattgaagcaaagaaactaggttcaagaatcctggatttgatttctgaagggttggggcttgatttagggtactttggtgataaattaagtgaatcagttgtaatatcagtgaaccattatccaccatgccctgatccaagcctaacccttggaatagccaaacattgtgaccctagcctcttaactattttacttcaaggtgatgtctttggtc

SEQ ID NO: 45394 - DNA, 500 bp, Gossypium hirsutum
  Clone ID: LIB3583-008-P1-K1-H10
cccacgcgtccgggcttccgcactgccgatgccaatggactcgcagatgcatgggaagagatacagcggcgacctcactttgaccgcgtttacgagggtgccacgccagcaccaccaattcaaccctctcttgatggaccacctcaaagggtgctgtcaagctttttgcactcctttgttgacagtagccgaagtggaattcctttacaccccaccccacttcctctgttaggattgtctcaaggtgataaacagtgcatacgtgatcgtagcagcataatggcccgacacatttttgctgataagagtgaagaatttatcaatgctcaggtaaatgcactcttgagttcattggaaatagaaaatgatatccatgccaggggacccatgcctgggagatttagagaactggaggactactggaatgaatcccaaggtgtcctgaagcctggtgctcatgctgctgatggatgggttactgaattcagccaaaatagacc

SEQ ID NO: 45395 - DNA, 420 bp, Gossypium hirsutum
  Clone ID: LIB3583-008-P1-K1-H5
atccggtcgccacgcgccggggcttgcgcaatctcctgcgcggctttcggattgatacagctagcaaggaagctacaaacgaagagatacggggaccattgtagaatgacatggatttgagtggccgaggaaggcagagcgacaggactgaagaggagagagaagaagagaccgaaatggagagcgaaagaaagtcaagaagagggatctgggagaaaaagaaagaacgagaagagaagagaagtaggaaaggcttaaaaaacatttgtaatgagatgaaacacagaccctgcttcttgtgatgtttaacccacaggggcgataccacagtacagttaatttccatttcaatactcaactaggcgagaggagtcttacatatgctattacctctactgaacagatgccaagattgtacat

SEQ ID NO: 45396 - DNA, 504 bp, Gossypium hirsutum
  Clone ID: LIB3583-009-P1-K1-A9
atttgatcgtcctctcttaagaattgccaattccctggatttgtctataaaatcccattcaagcaaccgctcaacaagaaaaggctcctctttgcttaaagatgtgcatattgggattcctggcagtggggtctctggtggcagtatttctctagttcaaggttcttatgagtactatcattatctgcaagatggctacgatgattcgggatggggttgcgcttaccgctctcttcagactatagttgcatggctcaggctccaacattattcatctgtagatgttccttcacacacggaaatacaacagtcgcttgtagatattgatgacaaggatcctgccttcattggttcacggaaatggatcggtgcaatcgaattgagctttgctttggataaacttttgggtgttagttgcaaagtcataaacgtccggtcaggatctgagcttcctgaaaaatgtcgagaactggcattgcattttgaaactcagggaacacctat

SEQ ID NO: 45397 - DNA, 496 bp, Gossypium hirsutum
  Clone ID: LIB3583-009-P1-K1-B12
cccacgcgtccgtctagctgaaaatgctgctaggcttcatattattgattttggtattctatatggtttccaatggccttgccttatacgacgtctctcgtctagacctggtggaccgcctaagttaaggattacagggattgatcttccacaaccgggttttcggccggcagaaagggtggaagagacagggcgccgtcttgcaaactatgcggaaacattcaaagttccgtttgagttccatgctattgctcagaagtgggacaccattcaaattgaggaccttgggattgatcgtgatgaagtacttgttgtgaactgtatgtacaggcttagaaatctactagatgagaccgtgattgtggagagtccaaggaataaggttcttaacttgatcaggaagatgaatcctgatgttttcatactggggattgtgaatggtgcttatagtgctccgttctttatcacgagatttagagaggctctcttccacttt

SEQ ID NO: 45398 - DNA, 458 bp, Gossypium hirsutum
  Clone ID: LIB3583-009-P1-K1-B7
gagatgctagatttaaaacaatcaccttttcaattcgtgatttctactttgttctatttgatgtctgtgcgtatgtgttttttcgtaaaaaaagaaggggcttttacaatcgaaaaatgaaaggctctatagccgaatcatcaaaataaaataataaacacaattttctttttctttattcgtattggcttgctgctgctgttgttagtctgtttcttcgcaggtacggagtgtgcctggcgcgagtacgagggctgggctggcgtacggaggcgcgggtgtggctgctagagggtacggaggctggggctgctgcggctcaagcagagactactagggttctgccttgatttttttgtctttgggctgtaggatatttgggtctaggttggggcttgcaataagttcgggctatgttaaggtatttgggtcattggaataactgcgggccttggact

SEQ ID NO: 45399 - DNA, 465 bp, Gossypium hirsutum
  Clone ID: LIB3583-009-P1-K1-C10
cggacgcgtgggttggaagtagcccaaatactaagctaatgatgaatccatttttcataagcccaaataaaacaaaaaccctaaatcccagagattgtggaaactgaaaaaccctcgctcgtttatctcgctgaagctaggcgaagcgaagcacccgttttcaaaaatggcgtccttaatctcagaaacaagccaaaaaatcttcacccccgagaccctccgtgctgcagccaaacagtctgaacgttgcctcgtcgttcctgttcgccttcgccgtgccatcaagaagtacctccgagagcaagaggacccttatatgcgaagaaaagtgttgcggttatctcagtcttttagcaatattaaagatgtgaatctgcaactcgtggctgagacttaaaagagctcgttgcggaccctcttaagtcgatggagcaatcacagaagatggaaatcaagagtgcttat

SEQ ID NO: 45400 - DNA, 455 bp, Gossypium hirsutum
  Clone ID: LIB3583-009-P1-K1-C6
tcaatctatatacaacttaaaaatcattgttgctttaactctttcattttcttgaaatacctgcgtccgacatatttctagatatgtcgatgactggactttccaaagacctaagcacataggaaaaatccaatattcctgtatcgggaacatacttgtgactaagacatctgaattcaagttatacatgtctatgctactctacttgattgtgggtgcggatatgggcatgtttccaacgtcaatatatgcaaattgtgtcatacgtttggaagatctatggagggtcatattttcatattcctattcaaatgtctgacttatagatatttcacggtaaataacgttcacactgcatataattcacacatatcgaaatgtgaccgacattctcgcgtccaggtgacatagaaaagtggatatagatacctgtttgaaaacatttacatttcaca

SEQ ID NO: 45401 - DNA, 376 bp, Gossypium hirsutum
  Clone ID: LIB3583-009-P1-K1-D7
aagagagagagcgacaaaccaactgatgcaaagaaaacagaggagcgctgatcccaccaaacgacaaagcgaacgctacacgagcgaacatcgaaaacgacataaacggccaatcctacatgcacgagcctcaccgcaagatgcacatatgacactgactctatatagaacatactgaacctgaagaagatgaggacattgttaatgatggagacacgcacagtacaagagagagagaccccaaactgaaccactggcatgtgtgtaggcccactatgccatgcagtcacagtggtaatctgatacaacatgaaactacgagtgagggtgatcgtactcaacaacggcaaagacaacatgaggatcatgctggatg

SEQ ID NO: 45402 - DNA, 474 bp, Gossypium hirsutum
  Clone ID: LIB3583-009-P1-K1-D8
cccacgcgtccggatttgtttgctttgttgggatggaatgacttcaaatttatcactttgcccataatttggtcttgtgttgattcttgtagagtaaagttaaaggggaagatccattgccgttatttttagccacagcagttccaccctcggttgtaatattgtaattttctatataatgatttgcttcggcttagccattgctggtgaggcggtacaaagtattttgtaattgccttagacgcacaaagttgaatttgtttatttatttttgtcaaatgagggaatctaaacctctcgttctcatctccttcttgacgctagagagtgagagttgagattctatgagaggccttctggccttcgggccagcatcaagcatcttcctcgccgttaaggccttcctttccctttgtgttttgttcaccaatcttctttggtagttcagcgaaataatgtttagatattgcttct

SEQ ID NO: 45403 - DNA, 446 bp, Gossypium hirsutum
  Clone ID: LIB3583-009-P1-K1-F3
cccacgcgtgcgtccacgcgtacggttagtagtgatgatgaaagtgaagaaagtgacgaggatgatggtgatggtgatgatgatgatgaatacgctgatgatgatggcaacagccaaagtgaagaatcagatgaagaagaagatgaagacagtgattgaatccatacatggcgattactggcccatcaactggtcgattatggtgctgtattatgtattccaaatttttattttttactaaggttatcttgttacatagatggtgtgggagtcagtattccttgatcgaaaaaggaaatggctctctaattttctgatcacgatgattgtattatagaactattactgcgacttatgtgatcattttaggccatataattgagtttgttaaggctacatgtggattgaaatgtagggaagggactattggctgatctaggcttatt

SEQ ID NO: 45404 - DNA, 479 bp, Gossypium hirsutum
  unsure (1)..(479): unsure at all n locations
  Clone ID: LIB3583-009-P1-K1-F5
ctctaacttaagcttgtgctgttcttttctgttttggtttgaaaatgccatccagctctgcagatcaatgtaggcgttttaacaaggggcttaacaatggcgccccaccaccagaacaagaacaactgctttgcccacgttgtgattccactaacacgaagttttgttattacaacaactataacttttctcagcctcgttatttatgtaagtcgcgtagacattattggactcatggtggtacacttagggacatacctgttggtggtggcactaggaaaaatgctaagcgttcacgtagcaacattggcaccaccaccaccttttccacaaccaatgctggacctagtgacgncgtcaccaccaccacgggcaccacaaccagttataatagctttccattacctgctaccccggttatgttgccaatctcatccaaccaaggaagctttagtatcggtggagagtccaaaggaagc

SEQ ID NO: 45405 - DNA, 226 bp, Gossypium hirsutum
  Clone ID: LIB3583-009-P1-K1-G10
atcgtaatcatggtgaggaataagtcagcttgcgtagttttgctcttttctcttttcctttcctttggcttgctttggtctgccaaagactttccccgaagaagaagccaccatgatcctccgaagaggtacgaggactgcccgaggcgatgccaatgggatacacgtggaccaaaagagccacagccgtgtgaagaaaggtggaaaaggccatattgggaggaag

SEQ ID NO: 45406 - DNA, 192 bp, Gossypium hirsutum
  Clone ID: LIB3583-009-P1-K1-H1
ccaaaatatcagctacatcgtatgagggcttgcaggccatggtacatggagatatccacccctcatagaccagacactaatatccagatcacgagcattctgcagaaggctagcatgaaccaccgcactaccgctcccactaacatcgcatatcagcgcaagctgaattcatggaataacatatcattaaca

SEQ ID NO: 45407 - DNA, 217 bp, Gossypium hirsutum
  unsure (1)..(217): unsure at all n locations
  Clone ID: LIB3583-009-P1-K1-H12
cgcgacccacgcgtacgcccacgcgancgcccacgcgggcggcaatgagcgttccattagcgggcggtcgcgcgcacgagaccatggctgctgcgcacagacacgaatcgacactaaccacacaccagaagcacaccagccggcagacgaagcagcctgacacacgtcaccaaggcaaatgccaactccagaacaagaatgcaccacagccgaagca

SEQ ID NO: 45408 - DNA, 526 bp, Gossypium hirsutum
  Clone ID: LIB3583-010-P1-K1-A6
ccttgcattcctattgcaagagctgttatagaggcatttattagacttcacaaaaaaggattaatttatcaaggtatatgccaaaattccattgcttactatcatgtttcactctgctaactgatatttagctgtttactttctcatttgatcataatattctatctttctcctttgcttcagctgcctatcacagggaaaagaaaagaatgtcaatattatctttctgtgcactaaaaatctagaagaaattatgatatcaaatgaaaaacaacaaagaaatactagtattaacacttaaaagaaattttatgtatcttttcccccttagagtgtattgatttagaaatactggtggttcaatttgacatctagtctgagttagtcactgactggtccaaacttgagatttgaagcgctttttttcccttttggcagaggaaatgcaaacaaagaaggacacagtgaagctttcttggctttgcttaaatatcttataaccatgcaagatttgtctatacaatac

SEQ ID NO: 45409 - DNA, 333 bp, Gossypium hirsutum
  unsure (1)..(333): unsure at all n locations
  Clone ID: LIB3583-010-P1-K1-A8
gnnngngaggnncngttctnatctcccatatattaacagcgctgacttctataccggggtcaattttaaggttcacagggggccactaaatacccaatctcctcatgttgttgccaggacaccagaaatgatcttgcctgtacccagcgctacaaagactgatgggaagaacgtcaggcagatgatactcgatgcatgcgaccagatgctagcggcacttgtcgtgagcagagatgtgcacgaggtcgacatgatgactgcacatgataagcaagacatgatgtctgcacttacacccaacaaggaaggtccacctgtgtgcacaaaatgcat

SEQ ID NO: 45410 - DNA, 534 bp, Gossypium hirsutum
  Clone ID: LIB3583-010-P1-K1-B12
atgatgaggaagcaaggcaccgagttcaatattgtcatgtacggtggaaatattgcaatttatagtactgttatctacagctttagaaatcatcccttttttagatgtgtaaatatataaataaattgaagcacattgctagaaagggatgatttctaaagctctagaaaacgttattacaacgagaaagcaaggtcacctatagtggattggttaatccatattgcaaggattttattggcaatattgttatctacggcttcagagaccatcccttgcttgctaaattaatggaatctgtaatctacagattgacgccccttgcaaggaaggaatggtttctgaagctttaggtaactttatcacgacttgatgcacgttgcaaggcaggtatggtcgtggatgggaaatcatcgtccccttttgttttggtttacacttttgtgctcgttgattgaagcttgcagactgactcattgtctctttagcttattcatgaaattttggcttatattattttgatttggttttacc

SEQ ID NO: 45411 - DNA, 422 bp, Gossypium hirsutum
  Clone ID: LIB3583-010-P1-K1-B8
cacaagtggcggcttagatagagctttatatactgacttagatagatcgaaggcggggctgtaaggcgacttttttgaacaagctgcaccatcacctgcaaaaaacaaagcagatggtagaagatggcaacacaagcacttgtctcatcgtctgttacctactaatgtggagactgcaaggcagattcttggagctaaaagacaaattgggcctttaaggaaaggatcctatgatgtgaaggcagctgtgactgcactcgctaagcaaggagctgacagacctttatggattgtatataaacaaaggctatcatacttggatggcaacacttcaggtgattatggatttgacacttggggactcttagaccctgaagagtcagaatgattcatcgagtttaaatggctagcctacggtgaga

SEQ ID NO: 45412 - DNA, 504 bp, Gossypium hirsutum
  Clone ID: LIB3583-010-P1-K1-C3
cttaaaacagtgtcttgaatatactggacagcattctaagctggttgaatcctttatttctgcactaagataccgcttacttactgcgggtgcctcaaccaatgacatattgcatcaatatgtttcaacaatcaaagcactcaggaccatagatccagctggtgtttttcttgaagctgttggtgaaccaataagggactacttgaggggaagaaaagacaccataaagtgcattgtgaccatgcttacagatggcagtagtggtaatccaaatggatctggaaacagtggggatagccttcttgaggaattaaatagagatgaagaaaatcaagaaaatgttgcaattgatgatgattttaatacggatgacaaacaggcttggattgatgcacaacgctgggagcccgaccctgttgaggctgaccctttaaaaggtagccgaaatagaaggaaggttgacatacttggaatgattgtcggcataattggttcgaagggatc

SEQ ID NO: 45413 - DNA, 502 bp, Gossypium hirsutum
  Clone ID: LIB3583-010-P1-K1-C9
cccacgcgtccgcaacatattttggcaaggatgcttcgcgtgaatgcgttctttgtttaacgagaggagaagcatttgttttccaaagaaaagttaataagctaacttgtttgtatttagagtcaatttagcattgcttttcagaagcacttttgggacaagaagtacttttgggacaaaaagcacttttgagataaaatgattgttaaacaatttgtttttgagtttgaaaaaaatacttaggaaaataaattttttggccaaatgcagaagtagaaaattttagtttttgttcaaaagtgctttttgacctaaatgcagttttgaaaagcattgctaaattaacttttaagctttcaagctatgcttttttagatggaatggtgttttaaggttaacttccatagttttcgcaatagaagttcccgaagttaaacaagttaaaaaagtgttagtgagagaaattctgcgaaatagaaattatggggattgaaaatattgg

SEQ ID NO: 45414 - DNA, 546 bp, Gossypium hirsutum
  Clone ID: LIB3583-010-P1-K1-D10
cccacgcgtccggtacatgattatacatgttctaatgttgtcatttgaggtgcctttgggcatattggttggatgttattataccatatgtgtttggcttgattatgcataatttttgtgccttttaagagcttatgtatatgtgcaaaagggattataagtacatgttgaaaagggtgaaaaatggcttgtaaaataacctattttcgtccacacgggcagagacatggacgtgactcagccttgtgtgacacacggccaggtggtacggtcgtatgtcccctgtagttttcaaagggttacaagtcaggttttacatgacctagcacatggccaggcatacgagcgtatgaggttatttttaagggtacacgggcatgtgttttggccgtgtgacccaagtcagtgagttatatgggcacgagcacaggctgggacacggccgtgtgtccctatttcgaatgcctacacggcgtaagacatgttttgatagttaattaattaaaaaggactaaattgaaaaaagtaaaaaacttacttaattaa

SEQ ID NO: 45415 - DNA, 530 bp, Gossypium hirsutum
  Clone ID: LIB3583-010-P1-K1-G10
cccacgcgtccgcaacaagttcggatgacaatagtcatctcaagtatggttctgttgccgaaacagttgcatatgacctagtgttggaagttgcaatgaaggttcaacgcttccaacaacgaaacttgcatttatatggttcatggaaatggctgttaacggagtttgcctcatattatggagtttctgatgtctacaccaagctaaggtatctttcctatgtaatggatgttgctacacccactgcagactgtctcacattggtgcatgaattgttaatgcctgttattatgaagggccacagtaagagtacattgagtcatcaagagaaccgaattttgggagaaaccaaagatcagatcgagcagattctttctctggtttttgagaactacaaatcccttgatgaatcgtcactctctggcattatggatgtcttcaagcctgcaacagggcttgcagcacctgcacttgaacccgctgtcaagctttatagtcttctacatgacgttttgtctccagaagcacag

SEQ ID NO: 45416 - DNA, 387 bp, Gossypium hirsutum
  Clone ID: LIB3583-010-P1-K1-G12
cggacgcgtgggaaaaaaatggttttagatgggatggtctagccctgtagtgtgattggttttagtatccttactattattattattattatcatcatcatcttcatcatcctaatggaaccatctttcgtcttttcttacaaaaaaaatataaaaaaaaaaataaaaaataaaatcaaaggaatataaaatcacagacgcaacaaaatatgcaataattggccaacatgcgatccgcgccaacaactcaatccgataaaagatggcgacttggattcctcctgtgctagaatagctaactccactatctacaatcgccgggctcaactagagtagcgcccacttgttgatattgctgatcattcctaccagatcttttattacttt

SEQ ID NO: 45417 - DNA, 540 bp, Gossypium hirsutum
  Clone ID: LIB3583-010-P1-K1-H1
cccacgcgtccgataaaagaataaaagtgaatgaaaatttctctcgtttgagaagtgaatcactacaaaatatatatcttccgcaggtaatatctttcattttcttttagtttaaggttaattttctttcttttttcctggattcgatttttgagggtggattcggcatagatcgggccagatcttgcgatctgcatgtttttgaattaattttgttgaacgactaatttgttgatggttgatttctgtgaatattgctttttatttggggatcaagaaagatattttagtatgttattttgagaaaattatgctctagggttttcatttaaattttttcgatcttgcagtgtttgcaagaaattaagattttctgaactttttatttttatttttgatttgtttcagcttttcgagacaagaaaaatgtttagtttgttaatttggtttgtcaatcctcaatctcaagactctcaagttttttacgagaaattactagatttttttggatttttttcttggtttctgatttttggctca

SEQ ID NO: 45418 - DNA, 256 bp, Gossypium hirsutum
  Clone ID: LIB3583-010-P1-K1-H6
cttacacttgtttgctaacttttaacgactgcttgcatgcactcatccacgacgagctcaatcagggagagctcgactataaccagtacttccatccagacttgagtaagaagtgagtgtcccaattttactatgacattcaaatgaaaaacatgactgagattcacctgatgttcaagaactggatagaataactatctcgctgactataaaaagacactcattgtccttcctttaacgcaaaaactgattacat

SEQ ID NO: 45419 - DNA, 509 bp, Gossypium hirsutum
  Clone ID: LIB3583-010-P1-K1-H9
ccaccggtctagcaatttcactccttggagctatggttatgccgcacaacctctttctccactctgcactggtgctttccaggaaaatccctcgatccgtccggggcattaaggaggcttgcagattttatatgatagaaagtggcttcgctttaatggtggcatttctcattaacatatcagttatctctgtaagtggtgcagtttgcaattcatcaaatttgaatcaagaagatcgagatagttgtgaggatttagacctgaacaaggcctcgttcttactaagaaatgtcttaggcagttggagttcaaaactttttgcagttgctttgctggcatcaggtcagagttctactataacgggaacatatgctggccaatatgtaatgcaggtactctgttattgtatgccgcattcttttgcagctcatgtttccttaagttctcataattgaacaatttaagcatttctatattgaaaatttgaaaagttaaaagaaattgtcact

SEQ ID NO: 45420 - DNA, 446 bp, Gossypium hirsutum
  Clone ID: LIB3583-011-P1-K1-A3
gaaacaaacaaagactggtatataaacagtccgatctgaagagaatggtcgtgacgaggagagccctcattgtgaagatagcaatctgccaaaaagtttggagcataacctaactgatagaactgttgcatctcttgcgaaagcctctaaagagtacctgtatttcaacaatgctgccacagataacgatggtgccatctcggctaacaataattggattccttacaccttacttgctggaaataatgcattagacatgtcattctctaactatttaaactgccaaatgcgcaggttctcatccggacaagggacaatctggatgtacacatagactggcgggccgacttgccccgcctgaatatagctgcacacatgatcagtaaatatttatatctctactgactgaggtactaccatggaaaacgcatacatgaaaaggctat

SEQ ID NO: 45421 - DNA, 436 bp, Gossypium hirsutum
  Clone ID: LIB3583-011-P1-K1-A5
atcaaggtatatcttctctactgaaccagctctctgagaaccgcctagtgaaccctctttttttattatggcgtaaactaatgcactgttgctaaactattagcaagtttacatttcggtcacttaatggtaaatagttatcaaatagtcactgaatcatgagaatgatcgtatttaagtcactgtactattaagtcactgtgtctaaagttcgggtgggcaagcttcgagtgacgagttgagcatcatgctggtgaaacagtactcatcgacgagtcgctgaaagctatatggatttaggctcatagatgagtgatgttcaaaggtgttgcataaaaaaaaaactgaatcgcagaagaggagggcgaagcctactcgattgatgtcggaggtgagaacgaagaatgctatacagcagtgactttaacaactcggt

SEQ ID NO: 45422 - DNA, 520 bp, Gossypium hirsutum
  Clone ID: LIB3583-011-P1-K1-A7
cccacgcgtacgaccacgcgtccgctcatggagtctgatcttcacgaagtcatcaaagctaatgatgacttaacccgtgaacaccaccagtttttcctttaccaaatgcttcgtgcaatgaaatatatgcatacaggtgaacaattgattcatctctttaattggctttcgtacatgtctgtaattaaggctatatttctcattggcttttggcttgttactgttcttaatggaaggttgaagtctctcgctcattgatgtaaatcgctttcgcctcgggttttgccatctaattgggatatggtgcttgaaagcaattgcagattgacactgattgctaagttctcggttgcagctaatgtttaccatcgtgaccttaaaccaaagaatatactggcgaatgccaatcgcaagcttaaagattgcgacttctggctagcaagagttgcatctagtgacaccccaaccaccgtgttttggactgactatgtagctacacgatggtacagggcaccagagc

SEQ ID NO: 45423 - DNA, 504 bp, Gossypium hirsutum
  Clone ID: LIB3583-011-P1-K1-A8
cccacgcgtccgggatttccggataccgatggagcctattctccaaatccttttgattctacagtaatcgcctcttcatttctccgtttccttcttcaatccattccgccctccttatctatgtccttcagacgttctgcatactcagggacttcacctaacagcaaaagctgaagcaaccttcttatgaatctttgtgaatgaaaggagaacatttccttcactgtccttcgccacaatccctacatccgattggattagatgtccatcatatgccgcatcaaagcttattttcacaaattgatcagattgctcataaagcgcatcacactatccttcggtgagagggcgagatttgttcaaaaatccacggcattcgcgaaaaacatggatcgtggcttctgccactcttctacaccgagagcatgcaatgtttctgagaagccttctatgctgcaagtcgacccatgctggaagataattccatgaaattctccagactgt

SEQ ID NO: 45424 - DNA, 285 bp, Gossypium hirsutum
  Clone ID: LIB3583-011-P1-K1-A9
cccacgcgtccgcccacgcgtgcggcgaaaggaatttattttttctatttttcggatttatccaaattgctagggttgtcgatctgagaaagggaggctatcggtggggaaggcgaatctagtgactcacgactcggtacctactgagaaactgaagctatcatcgttagcatacgctgctcaaatatgaatatttgacagtgagggccagcattgacttaactgtgctgcgccacaatccctacatgctcatggttgagatgtccataatatgccgcatcaaag

SEQ ID NO: 45425 - DNA, 305 bp, Gossypium hirsutum
  Clone ID: LIB3583-011-P1-K1-B12
accacgcgtacggagacacgtacttccacccacctttccaaaatatcactttgattctttggttacactcccttgcattaaccattgtgtctgaaatttgagacaagagctaggtcgaaaccaattactaatacatctatttaaatatatactagcttttaaggtaataataatactaatcttgttcttcttaaaaacgcgtggatagcgtcagatagtatgatcttgatttggttgcgtttatatatgaggtgggcgtatttcagctcttaaactctaaaccgcaccggacatgatacaaaaag

SEQ ID NO: 45426 - DNA, 546 bp, Gossypium hirsutum
  Clone ID: LIB3583-011-P1-K1-C12
gggaaagtaaaaatgctagctttgaatcagacaagaaagtagaaaatgtcacaattccaaaggttgatgctagtgttgtagaggttgaaaatgagggtacccaaaaggaggaaaaagctaatggggaaaggaaacaaaggggggaaaggagaagggcaaagccaaaccccaagtcgagtaacctaccgaaacattcgcttggagagcaagtggcagccggatggcctgcgtggctgtccgatgcctgtggcgaggcgcttaatggttggattccacgaagggccgacacatttgagaagattgataagattggttcaggaacatatagcaatgtgtacaaagctaaagatatggtaacaggtaaaatcgttgctctaaagaaggttcggtttgataatcttgaacctgagagtgtgaaattcatggctagagagattctcatattgcggagattggatcatcctaatgttgtcaaattagaaggtttagttacatcaaggatgtcgtgtagtttgtatttggtgtttcagtacatggagcatgatt

SEQ ID NO: 45427 - DNA, 292 bp, Gossypium hirsutum
  Clone ID: LIB3583-011-P1-K1-C7
gccacacgtattcagatgttgctcctcgagctgacattcaaaaaccctctgcctactaaatctactctgggattactggaaaagagccaaacctatcatctgtttaaccttgcattactagtgatgccaccatatacaatcatactgggacgacaccatgaacatactgcaagcgctaccaattggatgcccttcactactaagtatagtgactggactatataatgatactaatagtcacatgaacaaacgaacgctacactactgctcatcacatagatggcctccattc

SEQ ID NO: 45428 - DNA, 440 bp, Gossypium hirsutum
  Clone ID: LIB3583-011-P1-K1-D5
gtttttgagagtttggacttgactggatatgatctcaatggtgatttgttggatgttcatgctcatgagagcacgtttcatcggtttgacaaattcaatcttaaatataatccttgtgggcaaagcagacttagagagatctttttaaagcgggacaatcttatccaatgacgttttctggcagaagttacaaagcaagttctatcatatcttggaacaagcaaatatcagatcggacagtgcagggtgtccatatatggtaggaaacaaagtgaatgggaccatgtggcgagttggcttattaacaatgaaatttatagtgagactactagcttggtatatcacatcccacgattagttaatgcggtcaagcaaatgggaattgtcaaatctttgccgaatactctggacaatagtgttattacactatgtgaagttac

SEQ ID NO: 45429 - DNA, 503 bp, Gossypium hirsutum
  Clone ID: LIB3583-011-P1-K1-D7
aaaaaactagcaatttctatcaagttcttttctttgtttttttaatcaatggctagaccactaggctaacaggacactcaaccaatggctgaccaaattgtaaaagccactatctggcacaacagcctgtgactccatactcattctatccggttaaatcttacctggcaccggtcttgcgcttaccatagccactccagtgtaaactattttcattccaaatctagtccctgctctcattgaaacagcttttcctagcaacggttttagttgactgccccggattcagtcgttgcatctaacactggcctatcctgaatttacaggtatgtgacccttagacacccaccttatgcgcatcagttgtatagtgcacgcataaaattgcctttcaaggtacgagagatgtaagatccggtggttcaacttaccggcgctgcttcttcttaaattaggcctctactgcatgctattgtataagagctgggcacaatttaaggatc

SEQ ID NO: 45430 - DNA, 559 bp, Gossypium hirsutum
  Clone ID: LIB3583-011-P1-K1-E5
gatgacagtctgaatgaagaagcaggtagccttactttgaagcttgggggccaagatggtcatggtaatgcacttagccaaagagatacgataaattgggagggaactagtgggaagaagaccaagttgagtggaggttctggaaatcgtgcagattgtcaggttgatgactgcagggctgatctgagtgatgccaaggattatcataggcggcataaggtttgtgagatgcattccaaggctagtaagacactggttggaaatgtcatgcagcgattttgtcagcagtgtagtcgggttcatgtccttcaagagtttgatgacggcaagagaagctgtcgcagacgtctggctggccacaataaaaggaggaggaaaagaaatcctgaagctgtcgtcaatggcaattcactgaatgatgagcaaactagtggctatctggtgttaagtcttctgaagatactttctaatttgcattctaacacatctggccagaccacggaccaagatgttctgtctcatcttctaaggagccttgaaaaccataccagggaacaag

SEQ ID NO: 45431 - DNA, 529 bp, Gossypium hirsutum
  Clone ID: LIB3583-011-P1-K1-E9
ccgactgctgcgcctgaacttgctgaacttgcagctacaatatctgggttgaacttatcggaaactagacatgcagatgagaatagccacatgcgatctcatcttcaggctgatctgggtcatcagcagaattttccattaaacttgccaaatggtcatagtcatagtgcgcagcagcaattcattgacaagtctagtgctgaaaagctcttattttctccaaactatattgacttcgcaagggaaaaggggattgcacctaatattaatgcttctaagattagttccaatggggaagtcaggattcccaaaagaacttgctcttctgcagatctctatgcaaaagtgcatccttctggatttggaagtttggaaggatctgatgttgcacatcccaatgtgaatcttttgaacacagattccattggccagctacctggcgcttattcggataaccagaagctaaattctgcagttaagaacaatttaagtgcgggtctctacttgactggtactggcgataggcaaa

SEQ ID NO: 45432 - DNA, 566 bp, Gossypium hirsutum
  unsure (1)..(566): unsure at all n locations
  Clone ID: LIB3583-011-P1-K1-H4
aaagaatttatgtagaactctaagaggaattggaatgaagatatggaagttttctttatattctgaaatgtgctgcatgagtggccagccttttcatacaggaaaaattaagctgtacctaaaatctcttctaaagaatcgatcagctatacacaatttcctatattgtagtctatcgaatctttcaatttagcctatcaaatacttggattcttggaaaagaattccagatttccacacattctgtagatctctgtggccaaaagccatgagtgaaccttcttctatttctgtagtgataatcgttcttttcccattcatgattatgaacaactgaaggcataaaagaaagagtgctgatctgcaattgcaacagtaatcactcttcttatttgtgggatcagactaactagaaatcacaaaatcctgcttcttgacatatagagtattccctataggatcttgttaatgtccgtttagattcaagagatctncaatccaaattgaacattaatcgttttcataagcataagcagtacgtggcaattttgtagacaggttaattt

SEQ ID NO: 45433 - DNA, 435 bp, Gossypium hirsutum
  Clone ID: LIB3583-011-P1-K1-H9
ttttaggggaaaatatatcataaaggtctgtgctctatgtgaaaataaaacacactcactctactcttatatttaggaaattagactatatactctttaaaaatcaaaaattgggtgggtccacatgtgaacactgatgaaaatattttgttgaaaacacggtgataacaacgggattttcttagatacacagctactaattattttattataaaaatgccgcaccctcatcattttcaacaagaagtatcagcatcatcaactgtgcccactttatgtagtcttctgagaagattgttgaaatatcaaacaagtggagagcatcatgacctccggcggaatataactactttcagcatgcagccagttactacttcttgcttgctttcctaactatgctggaaaaaaacagaccgaacatggatggatatcatg

SEQ ID NO: 45434 - DNA, 406 bp, Gossypium hirsutum
  unsure (1)..(406): unsure at all n locations
  Clone ID: LIB3583-020-P1-K1-A7
gttgcttataactattgctgaattgatgcacaagataaatatataggtggtgaggccaaaatggctaaaatttaaatgtgtgcaagttatccgaatggctattttataaacgtaagtaatgtatatgtaatatgtgttgatagttttataaattgaaggtgtagtgacttatatgttgtttagccgaatggttgtcatgagaagaatgtaagtcatgtgtgtattttcttatttagttggaaagttattgaaagggatatatatagatatatatatatataaatatgtattaaagtcgaacgatattatgacatgaagttaaggtatacgctatatgcttatattcgaatgnaggtaatgaattacaatggtgatagtttgtgtgaaatgtggtaacatgtgatta

SEQ ID NO: 45435 - DNA, 546 bp, Gossypium hirsutum
  Clone ID: LIB3583-020-P1-K1-B11
gaaagatccgtaattctgcttctgtttcattgagaagaacagcattggaaatgaagggcacacaacatatattggaggaactgcggatggtgccagactctgaggcaagacccgatagtgttgcaatttccactgcaggacttgaaaataatgatttagtgccttcatctctgagccaagtagacacatctgtgttacagcagctgcccgaggaattgagagctgacatatttgaggcacttcctgcgcacaggatgccagaaggtactgccctgggcccgaggacagataacatgcatcctcctttgggcatcaagactgctactgacaatcaacctggatcaactgattctggtttgagcaacaatctctggattggagatcctcctctttgggttgataagtttaaagtcagcaaattgtcaacattgaatttttttgttgacatgtattacaaagcaaattcagctgagagtttatcttcgatactacaatgcattattgctgaatccctacatcctttaaatgcaagatgtgatgcttgga

SEQ ID NO: 45436 - DNA, 471 bp, Gossypium hirsutum
  Clone ID: LIB3583-020-P1-K1-B3
ctctcttctttcctccagcccaaaaaaaaaaaaaaaaccctctttcctttctctcgttctttttcccgttcaatcatgtcttgcttcattagcaaatatgccggtaagtacccttcccttgctatttcctttgctctttattttatgtttataaacttaatctctcggatccatcttagtgttttttttgtctgatctggtagtcggtttgatagtttgacgagaaaaaatcgctagctgatttgcttgttttaattataccaactggattttgatatatggatttcttcggatcttctaagggctggctatattgtcttatgatcttgcagggggtgttaactacatggttaaattttggggtaatatctgaagatctagatctgcatgtttggactcgcttattattactccagtcatttttttaaataccatgatatgattcaggtcacgatttcaggaaaaaaaaga

SEQ ID NO: 45437 - DNA, 541 bp, Gossypium hirsutum
  unsure (1)..(541): unsure at all n locations
  Clone ID: LIB3583-020-P1-K1-C11
atggaataattcattctcaaggagtcattcatcgcgatcttaaaccagagaacgtccttattgatcaggaattccacatgaaaattgctgattttggtatagcttgtgaggaggcatattgtgatctactggcagatgaccctgggacttatcgttggatggcacctgagatgatcaaaaggaaatcgtatggaaggaaggtggatgtgtatagctttggactaatgttgtgggaactggttgccggaacaatcccatacgaggatatgaatcccatccaagctgcttttgcagttgtgaacaagaatctgagacctgttatccccaaagactgtccacctgcaatgcgagctttaattgagcaatgttggtcattaaacccggagaagaggcctgagttttggcagatagtgaaggtgttggagcaatttgagtcgtcactcaatcgtgatggaacactggattgggtaccgaactcaaattgccaagatcataagaaagggctgcttcattgggttcaaaagcttagtncaacgcacaa

SEQ ID NO: 45438 - DNA, 534 bp, Gossypium hirsutum
  unsure (1)..(534): unsure at all n locations
  Clone ID: LIB3583-020-P1-K1-C2
atggccatctctccttacccccaaaaatatcaatcaaaatttttttttcttttgcgatggcaagtgaacatgaattttatccttcacgtgcaacgcccatgcaatactttacggatgaagacgaaggagaagaaggaggaggagaaatagaagaagaatcgacggacgacgaagtttgcaaagaagaagagaaagagaattcaagtgactggaggagtttgtatttgatgtgcggcggtcgccgcggcggtgggcgtcgccgtaaaacttggtcactggggcaagtttttttcgacccgaaggccaaatgggttcaagaatggaatagggttttcctcctggtatgcgcgacgggactgttcgtggacccattgttcttttacgccctgtccattagcaacacgtgcatgtgcctcttcgtcgacgggtggttcgccatcaccgtgacggcgcttccgtgcatgacggacgcgttgcacgtgtggaacatgtgcctncagctcaaaatgatcaagagatcatcgtcgtcgtacg

SEQ ID NO: 45439 - DNA, 539 bp, Gossypium hirsutum
  Clone ID: LIB3583-020-P1-K1-C5
cggacgcgtgggcggtatgaaggaggacgcgatcttgacgatacatgggcagtttacatcggcaacaattctcaaaacatgctaaaatggcagaagattcaaacaggtaccccaagtggaagatttggccatacatgtgttgtcattgaaaattatcttgttttgttcggaggaatcaacgagagaggggaccgacacagtgatacatggttaggacaagtttcactccacgaaaacctcggcatctcactgtcatggcagctactcgatgtcggttcgacgtctccaccaccacgaggagcccatgctgcatgttgtataagctctaggaagatggttatccacggagggattggtttaaatggtgtcaggttagatgatacatggattatagaactgtctgaaaatcgatgttacggaacatggcgtaaaatcgttagccatccatcacctccggctcgttcaggacattcattaacatgtatcagcgaaacgcaaacgattctgtttggtggaagagggatgggatacgaagtttt

SEQ ID NO: 45440 - DNA, 392 bp, Gossypium hirsutum
  unsure (1)..(392): unsure at all n locations
  Clone ID: LIB3583-020-P1-K1-C7
gcattgcctcgtcaatgcccactaaaccaatacccagtgtttctgaagtggcatctcattctggccaaatcagaggtgggagctgagaaagctgattcatttgtgacgggttgaatctttaaccagaaagttggaatagatgaggtttggtgtgcaaatatgaggtttatcgacatggttagctaagtttctcatgccaaatcttggttaggctggcaggcatatctatttgttgagaactaatgataagaagtgcacaagattggagtgattgtttgttgttgcataccacgtatattgtccactgttcacataaggaaattgtgttttttgttgtttgaanacnaaactgtncntnnacccattgatcttttaccccctgtccattatca

SEQ ID NO: 45441 - DNA, 524 bp, Gossypium hirsutum
  Clone ID: LIB3583-020-P1-K1-D5
cggacgcgtgggggcgatgcggtggtttccgagccttctgtggtggacaatccggacgtacctagctaccagccgtacgtgcacggtaggtgcgaaccgccggcgttaattccgttacacatgcacgaggtttccatggaggtggactgttggatggatactgcgttcgttacagctagcggcgcgtggcgcgtgcactgtataatggccggtcggagatgtgattgccgagttgctgttccaatgggagagcagggttcgattctaggtgttgaggttgacatctcggagactgagaagtcgtcctataattcaaaatgggtcacattagctgattctaaagatatggaaaaagttgccaaatctggagatggtttcttcttgacccctcatatatatactttcagaattccacaagttgagggaggatcttatttttcaattaaagtctgttggtcacaaaagttaccctacaaggatggtcagttttgcctcactgtaccttttagttttccgacatatgt

SEQ ID NO: 45442 - DNA, 406 bp, Gossypium hirsutum
  Clone ID: LIB3583-020-P1-K1-D8
cccacgcgtcgcctttctgctttcaacaaacgcaaaccactcttacaacaatgactacctcaaaacgccttgcgggaaggaaggttgcaaggtttcaaaggaacatcacaaagaggggatctgtggaaagctcagcaaagaaaggaaatgaataccctgttggcccaattcttctaggcttctttgtgtttgtgagcgttgggtcatctctttttcagatcattaggactgctaccagcaaaagcatggcctgagcagaggagttgatcggatgaataagacagccgatgttacagagtcgtgttcgtgcaataaataacagtgttgcacaactgatgttcgcttgacatcttggtctggttgcaataaatcattatgacatcttcttggtgatgaaaaaagaaag

SEQ ID NO: 45443 - DNA, 515 bp, Gossypium hirsutum
  Clone ID: LIB3583-020-P1-K1-E2
caagcattggctcgcacaatacttggaccatctgtccgctaccagagaatcgaagagctgttgggtgcaagtggctttttaaggttaaaaagaaagctgatggttcggtagacaggtacaaagctcggttggtagcaaaaggtttctcttaacatgcagggattgactttcgggacacttttagtccggtggttcgcgcatccacgattcgtactgttcttgctctttctgttatgcaaggatggtcgttgaggcaagttgatatcaacaatgcttttcttaatggtgagcttactgaagagttgtacatggagcaaccccctggctttgaagttttcgatgcctccggtcagaaacttgtctgtaagctacaaaagctctctatggcctgagacaagctcgtcgcgcatggtttcaaacactcagacagtatctttgtgagcagcttcagtttcgagcatccaaagctgactcctcattgtttattcgagagactgacgggcagactacgctac

SEQ ID NO: 45444 - DNA, 530 bp, Gossypium hirsutum
  unsure (1)..(530): unsure at all n locations
  Clone ID: LIB3583-020-P1-K1-E5
tttctctttttgattttgtgcaggagctaaagattaggccatgccctgtggtctttgcatctttttccggtggccctaaggcctgtatgtacaaggttcttcagatgatcgagggattgtgtgaagtgcaagtaaatccagatgatctccaactgctgaaggagtgcttttcgggccatgtttttgattctagtcctatggattttactagtgacttgggtgcccgatttgttgttcacccaacagttctgcaaatgtctcatccaccacgaatagcatcatggatagcaaatggcattgcttctggtcttgatgctctcttcctcagcaggtttgagtcccatcgtgctgagtattggcagactctatacggttcaattaggatgggggccccgtatctcatattatgctccgaaactgatgatcttgctccttatcaaattatctgcaatntcgctcaaagattacaacaacttggaggtgatataaaacttgtgaaggtcaatggttcgcctcatgtaggtcattat

SEQ ID NO: 45445 - DNA, 503 bp, Gossypium hirsutum
  Clone ID: LIB3583-020-P1-K1-G1
cccacgcgtccgcttaactctgctaaaatgaagcaacagaattgatagcaagaaagagctaaacaattatttaaccataatgctaatttatggccctggtgcagctttccgtgttaaaacttcattgtactgtgtcaacagcaacaacaaaaaggtttccagcaaaagcagtaacaacctcaccagattcagccgcaggtgcaaccttgcaggtagcttccttgcggctgctgctgttttagtctccgcagctatgccagctgaggtgccacaagactcggaaacactatccaacataccccaaacactttcaggagagtgctcatccgccaaagattgcaaaaagcctagaatccagcgaccaaagtctaggaaagctgagacatgcactatcaaatgtgttaccacttgccttagagggggtgatggctctcctggagaaggtccttttaatataagaaggtacttgaattctttccaaggatccatctcattttgctagc

SEQ ID NO: 45446 - DNA, 521 bp, Gossypium hirsutum
  Clone ID: LIB3583-020-P1-K1-G12
cccacgcgtcgcccacgcgtccgattccgatattttcacagccattccctccaaagtctcttcttctcccccaaagctactcagtcactagagacccttcacaacttagacctctcctatccttctccatcgcttctctagcaaactcagagacctcatctcttaagcaccactgttctcatgtcttcaatccctcagtagccagcaagtgagtgacgtcgttcaccgttatagggcaatatttgaatatacaagtacgaaattgtttacccaaacattttccatctctgattaagaccactattttcgatttatcctccctctcgtgtaatagcttttttatgacagtgggtgcatctcctttaacctccgtatccattagtcctagatccagtcccatctggatgctttgaatgcatgcaatagcttctaccataaagactgaaggctgtgtcaaaattgatttttacgaacagaggcttcgatggttgccaactttccgactccacatgccgaacata

SEQ ID NO: 45447 - DNA, 536 bp, Gossypium hirsutum
  Clone ID: LIB3583-020-P1-K1-G6
cagctaactgattttcttttaaaatttataattaattttccttttccaatttgaattttttgatttgattttttttggttgtggcgtttttgcaattctgtcgttgcttggaggaatcgaggcggaggtggaatgaggtccttctagacgaaatttctagaaggtaaggacctggtgcttgtggcggattagtcgacgtagacgcatataaatgttttaaggatcgaaagggaaaacgatgaaatggatatcattgcttaaggacatcaaagaaaaggtcggtttaactcaagctcctgctgcttccgctgctgccactgcttcttcatcgtcttcgtcatcatcatcttccaatcgcgatgcccgtgcttcgtatctcttcgactacattccctctccttcgagagataaacatgaattggaaatggacttcaagagattctgggaagagttccgatcatcgaattctgaaaaggagaaagaaacggcctttgattaactgtagatgccctttgtaagatagtcaagcagcatgc

SEQ ID NO: 45448 - DNA, 321 bp, Gossypium hirsutum
  Clone ID: LIB3583-020-P1-K1-H3
ctacttaccttcattcttttgtaagggtgagaattttgagacgattatatatttatatgtttagtagacctcttgaaatactctaaaaaaaaaaaaaagaaaaaaaaagaaaataatgaaaaaaaaaaaagataaacaaacctatgatttaagcaagctttcttcctactgcggcccagccaacaccccacgggagtcatcccaagccgccataaaaggcagcctgtgacgtgcccggaaagagacaaactaatagtggacgagtgtgaaagactacaacaagactgaacgaatctcactgagtgacaatgtggagcaaac

SEQ ID NO: 45449 - DNA, 399 bp, Gossypium hirsutum
  unsure (1)..(399): unsure at all n locations
  Clone ID: LIB3583-020-P1-K1-H7
ccgnngccaaagcccnggcncacannggngagcgagnagannncgcgggcgccgcnggngnnanncgagangaccgggcaaaagagcggcncggannaaaacagacgaagnnngnnnncggcgaaggcgnacaacggccgccagagcagacggnngaaggccaccacaaagaccgacangaccacgacgcccagggnnannnncggaaaggcgccagcggccgnggncagggcgaaaaaagcccccaggccaagggccacgaccnnngccnggccccaggaaacgaacncggaaacgaaacnggcgnnccacgcgccaccggaagcggngaacgcaccggncacgnaanacgggaagaaccccggcaacaagaccnngcgccaccacngccagccacgg

SEQ ID NO: 45450 - DNA, 417 bp, Gossypium hirsutum
  unsure (1)..(417): unsure at all n locations
  Clone ID: LIB3583-020-P1-K1-H8
cccacgcgncggccgaaacannccagganncacagcaanggcagcancaaagccgnggcaggggccaggaccagcaccagaaagnccgacggnnccgccagggngacancanngcnncgccgcaggggggggnncacnggagcnacaanganggcaangagcgngnngnaccancaancnacnngacacnggcaacagngcnaancagcncgacaacancccnagaagaaaccagcgngcnggnaacccagaagaggaacagaggcaacngaggaggcnagcacagcagangcagggaagaagngagaggggggaggagncngaggaagaagaaggagaaggagaagaagaagaagaagaagacaaccccagccgccgcagccgccaccaggaggaggaggagcaggggcgggaaag

SEQ ID NO: 45451 - DNA, 404 bp, Gossypium hirsutum
  Clone ID: LIB3583-023-P1-K1-A1
ggcaactgatgaggctagcacagcacatgcagggaagaagtgagaggggggaggagtcttaataagaagatggagagtgtgaagatgacgagcaaaaaaacaacccctgccgccgcagacagcaccaggaggaggaggaccatatgcggctatgctcaccatcgcaacaacgataatctgttcttgaacctctctatacagattaactctaactttaaccactatgatcttatgaaaatcaaacgatcgctagcaagtaaaggtatcatgatactgatgacgagcagactccttgtggtgacaccaccccatatgaaccaagaagaacacactgagcgcccacacacgcaggtatactatcgtaccagaggagggtctaatgattatgtattggaaggctcttt

SEQ ID NO: 45452 - DNA, 532 bp, Gossypium hirsutum
  Clone ID: LIB3583-023-P1-K1-A10
aagattattttatcgggcaatggagatgctctaggcattccattagttatgtatcaacgttccaacaaaaatacttgtatgcatcaaactgcccgggttcggcggggtaaatgcattaaaaagggtcaaattttagcggacggtgccgctacggttggtggcgaactcgctttgggcaaaaacgtactagtagcttatatgccatgggaaggttacaattttgaggatgcggtactcattagcgagcgtctagtatatgaagatatttatacttcttttcacatacgaaaatatgaaattcagactcatgtgacaagccaaggtcctgaaagaatcactaacgaaataccgcacctagaagcccatttactccgcaatttagacaaaaatggaattgtgatgctgggatcttgggtggagacaggcgatattttagtaggtaaattaacgcctcaggtggcgaaagaatcatcgtatgctccagaagatagattattacgggccatacttgggattcaggtatccacttcaa

SEQ ID NO: 45453 - DNA, 528 bp, Gossypium hirsutum
  Clone ID: LIB3583-023-P1-K1-B3
aatttattttctcttctctaagaaccgaacttgttctcagcactcagcagccgactttcacttaacacaaatggtatctcaatctcagtcgaatcgggaaaacccaccattttcttacctttttgctgtccatttctcttccaccacaccaatacccagactcagcaacattcactcaatggcttgttattgaaatgctcttcatgatgttcgttgcatttgactggaaatatctagatcgtgatggttgctttagaagacattgctaagcaagtctcgacatatggtgagaggtatgactgtttacaaggttcttatctttcctttattgcgagggatatgacactgctagtaagttgcttctcatagacttcaatatctttcctttgctggtgtggtggtagttctcagtttattttaactcgaaacactggattcagttcttttattggaacacatgttagattaacttgttggtttttttcacgttttgcagccatcgatgtcccaagctacgattcaattagc

SEQ ID NO: 45454 - DNA, 359 bp, Gossypium hirsutum
  Clone ID: LIB3583-023-P1-K1-C3
ctttctttttttttttttagataatcgaaagctacatatatagaacttgtaacatttcacccgcttacatgggaggaaagggccgtctcgaaagaccctttctttatattatccaacctctaaaccctattcttgcattacctcatctatcaactccctagtcccctgttgcaaacgctctccagacagcgcaagcatttcaaggcctttaatcgccaacagagaccgatactgacacgaagagatggcttttaagtgcagcacacaagtttcgacatccatttaaggggtgaccgtattggctaacttgtctcttttccgatggaggggaggttattgaacgattacgatctggggac

SEQ ID NO: 45455 - DNA, 525 bp, Gossypium hirsutum
  Clone ID: LIB3583-023-P1-K1-C4
cccacgcgtccgctgattaaaagtttacattccttaaaaagaaccttttttttttttggagtagaaagaacataaagagagaggattttggggggaaataatgttttgatatgttttcttttctgggaaatttgtttccttcagcttttttatgaagaaaaagcttcattcagagggttgagttgccataaccaaaagctgtttatacaatggggaaatatttatgacaaaaatggatcctcaggctttcatcaggttgtcaataggctctttgggtctgaggattcctggatcagccctgagatcttcgaaaactggaatccgtgcattctcttcaccatgttcatgtgagatacgactccgaggtttccctgtgcaaacaacatctattcccttagtgtcctcacccgaagccacacctgatattcacagcattgcctccagcttttatctagaagactctgatgtgaaagctttgctgacccctggctgtttctataacccccatgcttatctggagatcat

SEQ ID NO: 45456 - DNA, 535 bp, Gossypium hirsutum
  Clone ID: LIB3583-023-P1-K1-D11
tatgaactcccttctcagtcagaactcattcgacatgcttttgctggggacgatgtggaagaagaatttgaaaaggataaacaggaaatcctgaatgaggaaaaccctgaaccggataaacctgttttgctccccggttggggccaatggactcatgtacagcaaaaaaaaggtttgccttggtggatgcttaaggaacacgaagacgctaagcgaaagagggaagaaagtcttaagaaaaggaaggatgcacagctcaagcatgtcattatctccgaaaaggtggataaaaaagctgagaaattgcagacaaaatctttgccctacccgttcacatccaaggaactttttgaacaaagtatgcggatgcctattggatcagaatctaacccggagacagcaatcagaagtcttaatcgaccagaagtggtgaagaaacctggggtaattataaaaccaataaagtttgtggagatgcatcatcacgaaaaatccgaggattacaaacggagtgggcagaaacagaagaaaaata

SEQ ID NO: 45457 - DNA, 538 bp, Gossypium hirsutum
  Clone ID: LIB3583-023-P1-K1-D4
cccacgcgtccggccttggaattgtatcctgaagttatgaaccagagtaattgtggtgaacgttttcaatcaccttctgaaggtgctagcattgtttctcagactggaaagagttatcttgttgaccctttaggattgcctccaggatttgaatctggaaattcttgtgttcaacaaccaaggctccattctgaagacatggctcaaagttctggtgtagaacagcatgaagcaacgcctaagaatttacttgagaattctgtccgaggcagggatggagaatcttcaaaaacaaggaaaaagtatacgccaagacctttgacaagcagtgacagggtcttgcgttcaaaatcgcaagagaagtctaaagctagtgagttgagcaataatatcactgatattggctctagtgagcagcaaaaagggaggaacaggaataaaatgattgaaaaaagagaagtttctgatgaatattcaagaatcaggtcacatcttaggtatttagtgaatcgaataaactatgaacgaagcctgattg

SEQ ID NO: 45458 - DNA, 195 bp, Gossypium hirsutum
  Clone ID: LIB3583-023-P1-K1-D7
cccacgcgtccgcatgattctgggtggatttcattcactcatccaatcgcactcctcccctatagatccccaggggatgtatccaccatttgtaattactaagcttaaaggagctcctttttatttatatattttctgtctcaaataaagcatatttaagtatctaatgaaatgttgacatgaatcgtctttttt

SEQ ID NO: 45459 - DNA, 529 bp, Gossypium hirsutum
  Clone ID: LIB3583-023-P1-K1-D8
agggcaggcacctatgagcagaaccaggtgtggatgtctcatgcagcttagaacctcaacctacattacaaatttatttaatacaaatgaaagggaggaagaaggacagataagttctgccactataaacacatgaagctttgagttttactataagagatgattcaaacttcttcaccaagaaaagagatacccaatgttttgggacaccgtaaaattcaatgaagtttaattgttcttgggaaacaggattaacaagcatagttacctcttgttggaattgcttctgtccttgtgatatatctggccttaagatcttgatggctacagcagtatggtcaagggtggctttaaaaaccggcccatatcctccttcaccaatcttatgtgcactcgcgaagtaatctgtcgcagcttcaatgtcatcaagggtgtattttctataagcagctttattgttaaccagcttatctagtgctctctgtttttcttcttcctcctgattggctttcaattctgcgagttttct

SEQ ID NO: 45460 - DNA, 528 bp, Gossypium hirsutum
  Clone ID: LIB3583-023-P1-K1-E1
ctctagttgttcgtgagtgctaattctccccattttaccttgagattacctcttatcaatcttgaactgctgaaattgtgggtttaaagggattttggggttatcaaccttgacctagtaggacagtccactgaaggacaaatatgcccctcattttttgtggttgcagggatgctagggttatgtgggatcaaaaaactggccgctcgaaaggttttggttttgtttctttcaggaaccagcaggaagcccagagtgcaattaatgactttaatgggaagtggcttggaagtagacagatccgttgtaactgtgctgcaaaaggtgccacttccaacaatgacaaatcaggtttggatgccaaaggcgttgtagagccgacaaatggaacctctgaagaaggtcaagagaagactaatgatgatgctccagagaacaatcctcagtataccacggtttatgtgggcaatcttgccccagaggtaagtagtttttttccaatctaaagtttgtctattttccccttaa

SEQ ID NO: 45461 - DNA, 281 bp, Gossypium hirsutum
  Clone ID: LIB3583-023-P1-K1-G11
cccacgcgtacgcatatggaaacttaagctctgtatataatcatacattctagcttagctagggcgagtgatacagaatctgacgcggctacaactgtagtggtacatgatgcactatagtctttagtaacagatctaatgttgtttatggataaatttctgatatgtcgtgatcaagagactgttgatctcacaattcatgtgtttattgataaaggaattgaatagcatatcaggacttacattgctctagatcacatcaaaaattatatttatattga

SEQ ID NO: 45462 - DNA, 533 bp, Gossypium hirsutum
  unsure (1)..(533): unsure at all n locations
  Clone ID: LIB3583-023-P1-K1-G5
cccacgcgtccgtttttttcttttttctttggcttttttttgtcaaatttactccagttattgctaattggaggtcaagcgaaagaggccctaagtgaagtcgaaaagttctgtaacatttcgaacatgccttttccctttagattaagggcaagtcttctagagtacttttattctaatgactctgtcaggctctgtaattgttttgaggaggttttgaagagggatccgacatgctgccactcattggcaaggcttgtcagcatgcatcaaaaaggttgttatagattatcttgcatggatagaccagtgtttgctttatttggtgattatagtctggaatcccttgtggagatgattgctttgcatgtggaagctacatttccagagtctgaaacgtggagggagtttgcttcatgcttcctcaaactatatgaatacgaagaggatcgactgtctgtatgcctcgttgggaatgaaggtgaacaaaaagcanatcgctctatttattacagaaggattccaagcatatt

SEQ ID NO: 45463 - DNA, 535 bp, Gossypium hirsutum
  unsure (1)..(535): unsure at all n locations
  Clone ID: LIB3583-023-P1-K1-H11
acggccaatcagaggcagtacttcaaaattactgttgcaatacatacgtaccatcccatgcaagatttctctgactgctgctggttgctacatttgtccggctcctggatctaagggcttcgaagctctcgtctgctgctctgtttattgtcctctgccttcaaatgcagaatcatttcgcacattttctaatgtagaagaaaagcattgcttttcagatgagctggaacaaattatagcaaatgggagatcatattctaataataacctggtcaccgattcatcccaagcgcagtttttggacatgagatctcagtcagtactagatgaagcccggagattagatgttatcagtgaatcaacttacagaaacattatttcattgcaaagggaggaagtcagtcattttaagtctaaaactgatgaagttgcatctgggtgtgagtcaaagcagggaactgagcatattgctgcatttctgagtgaaccactcctcccagggcaaacatgctactntatgaaccgattcattatc

SEQ ID NO: 45464 - DNA, 533 bp, Gossypium hirsutum
  unsure (1)..(533): unsure at all n locations
  Clone ID: LIB3583-023-P1-K1-H3
aaggtgttatggcgaaggttaacgaagcagcggcgatggaaattgatgatccaaattcaaacatttctgaccagatcagccctaaattctcaatcaatgttttgcaacttcttaagtcttctcagatgcaacatggattacgacatggagattacactcgttaccggaggtattgcactgctcgtttgaggaggctgtataaatcattgaagtttacacatggccgtggtaaatacacccgaaaagccatttcggagtccacagtcactgaagtgaggtttcttcatgtggttctgtatatggcagagagagcttggagccatgccatggagaaacgacagcttccagatggtccaaatgcacgccagcgtatctatttgattggtagattacgcaaggcagtcaaatgggctgatctcttttcacatttgtgttctgtgaaaggagattctagaacatctttagaagctgaggcctatgcgtcctatatgaaagggaatntgttgtttgaacaagaccggaattgggacact

SEQ ID NO: 45465 - DNA, 529 bp, Gossypium hirsutum
  Clone ID: LIB3583-023-P1-K1-H8
cccacgcgtccgcccacgcgtccgcccacgcgtccggttggataagccaacagttacttactcgagaccaaaattggtgattcttcacatgaatatggcacttcatgtatacgaggacatcatgaggatgaccgagaatttgagtgagaagtatgtaattggcaatggtgcatcaagcacggtctataaatgtgtccttaagaattgcaagccagttgccatcaagagactctattcgcagtatccacagtgcttgaaggagttcgagacagaacttgaaacagtagggggtattaaacaccgaaatctggtctgtcttcaaggatattcactctccccttccgggaatcttctcttctatgattacatggaaaatggcagtctttgggatttcctccatgtttctaccaagaagaaaaagcttagttgggacatgcgtttaaggatagcacttggagcagcgcaagggttagcgtatctgcatcatgattgtagtcccagaatcatccacagggatgtcaagtcatct

SEQ ID NO: 45466 - DNA, 500 bp, Gossypium hirsutum
  Clone ID: LIB3583-037-P1-K1-A12
cccacgcgtccggacaggttgagcatgttcgttctgagagaaacttacttgctgaggttgatagccgatgcattgtaaagctgttctattcttttcaagattctgacttcttgtaccttattatggagtatttacctggtggtgatatcatgacactactgatgagggaagatattctttcagaagatgtagcacgtttctatgtagcagagagcattttggctattcattcgattcaccaacacaattatattcatagggacattaaaccagataaccttatactagataagaatgggcatttgaagctttcagattttggcttgtgtaaacccctagatgacaagtattcaacaattttgttggaagatgaaaatttaacttctcaggacaccaatgaggctgaagtccagtcaggatctgcaagacccccttggttgatgccaaaagaacaactacaacaatggaaacggaaccgccgtgcattggcatattcaact

SEQ ID NO: 45467 - DNA, 491 bp, Gossypium hirsutum
  Clone ID: LIB3583-037-P1-K1-A6
gcgcccacgcgtccggaaaccgggtggccttcaaagggagatgaagatgatgtcggagctacgccggataatgcggagaaatacaatgggaatttgatcaaattgatgtcgaaaaaaacggggactccgatgagaccgaattcggatcttaatatttatgtttttgctttgtttaatgagaatatgaaaccgggtccgacttcggagaggaattacgggttgtttaagcccgatgggacgccggcttattctcttggtataagtagcaccagcaatgtcgccggaagtaatacgaccacaggtggaactaatgggaaaccgttgtcgccgattccgacgccgccatctactccgacgagttcttccactggttatttgtctatttctcccgcaacgggaagatacgagttcgtggggactgtgctgcttgcttctttgatattaactaaaatgttgttatggtgacggattccaagtcttctttttttatc

SEQ ID NO: 45468 - DNA, 433 bp, Gossypium hirsutum
  Clone ID: LIB3583-037-P1-K1-A7
acgcgtacgaagaaatcccagatgggtttgcatgcattaaacttctgttaaggcttataaaatcattttcggggttgcttcttcttatttaagcttcgtgattgtcgtagtttgtttggggggaagttttatgtaacggttaaagattaaaacatacaagtatcagtttttttccttgggtggtatgttttgaggtttaaaaattaaaaaggtttctgagctagtttttgtttgtttcctccagaattaatagttttggtttttagtgttattccagagaaaagaagagtttttgaaggttgtatatatataatatattatatataaaatggcatcagcgagtaactggctttggttctcactgtctccaatggagatgtttagggcatcatctgagcctcaggtcctgtcatatgaaagaacttcctgctgc

SEQ ID NO: 45469 - DNA, 386 bp, Gossypium hirsutum
  Clone ID: LIB3583-037-P1-K1-B7
ccgtgcaaggagaggccatatgctgtgagcacgcctaaaggagtcaggtcatacccggaccccagaatcatgcactggtgaaacaagcacgaaggccagggttagaatggatagcatccaagacacatgccaatgctggcattattcagattgctggacgtgtcttcattatgcgaggcttgcccgcggacttgctggccaactgctctcgcatattcccggaggatgccacgcggttgaagcataacatacacgcagtgtgggcttttaacctaaggcaaggctcgcaacagttgatcaaacaactaatctatgcgtacgtacgtacgtaatcggattaacaataaaagccatataccaatatctggcttctgggttactatata

SEQ ID NO: 45470 - DNA, 261 bp, Gossypium hirsutum
  Clone ID: LIB3583-037-P1-K1-C12
attttgtttgcttccttcctttctgggagagacggcgagaacggcgtcgtctagaacgggaaacttcatcaaataaatttcaatcgtcctgaagtatatttgagattattctccctttgaaactagatttgtaccagtggatggttgccattgtaagtgttgccgccaccgagtcccactaatattttggaagttcacttctttttcagaggaatctgtaagcataacaatgttttgagataaggatagaaattatcatct

SEQ ID NO: 45471 - DNA, 270 bp, Gossypium hirsutum
  unsure (1)..(270): unsure at all n locations
  Clone ID: LIB3583-037-P1-K1-D10
gtttagaatctgaaaattgggtagtttattttaggccatagtgggccattgtaacatggacttggactttgttttattattgggcttgtatggactgtttattagtttttgtttttgtacaggcccgggcaaaaatgggccattacaatactgattgtcgaattgtcgaattagccaaaattttaaaaagattaacagctcanaaaaaaaaaaaaataaaaaaaaaattaaaaacaaaaaaaaaaaaaaaaaaggggggtggttctaaaa

SEQ ID NO: 45472 - DNA, 500 bp, Gossypium hirsutum
  Clone ID: LIB3583-037-P1-K1-D8
cggacgcgtgggttctgtttaattctgtcctttagattctgaaaggcttccttctttcttcctaccatgcttggcagtccaagatacttttgtatattagtcgagcaccttatccccaattcagtcgagattctaactttatctgcttctgtcgtatttgaactaaaaaaattgaggacttgttaaagttcacacattgaccagaactaatctcatatttcttcaaaatctcctttaagattcttattctgtctttagtcacttcacgaaacaatatgcaatcgtctgcaactaataagtgtgaaattgtcggacctcttctgttggcctttactccttttatcagcccttcccgtgttgcgattctgatcaaagacgaaagtccttcgctgcaaataaaataaaggaaaggactaagcggaataccttgttgaagtcctctgctaggtttaaaaactttgcctcttttaccatttatggaaactacataagatactgta

SEQ ID NO: 45473 - DNA, 503 bp, Gossypium hirsutum
  Clone ID: LIB3583-037-P1-K1-E1
gaacatccattgagaaggaaagtaccgttggaggtttgctgtgtttttatgattgttcaaaacttgaacttgttcaaagagttgggatatctccttcttgcagtgtggtgcagtgtgcttggcacccaagattaaatcagatatttgctacatcaggagacaaaagccaaggagggactcatgtactatatgatccaacacttagtgagagaggagctcttgtatgtgttgcacgtgcacctaggaagaaatctgttgatgattttgaggcaccgcttgtgattcacaatcctcatgcactaccattatttagagaccaaccaagccgtaagcgtcaacgggagaagatactgaaggatcctgtcaagtcacataaacctgaacttccaataacaggaccaggacatggtggtagggttggttcaaccaagggaagtttgttgacccagtaccttcttaagcaagggggaatgatcaaagaaacatggatggaagaagatcct

SEQ ID NO: 45474 - DNA, 501 bp, Gossypium hirsutum
  Clone ID: LIB3583-037-P1-K1-E12
attttcctaaaacaaaaattttatcccctatcactagggtttggctcaacatgcagccgcccaaaccatcatttatttgatggccaagggagcaccaatggtgatcggattttgtcaacagaagccccgctcatggagatctggtaagtgcactccttctccctttttttttaaaaaaaaaaaaacttaaaatcctatgctattttaccaaaagcaaaataaagttcaaagaaaacatccactttagcccgaatcagtctcgagatctcccttcaacttcgatgtcaacgaagcaaagagaagaaatccatggcatttttgcacggtaacacttcttttcccttgtttcctttttttctattttttttaaaaaaatgcagtgatgaagcacttccagaaaataaatcaagaaggaaaaaaaactagaaaagctaaaatcaccttaaaatgttgactaatttctctctatttgatttgcctgtgtatgcgtatagtccgcgt

SEQ ID NO: 45475 - DNA, 509 bp, Gossypium hirsutum
  Clone ID: LIB3583-037-P1-K1-E6
gcgccacttttacttaaatgtcaaacccattactgatacattgagagtgttattatggaagaccatctgcaacaacggtacttctgtgaacatccccggctccttaaccacctgagcagtttaagcaaagaaacttgttgctcggcttgtggggatccattgttccctacccaaacctctaagcctccgccgccaccgccgccaccgccgccaccgccgccaccgtcgccaccgcctccgcctccgcctccaccactgccatcatttgctccttcccccggtggtgatgcgtgggattatttttttcctccacctcctccccctctgccgtcttttaatcctccctcctctagttccgagaaacgtgatgagtcgtatcccctgcggtcttctgatcgttccacctttagttgtgaggaatgcgatcagtttcatctccatggaagatgtgcaagggcgcctctagaattttcccatcaccctcttcattgggaacacccttttcttgt

SEQ ID NO: 45476 - DNA, 482 bp, Gossypium hirsutum
  Clone ID: LIB3583-037-P1-K1-E7
aagagactatgtcgagccattaatgaggaagggcattttctgagaagaataacctgcaactactactaaacctgctttatttcacaagtactgtttgttcctacaaaaacgagccatgaatgagtttggaactggaaggtcagtgccatggaacatatacccaagttcagatccgactccatctcaaccagtagttgataaggaaactccattgaaaaacttggggacatccatgaatgccatttcttttggctttgttgctactgccatcttgatatcaatgtttgttatcatggccatctttgaacacctttttcagccaaatcctgctttttcttcccccaatcaagacggtgctgtaggatctggtgcagctgaaaaactcgggaatccacaaagagtatcgacatcatatgcaactgatttgtcagtagtgatgccaggagaacaacatcctacctatatagctcaacttgctcccc

SEQ ID NO: 45477 - DNA, 496 bp, Gossypium hirsutum
  Clone ID: LIB3583-037-P1-K1-F4
gattatttgagcacttctcagtgcctaatgttcttggatgatctctgaaggtgtggcaaatatattggagaggcttctccgttctgaaaataaggaggatgctcttttggctttccaagttgcattcgatcttgtggagaatgagcaccaggcttttctgttaaatgtaagagatcgcctttctgctcccaaatctctaccttcagaaccagtacagccaggatccaccaaccctgctccagctgaaaatgaaaattctactgcttcagaggatgttcagatgacagatgggtcttctgctattactacaaatgttcatgaggcagatcctaaggaagttatttatgctgagaggctgatgaaagtcaaaggaattttgtctggggagacctcgatacagttgactctacaattcttgtacagtcataacaaatcggatctattaattttgaagacaataaagcagtctgttgaaatgaggaatagtgtttgtcac

SEQ ID NO: 45478 - DNA, 501 bp, Gossypium hirsutum
  Clone ID: LIB3583-037-P1-K1-F5
gggaaagacaatatatacatgttaaactacatttacaattcggattggatcttttttactttaaacaagaacattttggttatatttaattttcgatatgtttttatttttgatatgtttcatttaaaactattttaatcttttcatatattattaaactattattattttcgatatctttaatttatgttatatttaattttggtcttcaaacaatgttttatattacttatattatttgattaaaaattataattaacactacaaaaattctgctaagggtattctagtcattttagttttttttcttatactattacaacataagaatactattatagttctattccattccattcaaccaaacaattaaattacttattacagctctattcaattacaactttatttcattatagtgaaccaaacgtaccctctgtattttattaatcttgggtttgtatatatgcctagaaaaatgataaaatcttttcaactaaa

SEQ ID NO: 45479 - DNA, 505 bp, Gossypium hirsutum
  Clone ID: LIB3583-037-P1-K1-G3
aattatagcagctcctggagaagatcaatcgtctggtaaaattaaatggttctcttctcaatcttaaaccttcggttcttcttcaacaccttccacgatcgacttcagcgattgtaatatccagaccattatttctctgggcaagggaatctccttcaatttccacatattttaaccccagattctttcccatttcaagtccctgtagacatgcaagggcttcagctgcaaaccctgaaggtacattttcgtttattgtggttgttgaattcatgacatccccattacagtctctgatgatgattcctgagcatgatctgtagtttttagtatccactgcagcatcgaaattgattttgcagaacccttgctccggaggcttccacggctcttgagacattcttgatgtaggatatatctgctttatggtgttcagctcttggagatactctaaaataaatcttgctgtctctgctctagatctccgtcgtccttcatagatcca

SEQ ID NO: 45480 - DNA, 271 bp, Gossypium hirsutum
  Clone ID: LIB3583-037-P1-K1-G7
cccacgcgtccgcggacgcgtgggtgaggctaagagtgaacgattggtacaaccttgtctctggaatggtatcaagcgaccgtgttacctattcgcaagaaaattttaccccgaaaccgtagataaattgaggagcgtcatcaatttatctaccgtttcggggtagatatatcatgcgaatcgcttgctcggtcgcttgaatcagatccagagacaagggagaacgaatcgtacacgcttagcctgacccacgcgtctgcggacgcgtggt

SEQ ID NO: 45481 - DNA, 241 bp, Gossypium hirsutum
  Clone ID: LIB3583-037-P1-K1-H7
cacataccttccatggcaaacttctacatcctcatatttacagccgctcccgcatcaaaccgtgtgcgggtttcaaaacaacgggcggcgaacccaaacaaaccaacagggtaccgacactacctggcatcagggcaagaccacatatagctacaatgctacctcccaacctgttattactacaaaaacaaacaacactgacaccatcacatatgatatcgcccccactacctgaacatgc

SEQ ID NO: 45482 - DNA, 317 bp, Gossypium hirsutum
  unsure (1)..(317): unsure at all n locations
  Clone ID: LIB3583-037-P1-K1-H8
cacaaaccatcccatggcaaacttcaacatccttttatcctcattcgctccaccattcaacccggggggggtttcaatataagggaccgcgaaccccaacnatacaaactggtaccgacactactctcgatcaggtcaaaaccacatatgcctacaatgctaccattcaaactgtcactgcgtacaaaaacaaacagcactaacagcaccacatctgatatcgaccccactacctcaacacgccctactactagctacacaaactaaggccaaattgcccctaccaaggcttgacacaagcatcagacaacagctaa

SEQ ID NO: 45483 - DNA, 311 bp, Gossypium hirsutum
  Clone ID: LIB3583-037-P1-K1-H9
cacaaaattaccatggcatactctcccatcctcttatcctctttcgctcccgctttcaaactggggagggcctctatataccggaccacgaaccccaactaagcaaactggtaccagacactatcgtccatcatgtgaaaaccacatatagctacaatgctacctaccaaactgtcactgctacatgaacaaacaggactgacatcagcacaaattatatcgcacccattacctcaacttgtgatactactagctacacaaactaaggacagattgcccttgccaaggcttgaaacaagcattaggacaac

SEQ ID NO: 45484 - DNA, 462 bp, Gossypium hirsutum
  unsure (1)..(462): unsure at all n locations
  Clone ID: LIB3583-038-P1-K1-A10
cccacgcgtccgcccacgcgtccggaatttaatttctttttcgagctttatcgacatttttcttcatttttagctctctgggtttttgttcttttgattgttttataacagtttcttcttaaaggatatgtgatatacgaaatccaggagttgaatccaggtgttcatttattcatacactattctaatttatcttgtttttatcacaatgtttcatatttggtctataaatttcaagaaacttggtttggcagataacagtttacttcatggagcttgctaccccacatacagaagaagtaataaaacttgttgataaagttggcgattttgagtggttaattcaaaaatctccattatcttagacttgcaaagtagaacagaacactaactgttttggtcccttttaatagaaactgaactcttcaggatntttgcattattatttagtgtgaacattac

SEQ ID NO: 45485 - DNA, 482 bp, Gossypium hirsutum
  Clone ID: LIB3583-038-P1-K1-A8
cccacgcgtccgaaattctatcgtctttcaaaaaacacatttcctcttctttgcatctttagacattgtaatagagtatactggctactcctttccagcaatgtagatgatcccattgaagcgccataccagatatctcctaaatctgagttcatcagagagaagaaaggacattcattttggcaatacagctccggacttagacagaaatgacctttttctaccgattcaaatatcttctttggtcattgatgattgtgagttcaaccttcatcggtacctcttcgatccaataggacgggctagtcagattgtaccttcgagttgcaagggtgtgcgctgcttcatttgtctttcgaggcgtaaactcaaaagataagttaccgaaactgaatcttttgctttggatttcattaataatgttgtcaatcgtcgatctatccgctgattctgatttaagctttttaatgactgtaagagca

SEQ ID NO: 45486 - DNA, 411 bp, Gossypium hirsutum
  Clone ID: LIB3583-038-P1-K1-B1
gctgagccctacaagaaactccggtaccagcagtctccagaagacacacccgatgtcacacctctgttgccagtttcaataaagaaactctataacagcaacctgtccaagctcttatcaaaggcgcacacgactactcatggctccggagcacttgcatggggcaataggtattacacgggtgaggcatatgaagggaaaaggaagccgaaaactttgtctgcagctgcggagtgaatccttgtgggaagaatgaacttcttgcagcacttcatccagaattctatgcacagtctctgaattgaaaaggagcttaaatactgtgaattgtgcctgtaatgaggcacgaaattcccttaaactgactgatctcatgaagaatagtctctatctaggaaatacattgaacca

SEQ ID NO: 45487 - DNA, 548 bp, Gossypium hirsutum
  Clone ID: LIB3583-038-P1-K1-B10
gagggacttcctggttgactgctgtgaaaagggcttttagatctccgactaaagacggtcatgataagagaagtaacagaagaaaggatgaacctgaccaccaagatgaggatgaagacaagaagagagagaagcgaaggtggatcttcaggaaaactacaattcaagaaccggtgattcatcagcaaaaaacaccagtgaaggctacaggtcgtaatggtgcaggtgcagcatcagatggtgcaaccgcaacggccgcagagcaaaggtatgatattcctatggcagcaaccgagggtgcagcagtggtacaagtggctcgcccaactagaccttcaaattatgctagagagcaccaccttgctgccattgttattcagaccacttttagaggctacctggcaaggagagctcttcgtgcactgaaaggattagtgaaattgcaagctttggtaagaggtcacaatgtgagaaagcaagccaagatgacactcaggtgcatgcaagctctggttagagtgcaggctcgggttcttgatcaaagagtg

SEQ ID NO: 45488 - DNA, 543 bp, Gossypium hirsutum
  Clone ID: LIB3583-038-P1-K1-B12
cccacgcgtccggcatggtttcttttgtgacatcactggttttcttggttgagcccatccagaatcatgcagggtgtgggtaaagcatacaacgagtttaagcaaggagaaccagccattgaacgcttgtttgatttgaccaagatgaagtccaaggtcattgagaaaccagatgcaatcgatttaggccatgtcaagggggaggtgaaattctgtgatgtctcatttaaatatgctgacaacatgccacttgttttggatgggttgaaccttactgtaagggctggggagacaatagctcttgttggaccatctggtggagggaaaacaacccttgtaaaattgcttcttcgcctatatgaaccttcatcaggatccatacttattgataatcacaacataaataacatcggactggaaagtttgagaagacatgttggtcttgtttctcaagatacaatgcttttacctgggacagttgctgaaaacattggatatagggatctaatgtcaaacattgacatggagaaagttgagcttgca

SEQ ID NO: 45489 - DNA, 510 bp, Gossypium hirsutum
  unsure (1)..(510): unsure at all n locations
  Clone ID: LIB3583-038-P1-K1-B3
cccacgcgtccgcccacgcgttcgaaaaaaaaaaaacataaactctcatcactgttatagctgttcccttgccccgacaaccttaaatccaaagtcttaaaattttcattgatgtgggtcttgtttttcatgtttttttgatggatactttgtttaggttagtaagtcttcaatcatctgatcaatctttgaattctagtagaacatcaagcagttctcgatcttcaaaacaaaaccatcgttaccatcatcatcatcaagaagaagaagataacgaagaatgcttcaacgttttcatggatgaagaagacttttcttcgtcttcttctaggaattattacccttattatccttaccagcaacaaaatcaaccccatacccattctccctccgtcggcagcagcggacgtggtggtagtggaggagtaacagccgttacgactcccactaacacttncacccccaccactactcatgcttttgaatcttctgattattcaactgctgctt

SEQ ID NO: 45490 - DNA, 520 bp, Gossypium hirsutum
  Clone ID: LIB3583-038-P1-K1-D11
cccacgcgtccgcccacgcgtccgctctggcataaaatcagcaagaacgagtacaggcgttgtgctgtgattgaatcttatgacagtatcaagcacatgatgcttgaaatccttaatgccaggtctgaggagtattccgtttttgctgttctatttcatgaaattgatcattctattgagattgagaagtttaccaagacattcaaaatgacttctctaccccagattcatttgaagttgatacaatttgttgagatattgaccaagcccaaaaaagatgcaagccaggtggtgtatattttgcaggccctgtatgagattgctgttcgtgattttttcaaagaccagaggaccattgaacaacttaaggaggatggattggcacctcgtgaccctgctgccatggcaggattgctgtttgaaaaagttgtaaagtggcttaccccaatgatgagaagttctatcggcaaattaggcgcttgcatacaattcttactttcaaagattccatgcagaatat

SEQ ID NO: 45491 - DNA, 430 bp, Gossypium hirsutum
  unsure (1)..(430): unsure at all n locations
  Clone ID: LIB3583-038-P1-K1-D3
cccacgcgtccgctgggcttggaaaactcagaatgagaggctaagatatgtattacgagagcaaaggagcaacacanaccatttgctaaagagatggatcaaagcctgtattgatgaacaaagagagagtggacagcacaagaaagatgactgagccgttaaaaagggaaggaagagtatggaagactgaagcaagaagcgagtatgactaacaagatgaacaggagagagagctaattggcacagtcactgagagaaaatcttatatggtcggcccagagatgaaagaaagaacatacgtcaagagaaacgcagaaaagaggtgtagcactgaacatagagctaggtctgtttacctgcaacccttgctctgcaactttggaacattttgttttgcctgctgggactgaagggagcagcattaaggtat

SEQ ID NO: 45492 - DNA, 354 bp, Gossypium hirsutum
  Clone ID: LIB3583-038-P1-K1-D7
cccacgcgtacgagcactcgtatgttccaccataacctatatatagtgacccatattttagggggaagacttaagctccaaagttaatacaaaaactttatcttgctctctcgtcaagcataacctctaggatcgtcagtcaacatctggaatggatcattcgcactcctgaccgtaaattcacgctacatgtgacctcctcactacagaggaacttgaagcggcgtctttgctatatggatcctgaggattgttgcagcatcttctcacttatacgtgcaatctctgtacgatctataagactgtgccctaacattccacacccaaggcatatagtctgcagcttttcatact

SEQ ID NO: 45493 - DNA, 532 bp, Gossypium hirsutum
  Clone ID: LIB3583-038-P1-K1-E1
gtgaggtaataaagttcttagtgagtcagaagcttatcgacaggaatcaacttactgatgatggggaactccaagcctcgaaagaagtcatggatgtgctccgaatttcgagtttagatgaggagttgtttttgaaacttctacgagatccaaactcgttggtgaaatatgttcgaaacatgccggattctcagttaaaagatgaagaatctaagcctcgtgctgtgtccaagttttctgacaacattcatgttggtttaagacaattaaatgagcctgttaatacaaaacaacgtaatttctttagaagaaagtcaaagtctcaagatggcaataacatttctgaagcttctagtaaaatcgtaattttgaagcctgggccgataacttcagaaactggaagcagctttggatcatcaccggaatctcggtacaccataagacataaagagccgaatgagaaagttggttcccactattttctttctgaaatcaaaagaaagtggaaacatgccatgggaagggagcaaca

SEQ ID NO: 45494 - DNA, 542 bp, Gossypium hirsutum
  unsure (1)..(542): unsure at all n locations
  Clone ID: LIB3583-038-P1-K1-E2
cccacgcgtccgaattggttttcggctaagactcttaagatgatcatattaagaagtttaaagtgttgaaaatgtttatccttatccttatccttacctcttgagagagtttgggagttattgaaaaattggtatatggaggttgttatatgataaataccaaggacaatcaatgggatgatttcaacttttaaataggaatttaaagcttatcaaaactttattggatggactcttgtatcaaccttgttgtgttcttgtagttatcttttgatactctnttacgtattatttggagagatttattgattgtattgtgagctatttgggtgagtgatttgtgacaattagggttggtgttgatgctgcaattacttctttgtgtaaaggtatattatgtttaagccaataggtgatccagatgattgttgaataaaatcattcactaagtgaggctccacagagtaggattggtaaatatgaattgcattaacaaatatcatgtgttaattntctccttattttactccttgcattacttt

SEQ ID NO: 45495 - DNA, 545 bp, Gossypium hirsutum
  unsure (1)..(545): unsure at all n locations
  Clone ID: LIB3583-038-P1-K1-F10
attggggtcttagttcggagttgctccgttcagaaattgatgctgctaatatgcanattgctggggggaagtatgatgaggctattaatactttgaaaggtatagttcaacagacagacaaagatagtgagaaccgagctctggtgtttatatcgatgggaaaggctctttgcaatcaagaaagatttgcagactcaaagaggtgtttggagattgcttgtggaattcttgacaagaaagagactgtttctccaattgaagttgccgaagcatactcagagatatcaatgcaatatgagactatgaacgagtttgagattgcaatttcgttgttaaagagatcattggctttactagagcagcaacctcaagagcagcactctgagggaagtgtttctgctagaatagggtggttactccttttgaaaggtgaggtgccacaatcaattccttacttggagagtgcagcagagatattgaaagagagctttggttccaagcattttttgggtcggctatatctataataatttgggagcagcata

SEQ ID NO: 45496 - DNA, 544 bp, Gossypium hirsutum
  Clone ID: LIB3583-038-P1-K1-F11
cccacgcgtccggccgcttccgccatctccaccccctttctctttaaaagaaaatctcagcatccctgatctccaaaaaacaaaacaaaaaaaaaaaacactccgggaaagtatattatatttagtctcgacggtattagttgtttggaaaaatttgttgcttgtttgagcttttttttatggtataaagttagttggaagtaaggttgtataaggtgatattgtcttcctgaaagaattttgatccctttcttgtaaaaggatatggcgcttgttgctactatgcaattgtctaatgaactgaaagttcacgatagtcatggatgcagtcgccagaacattggtgttgtagaaaaaggccgattacatttagttcgtaccaatctttcctcgcatgctatgcgacaggatgcttggagtctacatcttttgggcagtgcttgtaggcccataagacctgtatattccaggtctaatgtcattctctgccgatctgttctgattcctactgggggaaatgaggttcctatactaaaatctgcga

SEQ ID NO: 45497 - DNA, 222 bp, Gossypium hirsutum
  Clone ID: LIB3583-038-P1-K1-F2
cggacgcgtgggcggacgcgtggggatttattttcatgcaatagataaagaatgatgaaatggaaacgaaaatcaaggaagaacacgatctaaaatcaccttaaaactaatttcaaattgattttttagtatccgtgtgtatttctctgctattttcttcgtgaaaagagggagaaaagaaaaagatcccatttacatcattttccttcagttttatagccg

SEQ ID NO: 45498 - DNA, 321 bp, Gossypium hirsutum
  Clone ID: LIB3583-038-P1-K1-F9
cccacgcgtccgtggtaatagatttataagagggaacaacacgatctttctaactcagacaagaagcgatgccttattcgacgcagttatgtacgactatattcgattagaagctcctgcagtttaaaagattagctagtcatgtacaaatttaggaagttggtttatattctttctcattgtaatatgggtattggtcattgcttgtgaaattcgtttcaagcctagaggagcatgcaagatagtcaaatgagaaagagaaaaatatttgttttgattttaaaaaaaccaaaacgggcggttttacgaggcttgccctca

SEQ ID NO: 45499 - DNA, 523 bp, Gossypium hirsutum
  Clone ID: LIB3583-038-P1-K1-G7
cccacgcgtacgagtgctcctttgtatcacattctcattttcgatccccaggttccctattgaccgagctcctcggagattcaaatcaagtcacctctttctccggactcagaaatgccgatatgactacctctctgtcccctcaagcaattcccctttgatccttctgaatgactagttcgaccgctgtcgaggtttcttccacccagaagtcggcgattcacttcttccccatgctgccatcgcatgtgccgcttcattggctccccgaggctctgatagccaatggcgttgaagcggagactatccagtgtgggcgtccaaaggagcagaagttctggatctcgattgcctatcgtgattcttttttttcttctcaattctgacgctacttgttttctttgtcggtcaagggctttacatttcaattcgtcgatgcattgttagtcaggatctttcagttttgaactcggttattgtgaaaaagggtgaaaatgatcttactggactgactgacactgag

SEQ ID NO: 45500 - DNA, 495 bp, Gossypium hirsutum
  unsure (1)..(495): unsure at all n locations
  Clone ID: LIB3583-039-P1-K1-A4
catttttaattttcaattagaataatgcatgtgttttttttctttgatttagccaaacattgtatgtcaaaacatgtctattgattaggataaattatgactgctatgaaattttagtgatttgtgtgatttgtttcaccctgattatctgacttatgttcttaatcatcactcagaagataagtgtaaaattggaaagacaacttcctgataatgttcaaccgataataaatttacatatcagcagaatacataaggtattgatatttgttcttttttgagtatgctttggctatggtactgatttttgttttcttgataggagtttgcgcagctacagcagattgaaaaattgtcggcatgagcattaaccacagtcttcttggatgcagcatcttcttccctcaggttgctttgcctttttagttttcgtttatcgtttccagctctttctttntaaccctacttatgtatcattagaggttcattgggttc

SEQ ID NO: 45501 - DNA, 412 bp, Gossypium hirsutum
  Clone ID: LIB3583-039-P1-K1-A6
cgagttcttaaaatcatgcccattttcacgacaaaaccctaatttccttttatttgcttccatttgctccctatgtccgccgatgcagcacgatgaccctagaaacggtgagtcgactcaccgcagctccaagaaacccaaaatttcatctcagttcattactgagtcggatatccgagacgagttctctcaccaccacccacgtgtcgcacgcatcaacaacgggagtttcggtagctgtcccggttcggttcttgctgcccaacgccattggcagctacagttcctccgtcaacctgatgccttttactttaattcccttcgtgacggaataacggcttcgcggaaaattataaaggacctcatcaacgccgaccacgtcgacgaggtctccctcgtcgataacgccaca

SEQ ID NO: 45502 - DNA, 198 bp, Gossypium hirsutum
  Clone ID: LIB3583-039-P1-K1-C11
ctttgaatctgttgcaagatcatgtgggtgcttgaaacctgtggacgacagtatcgattctggttgggtttctgacaacgcacactagccagttaaaaactcttttcatgccataatgtataggacgaatttagagtattgtaactgacagtctactatgatgcctaatcgatacagcataatatcatctgttatagg

SEQ ID NO: 45503 - DNA, 493 bp, Gossypium hirsutum
  unsure (1)..(493): unsure at all n locations
  Clone ID: LIB3583-039-P1-K1-C9
cgctatcttttctctattactactatcctcgatgctcatcgaatcgttgatgtgaaaaaccaacgagtaccatggctgccggggaagaatcctccacttctcgctctctccaagagactcccacttgggccgtcgctaccgtttgcttcgtcttcatctccctttccattatcatcgaatacttgattcatcgcatctcaaattggctcgagcgacgtaggaaaattgcactctttgatgccgtcgagaagcttaaatccgtgctcatggtgctgggtttcatgtcacttatattaacagtgagtcggagcttcatctccaaaatttgtatacccaatgaagttgcaaattctatgcttccatgccggaaaacccttgattctattagaactacccaagacttgggatacgaccaaatatggagcgtccatggattgcatgaaagaatatnggatgatgaaaatgtttctccagagtactgtgattccaaggg

SEQ ID NO: 45504 - DNA, 495 bp, Gossypium hirsutum
  Clone ID: LIB3583-039-P1-K1-D11
cggacgcgtgggcaaaactttagctgtcacccaatggcaaacctggtcatgggcttgacattctgtcagctttggtattccaatctcactgaagaggttaaactgagaaattcagatcaggattacctccctcagcaatcagacgcttcaggatcaaatatgggcaacgaaattgtttactcagagggaaattatgcagcttatactcatgatgctgtttcttctcaatgtggttcagagacatctgtcatgaatgataaaagagaaagtctggtggctggtagcaaccaacaaagagtcgttcatgtgcagaacaatgttaacttgcagagagctgcacctctcgtacaagagattgagccattaggctccaatcaaaactcttctgaaaatgaagttggtttctatgatgatagtggctatacatgtgatccttcagtcttctctgccttagagggtttagagtcatggttgatgcctttaaagttgccatat

SEQ ID NO: 45505 - DNA, 493 bp, Gossypium hirsutum
  Clone ID: LIB3583-039-P1-K1-D12
ctgtcatgaaatatggggagagaatgtgcaaagagcttctgggtgtatgcgattcttgcttcaatgttgattttgttaaagacaatcactgcccttcttgccatacgacctatattgcctctaagagtgcattaatattttctgaacatgtggctcagtgtgcacagaaaatgcaaatgggtgctgaacttgctttggatggttcagtgttttctcctatgagaatcagattgattaaacttcaattagctttgcttgaagtttctattccattcgaagctcttcaatccacttggactgatgactaccgaaattcttggggtatgaagctggactcttcaacaacagctgaagagcttcttcaggtttgtgtgccaggcgcatttattgtgttaatcatctcttaactctaaaagttccctcactgttattggttcataaccaagaaagaagagtacccgtcatctaactgttgctctgcatggcattactt

SEQ ID NO: 45506 - DNA, 464 bp, Gossypium hirsutum
  Clone ID: LIB3583-039-P1-K1-E12
cccacgcgtccgcccacgcgtccgcccacgcgtccggaaaggagtcctaaatcaaaatttcaagataaaggatttaggagatttacggtactttcttgggattgagattttaaggtctcaagaggggattttgttaaatcagctgaaatatgcacaagaccttatcaagatactggtttaagtaaagcaaaagttgcgcttacaccacttgaacagaatcagaaactaacaacagcagagtttgataaagtagttcaacagcatcaaaacgacaagttgttagaagataaagcaatttatcagagactcattggaaggctaatctacttgacccatacaaggccagatatcaccttcgctgttactcatcttagtcggttcatgcaaagtccaaaacagtcacatatggaagcagcgttaagagttgtaaggtatatacagaaagagccagggctaggaatttt

SEQ ID NO: 45507 - DNA, 496 bp, Gossypium hirsutum
  Clone ID: LIB3583-039-P1-K1-E6
ggagagccaaaccaaacggggaaaagaaaaccctaagggtttgctcacattcaatcgccactttcaacatcaaaggtgatgaagggcgccgcttgatttccttctccacacaacgccgattcttcctcaaatcacagccaacagacgtggccctctaatgatgatcttcggcctcaggatctcttcttatacttcaagtttgacgaagcaaagtgagatcaatgaccgattcaaaagtgagattccttattcttttcttcctattaattcctagttcaataatgaaacataagaatgaaaacattcagctgaaatttacaggcaaatattacgcagaaaatcacctttaaaaaaaaggacttgtgaaatactctatttttttatatctagtttgcgtagcctcttcgtgaaaaaatccccccttttttttgatagatttcaaaataaaattgaaaaataaagaaaaatggaaacttaaaaactaaaaaaaaaagaa

SEQ ID NO: 45508 - DNA, 480 bp, Gossypium hirsutum
  unsure (1)..(480): unsure at all n locations
  Clone ID: LIB3583-039-P1-K1-G1
caactaacacattccatccatctcttctggtgtcctttgtttataacagtgaagtggcttcacatgtaatcattcatgcaatgtcacaagttgttggctagctgtttatccctcttcttttcacttttgattatttagattatatgcctactctntaagttgtccaacttttgtaatgaccaactagcatataatgctgttacgttaatttggataggatgggttgtcagcaccctccttgctgctgctgcagttggttcatttactggaggagcactggcagataagtttggccggacaaggacttttcaattagatgccattccactaatcattggagcagttcttacgttcgtgtcatttcattaactattagcttcttaactctcacaactttgctgcaaactaatatttcaaaatgacgtgaatgttcagtgctatagcacagaatgtccagactatgataattggccgcttact

SEQ ID NO: 45509 - DNA, 296 bp, Gossypium hirsutum
  Clone ID: LIB3583-039-P1-K1-G3
accaaaggtccaaaactacatgaggttgagaaggttgcctcagatccagggaactctttaattgatatttgaaagaaaaaagtactatgtagagttttcctgtgattcttttgggggggggatatcacctttctttgagttctttctcatgaccctttttattttttttcctctctctctctcctagtctttctttttgtgtttgaggataaggatttggtttaaatttgatgtatctgggttctcttaaagtttttttttttttttgaaaatattataaaaatatgttatatgac

SEQ ID NO: 45510 - DNA, 394 bp, Gossypium hirsutum
  Clone ID: LIB3583-039-P1-K1-G6
gttttcaatgatgcaattgaagcattgaggatctcatacaagaagatgaatcctttttgtgtaccatttgcaactacaaatatgggttctgcaatgcttgcaatggatttgggttggatgggtcctaactattcaatatccactgcatgtgcaacaagcaacttttgcatattaaatgcggcaaaccacatcattagcggtgaagctgatatgatgctttgtggtggctccgatgctgcaattataccgattggtctctctctcatttttctatttgacataatttattatctttttagttggtacaaacaagattttgtgattttttttttattcaggattgggaggatttgtggcatgcagagcactctctcagaggaacaacgaccctacc

SEQ ID NO: 45511 - DNA, 459 bp, Gossypium hirsutum
  Clone ID: LIB3583-040-P1-K1-B11
atttgttgttcagtcatcgattttgggtagatatcctgtgtgtgtccataatgaccgcgagaaaagcataccggtgggaggtactcatattcgattctttgcagtactccattgattagaacttgagatgtaagggcctgttatgagaagaaaagttagcaggagacatttgcgaagattaagtgaaacggagcgttttggcgttttgtttttaacagaatggtccacgtcattctatttgtttgtttttctttatattgaatgctttgcatgtttatacggttatgctgaatatacatgataatttttcctaatatctgaattctcctaaattctcctctcttttttaaattctttttcttcttcctttactcttaatttcgttccgtaacaaaggtatcaaagctatgacgatccctttcgatggctggcgaagacgtatcgacgaggttgcaaaaa

SEQ ID NO: 45512 - DNA, 462 bp, Gossypium hirsutum
  Clone ID: LIB3583-040-P1-K1-B6
cccacgcgtccggcagtattggattcttgaaacaaaaccgtggtatttcagcttcaatgagttcttacggccaccaaaaattaaccgatctgggttctatatttgggtctagccagaatgaaccgactggttcaaaacttggaacggcaccgtgaacgggtgggggtagaagaagaagcccaagtaagggggccaggtcaacttcaaggacaacttttggcaagccaacattcgaacaaccacctcttttggatttactttgagaggtgagcgacacaaagattgagaatatatcaatgtgtgtttgatacaccagctgtcataccaagctttgtgaggttctgctaaaagctattgggttgaaagtgaaaattagtcatatcggaacgcgagccgccatgtggggatatgtgatatctatcatagctctgtgacgagcgcgtgtgtgactcttttttgcac

SEQ ID NO: 45513 - DNA, 450 bp, Gossypium hirsutum
  Clone ID: LIB3583-040-P1-K1-B9
cggacgcgtgggtttgcataaatctcgatgcttttctgctggatttgaattatcatgaataaatgggcgtttggctcaaacaatcccaagtccttcaatgcatatccaaggggtgactttgatatagaatcaggaactatcaaaagaaccagaagtagaaaatcatcaatttaccctgttagaatggttaagtcctgggctaatcggcttcattactattacaagctacatccactatttgttttctctatttccttggcattcggggtcacgatcctcatagttttatctctatatgagcaacactatagggtgctgcgtaattatatgaaacttgatgatggctttggcagttattatccctttgctaagcttaagaatcttgtaatggttgctgggcattcggtttatacaagcagtagttgtgaaaaagctgacaaggaggattct

SEQ ID NO: 45514 - DNA, 459 bp, Gossypium hirsutum
  Clone ID: LIB3583-040-P1-K1-C10
gttttgttctattgcttttaaaatcttctttctttttaaaatatggtatctgctttgtcctcattgggttctctgctgcccacgaggacaaagtgaggttggcaagaaacctggaatttgtagttaaaggcattttcagttgatacatttaagttaaatcacgatggaagtgagtcacttgcccttctttattgcctaagctggagtaatgcatacctagctgcagatggatctgttcatatttatcttgcattttgaagaaaatttcttttgttcttgtcatttgaggttgtaaggcacttcaaatataagatttccttacttttctaaatatgtgctttgtcttatgtgcattctgagaaatttaaagcgttacttgaagttaatttagcagataggttctttctacttgtaacctttgaagttaaacttataaatcatacagtttaagaaacagca

SEQ ID NO: 45515 - DNA, 462 bp, Gossypium hirsutum
  Clone ID: LIB3583-040-P1-K1-D12
gcgtccgacgcctcctctgtttatagtgagactgcggaggagcaactcttacgtccgagacacactattacggggagtcattcactgtggcttgcggtgctctgccaagagacttccccggcagaacaagctacgatgacactcaacacagctacgaggactgccccatgccatgcctacagcagacacttggtcacactgaacaagacaagtgtgaatacaggtgtgaaccgcaaatgacggaggagcatcaacgtgactgaaaacatcctcataggagagactaggattgtccacaacactggcaacatgaacaaagagggctgcgtccacattgcgaacaaagctgcacggaacaatacgagagacagcaacagccagcccctgacaagcaatgcaaggagtgtcaacagcgtcgccaatggcaagagcaaatgcccggacagacgcaacaatgtgtga

SEQ ID NO: 45516 - DNA, 459 bp, Gossypium hirsutum
  unsure (1)..(459): unsure at all n locations
  Clone ID: LIB3583-040-P1-K1-D2
cagaaatttgatttgttaaataaaaaaaattcttttatttaacagatgagtgagttacaaaacactgcagtgaaggacatgttataactagtccaaaatatcaatcaagttgttttggcgatatttcttaggcacaaaccaagtgaatttttgttttgatggaggtggcaacatacgaagttgttttatatggaatttcaggtctgaaattttaaattgtcctcttctattgccaagctattgattatggtgctttttatctgtaaatactttttttttttggtttatgaaatgaaactagtatggtttttaagtagagaattgtatatatttatagtttcattggcctgttagatgttacttgngttatggccttgtttgttatttatgtttcccgagctgctaaattattcgcttgtgtttatgtgttctcaacctttgcatatgtccatatttttt

SEQ ID NO: 45517 - DNA, 461 bp, Gossypium hirsutum
  Clone ID: LIB3583-040-P1-K1-D6
cccacgcgtccggtccagctccatacttgaactgtatgcatggggacatgttgaatggcctgcattcgagtgggtgcatgtcgattgcttttctggtttgctacagctggcttgcttgttaccccagaaagaagataacttaagaaaccgaattacaaagtttttgttggctgtttctgaatgttttggggattcttatttgatacacataatgctgcctgtattcttgatagcaattggggatgatgcagatctgacgtttttccctccaaacattcattcaagaatcaaaggtttgagaccaagaacagctgtggcagagagacttgctattctaggggtcctaccacttctcttggcaggcgttctaggatctcctggtaagcgtcaacaattagctgactacttgagaaagctgctattggaaggtgccacgaaggagagtcggtctacaacacaca

SEQ ID NO: 45518 - DNA, 268 bp, Gossypium hirsutum
  Clone ID: LIB3583-040-P1-K1-E10
gagccagaaagcatgccaatgcttcagccgcatccgctgacgcgggatcaaaattgatttgattcgactcaaatcggagcgacccatctgacattattgacactactctcagtgactgaacaagtgcatgcccgtctctgataccgaatgacacctgcagcacatggtagaatcactcaggcttatgtcgtgtagatgactgtcgttaggcagacaattacgagtgcaacgccagattcgaatattgattttaacaggcagctctagg

SEQ ID NO: 45519 - DNA, 462 bp, Gossypium hirsutum
  Clone ID: LIB3583-040-P1-K1-E2
cgattttctgatcatgttgagcaagcggttgacagagattgatgtttctaccatcctgacagttttgcaatgctgtgggatgaaaataagggccgatgatcctgttgccatgaagaactttattctttgtgttcaaaatagggtgaatgagttaaaggctttgtctggagatggtgaggctaaaataaacggcaagagaatggaattcatgcttgaaacgatatgtgatataaaaaataacaagaaaaagcccaaggaggatacagtgcaacacactcagataaagaaatggctacagaagttaagggttgaggatattttaattagagggcttaaatggagcaagctgcttgatcctgacaaaaagggccaatggtggttacccggggatattgcctctgctacagataatgttgaagaggttgccaacagcattgacaaagaggccgttgaagctcagaa

SEQ ID NO: 45520 - DNA, 442 bp, Gossypium hirsutum
  Clone ID: LIB3583-040-P1-K1-E7
ggctgatcccaaaccatctattttttcaggaaagttgaatgttaggtctgggagagactctcctcagacttctgccccgatttctttgcatcctagccgtcattatcacctttcacagccacccctactagactccatgcaggctgaaccttctggtcagactcagaagtctcttctgtctcagatctccaaagtagaagcagcctcagcacttggaagtgcattggagtgttctaatccacttgctattgaaacttcagaactttcaagtactagtagtctattagctgctgtaatgaagagtggaattctctccagcacttcatttactggcaactttccaactaagatttctcaagatgttgggcgaacttcacagcctcctctcccaaattgtcctcctgctgttttcacaacctcaggcttgattgatgctgcaatt

SEQ ID NO: 45521 - DNA, 373 bp, Gossypium hirsutum
  Clone ID: LIB3583-040-P1-K1-E8
ctcgatccaggggacaacatggcacttggaggggcctccagaggttggcttcacggccttctattgggaggggcatcggcgagttgcggttatctatcttagacgctatccccagcactttccttctaccgcaccattgtgacactgagaaaagttaccttggcacctacactggaggtacgctgacgtacttgacacatgaaaacagagaggcctacgatataccaccgataggcgctgacacaggccgagctggacgcactgtgcacttcgctagccgagacagcagggcacagctcttcatagcagtgcttcaccgcgctgataagaaccctggacaatcccaggcattatgacaagctggaagccaacg

SEQ ID NO: 45522 - DNA, 458 bp, Gossypium hirsutum
  Clone ID: LIB3583-040-P1-K1-F12
cccacgcgtccgcccacgcgtccgcaaaattcttaccttttgatcaaaatcttttgctcccttttatgattttgctttcaccaaacagagctgatggtcaagtggctaaaacccaaaaatagatactcacaaattggtggttcgaccaagaactgatttttgttggtttgctaaagatatcgacaaactgatatgatggcttgaaaatgaagaacaattgatcaaaggccaaacaaaagaaactttaccaaatggagcaaacacatgaaaacctccatgaaagcaatgatcatgttcttgatatagcaccaaacgatggtcaagttgtgaacaatgttgactctcatgaacctgtgattcagccatcttcaagtcatggaagttttatgtcatcattttgtttttgggtttatattagattagttttcaatatcagtcaaattgttgcatcaataact

SEQ ID NO: 45523 - DNA, 461 bp, Gossypium hirsutum
  Clone ID: LIB3583-040-P1-K1-F2
gatggcaggtattgaagtgggtgatgaacttgtgattgatggtggaatggctagctttcaagtaattgagaaagttgggaatgatttgcgttgtaagtgtacagactccggtctgtttcttcctcgagccaaatttagcttttggagaaatggaaagcttgtagcaagaaattctgagcttcctactctatcaaaaaaggactgggctgacattgagtttggagtttctgaaggtgtcgacttcattgccctctctttcgtcaatgatgctgatcctgttaggcagttgaagaactatctatacatgaggtcatccagatccacaagggtattggcaaaggttgagagcttggaatcactacagaaattgaaagagattgtagaggcttccgatggaatcatggtggctcgtggtgaccttggagttgaaatcccttatgaacagattccgacagttcaag

SEQ ID NO: 45524 - DNA, 463 bp, Gossypium hirsutum
  Clone ID: LIB3583-040-P1-K1-F9
cgtgcggcctttggtgccaaggcagtactgaatcccatggcttttatgtttggaggaattgtgggacaagaggtggtcaaagcatgttctggggggcccatcctctttttcagttcttctattttgactcagtggagtctcttcctgctgagcccttggaccccagtgattttaaaccattgaatagccgttatgatgcacaaatatcggtttttggctccaagcttcagaaaaagctggaggatgcgaaagtgtttatggttggatctggggcacttggctgtgaattcttgaaaaatttagcattgatgggcgtttcatgtggtagtcagggcaagctaacaatcactgatgatgatgttattgagaagagcaacctcagcaggcagtttttgttccgggattggaacattgggcaagctaaatcaactgttgctgcttctgcagctgcatctatcaaccc

SEQ ID NO: 45525 - DNA, 461 bp, Gossypium hirsutum
  Clone ID: LIB3583-040-P1-K1-G1
gttaattccaagttcacctttctagtctttaaggtttatgtcgatcggctttctgaagcatggaatctgctcaggaagctcttcttcctggattgccggatgatttggctttgagatgtctagccaggttgtcacatggttaccatggggcgcttgaatctgtctcaaacaggtggaaagatttggttcgcagccccgagtatgcaaattataaagctaaccaaggatggtgtggggattggttatttgttgtgaccgaacgttccaataatcagtggattgcctatgatcgtgaagccgatagatggcatcctttgccaaagattccaactgaccatgatggcttacagcattttggattttcatgtgtgtgtgtccacaataggctccttgtgatcggtggctcccatgctccacgtgatactgcttatccgcgtcaaacccctgtgataacaaatgct

SEQ ID NO: 45526 - DNA, 555 bp, Gossypium hirsutum
  unsure (1)..(555): unsure at all n locations
  Clone ID: LIB3583-041-P1-K1-A1
acgcagccgagcagagatagtttaccaccggttctgggtgaatggctgcttatcatactttgagaaagttcctgatgggttttatttaattcatggagttaacccatatgtctggaccatgtgcactgatttgcatgaacatggtcgaattccaacaattgattctctaagatctgttgatcatgttggtggttcaccaatagaagcgatatctgttgaccgaagaagtgatcttggcttaaaggaactccaaaatagagtccataacatttcttgtagctgcataaccacaaaagaagttgttgatgagttagcaaagcttgtctgcactcgcatggngggttcatctgcaactggagaggatgatttacttttgtattggagggattgcagtgatgaattaaaagattgcttaggttcagttgtggttcctataggtagcctgtctgctggcctttgcagacatcgagctntattattcaaagtgctagctgacacaattgatctgccatgtcgaatngcaaagggatgcanatattgtaaaagagatgatgc

SEQ ID NO: 45527 - DNA, 471 bp, Gossypium hirsutum
  Clone ID: LIB3583-041-P1-K1-C10
tccacgcgtgcggaaaattcggaggaccgagtgccgtccgcgcgcggtcgtactcataagcgcatgaggtctccatggagaacagactgtggacaatggaacagtgtaggcaaggcaagtatggcacaatggcatcgcaacattcacaaaaggatcggctttgaaggctgggcacggtggaccaacagcaccacacagtgcgtggcgtcccactggtcgacatgattgctctgccagagcgtgtcgtccactgcagctacaatgacggactggaacctgttgcttctatgaatctacttgacactggcaccagcgattatcaactggaccacatacctagaagattacagcttgctggtaacccagaataggaacagacgctactgatgatgctacgcacagcatatgcacggaagaagtgagaggggggaggagtctgatgaacaagacggagattgacaagaagaagaa

SEQ ID NO: 45528 - DNA, 373 bp, Gossypium hirsutum
  Clone ID: LIB3583-041-P1-K1-C12
cccgcgtccgtccgattccggtcgcccacgcgtccgacacagcatctaaaagacccttcttgctcattgtcgctgcttggactaaaggacgcttacaccaacacctctcttcgtcaatacaacactgtgagcctgaagtaatcgctcaacctcgtcgcctcatcaccctgctgtctaactctgacctccaaactcagaacacgtcactagcagctcattgtgcgattgctgtatcttgctactgactatacttcttaaggactcgttctgccttacttaccatggctgcttaactattgtacatctaacaaaggcgatggatctaccgttttaaatgcctacatgtgatccaatcattctaccaagacagcac

SEQ ID NO: 45529 - DNA, 569 bp, Gossypium hirsutum
  Clone ID: LIB3583-041-P1-K1-C3
ccgtctacccacgcgtacgcactcgatcagccccagatgaagaaagcgatcaatgactcagagcagattgcatggctgactggtgcgccatctgaggatggacaccctagaagcaagtatgctcaacaacaggtaaaagggagtgactatcctcatagtacctataaatgcacacatccaacttgacaggttaagaagaaagtcgaacgttctcatgaaggtcacataacggaaataatatacaaaggagctcacaaccatcccaagcctccacctaaccgtcgatcatccattggatcatctaacccattaattgacgtgcaactggaactccccgaacaaactggccttcaaaatggtacagatggtgagcctgtttgggcaactgcacagaagccaatggttgctgctactcatgattggacgcatgaaaacatcgagatgacatcttctgcaactatatgtccagagaacggcactgcaccggccccaaatggtactcacattgaatcaggtgatgcagtggatgcctcatctacattctctaatgatgaagatgaagatgatcg

SEQ ID NO: 45530 - DNA, 426 bp, Gossypium hirsutum
  Clone ID: LIB3583-041-P1-K1-C8
cccacgcgtccggaaaaactcccatctttctcaaaacaactttccttgaagacttcttgtctttcattcctttttcaccctaaaagcttgtttcctaaacttgggtttagtgtttggagctccgatgattttacagccaagacggacctcttaaatgtaccgctttatatcatctctctcaaacttgttttcctggtactgcttctatcattttcaacagtagttgctttctctaacattcttctacccttttccttccaactctatcttgcacaaaacaagattaaatttttgttgatttaaaagcacaagagagaatagggaatgagatgatttctagctaaattgccttttgtttttgctaataactattcacattctctgagaactaacaatcgtttattcatgttttaacatggtacatac

SEQ ID NO: 45531 - DNA, 529 bp, Gossypium hirsutum
  Clone ID: LIB3583-041-P1-K1-D2
gccttaactatataattctgtacattatggtaagagctgtatgcctagatcaacaaatatttgctattccattcaagtttatgcatactgaattggagctatcttttttctctcttatagtttcagcatatgctgtctgtcaacaacacatgatgcactttttcctgtcttgatgtttatagtttagtgttaatatctaaaatatggacttcagaaagatggtagtgttggagaggcagggacatcaacattattggatgattcatggttttcttctgatagctttctgcactgcttctgcaaggatttcttttcgttagtgcaagatgcttcagttgttgatggagatcttctctcatggacaaggaaattaaaagagctgcttgaaaatagtttaggatgggagtttcagcagaaaagtgcagttgatggaatctactttgaagagaatgatgagtatgctcctgtggttgagatgttggatgagccgagcggtagcgaacccacatcttagatagttacatcatgt

SEQ ID NO: 45532 - DNA, 159 bp, Gossypium hirsutum
  Clone ID: LIB3583-041-P1-K1-D7
ttcaacagtgccagctgatggcatggaccgcctgtacgccataacgcgcggtgtggggtacccacgtaccgtcactgcaggcctacgccgtcttcgttctccttcttctgcactcgcgcttcccgcagcttaatgggctcttaggtcgataggttacga

SEQ ID NO: 45533 - DNA, 536 bp, Gossypium hirsutum
  Clone ID: LIB3583-041-P1-K1-D9
gttgcccggtcttggctcccctgtttcaacaccgctacctacagatgcaaacagtgatgcaaccatgttgtttgttatgctgttaggccacagcgacgacttcgctgccgatgaagttatgaaagttacgttagttttcaaccggtttggagagggacttatagagaggatgccaaggtaagtttctaaccataaattatgctcattttatctgatttatacatgtaaatcgatggccgtgacagggtccggataggctacgctcatgttgccaacaaccgatacgatgaatggaagatgtatgccattggcggcagcgctaatccaaccattttcagcgaaggaaactacttcatagctcccgatgatccagggtccaaagaggttaccaagagagaaacaaataattgggaaacttggagatggcagagttcaaaagatgtgtttataaatggtgcttatttcgttccatcgggccatggaagttccgatctttttacaccatgactaaatcctcattgttgttcaggatatat

SEQ ID NO: 45534 - DNA, 407 bp, Gossypium hirsutum
  Clone ID: LIB3583-041-P1-K1-E12
acgcagtgcttcatttattaccggtaatggattggaactcttttctgagctagagccggctaaagtggctggtcatgctcggaagttatcaactgaaagttttggaagtgatgtaagttttctgagaggtagtgatatgtccatttctgggattccaaattcatctgttaatggctttgttgaccttcctggaacttctgaagtattatatacgaggggaagtcttggaaactcagatcctcagtcttctggagatacaaaaattgttcttccattggatcagcgtcataagatgaatagggttcttttaaccatgcagcggaaactagccactgcaaaaactgacatggaggatctagtagccagattaaatcaagaaatagcagtgaaaggttatcttaccacaa

SEQ ID NO: 45535 - DNA, 404 bp, Gossypium hirsutum
  Clone ID: LIB3583-041-P1-K1-E5
gcggactgggtcgtgtcttgcagcgagagcggctatgatatacgtactgaggccacgtacacgtgcgagcgacaaacaagcctttgtatggtgtcagccaagtgaggtgcatgtacagaaagtaacaacggctcgactattagcattatgtcctcttggacctacattgctagctaacaagagcaattgcaagggattgctaaatgctgaagatggtgctgccgaactagcggttgatcagttcatataaggttgatgaacaatattgctggctgctgtgcaccacattctactccgaaactgctgataaactacgcatctggagatgatcacaattcagatgatcagctcgctgttgaggcagttctgaatactgatgatcctcactatcaacacatgagact

SEQ ID NO: 45536 - DNA, 574 bp, Gossypium hirsutum
  Clone ID: LIB3583-041-P1-K1-F4
gccgcgtcgacccacgcgcgacgcacgcgtacggagtgcatcatctattaccgatcacggattggcactcttgctccactcctactcggaccgcgtgggggcacatgctcggaagttatcaactgaacgttttggacgtgatggaggatctctgagcaggaaagatatacacgcccttgtgatgtccatagccacaagccatagagaaaaattgatcgtgatgcaactcatatgcaccaataaacaatatgaagactaactcactaagagggtagctccattttcttatctccttccctttaactgagcttcttatttctaacccattaagttcagctatacagttgttgatgaaatctgctatttgctgccctggactaggacgatcgacatgcactactaaagtaagaaatagcacagaaaggccacattaccacatagaataaacacctgtaagtcgaactagactgctccaagcaccagggcattcacgacctgcatgggctatcctgttagctctttcaccatactgagggcaatttgtattactgacaagctgacggtgcctgcatat

SEQ ID NO: 45537 - DNA, 547 bp, Gossypium hirsutum
  Clone ID: LIB3583-041-P1-K1-F9
cccacgcgtccgcccacgcgtccggcttcttgaccaccgtgatggcatcaccttcaatgacaacctgatagagccccaaatctaagcccagacgaactgtctggagacatgcaagggctttcgtgacaaacacagtaggtatgtaactgttaataactattgttgacccaaagacatcacctctttgatttcatatgacaatcctagggaatgttgttggagagccgcattatagttaatttttattgaagtgtcttctagaggcctccatctttccgattcaaccctgttaccaagtaatttcacttttagagcatgctattgattgtttttaaatatgagaaacttgtaaatataatattttatataaataataaaaattgttcatataattgttttgtttttgaatgaaatatgttattaaatacaatttacatgttgtgtaatgatgcaaacttagttagaagttaatcaattattttggccaaatggagtacatgattatacatgttctaatgttgtcatttgaggggcctttgggcatatt

SEQ ID NO: 45538 - DNA, 273 bp, Gossypium hirsutum
  Clone ID: LIB3583-041-P1-K1-G10
catttttccgcaaaatttaaagaggaatacaagattgatgtatcccagaatgcaagggcttgtcttaggcttcgggctgcttgtgagaagctaaagaaagtactcagtgcaaatccagaggcacctctgaacattgagtgcttaatggatgagaaggatgttaggggtttcattaagagagaagagtttgagcagattagcgctccaattttgcaacgtgtgaaggcgccattagagaatgctcttgctgatgctgggcttgctggtggggat

SEQ ID NO: 45539 - DNA, 480 bp, Gossypium hirsutum
  unsure (1)..(480): unsure at all n locations
  Clone ID: LIB3584-027-P1-K1-A10
gttccaatctgtatgtgactgcattttcatcattttatcttttggcctcatcaccttctgtattagctctacatcttcaatatgttccagaggagcctaactcatcctggcagtggcttctacgatggacaatgtcacatttttgggtatcccctttaaaaccagttaggagtggaaagacaaaacgaagtattcagaaactgtccaatgcaaaagttgttaatggatctagtcattctaccttggagcatgaaaaaaacaaactangtgtgaggagagtttctggcaactcagcagcagattcagttcggaagcatgcacaaaatgagcttgagagggttaagcgcagtttacgaaagctttctgactcttcaaaggaggtttctgattagtctgaagtttttaatgagaaaacaaagaagactccgaaaaaaacttctaattctaatgaccctgatttttcagaacaggaatccgctg

SEQ ID NO: 45540 - DNA, 369 bp, Gossypium hirsutum
  Clone ID: LIB3584-027-P1-K1-A5
tccccgtccttgctaaggcaaagcgcggctatagcttcaagaacttacggttccattgcctgttagggaatatgtccgaccttgaaagtccgttcaaagcactaactcaagttcatggcgtgacatccgttttgggtcaaatgcagttataacatcaagttccgatcatagctgctattaaagaagctgcgcatgctaagagattaatgccatgcgcactggaatgcacatggacaacaacaatgcgggtgagccagcacaatctacatttctaattaaggctcaaattcagcatgctgttgaggcttaagggaccctttacacttatgtgcctgctaactgtttctcatgctattttatatctacatt

SEQ ID NO: 45541 - DNA, 509 bp, Gossypium hirsutum
  unsure (1)..(509): unsure at all n locations
  Clone ID: LIB3584-027-P1-K1-A7
agagatgtagtacgnnngtggatcacnnntggcaaacncnngatgtaaatntnncttaatnngcaaatcatnnntggatccgtatgcnncgaagcttgtacgggtgctagatacgacatcnngcagtccgaaatttctttcccgcaattgaatcacncnntcgacgccacttgacttctttaatccgctttcaacctaaggctttagccgtgaaatagagaaggctttttaatgagnncttcagcttgannaattgggnngtcgaaacttcgctttattcttcaatgtgaactcaaaacctcgttatcaatgccttatggnnngcaaactgaanntcaggcaggcacgnnngtagtgaagatgaaaggaagctcattnnntaatgaggaaacttttgaaaaaagtagttacgaagggaacctttctatgttgcaagtggtgggtttcacaaagggtaagctcgggatgcaaagcagtggnctgaggggtgatgcccgatctggtattcg

SEQ ID NO: 45542 - DNA, 549 bp, Gossypium hirsutum
  Clone ID: LIB3584-027-P1-K1-B3
aaaaaaggtttttcattcaaacttgtcgtcaatcccagtccactgttctaagaatcatcgagactgctggagataatgaggccctcctttttaaagctttaaatgtcagtgatgatctccagaaagctctctcaaagtatgaagagttgaggaagccatcggttgttcctcatgaacccgaacccactatgattcctgtggccgctgagcctgacgattcacccctcaatacaaaacatgatgccttgattagaaaaccagcaggtacactacatgggatttatgggggaagcagcgatgccatgatggatgatctcgatgaaatgattttcggtaagaaaggtggggattcatctgaaggagggcaggattcaaagaatcagcaagcagcaatagatgatctaatcacattatgagtattactcataacactacaaatatcccgtgatttaggacacaaaagcctatgccaggccattgtaagcattgaacgacaagtttgaatgaaaaaccttttattttcacctacaaccattggttattggggcc

SEQ ID NO: 45543 - DNA, 395 bp, Gossypium hirsutum
  unsure (1)..(395): unsure at all n locations
  Clone ID: LIB3584-027-P1-K1-B6
ctcctcatggcagccttgcttctgtgcttttcggttcagatgagtgtctagattggaagacaaggtacaaggtggcgacagggatagcagagggattgaaatatctccaccacgattgtccgagacgcattatacatcgagacatcacagcctccaacatactgctcactgaagattatgaagctcatgtgcgtaatctccgtgtacctatgttacctgaatatatatctgacatggatatggtaatntcttctgctcattgcagatctcggaatttggtttggcaaagtggctgccggagaattggcatcaacatgttgtccatcccatcgaaggaacattcgggttaggtacttggcttcagagtacttcatgcatgggatagttgatgaaaa

SEQ ID NO: 45544 - DNA, 155 bp, Gossypium hirsutum
  Clone ID: LIB3584-027-P1-K1-B7
caaaataggccctgagaaatccctcgttttaccaaattaacagccttaaaggcaaatgccactttccctgtatgggttaattaagaaaagaccctgccctgtttactttcaaaataaccgctacacttgaaagctaattagcacccgctctttag

SEQ ID NO: 45545 - DNA, 362 bp, Gossypium hirsutum
  Clone ID: LIB3584-027-P1-K1-C3
aaaaaaacatatttccaagctctcttctgctcgttctaaccgaaaagctcggcccgattggcctcgaagtggagacaaaatgcaaggactttgacgctgacttgttcttaacttcccattcaggttcttttctcttttcttcactttaaaatcctttcattgaatgacgatgatgatgatgatgatgatgatgtgtacattatcatggtggtgatgataaaaattttgatagtaaaaaaagacagtatgggtcaaattctatccttttgctctttgtaaactgtaaggtccctatctgtacggaactttttctgttttgtcacttactgtaataatattattatatgattattatgattatg

SEQ ID NO: 45546 - DNA, 464 bp, Gossypium hirsutum
  Clone ID: LIB3584-027-P1-K1-C4
tccgccaacccttccgccaaccgttccgcccacgcttccgcccacgcgtccgcccacgcgtccggccgtatggggctcctatggaaacactctttctaaggatccaacttatacattgccttgcagttggacagcagcggaaccctccacatttttgattcgtgggaagaatgacgggggaagatcgaaagaagtttaaggcaaatggcacattgatgcaaatggtcgctgcagattggttaagatctgacaaacgagaagatgatctatgatggctttctgggggcattgttcaggggttgcgttgttattttcccatgagttacctgtaaactcaagctgtacttgttgcattgtgcaatatgttgattgtaaattgaaaattggagaacttttacgagttggttatttgcaaaaatatgctgctcggggagggccagagttattctttattgtaaacatac

SEQ ID NO: 45547 - DNA, 480 bp, Gossypium hirsutum
  Clone ID: LIB3584-027-P1-K1-C9
cgtacgaacacgccttcgcaaagcttcatattatcttttttatttccgacacaagataaccaataaaaagaggaggaaattcaatcggcttctttccaaaatccatttttaattttagatcttaaaaaaatagtcagcagtatttagacattgccataatcctttaccacctactagctgcaatgctgccgtttgcaccaactccatcacctaatataacatacaacgctctccttaaaccgttacatgacaccaactactcacgcaagtacatgcacttcacataccatttccaatactcttattctcaccatatagactctcctttacatcccagatcatttgctagaaaatacaaactctcatgcttctttgatcgaccccttaataactcatttagaattaaagcacaaatataatctgtccaaatcacgaaatgacaccattttcatcattgaaacttacaactcccttcttaac

SEQ ID NO: 45548 - DNA, 315 bp, Gossypium hirsutum
  Clone ID: LIB3584-027-P1-K1-D5
cgccaacccctccgctaaaatgaaccatttcataaaacccaacaacctaacccaactggccttaatggggggggcgcaaaattttcttagcgaagaactccatgtctaaatcaattttttgcacactattacactgacaacattaccactatcacctttgaataacttaagagcggacgagcgcgactaccatcatagctcacattaacaaatgtacatcaactaatttaaactgctcccgtctatggaaacgatactattgattacattacatccatcactgctacaaagcatagacatatgcttgaaagacat

SEQ ID NO: 45549 - DNA, 318 bp, Gossypium hirsutum
  Clone ID: LIB3584-027-P1-K1-D9
accgacgcaggcgttcaagcactcgtgcgtgaatcctgggctagatgctctgtaatccgggacgcctcaataaactgcggcgggccctgcattaagttgtccgtgacgacaaattaagcgtggaaggcgatatcccgaagtgatcataccattaagcggttcctaaagaacgttttcagactgaactcggaccatccaataataatgctgtttacacccaacgaacattgcgaacattgtggatgacatatacctattcactgcataccgaacgtgagcatttgtcaaatgcaaaggcatcctaatgtgtggtaagat

SEQ ID NO: 45550 - DNA, 258 bp, Gossypium hirsutum
  Clone ID: LIB3584-027-P1-K1-E11
aatagatacataatcactaaatgaccaactcaagctttctgtatacgctgctagtgtaaatcaaggagcaccatttcatgtccaaagccaacgccagcacctgcaaaacgtattctaagtaggcttggactattcaaaaaagctgatacatgatcttctaattcctggggggactcgtgcacaaaccaaactcttcccttactatctattcaagccactctaaaactcacaaagacaatatcaacatctttactcata

SEQ ID NO: 45551 - DNA, 449 bp, Gossypium hirsutum
  Clone ID: LIB3584-027-P1-K1-E12
cccaccttgttagagatggttatttgacaggggaaaggagtccgggcgaattacgctgcgatccttcccaatttttcatgcttttcgatataaacagtgatggatttatatctttcaaagagtatatcttttttgtaacattactcagtattcccgagtcgagcttctccgttgtattcaaaatgttcgatgcagacaacaatggtgagattgataaggaggaatttaagaaagtgatggctctgatgcgagctaataacagacaaggggcagtccaaagggatggacttcgctttgggttaaaagttagcggttctgtggaggacggaggtctggtggagtacttcttcggaaaagatggaaaggcacgtctccatcatgataaatttgttcaattcatgcgaaagttgcaggacgagatactaagattagagtttgatcattatgac

SEQ ID NO: 45552 - DNA, 374 bp, Gossypium hirsutum
  Clone ID: LIB3584-027-P1-K1-E4
acttaaaaaaattttaattcctccctctcttacttccctcgttttcgccagggggtctggacaagaagattaagatcgggattaacggtttcggaagaatcggacgtttggttgccagagttgctcttcagaggaacaatgtttaactcttcggggataacgagccgtgcatttccaccgattatatgacatacatgttcaaatacgacagcgttaacggtcaatggaagcaccatgatcttagagtcaaagactataaatccattctcttcggcgaataacccgtttccgctcaccgagtccggaacacttgccagattcctagcgctcaatcctttgctgatttcgttgttgaatcaactggagtgttcact

SEQ ID NO: 45553 - DNA, 314 bp, Gossypium hirsutum
  Clone ID: LIB3584-027-P1-K1-F10
cccacgcgtccggctatgcatcccaagcacgctgaccgcaaccttcacactgacagaatcgttggtggggctgtttatgtgttgtatgatgatacattaaggaagttaaatgtttatgtatacaaactttcgagccaacacaacacgattattcttcacacatacctcagatttctatcacatatgtttgctgctgatgatcttacatgcacaagagttttttatccattccttttccaaacatttattcacactaaattgataaaattaatacccctatatatggaaattattgatcttacacttactagctt

SEQ ID NO: 45554 - DNA, 361 bp, Gossypium hirsutum
  Clone ID: LIB3584-027-P1-K1-F4
tggtacctgttgttcgctggggttgccattgctagcgggggtgaaccagattctcactggtttggattcattatgtgctataattgcaactgccgcaagggccttcaaatctgtacttaagggcattctgctttctcttgagagagaaatgtagaactccataaattacctactctatatgtacgcaattgcagatttgttatagtgcctgctgtaattataatggatcccaatgtgtgagaagtcatcttatcaccttgtaaaacaacacatataaatgtgcctgcttctttacatcaattgaacaatggcatactcattcaactaataaaacttgttgctgactcatcatacaaaagca

SEQ ID NO: 45555 - DNA, 419 bp, Gossypium hirsutum
  Clone ID: LIB3584-027-P1-K1-F9
taatcttatgccttttcaaggtccaaagtatcgtgacagtagaaaaggagagttcaatgcagtgggtgagtacaatggttcgagcgtcagcgttttgcatgatgaggattgatgatgactactcatggcaatcagtagcaatcgggaaacttattgtgttcaatgttgacttgattccaggaatatatacgacaacactgtatggatctatcagtgcggttcagtgtgtaactagctgcaacgtcctttgcgtggcttctatgagtcaagcagcatgcttggcggcactggacataattgaggatggcatatcaactctagcaaaagtccaagaagcatataagttggagaacgagactaaagaaacaattgaagaataacttcaattgcgttcattatatcagctgaaagacactttg

SEQ ID NO: 45556 - DNA, 544 bp, Gossypium hirsutum
  Clone ID: LIB3584-027-P1-K1-H6
cccacgcttccggtttaatctctttaggcatttggggtcctcttcctgataaaatccataggttatcttcactggaatacttggatttgagctcaaatttcctctttggttcaatccctcccaaaatgttcacattattgaagcttcaaacttttgtattggatgataatgtgtttaatgatacagttccaagctggttaaactctttgccaaatctgacaactctgaggatgaagaggattagattgaagggtccatttccatcttcaatagagggtattaaaacacttgttgatcttgatttatctagcaatgaaatctcaggggatttgcctgatcttagcagcttaacaaatctgaaactgctttgatttgaggggaaacaaattgggttctcatttgccaacattacctaaaggggtgcttatggttttccttaacaacacttctttatgggggagatcccacacaatatgcccattaaatcagctcaacacattgatgtggatttaattggtaactggaaaccctcacctgaactttt

SEQ ID NO: 45557 - DNA, 236 bp, Gossypium hirsutum
  unsure (1)..(236): unsure at all n locations
  Clone ID: LIB3584-027-P1-K1-H9
cgtccatactttttaattctctgataattcatatctatatttttacatcantaccattcntncttacacgaaaattttttacaaataacagcatccaaaaaccatcaaactccaaaatctttacactcctttccaataacgctttaacacaatcactaatagctattatcataactctcacaatatcatatatatttataaccttacataccaataaagattcaacatttttaatc

SEQ ID NO: 45558 - DNA, 339 bp, Gossypium hirsutum
  Clone ID: LIB3584-028-P1-K1-A10
cccacgcgtccgcccacgcgtgcgaattctaccttttattaaatattttattataaaaatcttatgtgacttttttttaatttttttaataaactgcttactaccctcaatttctaaagtaaaatgtttgaagtatattttataattatttaatgaagcaatttcaggctctaattaacctactagtgcatcactaatgaaggtatctcaactttgattcattactcgctttatatgttatcaaaaaactgatgcaatgatcttggttttaccaactttatattggtgaatgcaaatctatcatggatacacaattgtttgctattatttgcactacaa

SEQ ID NO: 45559 - DNA, 187 bp, Gossypium hirsutum
  Clone ID: LIB3584-028-P1-K1-A8
tgctaaacataacatcaatgtgcacaagatcttcaagttcatcatgcgtaagctgtttaacttgccatggacctgtcatataaacttgactattgaagaacccatcatctacttctaaaaacatgtttctttttttagatttacgttacccaccactgatcgatatgtacatagttgaaatacaaag

SEQ ID NO: 45560 - DNA, 273 bp, Gossypium hirsutum
  Clone ID: LIB3584-028-P1-K1-B9
cccacgcgtccgattcgaaagagtgaaaggtgaaggtaaacagcatggtgtaaaggaaggctcctctgctcgggcagaggaagatgtaaaaggaagcagcgtgaatctcagagcaaatgctacatctgatcgacaaactgcagaagccttaactcttgatttttctgccataaaacctggaattgctgcagacctgaaatttggtggatctggttcttatccaaatttaccatgggtttcaaccacaggtactggtccacacggcaaaactat

SEQ ID NO: 45561 - DNA, 278 bp, Gossypium hirsutum
  Clone ID: LIB3584-028-P1-K1-C5
gataaatacacgtaagcattaaataatctacgatggtgcgtgccgaaccatcaggcacacctgtggcctgggggcaatgcttctaggaatcaactgcgctaccaatgctgcacgtggatcaaccccatatcgcggggagtgtattaatcggaatggtctccgagctggatctgtgatttttgaacctgttctaatgtaccaagagaggactgatcttgttattacgtaatcgactttgcagacgcttgtttattatatcgacctactgttgaacactg

SEQ ID NO: 45562 - DNA, 340 bp, Gossypium hirsutum
  Clone ID: LIB3584-028-P1-K1-C9
gttgacacccaatgaacagcagatcagtccaaaaaagcagtcaaagcaactgagtgcatcaggagagagaaaagatcaacatctggaaaatggtggttcctttaaccaatatggtaatatcaagcactctgcagatgtgaagcacacctttactgattcatcctgtcaattcttttcctcatcagaccttcagcagcacaaacaaaacattggacctgattctgtgagttgcgtacagacaaacattccttatatgcatctcaactatagcagtcctttggatcagcttttaggttgtcgaactttttccaatatcaaatctgaaaataatggttaccct

SEQ ID NO: 45563 - DNA, 286 bp, Gossypium hirsutum
  Clone ID: LIB3584-028-P1-K1-D2
ctcaatcatccactatatcatgcaccattgcccgaggatacgcccaagcttccaagatggcgtgggagaagcacttagctaaccacaaagctaccccccttggttgtcacattgatgctatcaccatcgacttcaccgtgcacttccaggcgttcatgcgtacttcaacatatgctacatcacaggtgcattctcaggcgcatcctgctgcataccatctttactcatgtctatatacatcttaaacttaccttactaagtaacacactatggatatggacattcc

SEQ ID NO: 45564 - DNA, 436 bp, Gossypium hirsutum
  Clone ID: LIB3584-028-P1-K1-D6
gcactaccgtccgaatcccggtcgaccacgcgtccgctagttctagatcgcgagcgccgtcggattagaactagcttagatcgcacgggggagggaatttaagttcagaagctatacacattatgtttgggaaattttggtcatgaatctctcgggaggaatgatgaattcatttgtcattcaagctgtgtgtttgaataaataaagatctcctcagttaactaaattatatgactttaaccactgaatatgttaaaccaatttgttgtttgcattctttggctgttaaacttgacaaattaaagtataaggaatggtggttgtgtaaaagtttctttcaagtttagaaatgatggattttttcatttctttgtcaaatgtatgcttggttttcttatctgcttaaagtttgaagatttaaatttttacgttttta

SEQ ID NO: 45565 - DNA, 498 bp, Gossypium hirsutum
  Clone ID: LIB3584-028-P1-K1-D9
cccacgcgtccgcccacgcgtccgcggacgcgtgggaaaaagctttaaaacaatggcggattaccattgcgtttacaaagacgtggaaggtgcttccactcaatgggacgatattcaaagaaagcttggtaatttacccccaaagccacccgctttcaagcctcctcctttcgaacccgcacccgacccggattctgcccccaaggacaagtcttgggtcgatgccaagactgaagatgaacttgatgaactcgaagatgatctcgatgatgatcgcttccttgaagaatacagaaagaagaagctagctgagatgaaggaagcagctaaggtttcaaaatacggatcggtgatgcagatttcaagatctgattttgtgcgcgaagtttcacaagctcctcaagatgtctgggtggttgtctttctctacaaagaaggatccccaaagtgtgggctgcttctgcggtgtttggatgaattggcaattaaataccctgc

SEQ ID NO: 45566 - DNA, 434 bp, Gossypium hirsutum
  Clone ID: LIB3584-028-P1-K1-E1
cccacgcgtccgaaaagaaagcaagatggaagagaacatcaagtttatgcaatgtgataaggtggagaatgccaatagtccatctcgtacttccccatcaactttcagtgttggcaatttatcacagccagttaaggttgattcatcaagtcctaatttacaacttaaaattgggcctaccgaaactgtttatacacaagcaataaattctcagccttctgctgtgtcgctggttcaggcaagagaagctgatgttgaagcactttctcagttgactcgtgctcttgataaaaaggaggccattgtgtctgaactgcgacgtatgaatgatgaggtgttggaaaaccagaaaggtggagacaaccatataaaggattcagattctttcaagaagcaatatgctgctgttctcttacagttgaatgaagtcaatg

SEQ ID NO: 45567 - DNA, 505 bp, Gossypium hirsutum
  Clone ID: LIB3584-028-P1-K1-E10
gtctctgctcttttgaataatgtagctcttctaatgcttttgcggcacactttctgctcttagacagtgaatgatacttgtaggagtttaaagtcttacctagcctcaggtagctttggattatgtcttcattgttctacccacacttttaattttcaataacttactctttgccttacatggaaggacctaatgcttcaagggcaaccatatcatcttatagggttgttacgatgtttatcacatgcttgtgtatcttggctgttgacttcagaatatatcctagagaatatgctaagacagagacttacgtgactagcttggtaagatattatcaaggtcgttaatatttttcttttcatcttcatgcatattatttctttttgctaataatttaagtaggtaaatttacagctttttagaggtaaaacccatgttaacatttaatcctataccctcgtacataatatttttgttattggttgtctcataaggggtctttaca

SEQ ID NO: 45568 - DNA, 386 bp, Gossypium hirsutum
  unsure (1)..(386): unsure at all n locations
  Clone ID: LIB3584-028-P1-K1-E3
tcaatttcattcttcttntttattatcttataacattacccacatcacccgcnttggttgatatgaaaaatattaatcttattaccaacnacatttttataaccaaaataagtcgaacagaatggatctatgattatttattaattatcgctgtcaaactctattcaaaaatcctctaatacatccacaaaaggttaatatttatcacttacaaaattataaactacctcctattgaacaagaatactcttatcacattttaactattactatcatacaacctttatataatgaactttctgactttttacaaacttgcaacaatctttcacatacttaatttaaaccctcttaaaccttcataaaattatcaaatttactttttt

SEQ ID NO: 45569 - DNA, 461 bp, Gossypium hirsutum
  Clone ID: LIB3584-028-P1-K1-F2
cctaactgcaaaaagcttacgaaaagcatcaatacagctcctcggtcctcaactcttgagctacaatgtttcatagagaataacgaattcaggttaaaaggggagaaaaatgacgataatacaatttcattgaccttgcgtattgccgatcgatatggtcgagcaaggaatatccatttttcattttatctaggttccgatactgctatttcaatcactgaggagatggtcgaacaacttgatttgtcaaatgaagatataatagccattgcagagttgattgacagcatgatcttggagcttgtgtcacggacttagagttttcccacgctatccgtgcggccttaagcagtttttctgctcaaaacgcctaagttagcctaacttgtaacgaaaaagattcagcagcaaaaacgcccaagtcaacttcactcgcaacaatgaaagattcaatagaattc

SEQ ID NO: 45570 - DNA, 295 bp, Gossypium hirsutum
  Clone ID: LIB3584-028-P1-K1-F3
cccacgcgtccgcccacgcgtccgggataatcaaatcgaaaatctaactgagatattggagggtcccgatctccaaactatgtttcttagcaacaatgatttgaaagtaatcatggatgatttctttaattctatgccgatgctaaaggttctagacttgtcccacaataccaatttccaaaaattgcctgtaagaattgcaaaatttgtttcactagaacatctcaacctgtcattcacaaaaataaaaaagttgcccgtcgaattgagggccctggaaaagcttaaatatttt

SEQ ID NO: 45571 - DNA, 442 bp, Gossypium hirsutum
  Clone ID: LIB3584-028-P1-K1-F5
cccacgcgtccgcccacgcgtccgaaaatttcagacaatctctcccactttctcttcacagtgcaatggctagatactatagagattcctacatggactacctatccttacccccactccatctctgtttcttcatctccatcctcttcttcgtcctcggtttttcctggtacctaaactacgaatccgtgctcgaagatttcatgaaccaactcaagttcttcctcatgctaactactatagtgctcctcctcttgctccactgcttttcggggagggtgccgtcgtttataccaaaacccgaaaaagattcgcttcataaggccggaaggtctccgagggggggtgcgctagtgcttggtttgcttctttatatgatttcatatcaggcctattttcaagaacgttggtttccatttggggtattatgtctaaattgaaa

SEQ ID NO: 45572 - DNA, 447 bp, Gossypium hirsutum
  Clone ID: LIB3584-028-P1-K1-H4
cccacgcgtccggtttcaattggaatgtcgtgataatggggttacttttactctgagatgtcctttaattgaattagccgaagtgtcatttgattttatgtatctgtttggggtttccctggtttactcaaggaaggacatctaaccaattagtttttgtttttctttcagttattcttcctgttgtttgcactttaatttgatgaaccagggggatactatagaatacacaacctgtttatccaataagttatatagtcattatgtgatcatggttggatggtattgactgctcatgactgaacttttacaccattcaacgtctcaacgaacagtcttatagtaaaaaactttgttacctatcatgattcaaaagtaaaaaatcattcaaaatttaaaggtaggtgcgaaaaagttcagttaggaaccaattgaatgaattaaatt

SEQ ID NO: 45573 - DNA, 298 bp, Gossypium hirsutum
  Clone ID: LIB3584-029-P1-K1-A1
tgtctcggttgctcatgcagctgtagcaacttggcattcagtgctgaggcagtggcctacaccgcgactgacatggtcctgaaagctgacctccactgctcgaggtgctgcatgaaagtgtaaaacgtgctgattctattccgttacataccataccagatttacgatgagacaaccaacaccgagactattaccgtggtatgctgcaattctgacaagctgagggacaacatatgttagaagggtgctggatcaaatcaagagcatatgaatcaaaccttcagctacttctgctaaa

SEQ ID NO: 45574 - DNA, 405 bp, Gossypium hirsutum
  Clone ID: LIB3584-029-P1-K1-A5
cggacgcgtgggcaaagatcaaacttctcaacttatgtattggaattcacgcaggaattgtgttcatgagcaaagtgattcgtttcatctcggtttactttatgggtacgattttgttatgctatgaccatggtagagattggctgatgaaattcacacctaacaacagcattagaaatgactcaagtccagagtcacccccaaactacaagcaggatctcagccgttttgttttgcatcttgaaggtgaagatgcactggttgacctaatgatgaaggaaaaccgagatgccaccgattactggtggcggaaagcaaagaagcgacagccaaaacatctcatggaacttttggaactatcaagaccttgtgagggattcaaaggacttacagagtttggcagtt

SEQ ID NO: 45575 - DNA, 379 bp, Gossypium hirsutum
  Clone ID: LIB3584-029-P1-K1-B12
cccacgcgtccgaccacgcgtacgaccacgcgtcctgagatccaaagcttttattgaacgcaggtgaaaaaaaggatatcaacgaggtgatgatggcagccgatgcctagctcgatgagaggaggtggaacgactgtatttgcattgtgtacacacacaaatctggtttccaatgacctccttctccttacggactttctcgcttctgttctagcccagctaatcaaactgtttaccaaatggcacgctctttgttaagctgtgccttgactgtttgctttcatcctctgtaggatctatcttctaatttcgaggcttgcttgaattttgtttgcacatatgatgcttgtaaagtgcaccagtaccacttatgatttta

SEQ ID NO: 45576 - DNA, 419 bp, Gossypium hirsutum
  Clone ID: LIB3584-029-P1-K1-B3
taaagagagggttggtgttgttaatggttttcatggtttttcagagaggagaggggcaattatttgagagatggctataggggtacatgtccgaatctagaaatgatagtgaagcatgtggtgtccatcaagttcagccaaacatttgttacgatccctgcaacgctgcgcttgttcttccatgattgctttgccgagggatgtgatgcatcagtcatgatagcatcaccaaatggagatgcagaaaaggatgctcaagacaatctcttcctcgcaggagatggattctgcaccgtaatcaatgcaaagcaggcagtggaaatacaatgcccaggaattgtttcttgtgccgatatattagcacttgcagcgagggatgttgtagtactggcttgaggtccttttagggaaggaaaatt

SEQ ID NO: 45577 - DNA, 213 bp, Gossypium hirsutum
  unsure (1)..(213): unsure at all n locations
  Clone ID: LIB3584-029-P1-K1-B4
cggaaggaaaaaagcaagaaccncagagnaaggggctactngctacaagagaaaagangcagnaggcggagacaggngangnnccacacacgcatcnggcacggaccaaaagaaagccanannngagaagaagggaggaacacaggcacnnaancaanancccgangnnacaaccgcagcangggccaaagaanccnnagagggacacngcat

SEQ ID NO: 45578 - DNA, 343 bp, Gossypium hirsutum
  Clone ID: LIB3584-029-P1-K1-B5
cccaatgctgacatctgtaccactgttaataaaggctgctcatctggaatgaaagcggcgatgctcgcgtggcagactatcgagttacgcatcaatgatgctgtggatgctggtggtatggaaagcatgtcagatgcacccaaggctctggcacaagctagaaacggatctccaatgggacatgatacggatatcgatggcgtgctcaaagatgggtaatgggatgtatataatgattatggtatgggcgtctgtggagaggaatgtgctgaccaggacaagattacaccagaagaacaggatgcttatgctattccaagctacgagtgtggaatagctgctc

SEQ ID NO: 45579 - DNA, 291 bp, Gossypium hirsutum
  unsure (1)..(291): unsure at all n locations
  Clone ID: LIB3584-029-P1-K1-B8
cccacacatccgaagcgaacgncncacccanacccngcgaaaaaacacaaacaagacaacaggggggggggaaaaaaaaaaaccaaaaaaaaaaaacgggcggccgcacaaaaggacccaagcgaacggacgcaaccaagcgacgacacaacccaancacagggccacccaaacccaagncaccggccggcgnaaaacaacggagggacggggaaaacccgggcgacaccaaacaaaaacgccgggcggcacaacccacgcaccccagcaggcggaaaaacgaaaaggccc

SEQ ID NO: 45580 - DNA, 239 bp, Gossypium hirsutum
  unsure (1)..(239): unsure at all n locations
  Clone ID: LIB3584-029-P1-K1-B9
cccacgcgtccggttcaaataaaanacgggttttttgaccttccaccatttttagaacaatgaagcgtggatcaacaaagaaaacgccattcaacatggaatcttatcaatatggacaggcagatccgaaccctaaaccacctaaatctaataatcttataacgaccaaaaataaatttagaggaagccgtttaaacaatttggggcactgaataaacaagtccaccaaaaatttttat

SEQ ID NO: 45581 - DNA, 325 bp, Gossypium hirsutum
  Clone ID: LIB3584-029-P1-K1-C1
cttgcttaacagcgtttggacggaacagactcagggacgcccattgctacagacttcgactaccctgcaaccttttttccagtcgcaaccttgggactacgcctctcagctatcactagtctccgggaccagccatcaccattttttgagcttagctccttattgccaaccagccatgagctcccaggttcgacagaattattccatcgaggtggaggccttcgtcaaccgtctgatcaacatgcatgtgcaggccttgtacatctacctctctgtgggcttttattttgaccgcgaccaagaggctcttgagggcgttagttat

SEQ ID NO: 45582 - DNA, 239 bp, Gossypium hirsutum
  Clone ID: LIB3584-029-P1-K1-C12
gcgttcgaccacgcgtccgaccagcgtacgatacggatgaatgctagagactgatctataaaacggagggaggaccttgcgacaaaaaaaactcaaactagatccctaaatcaaaaatgtagtctgtataacaaatatgccctagtaaaatactactaaacacatctaaaagtattatgatgacaataacaattagatatttggagttatagacaataagactgtagtaaaagttgttg

SEQ ID NO: 45583 - DNA, 534 bp, Gossypium hirsutum
  Clone ID: LIB3584-029-P1-K1-C5
cggtttccttgggtgttgtttctggtagcagcagtgaacatggccgttgctgcagagcctctccggccagggttttactttgaaacatgtccgccggcggaattcatcgtcagagatgtgatgaagaaagccatgattagggaaccaagaagccttgcctctgttatgcgccttcaattccatgattgctttgttaatggctgtgatggttcgttactcttagatgatacagcagacatggttggggaaaagcaagctctttcaaatataaattcgctacgatcttttgaagttgtggatgaaatcaaggaagccttggaagatgcttgcccgtcaactgtgtcttgtgcagatatcttagtcttagccgccagagatgctgttgctctgagtggaggacccaattgggaagtgagattgggaagaaaagatagcttaacagccagtcaacaagactccgacaatataatgccaagcccaagagcggatgcaacttctttgatcaatcttttcgcccaattcaatctatcagtg

SEQ ID NO: 45584 - DNA, 445 bp, Gossypium hirsutum
  Clone ID: LIB3584-029-P1-K1-C8
taaacccatttattagccgtttctctctatctctctcggtctccctgtcatgagggctttttcttgctcatttcttctgctgtcataacaaatcctcaaatatatctcttcaatcccaatctcctgtcatgtctttaccgaatctctctctcggtctcttttgaaggggcgtcctctcattatggtagcttagggtaaccaaaggcgaaaacgcccacacacacgctacactctgtttttagaaatcccctgcttcatcggagactgatcctgagtgggtacatcactatgccgctgctttggtgcgatttttgtaacccctgcttactcggatactgatgtcagctgtcgaggtcagcaagctgcgattccaacaaatggacgatgaaccaaaaatttggagctgcaaaacacccgacggggactccatctctcggctggtcat

SEQ ID NO: 45585 - DNA, 508 bp, Gossypium hirsutum
  Clone ID: LIB3584-029-P1-K1-D11
ggacgacagaatcggaagctagcggtggcttatcacaaacgacggaatgggaaatcagtgtttgccatagctcagactaccaaaggaatactgtctaattctgatgatagttgcgttggactcatgacagctaaccttcttggatcaaaataccatatatggaatcagaatggtcgaaccatgtcatcaaacaaacaatctaatcctctcttgggtgttgtaaggttcatgccaaccatagcgacatggaccggtagttaccgaagcatgaaggcatatatacctaagcaccaatcaatgcagctcaagaatgtggctcatatgcaacacattaatggactacctaaggactgggaggagaaaatggacaaaatccacaagttgttctcaaggattcctcgttacaacaaaatgttgaaacaatacgaattagacttcagagaaaggggaagagctgctggactcagaatacaaagctcagtaaaaaattttcagctgacattgcaag

SEQ ID NO: 45586 - DNA, 398 bp, Gossypium hirsutum
  Clone ID: LIB3584-029-P1-K1-D12
atcagaggcagaattaggttatcgttgatatgccaacgattgatgtgagacaggcagcatagagtcgttgctgaaacaatagaatgagttctgcttagttttacaccatgtcccccttgacgaggtgactaggtgaattaatcggatatatatcgttaaattgaagagagaagttgccagcaacctctctaaacaaacaccttaattcttgctcgaaccttgttaggtaaagaccgtcgatataggcataaagaaattggatccttgtcaaaaaggcatatatacatagggcggacgctatgcaggatacaagtgtacgtaagacgccatagcaaaatgtactatcttatagagtgtgacgtgaatatagtcaactggcacacgttgtacaaaaggat

SEQ ID NO: 45587 - DNA, 359 bp, Gossypium hirsutum
  Clone ID: LIB3584-029-P1-K1-D3
cgaacgcgaacagctgttgatgaggcgagtgctgaacaatgactatttaggcatcatgatagaaacaggaacgtgcgatcataagcacgagggacaaggctgcagataaacaatgctgaaatggcaaatttgtacgtgtggatgtctacaaggaatacatactcagctgctactataacatcaatgatggctgatagggaacaacacttttccaatggatgcaactggtggaacacaaagggtgttgggtacggatagtgaagacacccgttgtaatcctgatgtatatagggcacatgggctgtcagctgcacaagatgagccatcttcatcaagtgttttccaatggcctgtgggat

SEQ ID NO: 45588 - DNA, 501 bp, Gossypium hirsutum
  Clone ID: LIB3584-029-P1-K1-D5
cccacgcgtccgtaagaacttgctggcaatgccagttggtatcatgcaaaaagaaaatgttgacaatgttgtgcaaaagtttcttgcagcgaattttacaattattttattccattatgatggcaatgtggatggatggtgggatcttgattggggtgataaagccattcatgtagtagctcataaccaaacaaagtggtggtttgcaaagcgctttctacatcccaatgtcgtgtcaatttatgactacatatttctctgggatgaagatttgggggtggaccattttgatccgaaaaggtacctacaaattgtaaagacagcaggcttagagatttctcagccggctttagacccggattcaacagaaatacaccataaaatcactatacgttcaagaacaaagaagttacataggagagtctacgagctcagaggtaaaacaaagtgttcaaaagcaagtgaggggccaccatgctctggatttgtggaaggaatggc

SEQ ID NO: 45589 - DNA, 276 bp, Gossypium hirsutum
  Clone ID: LIB3584-029-P1-K1-D8
cctcacccgtaatcgcaggctgaacctacacatgcgacaagcgagcgtacgcaagcagacgacgagctaggagcacacaagcgctcagtaagaccacctaacgggacatcagctccacaccgacatggactggaaagaccctgccacagcacaactatatgagcctgcagcacatacatcattgactagctacagagatggatttgacgccttggaagacaccttcttctaacattacatcaccgtgaaaactgacagggacgcgcctcatactaa

SEQ ID NO: 45590 - DNA, 321 bp, Gossypium hirsutum
  Clone ID: LIB3584-029-P1-K1-E11
ctcacgcgaaagcccacgcgtgcggccacgcatacgtattcgtggcgaacaaatgaaaaagaggggcacaagataggagtgattgtatagaagaagcataccaagaataaaagaacacgggccacatatcgagaagagcgaagcttgctgacggatacacgcaaccaaggaagcctccaaaagggaaaaaaaaattaagcaactgcatgagataagacacccagaaccaagggaaacaattgggcttaccaaatacaagctctggacaagcagaaatgcaatgccatacaaggcgcaatatggaacagatgttgacatact

SEQ ID NO: 45591 - DNA, 227 bp, Gossypium hirsutum
  Clone ID: LIB3584-029-P1-K1-E12
atgtcgacaaatgatgtagtatctaacaggcatataccaaccgcaattatgaaaaacaactcagcttgaataagaaatgttacgcgccgtttaactgtacatctaatcgcagcggttgttgggagtacgcgcagctatgaccgctacacttatcagctcctttaatcccgctcctaacgataacgtacattactttctagtaacgtatgccaggataacaagataaa

SEQ ID NO: 45592 - DNA, 393 bp, Gossypium hirsutum
  Clone ID: LIB3584-029-P1-K1-E9
cccacgcgtacgcccacgcgttcgcaggaagctcccgctgataaggtttgctggaaagatgtacttcattggatgtcagccactttctagtgataattgcagaatcttggagaagagacgatttgaatctgagcccttatccttttacagacccggtaacaggtcttgctacttggcacgataggccaccatctccatctactatagtatgggttataacaaagaaattgtagagtgccctgattattgaccatcaaacattcggacacgtggcttctggttcctccctattgagtggcagtgttcctgtcaggaatgtggacatatatcaacactggttatcacacggcatctaaactcacgatgacatgtgtccaactcatgctgagttac

SEQ ID NO: 45593 - DNA, 300 bp, Gossypium hirsutum
  Clone ID: LIB3584-029-P1-K1-F1
gcgagacgaagctgctggggcatgtggaagcgggacttgcagtgcgccatgagaggctttgggcccatgagcgtgctgctgaccgggctgctgaagcggatgtagctgagtacggtgagcgctggctggggcggctctttaacaatcaagtgcactatgctaatagtgctgatcgtgcaccgcaggatctaacggcacctatggttacagaggtatcgtctcatgtacatactagtaacattcacaatgactgatactccacatgtgaccatggagttactgcatccatcaagatatacg

SEQ ID NO: 45594 - DNA, 544 bp, Gossypium hirsutum
  Clone ID: LIB3584-029-P1-K1-F10
ctcaaactccttttctccgtcgaacgggttcggccggcgttttgccctttcgttgccgtgtccggcgccgcgaaaataggcttttagccccgctttaaagcacccttaaaggctaagcccccaaatcccgatgaatcgaacggacatagggcttgatacccttttagagtcgattacgacagcggcgtcgcaacccagggaaatcaggtaagtccctcctctttcccttctttagtttcgtatcaaaatgaaagaaaaaataataaaataaaaaaaattgaaaagtaaaaatgaaaatcacctttagcaaatactgtttttgtttcttgattctattgatctgtgtgcgtaagcctttatactgactatctctagctgtttataaccgaatgaaataaaaataaaaataaaattacaagaacgattttctcttcttttttgttattactttgatgaagttgtgcattagctgtggcttgtgggtttgttgcaggtacagctagacaggtgtgcgtagagaaaacaacaaggatttccaaaagct

SEQ ID NO: 45595 - DNA, 415 bp, Gossypium hirsutum
  Clone ID: LIB3584-029-P1-K1-F7
gcggagcatcactgggtgccggcctgcacgatcatgcagcacatggatattctggtcacaactacataaacacatggtctgatatctttagtggaattgacacaacaattataccatggatcgatcgcaccctctttagggcccagtactcaccacaacctgctatctaacacttgtaatatgaaacaccatcgacgacgaaaatttcaactcactccacagtgactataagcacatcattctccattatgaaatagacctgacatcaactcaatgcactcaaagcaaaaagcaaggaaaatggtaacgattttaactatatgacataccatatgtatgaacgtcatgtgtggagatcagactgcattgcacacagactcaaaaatgatcaagggactaaactgatcattggcac

SEQ ID NO: 45596 - DNA, 311 bp, Gossypium hirsutum
  Clone ID: LIB3584-029-P1-K1-G10
atcattttgaagctcgagttgatgtttctacatgactggtttttgttaacatgtttttttttaaggataaattatcatatcaaatcaaatctctccaatttacttggtttctttgggagtgtatgtagtactataaaagaaagtaacttgtcccccttcgagattgccatttatttgttaatatcgatgaataaaagttaaagtgatcaaatcgatatgatcttaacctcaccagttcaatggtattaaaaaaaaaaaaaaaaaaaaaaaaaaaaaaaaaaaaaataaaaaaaaaaataatatataaaaat

SEQ ID NO: 45597 - DNA, 345 bp, Gossypium hirsutum
  Clone ID: LIB3584-029-P1-K1-G7
tcgtccattatgcaaacctaggcatcatggcgtccggaagaccctgctataactcgaagcaatgctcccggtcaatactctcgactgacacaaggggaggcatgcggtgtggaagcactggcaaaagatcaaagagtcaggtcacactccacagggcgatcatgagaaatcgcaccgaataacactgacaagcctcaggttatcgccaggacactacaagcactcactcctaagaacaactgcttgactaatcacatccggatacatttaccacacttgtttacgagccttaacaaggtcctcttactagacgatgacatcgtgagacaaacctatattttacct

SEQ ID NO: 45598 - DNA, 439 bp, Gossypium hirsutum
  Clone ID: LIB3584-029-P1-K1-H1
acgcgcgctacttggggcggtacatgaaggtgctcttcgtcgccgtcgcagctgtgggctcggtcctcttcatgatggagcctggaccttacacggcagatgagaagaagacgggactcaaagacactgacaaggcttactttgacctgcgaattggagatgaagatataggccggctggtcagtctgctatttggaaagacagttccaacaaccgtggattaatgtgtggcctcgactacatgagagaaagggtatggctacaggaacacgaaattccatcgagccatcaaagactttatgatccaaggtggcgacttcacccgacgagatggcactggaggtacgagcatctatggtgaacgctttcccgactagaacttcacactgaaacactatggacccggctgaacgagcatggccaacgcgcgcaaagacac

SEQ ID NO: 45599 - DNA, 171 bp, Gossypium hirsutum
  unsure (1)..(171): unsure at all n locations
  Clone ID: LIB3584-029-P1-K1-H10
ccaccnagcccccaaaananangcaanggaagcnggcggacaaaacggaacanacagcccagggggggggagcaaaagccggaangaaanggcaaaccgcacgaaggngcgcaccacgnngaggaggggaacgngcaaggagaaacaaaacacgaacgcagagaaacaaca

SEQ ID NO: 45600 - DNA, 547 bp, Gossypium hirsutum
  unsure (1)..(547): unsure at all n locations
  Clone ID: LIB3584-029-P1-K1-H11
cccacgcgtccgcccacgcgtccgcccacgcgtccgcccacgcgtccgncttcaaacacaagagctggggagcaagattgcaagatttgtttcaatgaagtaaaactagatcgtgggagttactcttgcaggaagccaggttgcaattacgttgtccatgtaaattgtgtcttagaggatgaaaagttgtacgaggtaattgaggaagaaaagcaatgtgaggagttttatgaaaaatctatgcagtcttccatcattcatgttattgaggtgaatgaagctggggaagctacaaagattcaacatttgagtcatcaacattgcttggtgttaacatacaagatggaggaggaaattgatagaaaatgtgatgggtgcatgctacctatctcaaatattttctattattgttcagaatgccccttttttcttcataaaacctgtgctgaattgccacgaatcaagcaacattggttttcgtcaaagcaatgccaccctcaatttcaacagcttcaaacaatgggacttttgcaatcgacgttgtaat

SEQ ID NO: 45601 - DNA, 531 bp, Gossypium hirsutum
  Clone ID: LIB3584-029-P1-K1-H2
catactcggaagctacgaaaaggcacatgttttctcttcctagtaaggtggctaagctgcatttctctggatgggtaatcagaggtcaaatgcaaaggtgacattcaataacatgcatcacaaccttccgcgtaggaccattagtatccttccagatagccgaaatgttgatttcaacactgacaaagtcggaactgaagcatatcgagtacaaatggtgccaacgaatgtgaagatacaatcatcggagacgttcaatgaagatgtacattcagtggatgacgaatctgcgatgactgaaaagggtctattggaacagctaaacatcacaagagataccagtgattatctttcgaatacaaccagggctcaaatgagtacattcgaatcatttacttgtaaaggcacgcctttgacactgaaaatacaaacaaccggggcatggcattcatgttttcatcaatggacaacatcttaggatccgcgttttgggacttaaacaaaaaaggaaagtttttttttttcccaaaa

SEQ ID NO: 45602 - DNA, 310 bp, Gossypium hirsutum
  Clone ID: LIB3584-029-P1-K1-H7
tcggggagcgccgcctcattgcggcggtagttaattctaaaacatcacttatcagactcatactaatccagtgattgctcaccagccctacaggtgtaagtgtgcaacatgcatccagctctcatcagagagctggtacttattttagacctattaatgacgactatacacatgcttacactagttattcatatgctctgaatgcatatgtaacttattatttacagactacttatacatattttattacaactatacattaaacatacagatagaatgatacacgcgtattattgtagtacttatgata

SEQ ID NO: 45603 - DNA, 249 bp, Gossypium hirsutum
  Clone ID: LIB3584-032-P1-K1-B3
acgcccatataagaggacatcctgaaaagattgaagagtggactcaagcttatgaggtgctgaacgacacggagaagcgagagatcaatgaacagtttggtgaggacaccttgaaagaaagcatgggcatcggtgtgcaaggacatgaccctttcgatatctacgagtgattattcggtggcatatcctgttggcgctggaggaagcagcccaggaagaagacatataaagggggaggatgtaatccat

SEQ ID NO: 45604 - DNA, 581 bp, Gossypium hirsutum
  Clone ID: LIB3584-032-P1-K1-B6
acaaaactctagtggcaaggccactgctagcattattccacaactctggcaaccaaacagtggtcttaatatgactaatgatgttccagagaattctgaagatgcagttccatgcatagcgctgtccaagaatgactcctatgtaatgtctgcatgtggtggaaaggtttccttgtttaatatgatgacgttcaaggtgatgacaacttttatgccacctcctccagcttcgaccttcttggcatttcatcctcaagataataacattatagcaattggaatggaagactcagccatccatatttacaatgtcagggtggatgaggtcaaaacaaaattgaaaggtcaccaaaaacgaatcactggtctagcgttttccaccagtcttaaccttctcgcttcttctggtgctgatgctcagcttttcttttggaacatggagaactgggaaaagatgaaatcagttgcccttcaactgccacctggaaggacccctcagggtgccactcgtgtgcaatttcactctgatcaagttcgcttgttagtatgccatgaaactcaacttgcagtatatgatgcta

SEQ ID NO: 45605 - DNA, 515 bp, Gossypium hirsutum
  Clone ID: LIB3584-032-P1-K1-B7
cgcgtccgtccacgcgtccgaaatggggtgcaacattaactccatcagaggtggctgataaagtaaaacatgtgttcaaatactattccatcaaccgacacaaaatgactgtattgacaccttcatatcatgccgagagttattcgccagaggataataggttcgatctgcgtcagttcctttacaatgcaagatggccatatcagtttcggaagatggatgaactggtgcaagagatgaatggtgacagagttgcttttaaggaaacaggtgaggatggtggtacagcagcaggtggtggtgggatgggagttgtagcagctgcctcaggcaaccccaaagctggattttaatcaaaactatcggggagttgagtaggaataacgattgcttccaacttttatttatggtgtagtagcacaaatttgttttcagttgtccagttattggcgcagtgagcccacccccagccccaatctgtatatctttttttttaacttaatttaatagatgtc

SEQ ID NO: 45606 - DNA, 480 bp, Gossypium hirsutum
  Clone ID: LIB3584-032-P1-K1-C12
cccacgcgtccgacgagcaaaacgcccacacgtacagaccgggcaagagaaaagaataaattgggatgctggctcattaatatcggagcatgacatatttgagagtgcagtgtatggcgctcgaaaattgcgcaattgagaggtggagcaatgagctaacatcaagtgaacaatcttataagattgactaaaagcaacaaacgtgtccgcaaaacgaagaagaaatcgactgttattaaaacagtgagctgccaaaaggctgctatgctcagaaggatgctatgaatgattgtaagctgataccagaatggtggctagctaatggaaaccattagatgctctgtaaaacaacccataacaatttacatacctaaaaacatgtcaacacatagacataatagcaaaatagcattgtccttagacactatatgaatgcaccgaaaaggctaatatagtatcaacattgacacatactatctt

SEQ ID NO: 45607 - DNA, 558 bp, Gossypium hirsutum
  Clone ID: LIB3584-032-P1-K1-C2
gttttgattgtctttatggtttttattttactcactgacatcttattgcggagatacgcacccaacctgcaaggtattgtctgcttcggtctgaaagcctcatggttttgttccaaaaaagatgccatagccaaagtttctgcatatgtattgtagtagatcctcaaagattctcaatgtagttttctattccttgtttccttaagcaaagataccgtgttaccttttgcagaaaactggcaagaacttatccaaaaaattaagtcaaaagccatgaggcccggcgtggcattaaagcctggaacactgattgaggaggtttatcctctggttgacagtgaaaatccggtggaaatggttcttgtaatgactgtagaacctggatttggtggtcaaaagttcatgcctcaaatgatggataagaggttcgtgttctaaggaagacgtacccatcactcgatatagaggtgaatggtgtgttagggccatcaacaattgagatggctgcttcagcaggagcaaatcgcattgctgcagggagttcaaaataaggagcgg

SEQ ID NO: 45608 - DNA, 480 bp, Gossypium hirsutum
  Clone ID: LIB3584-032-P1-K1-C4
ggtttttagaataattttccatttcgcaagcctcggctactttgatctgcggcagttctttctttctttcagttttttgttgggtattgcttgccataaatcgctggcaatagttttttttcaattgctcgaaacacccaaacgggaaaaaagtagaattaagaaaaaaatagatcgggttaaacagatgtgagcaatgtcgagaccttggcttctcgtttttctagtgttcgtaatagtattcacttctcagttcgaatggaagcagcaattcgatgaagaaattgaaccaacctccaccgtttctgtcaaagaccaatacgtttcgaaacgccaagaatcagtcaaagaaaagatcatactttctcaagaaagaaatattcagaaactgaatgagctagtaaagagtcttcaggagcagctgctacggtgtaaggctgaaaatgagtttaccaatcactctacgtttgctttaactga

SEQ ID NO: 45609 - DNA, 345 bp, Gossypium hirsutum
  Clone ID: LIB3584-032-P1-K1-D6
cccaggctttcgcccacgcgtccgcggactcgtgggcaaaaacacatccttgcaagctggcagcatcgttccggcggcgtggttcactcccctgaaagtcctcactgcgagaaaccggatgaccaatgcgactttgacattgactacgctgatcatggttcacttcttggcgtggtggccgctgatgtcttttctctaacatatatgaatggctctcttattcatctcccattgactttcggatgtgctgatgatctgaaaaatcctggcccatatgatcctccagcagctggagtcctcgggcttggcaatggcaaagcaagcatattgtcacagctcgcccgc

SEQ ID NO: 45610 - DNA, 517 bp, Gossypium hirsutum
  Clone ID: LIB3584-032-P1-K1-E10
tggaaacttgataaaacgtgttaacttaggtaaagcatctggtagacagcatgggctgttgggggacaactttacgcttgctgtcatggtgttgcttagagatccctttcgaaactatgaaccaattggcacttcgatgattgctttaattcaagtagagcgagcttctcttgctatatagccagaaagagatgagcaagagagccctgaatccgaagttgcagaagaaaaagatggtgctccatttttcttaatcactgaagtccatcttgcagggttaaatactgagcctcataagcagcatctttggtgtagcaaagcacagtaacagtccgctacacgctgcttgcttgctagtggcatagctaactccactaagaaaacattttcgaagttaaaagcgatggtaagatactacccatcaatgatgagaaagatgctgcctgggaatgtgctatggagtctaacctcaaatgttcatgaaactggaacagattggaatgacttggcaaatttt

SEQ ID NO: 45611 - DNA, 280 bp, Gossypium hirsutum
  Clone ID: LIB3584-032-P1-K1-E4
cccacgcgtacgaataaaaataataatataaaaaaataacaaacaacaagggccttatctttaaacgtggggcgcgtcagtactcttgaatctatcctcatatctcttatatatcgatacataacttaattatattgacctccaattgacatcttctactatttaaaaacaactgatgaaactaaaaaatatcatctttaaagatatgctatatctatataaataaaatcttctttaataactcagcgtacatcctaattaatacccacatctccctact

SEQ ID NO: 45612 - DNA, 580 bp, Gossypium hirsutum
  Clone ID: LIB3584-032-P1-K1-G12
cttaaatttctcaagctctacaagaaaagtgtcatgttgattctctttttcttaacttaaagcttttttatgttacttttttatttactaattcattttttatataataactaacttagctttcaaagttacgacattttccatttttgcttctaccttatatttgaagcaaatgaacacttgggcttttatttttagtcaaattaatcagaagttaattgaaaatatgacatgatctttaaatgcctaacttggccgttaattgttgccgtgtgatggttcacatgtatttcattgttgattttgtactaactttattttatatgccacgttagtaaataatttgaaaattcagaattttcatagtatttaaaaattaccaaaaactaagaaaggaataaaaactctttgaaattaaaaaaatataaaaaaatacattaagggtttgttttgatggaattttaaaattgtagatttttaaaacacattatttcaaaatgtggttttttgtgattattttgtttgaatacataattttttttaaaaaaaatataaggctatatgaaatttttatggggtt

SEQ ID NO: 45613 - DNA, 533 bp, Gossypium hirsutum
  Clone ID: LIB3584-032-P1-K1-H12
cacaaaatggttttgaaatcaaaatatgtcctgcgaccaaatgtccacatgcaggaaaagaaaaagatgaaaattatcattgcatatgtaagttaaacatgcatatgagttaaacatgtaagctgacctttcttatcagttaaatattactttctatgccttttctaatggttttaatgccccatgcatgtttgtttattttatctgtcttgattgtattgtttatttactcttctacttttgtagtggctgccgtatttagcttggcctataaactgcagcctgctattatatttattgatgaggtcgacagtttcttgggacaacggcgtaacacagatcatgaagcaatgacaaacatgaagactgagttcatggcattgtgggatgggtttactactgaccagaatgcacgagttatggttcttgctgcaacaaatcgcccatcagaactagatgaagccatactcagacgtctccctcaggcttttgagattggagtacctgaccgcatggagagcgctgagatattg

SEQ ID NO: 45614 - DNA, 320 bp, Gossypium hirsutum
  unsure (1)..(320): unsure at all n locations
  Clone ID: LIB3584-032-P1-K1-H2
cgtccgcccacgcgtccgngaaaaggtttatgagacaattggtctggaagtgcagaatggatatggtttaatggggcagcaccttgcgttgctggtcgacaaccttattataatgtttacaattcactgtttcgctctgtgtttgaaatctttcgatatgggtctgtctgtttctttttggttgctttttcagagactgatttcaggtttagacatcactgtttcgttccgtgtttcaaatctattgatctcgatctgtttgttctttttgtttgtttcctgtgtacttttgcgagatatatttatttatcactcgaagc

SEQ ID NO: 45615 - DNA, 273 bp, Gossypium hirsutum
  unsure (1)..(273): unsure at all n locations
  Clone ID: LIB3584-032-P1-K1-H3
accaaatcccttttttttggggctgctatatcaaatggccattatttttgtataaattaaaaaagaaaccccatgtaattccccaatcttaaacatgttacctacaaattaaccagacctcaatagtnctttctttctgttggtccttcttctatcattagtatttcttcaatgtttgtacggtaatggcgccgttggaatttagaaataaatacaattcagcagtaaagaaggaaaaaaaaggaagaaaaaataaaaaggaggatataaaaa

SEQ ID NO: 45616 - DNA, 353 bp, Gossypium hirsutum
  Clone ID: LIB3584-032-P1-K1-H6
cgcgccacgcgaaacgaaacaacggctaactgctataagtctgagcattgaaagaagcccgaaaataggacgtgggaggggagggccaattactgctatattgctggatacatgcttactgaataaacatactacatacactttgttactgaacacacttatgtaaaaaacatggtgtaatgaatgaaaattcccactccatttatttgatagtattttaagggagcacaatagaaagcaatacctgatatggactaggggtttggcaactaaactgaagcaagtaaactgctcaaatgctcatgtatggaagactgatgatgtcacatagataggactgaagatttacaaag

SEQ ID NO: 45617 - DNA, 273 bp, Gossypium hirsutum
  Clone ID: LIB3584-032-P1-K1-H7
gagttatgtcagagagctgaattctttgccgcgggagtgtagtctttcgaagactagtgccttggggatctgtaagcctacatttgaaccgaccattcaggtcaactatgatgttgggatctatggtcatctacatgctgcaagcgcaggacttgttgttatatatttagaggggttgactcttgcatcaatcagtttctggagtgagtatttactagatgttgttgttgattgacgcattggcttttgtacatgctattgggcttgccaggg

SEQ ID NO: 45618 - DNA, 221 bp, Gossypium hirsutum
  Clone ID: LIB3584-035-P1-K1-A1
cccacgcgtccgcccacgcgtccgatgggacgtacgtcgatggcagcaaaagcgtggttgatggtgacagagattaggaggctagggtttctttttatgtttgggttgtgggcttgttgggccttagggtttttttaattattttgggccattgggtcttgtaaatggactgtttttgttttgctggtacgggccgggtaaaatttgggttgtacaccttc

SEQ ID NO: 45619 - DNA, 437 bp, Gossypium hirsutum
  Clone ID: LIB3584-035-P1-K1-A6
ctgacgcgtggcaaaaaatctaagagcctctcctctctgctggggtctgcaaggccatggacgcctactggtgagccacctgagtggttcaccgcaccaccactatggctggtggccgtccacaagcgacgacggggaggtgtcagacgagcatggggaactgcggtggctgcatgcacggagttggagctgagcacaggggcaagggcgttcatgctgatctggatagggctagggtttgctcccctctaccgaaattgatcatgttatttgggctaggttttttaatactttgacgcccggtgggattatataatactggatataggccgcaactgtaatggactgttatatttcgtaatatggggttatattttggacccgggcaaagatgggctcttacaataataagaatcaattaagtcctctgctaccat

SEQ ID NO: 45620 - DNA, 544 bp, Gossypium hirsutum
  Clone ID: LIB3584-035-P1-K1-A8
cccacgcgtgcgctgacacgtggtactgtggaatacaagaacatcagcttcactgtttgggatgttggtggtcaggacaaggtatgcatcataaaacctaatgaagtgtagttcttttttaggtaaaaagtatgccactgcctaggagtaggggaaggggttgcggatgttgggatctgaatctctgatatgctagatgttaccacacttgagggtggctgcatgaatcaataagctaagtccttagttctatgatatagttctatgatgttcggtgtatatatgttaaatgttctgtgtcatttaccctgattgatcctctgtttcgagcagagtacaatatgatattgtatggtaattcatgaagccttagtttcaagaatgcagaaagcacatggatataacactctaccatctgattttgttacttgtgttgtttatattgggggcgtagccagcactgaagcatcttcttggttggttctatgatttttatttaaagcttcatattttcaccagcttactttatttgaaatacagattc

SEQ ID NO: 45621 - DNA, 135 bp, Gossypium hirsutum
  Clone ID: LIB3584-035-P1-K1-B1
gcacgtcgcggcttcccgcagcttaaatggggctcccttaggtccgattaggcttacgcacctgacccaaaaactgattagggatgtcacgtagggccatgcctgtagacgttttcgccttgacgtggagtcacg

SEQ ID NO: 45622 - DNA, 554 bp, Gossypium hirsutum
  unsure (1)..(554): unsure at all n locations
  Clone ID: LIB3584-035-P1-K1-B6
ccaccaatcgacaaagaagagggaaatcatcatttgatgaggatgaatgctcagctgaggattctgacagtgaaggcgtccatgatttcaagagcatcgctagaagtggtggaaatcaccgtataagtagtgctcgttctaatacattcataagcatgggaagaaacagtgaggttcgtacttctagtaggtctgtacggaaagtatcatacgttgagagtgaagaaagtgaagaaattgaggaagccaagaagaagaagactctaaaggatgaagctgaagaggaagatggtgactcaattgaaaaggtgttatggcatcaaccaaagggcatggctgatgatgctattagaaacagtagatctacagagcctgttctgctaagccacttgtttgattctgaaccagattggaatgagatggaattcctgattaaatggaaggggcagtcacatcttcattgtcaatggaaatcgttttttgagctacaaaatcttagtggttntaagaaggttctaaattacacaaaaaaagtgatggacgatgcgaaatac

SEQ ID NO: 45623 - DNA, 214 bp, Gossypium hirsutum
  Clone ID: LIB3584-035-P1-K1-C12
gtgatggtctttcccactaaaggaaagctaatactttgcttataattactgatatacataattacatttttgtacatcagtaattataagcaaagtattagctttcctatagtgatggtctttcccactaaaaacagtgaggtgtgctgtgtgcactgtgcatattgcttctgttttgtgttgtaaataaattcattgcatatttgttattcag

SEQ ID NO: 45624 - DNA, 530 bp, Gossypium hirsutum
  unsure (1)..(530): unsure at all n locations
  Clone ID: LIB3584-035-P1-K1-D1
cccacgcgtccgcacgtttaacattattgtaaaaatattttaaattatactttatttattaattnaaagagaagagaaaaaaaaaaaaaaaaaaaccaaaaaaaaaaaaaaaaaaaaaaaaaaaaaaaaaaaaaaaaaaaaaaaaaaaaaaaaaaaaaaaaaaaaaaaaaaaaagggggggcggtttaaggggaccaaagttaacgaccgcgggaaggcaaggaaaaagttttttaatggggcacccaaaataaaatcaaggggcgggggttaaaaaacgtgggaacgggaaaaaccggggggtaaccaaattaaatggcttggaaaaaaatccccttttggcaagtggggaaaaaagaaaaagggcccgaacaaatggcctttcaaaaaattggccaacccaaaagggaaaagggaaccccccttgaaggggccaataaagcggggggggggggggggtaacgccaaggggaaccgtaaaattggcaagggcctaagcgccggttctttgggtttttttcctttctttt

SEQ ID NO: 45625 - DNA, 572 bp, Gossypium hirsutum
  Clone ID: LIB3584-035-P1-K1-D6
attttcggaagggagtctctacgtcctgctggggctaaaacccagcattctccaaatgagccttggaacacaaagcccggagcctctgttgttgaaggtgaaactggcaatacgggaaatcgagacaagagtgacaagtatcaagagcaacgaatatatccatgtcatttaagttcatccatctactatggtggccaagatgtgtacttgtatccccagggtagccagagctctgaactggactctgtgttcaagaaagatgacggagaagacgattcagggagtgcaacaagaggaaactggtggcaagggtctctatactactaagagtttgatcgccagtcaacatgcttatatcaaggttcataggaagatatagatatatgggaggaggattatagttatcaaacgttgcagacagttagcctgtattactttcaagagccaagcaaatatagctatttggtctcccttcttctctttaaaggataatgaaacttgctctttttttcttgttatgcatatgcttcagtgactttgatatgataatactatatatgagaaatttactg

SEQ ID NO: 45626 - DNA, 529 bp, Gossypium hirsutum
  unsure (1)..(529): unsure at all n locations
  Clone ID: LIB3584-035-P1-K1-E4
gccctttatacaaagaagactgcgagttccttaatacaatggtgacttgcttgaagaacggaaggcctgattctttataccagaaatggagatggcagcccaaagcttgctctttgcccaagtttgaggcaaaaatattgctggagaaacttagaggaaagaggcttatgtttgttggggactccataaactttaaccagatgctatctatggcttgtatggttcaatctgtcatcccaccagagaagaggagcttaagttatgcaaactataccattgtctttaaaatggaggattataatgctacaatggagttttactgggcaccgcttttggttgaatccaatgtagaccctccgacaatgagggatggcacagtggagcctatagtcaagcttgaatcaatctcaaaacatggagataactggaaaaatgtggattatctcatctttaatacatatatntggtggaggtaccccaccgtgaaagtactacgaggatctttcgaggatggcgtgacagattatgt

SEQ ID NO: 45627 - DNA, 251 bp, Gossypium hirsutum
  Clone ID: LIB3584-035-P1-K1-F6
actagttctagatgctagcaatgcccccctatataagatcggtttcggacaaattactcttattgtacccaaatctggatggccgaccgccggtcacgcgccttacacgagtgtcgagaacgctcaatcttataacaagatcttgtaaaattatgtgacgcaaagggacactccaaagagacgtgaatatataatgccgacgtttctcttcgatatgtacaacgaggatttgacgcaacacacaggtgcgc

SEQ ID NO: 45628 - DNA, 569 bp, Gossypium hirsutum
  Clone ID: LIB3584-035-P1-K1-F8
atgaaaggctgcgatgactgttcaaattaatcgacaacaagtggtcggacctcttgttgtcgattattttgggatgaaaggctgcgatgactgttcaaattattcaggttcctccggttacttggcctgggacttcattgccggaaatgtcggttctgattacgacgatgaaatatcagatggggattgggaagatgaccaaagcatggaagatgtcgaaatgaggttctacgatggatttgatttagacaatgctgcctttgattggcccctctctccctaaggatttttcccatcttattttcataactggctttgacaatctctgtcgatgcttttccaccattattgagtacctcttagctgccactttgttatgtataaacaaagcttttccatgagtgtttgtaataaaaaaccagtaacatgtagccaaaaaagaagaagctttcttttatacatattttaatggtccggtagtgcccttgcaataattatagagtttcggtgtgggattgtaagattcttgagattagtgtttctggttggtgactttgatggaatatcaa

SEQ ID NO: 45629 - DNA, 539 bp, Gossypium hirsutum
  Clone ID: LIB3584-035-P1-K1-H4
ttttattcttttacccttctttactgggtttttcttatttcttttactaatattttcccgccactgtttggttgccaagaaaataatgacaagaattcatgatttcaataactaactttactattttcaatattttgtcttaatttggcttctatattagcataatttgaaaattaaacttctgatctttcagatttttaaattatttctttgttattaatctcttttttttttctcgtccctcttaattaattctcaagaaaaaaaattagtcatggtgcaggagaagaaagagcatgaaaattctgcaaacaagaaaccagctccaaccgagaaatttgcaccgaggtttgatgggttaaggttcattgagactttggtcactgctcaccgataaaagaaaaaagcttcaattttttttaacttgatgaagaatttttattattttgacctttttggcctttactacatccttataaggaagaagaggaagatatgaactatgatgtttttcagtgtttattagtactaatcatgtg

SEQ ID NO: 45630 - DNA, 560 bp, Gossypium hirsutum
  unsure (1)..(560): unsure at all n locations
  Clone ID: LIB3584-035-P1-K1-H6
ccacgcgccagacgatcttccaaaaaacacattccctcttctttgcatctatagtcgttttaatggagtatactggttgtgtctttccatcactgtaaataaacccattgaagcgctataccagatttctcctaaatctgagttcatcagagagtagtaaggacatttttcttttgcagtgcattctcggactcagacagaaatgacccttttttttaccaattcaaaagtcttttttggtcattgacgatggtgggttcaacctccatcggtacttcttcgatccaataggacgggctagtcaaattttaccctcgagttgcaagggcgtgtgccacttcatttgcctttcgagaagtaaactcaaaagagcgtcaccttctacaaccaaatctcgaaaacccattttttccccaaatatgatggcttgaagacacaccttcacttctgcagtggtcggattccctgttcttcctagagggtaagtacatgctcccattgtaaaacctttatgatttcttataatgattnctcgtgttgctgtcatgtcttgttatgga

SEQ ID NO: 45631 - DNA, 366 bp, Gossypium hirsutum
  Clone ID: LIB3493-001-P1-M1-A7
ctagcctctctttcttcttctgcttcatcttcttctctgttctataatggaagcaaagatctgaataggagtggcggtgttttttcttttttggtggaacaaatggctttcaatcatcaacactcttcatttgttctcgatgctctttattgttcagaagaaaactgggaggaggatgaagatgagcgttgcttcaataatgggattaatgataatgataatgataatcaattaaacccttttccgatcttgttagaacaagatttgttctgggaagatgatgagctttcttctttatttacaaagggaagaacggaatcaactgtacgatagtcttcaaaccaatgggaatctagctgggggctc

SEQ ID NO: 45632 - DNA, 305 bp, Gossypium hirsutum
  Clone ID: LIB3493-001-P1-M1-A8
gatccttaaaaaatattggtagcctgttaagtgaaattttgtggattaaagattgccaagtggacatgcatggccaacatcaaaatcttggaagcttcaatgaaatgaaagatagagatattacgtagataaggaaccttactctcacctttctatataataaacgcatctgattgccccttcaatcactcacccatcacctacaaaatcaactgcttcacaatggcctatacaaccatggctatttttttcccatcattcggcggtaaggcaatgaagttcactttttggagacaaagtttgtg

SEQ ID NO: 45633 - DNA, 389 bp, Gossypium hirsutum
  Clone ID: LIB3493-001-P1-M1-A9
ccggttgcaaaaggtcacgatgccatcaagtataatattcctccttttactatgtttttgttattcagttttgtgtgtaacatggtattaagaaccatagatttaaacattcacttttagaggcaattttgcttggaatattaatggggtaaataatgaaaatggtattttaattttctaaatctttggtttgaaaaaaacaaatcaagtcttatgagttcgagttctcgatgctaattggatacgatgcagatatcaaatgaatatctgcttatgaccctccaccggcacgtctatttggtttgcgagtacttgaattgaaagagctgggagtcaccgaggaggaagcagtggccgttgctgatggcaacatatcgagtactcctggc

SEQ ID NO: 45634 - DNA, 409 bp, Gossypium hirsutum
  Clone ID: LIB3493-001-P1-M1-C11
ggaaaactttacaatcgaaaatccaaaggctttatagccgaaatccccaaaaaaacaaatcaaaataaacataaaataaaacacaaattttttgttcgtatttgctgctgcgttcgtccttttgcaggtacggcgcgtgctggcatgcgttggctcttggcgtggggcgtacggaggcacgggcgtggtcgctggagggtacggaggctggggctgctgcggcgcaagcagaaactgctagggttctgcctgatttttttgtttttgggctgtgggatatttgggtctaggtttgggcttgtaataagtttgggctagggtattagtttgggtattggggttagggatgggtcaaagtctgtaaaaggacatttaatggactgttataatatttattgggtttttatta

SEQ ID NO: 45635 - DNA, 392 bp, Gossypium hirsutum
  Clone ID: LIB3493-001-P1-M1-C3
agtctccaacttccatttctcttatcggggttgatatcataaataccaaaatggcatgttctgaagaaacatcagcccagttagaacttatcaggcaacatctctttactgattttgcttccatggaaactccaccacccttctatcaactctcaaattccgagtcatctcatgtttatagcccgacccggttaaaacaatcgagtctcagccaacgtcgtccttctattaacgttatgatcccacccacaagttttaacataggcccaaacccggttccagattcggctgcggtggcggttgaatcatacgagaaaagtcattatagaggtgtcagaagacgaccatggggggagtttgcggctgaaattagagaccctaacaagaaaggg

SEQ ID NO: 45636 - DNA, 407 bp, Gossypium hirsutum
  Clone ID: LIB3493-001-P1-M1-C5
tctggagagaagatattctgaagcctatgacttgctatcttatgcgaggaaacatttgttacatttcaagaatttcttctcaaatcgtgttttaagtggtttggtgttggatggcattattactagcatcaatgaccattgaaagttttcactattagaagtggtaaacagcatcaaacggtattatttttcacatgatgctaatcataacatagatagccatgagctacaaagtggttggaggagattgtgacaacagttatcctacagctgtttactggcctgtagtggaagctggcttcctgtgtgtaaattaatcgaactgcagttcttcagttgatttgctgaatgcatgctaggaatcttcatttgttgctgctttgcttgatatgattttttctggggac

SEQ ID NO: 45637 - DNA, 400 bp, Gossypium hirsutum
  Clone ID: LIB3493-001-P1-M1-C8
gaaaatgttgacatctattcaaaatagcagtgcaagcttggatgcaaacttcgggatgggacatgtgatggggctaggattcccaggccaccaaattgttcccagcaacttggcagcaccaggcaatggttacgccgcagcataccccattttcacgcagagtaaaaatatgatgggggaatcttctaatgttgctgaaaatgggaatggcaccaattgcctgttagagcccgtcgtgatacaaaacaagaagaggatcatagatggtccgccggaggtggtagtcgaaaggagacaacgccgcatgattaagaatcgagagtcagcaacaagatctcgagcaaggaaacaggcgtacacagtggaactggaattagagttgaaccagcagaaacaggag

SEQ ID NO: 45638 - DNA, 413 bp, Gossypium hirsutum
  Clone ID: LIB3493-001-P1-M1-D12
gatgcattgtttctgttgtgtcatccggatttgaatgcctaagtgctatcgggtcaacaacatctccattccagatcgttattttggagcttcaaatgcccgagttggatggatttgaagttgcaacaagaatctgtaagttccgaagccgtagctggccattgattattgccatgactgctagtatcgatcaagatatttgggaaagatgtttacagatcggaatgaatggggttatccaaaaaccagtgctattacatgaaatcgccgtcgagcttcgtaaagtcctggttcaggccaacagagtcttatgacaatacacgctctcaacactcacattcaaaccggtatataaagtccgttccttaacctatatctctcgcttaatgtttctcgagttcttgaacggaatt

SEQ ID NO: 45639 - DNA, 401 bp, Gossypium hirsutum
  unsure (1)..(401): unsure at all n locations
  Clone ID: LIB3493-001-P1-M1-D7
gttgaaaagacagaaaaggaagcagtctaacagggaatctgccaggagatcaagattacgaaagcaggcggagtgtgaagagctacaagcaagggtggaaaacttggcgaacgaaaactgcacccttagaggggaactacagaagctttctgatgaatgtgagaagctttcatcagaaaatagttcaattaaggaggaattgatgcggatttgtggaccggatgctcttactaagcttgaacaagagaacccctcttcagttgtcgagggtaatagttagtaggaaatctacagagataacttggtgccggcagtgcagtattccgtctagtaatattctttttttagcgttggccaataacctaatangacatttgttttcttactaatctaaaccctta

SEQ ID NO: 45640 - DNA, 382 bp, Gossypium hirsutum
  unsure (1)..(382): unsure at all n locations
  Clone ID: LIB3493-001-P1-M1-E4
tcggtatagatcnnnnctttcatatgcagatctgatgaatggggtttcttgtttttgtgtaaatttattcagatctagtgtttgatgnctttctgttctcaattgttatgcttnncttttctgtattgactctgtaaatttgggagactttattctaaggtgtgatcttcatatgcgcaggctggtgtagtggatggttttgattgtgttgagtgacgtattttttgacgtggtgatagagatattatgttaatctaggagataaaatgcttatatctgctaatatttgaaaatgggtacggagatatagncttatatattnaatttttaatggactttgctntagtgattgaattgtggttttaatggccatttgtgtata

SEQ ID NO: 45641 - DNA, 401 bp, Gossypium hirsutum
  Clone ID: LIB3493-001-P1-M1-F3
cggacgcgtgggcggacgcgtgggcggacgcgtgggatggcgttgaaggcataaagaagtggcctctctttgtcgttcacatagccctcctttcttaaatattcaaaatctaccagcgttgttatatgtgtgtgtgtatatatatataattgagctgactttccaagctttatgatgattatccactaaatcatatctacatatatatattgccaaacaaccccccaaaagaagccaaaaaatcacaaaacaaaatctgggtttgtcttgaatggatgttgaaaagatgaaactgaagaaaaacatgttggctaaggcctgggacagatgcaaatctcttggaaatagtggcaagaactcatcggtgaatccattgatgaagaagagcaaatcatgtcata

SEQ ID NO: 45642 - DNA, 389 bp, Gossypium hirsutum
  Clone ID: LIB3493-001-P1-M1-F8
gtgattcagtgctttttatatggaatgataaaaatcaattacttcttggcatccggcgagctaatcgacctcaaactgtaatgccttcatcagtgctatcaagtgatagcatgcatttagggcttcttgctgccgctgctcatgcagctgcaacaaatagtcggttcactatattttataatccaagggctagtccatcagaatttggcataactctctcaaaatatgtcaaagctgtctatcatactcgagtttctgttggaatgcgctttaggatgctgtttgaaacagaagaatctagtgttcgtcgatacatggggacgataactggcataagtgacttagatcctgttcggtggccaaattcacattggagatcagtcaagggt

SEQ ID NO: 45643 - DNA, 407 bp, Gossypium hirsutum
  Clone ID: LIB3493-001-P1-M1-G1
agattatagcaccgatgataacgatccacgttttgatgggaaagaacaaacggaaaccaatttggcttttatgtataatcgaatggtgtccggcgctaagaaaacggagctgttcatgggatgtacatataaagccggcgacaagaactgtgattcgccgggaactatagagagtgcacctcataatactttacatacatggatcgggtcgggtttaaacccgggaagggaagatatgggcaagttttactcggcggcgaaagatccggttttttacgctcatcattcaaatatcgatcgtctttgggaagtttggcgggatatcaacgatcggaaactggatatcgacgattccgattggcttaattctttctttttattctacgatgagaatctgaatttagtaa

SEQ ID NO: 45644 - DNA, 279 bp, Gossypium hirsutum
  Clone ID: LIB3493-001-P1-M1-G2
cccacgcgtccggctatcagttcaaagggttcgttaatttagggtctaatccagtcaggtcccaacaagtggctggggtttaatattttgttggatcacagcttatagatatcaaatttatatatattattttactgattctttgatttgtttgagggactacgagctctaaattatgtgctaacgggccctttctttttgtaagtaattatttttagcagtataaatgaacttgtaacaaccatatttgcatatcaatattttcgataattaattttc

SEQ ID NO: 45645 - DNA, 382 bp, Gossypium hirsutum
  unsure (1)..(382): unsure at all n locations
  Clone ID: LIB3493-001-P1-M1-H7
cccatctcagcttcatgaacatgagcctcaacagtacatcaacagtgggaaaaggcaagtccattacactcctattttcagattcttggacaaggcancagtgaaagatggcaactcaagtaagccaccttgcactgtaactcaagtggaaggaaccaagcttgttcttggaatgcttttaatatggctagtaaccttaatccccagcacaatatgggctcaaatgaacacattatttgtgaaacaaggcaccaccatggacagaagcttaagttcaagctttcaaatcccagcagcttcacttgggagctttgtcacattctccatgctcctctccgtaccaatgtacgaccgctattttgtaccatncatgcgtcgaaaa

SEQ ID NO: 45646 - DNA, 416 bp, Gossypium hirsutum
  Clone ID: LIB3493-002-P1-M1-A3
cggacgcgtgggcttccaccagcaatgcaacagaagatttttgagcctgctccacctcctgtgaaagagggtggccctcctggaaggaagattgtggtgtctacaaacattgccgaaacttccttgactattgatggcattgtttatgttattgaccctgggttttctaaacaaaaagtttataacccacgagtgcgtgttgagtccttattggtatctcctatatcaaaggcaagtgcacatcaaagatctggacgtgctggaagaacacaacctgggaaatgcttcaggctctacactgagaagagttttaataatgatctgcagccgcagacctatcctgaaatattacgttcaaaccttgcaaatacagttctcatcttgaagaaactgggaatcgatgatctggtacattt

SEQ ID NO: 45647 - DNA, 415 bp, Gossypium hirsutum
  Clone ID: LIB3493-002-P1-M1-A5
cccacgcgtccgccaaacttaggggagcatctcagataattggtgttgatattaatcccgaaaagtatgaaaaagcaaagtgtttcggagtcacggacttcttgaatcccaacgagtataacgaacctattcaacaggttattaagcgaatatccggtggaggggcggattactccttcgaatgcataggcaacaccggaatggtaacaactgcactgcaatcgtgctgtgacggatggggtttaacagttacgctcggtgtaccaaaaacgaacccggaaatagcatctcattattcagcatttctttctgggaaaacattgaaagggtccctatttggaggatggaaacctaaatctgatcttccttcattagtaaacaagtacatgaaccgggaaatacaggttgatgagtt

SEQ ID NO: 45648 - DNA, 413 bp, Gossypium hirsutum
  Clone ID: LIB3493-002-P1-M1-A7
gtcagatcttgcaaattaagaaaagaatcgattttggatacaactgcatgtacattgaggacatacgtaaaattggtcaatgaggctggtcataatagttaggcacatattctaacgaacagtgactcttgctgacgatacatacaacagccccatcgcagcatcgatgtgattacaatgaaatctcctatatatgatttcttaatttgggcataaaaagagaacatgtttggtgtgattataattattagattttggtggtttgattgtaacaggatattaccttctcccgagagacgacactatgctcttgatcagcggagataggaagcgagaggaagagaaagatggattttatttttaattcaacctccccggaaaggtcaaacaaattcttcttcttcttcttcttc

SEQ ID NO: 45649 - DNA, 373 bp, Gossypium hirsutum
  Clone ID: LIB3493-002-P1-M1-B11
cggacgcgtggggtttgagtgtttttcagcttttcttttattttctttattcactataatctgaaagctatgaagatgccagtggcgttgctggtgctgctggcattatgcaatgcaatcaaagttaatggagaaggtaactatcttcaatgtgatcataacccgacgtcgcaaccgagaccccatagcgtttcaatattagaattcggtgctgttggtaatggcaaaactttgaataccattgcctttcaaaatgccattttctatctcaagtctttcgccgacaaaggtggtgctcaactctacgttccaccaggacgatggcttacaggaagtttcaatctcactagccatctcacccttttccttgaaa

SEQ ID NO: 45650 - DNA, 374 bp, Gossypium hirsutum
  Clone ID: LIB3493-002-P1-M1-B6
gtcacgttgtgagcatgatggatcatgatatggatagaccattgatatacggtttcggaggcatggggtgtggagttcgtcgaatctaagctgctgaagaaacgctgatgcatcgaacattatgattgatgtgtgagggcttgggaaagaggatgtcaaagagattgagaaacagagcactatgtacataataggctatgactgagactcaaatgcggaggaaactggcggtaggtacaccagcaggatccatttatgtgaacaagtatacatgactgaccatagtatggctgagatgaaatacggtgtgcttaaagtggatgtgcaaagatcaaggaagaggagagtaatgacgagattaatgtgcaaattga

SEQ ID NO: 45651 - DNA, 408 bp, Gossypium hirsutum
  unsure (1)..(408): unsure at all n locations
  Clone ID: LIB3493-002-P1-M1-C11
cttgtgccgttgcatttttttcagagatgtgctcttttgcgcttctttcgatctggggaatatcaagatcggaatcaacggattcggaaggatcgggcgtttgggagccagagttgctctccatagtgctgatgtacgagctcatagctggtgacgatcctttcattaccaccgatgacatgacctacgtgtacaagtatgacagtgttcacagtcaatcggagcaccgtgagcttactgagagggactcaagaacccttatgtttgtggagaagtctgtgactgatatcggcatgagataccttgacaaaatgcctaggactgagactggaactgaatatgtggaggnaattactgccgttttcactgacaaggacaaagctgctgctccattggaaggggttgcaa

SEQ ID NO: 45652 - DNA, 421 bp, Gossypium hirsutum
  Clone ID: LIB3493-002-P1-M1-C3
gggatgaaggttttggctcaagaatttcagcagattcatttctggtgataatggaagatggaatccaaaccttcatgaaatttctcaaggcagacaaggagaaaccatatcaaatcattaaagcattgcttggaaggaagagaaaaggttcacttgacccaacacttgtccgactcgtgaaaaaagttaatgccaaaaagaagatgaagcttaaagaccttggcagggctcacaaatgcctaaggaaagggaaaaacaaggtcgagaagatggagatattgatgggtctaattgacctaaaagtggtgtcaagggtgttgagaatgagagatctaagtgaacaacagttgcactggtgtgaagagaagatgaacaaattgaggattttggaaggcggtctccaaagagattcctcaccact

SEQ ID NO: 45653 - DNA, 415 bp, Gossypium hirsutum
  Clone ID: LIB3493-002-P1-M1-C6
gtttgttttatatccctcggttggagaaatttcttctgtcattttcgatgccaccacaaagtggatggtgggtgatgctacgatttgtaatcgcacactgttatgtcctgttgttggcagacacgtttaatgaatatgccaatttcttacaatttgttgcagatgactccaataataggggagagatacagatgcaaagactgcgtggagaaaataggttttgacctatgcgaatcatgctacaaagctccggctaagatccctggtcgatttaatcagcagcataaacccgaacatcaattagaaattatacagcctttaagcctaagtgactttatatccaggctgacctcggaacaatccgatgatgatatctcagatgcacctggacataccgatgatgcttcacatatgc

SEQ ID NO: 45654 - DNA, 371 bp, Gossypium hirsutum
  Clone ID: LIB3493-002-P1-M1-C7
gaggcaagccatggcatgccctcaaagtttcaatctttcaatcattaaaacatcaactactcttaaaattttctccaatacctcaaatcaaaactcggttacaggttcataccttatgaacaaatgtgggttcaccccaaaatttgcttcatttgcttcaaaatatggtcatttcgaaacaactgaaagggctgattctttggttgcttttctggaaaatcatgggttttcgaaaacccaaatcttaaatctcataaaaagaaagccaagattgcttatttatgatactgagaaaacccttttgccgaaattggaggttttttactctatatggttttcaagggctgagcttactaaaatattgactagct

SEQ ID NO: 45655 - DNA, 413 bp, Gossypium hirsutum
  Clone ID: LIB3493-002-P1-M1-D4
agcaaattgaacgcttcatggttgatttgaagaggcttgaagtgcaagctagagatggaccatctgatccaaatgcgcttgccaagtggcggatacttaatcgcttgcatgacagaaatgagactatgtactacaaggttctaattgccaacatcgaggaatatgctcctattgtttatactccaactgtcggtcttgtttgccagaactatagtggtctgtttagaaggcctcgaggaatgtactttagtgcagaagatcggggagaaatgatgtctatggtttacaactggcctgctgatcaggttgatatgattgttgtcacggatggaagcagaatattgggtcttggagaccttggagttcagggaattggaattgctatagggaagctggatttgtatgttgctgct

SEQ ID NO: 45656 - DNA, 337 bp, Gossypium hirsutum
  Clone ID: LIB3493-002-P1-M1-D9
ggttctttaagactggacgatattaagctttaaccttaccaactaggaagtaatactgaattttaatatgtttgaagaaaataaacatgtatacaccactggaacaatatactgaaaaaactggttgaagacgtatagttcagattgatgatactgaaatttagcataaaacagccgatgctcattgctattctcctaacaggaagaactatgtacctctttgctaagaacgatatgatgcactctattatcaggcatgagaacgatgtattactggaactggcaacagacgctgaattactattcagaacaagtgctctagctcacattggagctc

SEQ ID NO: 45657 - DNA, 410 bp, Gossypium hirsutum
  Clone ID: LIB3493-002-P1-M1-E3
ctttgcactgaaactgcgtcgtttttcgaagctccatacaccaatgctcttctagcagttcatcatccaaaaggttcttcagcttagaagaagatcgagcaaatttcgattggttttttttttcttttacacagaagattttcccgctttatttataaagtgcaggttgttctctttgatggcttcaccggttactgattcagccggtttatcaccctgtatcgaaactgtgtcatggaatgcagatatggtcggtactttgcctatgccggaagcggaagctccgatgtcttcttcggtgttgaacaactgtaacataccgaaaccgccgcctcttccgagtaagattgtaacgagaaacaagcatcccaaatggcctcccgagagtagctttgccccaaaggaaacga

SEQ ID NO: 45658 - DNA, 408 bp, Gossypium hirsutum
  Clone ID: LIB3493-002-P1-M1-E9
cggacgcgtgggtgaaaatccaaattcaatggctctacattctctatcctcaatcttacctttccaaaaccccattttctcctccctctcctctccactttctccttatcaccgtcaaatacgccaccttagaccgatggttcccttggcgatctctcgtcgcttcaggcctcgccgtaaacatacccagaaacgaagcggtacgtccatgttcctcccgctttcatccagaggaaacgagtcgcttttagattctagaaatagttctggaaatggagactcgatagcgatggagcaagagtccagtacctcgatgagttcgatcgctagttcgaggaagaaagacaggtatacaggcaacgcccgaagattcagaattttcggcgttgatttttctccagacagtgt

SEQ ID NO: 45659 - DNA, 413 bp, Gossypium hirsutum
  Clone ID: LIB3493-002-P1-M1-F5
ggaatattactttgtgcaaagacaaaagttgctaaaactcgcttagcagcatattttgctgatggaacatctcgtgtcggagctaccagtaataggaaagctgaacgaagtggtacgaggaaaatatcaaagatataccgagcacttgtgactggcatacttgttgatgacaaggttatcatcaatcagcctattggaattgtgcgatatcccggagtggccaaaggactatatgttgcttcaccctcagggaagcctgctttgagcaaagttgaagttcttgagagagatgaaaaacaaaactgtacattggttcaggttgagattgagtccggacggcctcaccaaatacggattcatctttctttcataggacatcccttgttggtgatccactgtatattgctgggggc

SEQ ID NO: 45660 - DNA, 355 bp, Gossypium hirsutum
  Clone ID: LIB3493-002-P1-M1-F7
ggcaagatcctcatgtaagttggctctgaaagaacttaaacaatggatgatgccacaaaaggttgaaacttcgttggcaacttatccatcgtcagctgaaattgtggcagaacctcttggagtcgtcttggtcatatctacctggaacttccctttttcattgtctcttgatccggtgattggagctattgctgctggcaatgctgtggtcctcaagccatcagaaattgcttcagccacatcatcactgctttcaaggctagtaggggaatatatggataaatctgctataattgttgttgagggtgctgttgctgagacctctgcattactagagcagaaatgggataagatc

SEQ ID NO: 45661 - DNA, 196 bp, Gossypium hirsutum
  Clone ID: LIB3493-002-P1-M1-F9
acccccgcgcgtgccgcgcccggattccccgggcgagccacacgcgcgcccacacgtgcgctttgtggagacacttaactctgctctgctgtaaattctcgatcgccgcgaaaaaaaataatggggaggggaatcttcttcggcgcggattggggaagcactggggcccctccgggggaggataaaaattgggggg

SEQ ID NO: 45662 - DNA, 412 bp, Gossypium hirsutum
  Clone ID: LIB3493-002-P1-M1-G1
tcaatgccgggaatgttctagtaattgaagacaatgaacctgctgcaaaatggctagcccttataaaccacgcacttaacaagccagattacgatttaacgcacccatctcccgacgctagccaaagttcgaaacatttcaatacgctattgaaggatcacttcttctataaaccgtcactcaaagtcctgagtaggaatttcagggctgaaagcagccttctcaagacctgcaactgtcccgttgaatccacacatggggagaagcgaggccaaaaaaagcttagggatttagcaagcaaactagaccttggtccccttcctgcgcgtcgtgatggtgcagttgatgagttggttgacctttctggtatgccccccaatttttcaagtggccagatgggttaccggctcgt

SEQ ID NO: 45663 - DNA, 413 bp, Gossypium hirsutum
  Clone ID: LIB3493-002-P1-M1-G3
caaagccagatggcagctcagcacaaccagaattttcagatgacaaaaagtccactgttgaaaatgacgataagaagaagatacaggacgagtatcttaaagcttattatgctgctttgtataagaaacaacaagaactagaagaagctgctaagaaacaacaagaattattggacattcctctagccactggtctttctgactcttccaatcgtcaagttggtatgaaagctaaacgtgatgacaatgagggagaagatgatattgattgggaagaagctcctgttgctggcaatacaactgagagttataaggtcaatgatttgaatgtggaagcagaagaatctggagatgatgaggatgatgtagattgggaggaaggctgaattaatggttcagcttcctgtgatgtg

SEQ ID NO: 45664 - DNA, 407 bp, Gossypium hirsutum
  unsure (1)..(407): unsure at all n locations
  Clone ID: LIB3493-002-P1-M1-H12
tcgcgtatcgatctgtntcatcgatcaaatgctatccaaacccatcaatgcaaacaaccctccactcattccatccatatacccttgcttcataacgatctactaactaaggcatctcgagacttgatgttccacagaggaattgcgataatactatgcgcttgttttttcccaaataaagattgaatatggatgaccgacaagacatttacatgcactcatgatctgatacactgacaccctgtccatatccaatacatcagacaaaactctatcagagtaagcatgtgcgctccccatatgcaacgctagataaacaaacggtgagaacctaattttacactcagcaacactcttcgcggataggactttgctttcattactcatgcaaattaacaatttggttg

SEQ ID NO: 45665 - DNA, 413 bp, Gossypium hirsutum
  Clone ID: LIB3493-002-P1-M1-H3
agaagaagaagaatccttgattcacaatttgattgtcactgtctttgcttcttcttcttcttcttcttcttcttcttcttcttcttcttcttttcaattgatgaattcaaggcaacaagttctttgagggtcagggacttgcctaaaaagtaaacatgccttttctttaatctgttttcttccatcatcttttccctcacttttgcctcttctgatattccatttttaaaaacttcccattccttgaaacaataaataaataaaaccttcattttttggtttctttctcgaatcttcaatgagatcttgagtggtatcccaaaatacttccaaatttttgaaattgggtcatcgaatttgagaccaaaatcttgtcaaaataaaaaataaacaataatcaaatatatataact

SEQ ID NO: 45666 - DNA, 457 bp, Gossypium hirsutum
  Clone ID: LIB3493-004-P1-M1-B1
cggacgcgtggtgaagcgtcgctctatagtgctggtctgatcaacactgtgccgggtctctaaatctaatactcagatccgcgagtaattattgtcacagctcattagaatggagacccctctattatcatacgattaagttactccacgtggggcaagctcactcttccttcaaacttttcaatttattcaatacgactattctcgatttcttatcacaacagctataatggatttttttacattcatcaagacttatttggttatggtttttgttgagatttccacctatttctttgcaaacttttttaagtatgtttactcacctcaatcccaccatgagtctgctctttttgccctccatttttatgcagtttatttctaattttttcttaatttttttgtacaatttttttttttttttttcaatcttcttgattcacattttaaatttttt

SEQ ID NO: 45667 - DNA, 391 bp, Gossypium hirsutum
  Clone ID: LIB3493-004-P1-M1-B12
aaaccctctaaaacaacaaagcatctatctggattcttccttcatcattgcacttgaatgcttgttctttttttgctccattttttgttttagattctccatcgagttctaaactgtacttacggtggttaaaacttcttcgcttttcttgtttatatttccatctgtttgtttctcgggaaaaccgctacaattcccgttcgtttggtgctttttaattcgtgttcctttgttctgcctgttcgtttgcattcaaggatctttgaatcttcttgatctatcgtctaccattattttgagaacaatggaacactttcaaaacgacgatcttgaatatattgtcgatgactattacgacttcgatgattttgagcaacgacgatctcttcgc

SEQ ID NO: 45668 - DNA, 451 bp, Gossypium hirsutum
  Clone ID: LIB3493-004-P1-M1-B7
cctctttcgagtttttttctctctctctttaatttcactcagatttttttccaccaccacccaccgacgattttccttcatccaatggaagccgccgccgacaatcagagcccttcttcatcggacgttgatgtcacgccacgtggggcaagctcagccgtccttcgagctcttcaattaatccaatacgacgattccgattccaagctacaagccgctaaggaaatccgtcggctcaccaaaacttcccaaaggtgtcgccggttacttgctgaagctgttatccctctcgtttctatgctccgagtcgactcacctcaatcccaccatgagtctgctcttctcgccctccttaatctcgccgttaaagacgaaaggaataagatgagtattgtggaagcaggtgctttagatcatgttattagattccttcaaagtgagaatataaacc

SEQ ID NO: 45669 - DNA, 348 bp, Gossypium hirsutum
  Clone ID: LIB3493-004-P1-M1-C5
ttcaagtatcacaagagaaccaaagatgtccgaacgggtaaatcagatggcaagacttatcgtttctccaatcaactactagccctcgaaactcatccttactttcagtccctcccagcaaccgcagccgtggcggcgcccacatcaccgcagcaagctgcagctcaggcgacaatgccagctccgagtctccctaatgttactgttccatcagcagcagccctccccagtttgcctcataacattgtaccaacaaatataaaccctacacccacactcccttcttttcctaatgtttcggcagatcacatgtcgaattcgacatcctcatcgacctcatcggatttg

SEQ ID NO: 45670 - DNA, 396 bp, Gossypium hirsutum
  Clone ID: LIB3493-004-P1-M1-C9
cggacatgtgatacaagagagcaataacatggatgatgcggctagaagaaacatagcggaccaaacagttatcaaagattgctgaactgaatccttgaagacagtgatggacatatgcctgagatgcctgtccgatgacccgaccggtcgaccttgcattgaagatgtcctatggaccttgcaattcgcggctcaacttcaggatccatggcgacatgattgtcaccacatacatgggatatctgactggcatccagatgactgacaagaacagatctgtcgtggatcaacctgctgatggctcttggaatctatagatggcagccatcactgatttgcaaactgcatatgaacaagttcaatactgctaatgactgcatcaatgactatttcatg

SEQ ID NO: 45671 - DNA, 459 bp, Gossypium hirsutum
  Clone ID: LIB3493-004-P1-M1-D1
ctcacctgaagatcgatactatcgaaggcgtgatcggtcctactcaccttatgatcgttattatcgtagacgggactgttcttactctcccgatgatagatactatagaaggcgtgataggttttactctcctgatgatcgttaccactgcagacgggatcgttcttactctcctgaggaccgatactatagaaggcgggaccgttactctcctgaggatcgacactatagaaggcgggaacgttcttactcacctgatgatcggtactatagaatttcacgtgataggtcatactcaccatatgactctagatatagaagacaccattatcgttctggcttctcgaagccttaaacctcccgatcaaggagagcttcgaggagaatgctgtcgtatagtgtcagctctaatacaagtaccggtttgaggaggagctgtcatgcagcacttcctcagta

SEQ ID NO: 45672 - DNA, 449 bp, Gossypium hirsutum
  Clone ID: LIB3493-004-P1-M1-D12
cggacgcgtgggcggacgcgtgggcggacgcgtgggtttttcaactttgaaaactagcatgtacgatccaagtggaagatctaataagatcatacttgttcttctacttgttttggtcctcatttctttgatagttcctttggaaaagagccctgaaactagtgaaacccaccattttcatgtcaataataatctccaaattgcatacacagcatgtgaaggcactttatatcccgacctttgtgtcgccactgtctccattctcccaaatcttgcttctagatcactccccgaccttatctcagcaattttaaaccaaaccatggacgaggtgagactctcttgtgccaactgcactgagattgaaaagggtctcaagagtaacaccaccttagaatgggccgccataaatgattgcatcgagctttttaaacataccctagccgagc

SEQ ID NO: 45673 - DNA, 317 bp, Gossypium hirsutum
  Clone ID: LIB3493-004-P1-M1-E5
ctgagtcatatgcccgtatagagaagaggccgataaggcggtcaatgcttgtaacattatgaagactatgcctggggcatctagtccattgcaagtggaggatgcatatggcgagttggaaagattagagcgcaaactctgtgatggcttgctatcgaagaatgtctatgaagatgacgatgctgcttaattttctaaatacggaaccatgagggagctgcatattactttaggctcgtaacagacatgtaaaggctgtgccttgttgaaatatgggactaaggagcaggcccttgtcgcgctgcatgctgataatg

SEQ ID NO: 45674 - DNA, 407 bp, Gossypium hirsutum
  Clone ID: LIB3493-004-P1-M1-E8
gcgattaaaaatggcatttccgtttcgtgctctgctggtaattcaggtccttcgagttcaaccgtttctaataccgcgccatggattatgaccgtgggtgctagctacctcgatcggagcttcgaagctattgtcgagcttggagacagacaaattttcgagggttcatcgttatatatcggcaaaccattaaagcaattacccctgttttatggtgatctaagagccgcattttgtattgatggctcactcaagaaaaaccttgtgaaaggcaaaatcgtaatttgccaaaggggaattacgagtcgagccgagaaaggggaagtagtaaaatcggccggaggtgccggaatgttacttataaactcagtaaacgaaggtgaagaacttttcgctgacgcacacgt

SEQ ID NO: 45675 - DNA, 419 bp, Gossypium hirsutum
  unsure (1)..(419): unsure at all n locations
  Clone ID: LIB3493-004-P1-M1-F2
gcaaatgcagcctggtatgaaagctgtttgaagtttgaagtaagaaaaagagttgaacttgtgctgtaattctgtgtgtgcagaaaggatattcaattttgtttctttagctctgcatttggaatttgagggaaatatcaaaacattccttgaagcacccttcaatcccaagttgagagatggggatggatggtgnagaagagcaaatgcaagagccagcaggctgcaaggaaagaattttcgtttcggttcgtttacgccctctcaattacaaggaaatagctaggcacgatgtatcagactgggaatgcatcaatgataacacaatcatataccggaacagccctttcggttccgagagatcaatgtacccaacttgctatacttttgaaccgatttttagccctgattgccccaac

SEQ ID NO: 45676 - DNA, 434 bp, Gossypium hirsutum
  unsure (1)..(434): unsure at all n locations
  Clone ID: LIB3493-004-P1-M1-F4
tttctccttacttttttttctcattctaaatattttattagatccaattggaatcgaagattaaaactctattgctaaattttctttcactcaattctatcttattttaaattaatttttagtgttggttggattttgtgggatttgaattagttagatctgaattggggtattttaaatttctttttcctcgattggttagggagtttttctcaatggcaatgccatcgggaaatgtagttttatctgataaaatgcagtttgctgctcctccagctgcaggagctggcggcggcggaggtggagctgcntggagggtggatccaccagcaccatcctcggcaatggttccccgatgagcgtgatggcttcatctattggttgcgaggggaattcgctgccgccaatgctatgaatgactctctttgtcaaca

SEQ ID NO: 45677 - DNA, 302 bp, Gossypium hirsutum
  Clone ID: LIB3493-004-P1-M1-G8
cggacgcgtgggcatggataaacagaaaaggaagcttggaggttgatcaattcaagcacactggttgtttctctcaactgtaattttttttttttttgttcttttgcctagctagttgatgaaggagagcatcatcccacattatattcccatttcccatccactttgatttttcattttgttttgttttttcttgattatggtttactaccctttttaactatttgaatagttcaatatataatgtggagaaaaatcagaattagaaattattactaaatggagagaaatatgttaattgg

SEQ ID NO: 45678 - DNA, 337 bp, Gossypium hirsutum
  Clone ID: LIB3493-004-P1-M1-H1
ctcctttcccttgcatgctatggccagctttcttcgaaatgtttcatctcttaaacgttctctcttcgctccacaggtttgtaggggaggggtgttaaggtcatcttctcagctgtgtaacttttcttctaaaggtagaaggaaatccaagtcagattcaagtgattcgtgcgatgagaatatgtccaagaaagatttagctctaaaacttgccttggatcagattacgagttcttttggaaaaggatctatcatgtggcttggtcgtgctatgtctcatcgaaatgttccagtagtttccactggttcttttgctctggacatagcacttggaatc

SEQ ID NO: 45679 - DNA, 386 bp, Gossypium hirsutum
  Clone ID: LIB3493-004-P1-M1-H11
ctgtttttcttttgtgtggcgtcactgccctttcgcggacaagacaagaggaatcttttgggaaaaatatatacattttttgcactcatttcgctagcttttttttttctccaccatagaaaaagaaaaaaaaaaccaaaaaactataggtattttgtttccatttgcaaacagtgtggactttaatagcttattgtttcccatgtttatctgtaggaaaatcctttacagacgcaaactttcctttctgaatgaccttattattggttcacccttcatgtttagaaattaaaacatggctgatggctcccaacctttgtaattctcttcctttaaactgttcttaattggttgatgtagaattttatggatatatagctatcttc

SEQ ID NO: 45680 - DNA, 359 bp, Gossypium hirsutum
  Clone ID: LIB3493-004-P1-M1-H12
cgacccacgcgaacgttgactcgtactgtctgcatgatcggtgagagctgaaacgcttactgcacttgatttaacgaagagaagcttttgtttcgctgagaaataatccaaacgctatttctctgagttcggagatttctcttttgtttggatcaaactcaaaattcaaaattcttcgctctcaaaattcatagatcttttcttttctttccttttctttttcacttttaagatcttcacgtagaaatgcagcatcaacaaggagaagcttcttctaggcgtcaagttccgcttatctcaacgcgctctcactagaaatcgagacatgacttcagcggaaacgcagctcattacaagaa

SEQ ID NO: 45681 - DNA, 305 bp, Gossypium hirsutum
  unsure (1)..(305): unsure at all n locations
  Clone ID: LIB3493-004-P1-M1-H5
ttttcttttgtgtggcgtcactgtnntttggnggacaagacaagaggaatcttttgggaaaaatatatacattttttgcactcatttcgctagcttttttttttctnnntcttttttnttcctttttttttcccttaccccnttngtgttccgcttctctcttcctcccttgtttccttccgtctcttttggctgcttttcattgtttgttcccaggttgttggatcttgcacacaccattctgtgaatgaccttattattggttcacccttcatgtttagaaattaaaaccatggctgtggctc

SEQ ID NO: 45682 - DNA, 304 bp, Gossypium hirsutum
  Clone ID: LIB3493-005-P1-M1-B5
gtgaacatcatggatacactgaggcacgacgtgctactatggaaacaggagggaggaactattgtgagctctgaagctgtactatgtacgaggatgaaagctagcgatgagctgacttacaatgtcaccaggtgaagacaaattgatattaatgagatgcgagaatcttgctaaaccatcaagatgaagcatgacatatctgtcacgagatattgtactatatgaagatccagaaggatagttaactgacataagtcttagagatatagtcctgaattttgtgattgctggccgtgacacaaca

SEQ ID NO: 45683 - DNA, 252 bp, Gossypium hirsutum
  unsure (1)..(252): unsure at all n locations
  Clone ID: LIB3493-005-P1-M1-C11
cacaaaaataggattttgtagggtcagagtaccattttcatccttccgtcctgtgaaaccagatgatccaccattagatccattccttgtacatacattaactatacgttttgagccacgaagacagaggcctgttgaaggatcagcangaatgaagcaagacccccgaagtttcaagcttatattagaatatataaaagccttgnctactggacaggaaacagatnttatttagtatcatgcacgggatta

SEQ ID NO: 45684 - DNA, 328 bp, Gossypium hirsutum
  Clone ID: LIB3493-005-P1-M1-C12
gaataatgcaatgcgctttgaagagatactttctggatcaactcaaatgcttaactatgttgatataatagtagtagatctgcaagccaaggtatcatgacgttgttcttttgctaatgatgttaggccatattaattttggattttaattacattgtgtaggctgaagagtatgaaatcactaatttggaggccttcttttcaagctctgaatttaaagcctggtacgagttggatgaacaaagaaaagtcatcaggcatcatcttgcagatgatagatgatgacaaatcatagctgagacattacttggacaggtcattgatcctc

SEQ ID NO: 45685 - DNA, 378 bp, Gossypium hirsutum
  unsure (1)..(378): unsure at all n locations
  Clone ID: LIB3493-005-P1-M1-C5
cggacgcgtgggctggttactcccatttaataattttagggttttgtattagtactgctatatcttccaatttctccatttctgaaatataggcactgataaaagctaatacttcgtgcacccgtttccttaccccctcatgatatgccttgtttggattgtaccttaacgcccaatagctgatagccattcttttacacatagagtgatctatttatgaacttttatgctaaccaacatttccaactttgctccccatttgtggttgagaataccacatcgatcccctataggatttgtcgcgtgaacgaacattctcgaaactagtgctctactgattcctnctcagtttggcaaacaggacaaagactatctact

SEQ ID NO: 45686 - DNA, 160 bp, Gossypium hirsutum
  Clone ID: LIB3493-005-P1-M1-D1
gtcgttgaggaatcggtggtcctcacggtgatgcatgtcttaccggacgtaagatcattattgacacttatggaggctgaggagcccacaggtggggctttcttggaaggaccaaccagggcaggaggggtacatgtagacgtgcaggatgcctatgctg

SEQ ID NO: 45687 - DNA, 432 bp, Gossypium hirsutum
  unsure (1)..(432): unsure at all n locations
  Clone ID: LIB3493-005-P1-M1-E12
gttggttcaaataatgtcagtgttgggagtaagaaatgctgccccagtgtttagcttggttccaacagttggacccttcaaaccagcaggacttttgccttcaataaccgaggaagacagagttatactgaataatgtccaaaaaattctcgaattcttaacagcgggaagttcaatatcaacgacgtcaagtcagggtgtaaatgttgctcaggttatccaggagttgcttccagtgttgccaggcatatctgccagggttcttcccgagttgattagccggttatcgtctcgtgtgttagcacgtttaatccgggatacatttttgtaagcatttttaacgtaactagtctcttcaatngtgtatatgctngtatagcagatcttgatattatataaaatggatataataatntatatgtctttagattt

SEQ ID NO: 45688 - DNA, 241 bp, Gossypium hirsutum
  unsure (1)..(241): unsure at all n locations
  Clone ID: LIB3493-005-P1-M1-E6
ttctcattttagcgtagtcccccattttgcaatatacccttcaagctccaagattctctcccatggcgtcttctttaacaacactgtcaaatgtgggtcttctttcatctccaagaaccccacccaagaaccaacccatttccacatccagtaattccttgaactnntcctcgacactctcactttcccccaagatttcatcttcatcgagttccttctctgggtcatttcgttttccccg

SEQ ID NO: 45689 - DNA, 328 bp, Gossypium hirsutum
  Clone ID: LIB3493-005-P1-M1-E8
gttttaacactcataatgatggtgctaatggtcagataatgcaccggtctgatataagtcggcgctttccttgctctaatggttctggtattgctgctatacgaaatattggtagagacacattggtgaatcctgatatttcttataagggtgtaggctctgaggaatctttcagattccaaaaggtcttgcaaggtcaagaaacttttgtaagccctccatgtagaagaggtccaactgtagatgacactcgagaaagtgacagtcctggtgcccctgatgttggtcagttgtcgggaacctagaagtggatggtcttctttgatgc

SEQ ID NO: 45690 - DNA, 277 bp, Gossypium hirsutum
  Clone ID: LIB3493-005-P1-M1-F11
ttttgcttgtggaggggagaggagactgatcaagtgagggaaggtcatcctgacccatcatcttctctagtggagaagttgctatggacttacatggatcttccgtacgtataggctatatctgtggctacatgacatttggattagcatacagatgatttaggcgttattttgaatttttccctaaagacgagctaggctgtgaaataagtgtgcctgtgctgtatgttatcatagatgtgtgcacattattacgttaagatattggatgagtatg

SEQ ID NO: 45691 - DNA, 156 bp, Gossypium hirsutum
  Clone ID: LIB3493-005-P1-M1-F12
ttatgtcaaggaacatcctgtgatgaattacatgaaaggggtacctgaccttactcatcctccattcattttaaacaaatcataacctatcatattataatttcaaactttttacttcaaaatacttttaatttcccaatcccaaaccccatcttt

SEQ ID NO: 45692 - DNA, 374 bp, Gossypium hirsutum
  Clone ID: LIB3493-005-P1-M1-G2
gtcaacccttgcagttagaaatgcagatttttctgcccttcagaataacttaaaagaactagaggaactgagggaaatgagagaggatattgatagaaagaatgagcaaactgctgccatcttgaagatgcaaggggcccaacttactgaattagaagtgctttataaggaagaacaaattttaagaaagcgatattttaatactatagaagacatgaaaggcaaggttagagtgttttgccgcttaaggcctttaaatgagaaagagatgcttgaaaaggaaagaaaagtgctaatgggcttggatgaattcactgtcgaacatccatggaaggatgataaagcaaaacaacacatgtatgatcgtgttttga

SEQ ID NO: 45693 - DNA, 310 bp, Gossypium hirsutum
  Clone ID: LIB3493-005-P1-M1-G9
cggacgcgtgggcttaattgcaccttgccactgcaggggcactcagaagtatgtccatagatcctgtcttgataactggaggtcaactaaggagggctttgcatttgctcactgtacagagtgcagggcattgttcatcttacgtgcaaatgtcccacctgaccggtggtggttgagattaaaattccagtttcttgttgctagggaccacgcattcatctttgtaattgttcagctgattgtggcattcttaggggtgctggtctacaagttttatggagaggaactaagagaaatgtttggttatgat

SEQ ID NO: 45694 - DNA, 258 bp, Gossypium hirsutum
  Clone ID: LIB3493-005-P1-M1-H10
ggtcaacaataaagtctggagatacccctggaaatggtgtggtaccatgagggggccttgacggaccatggaccattcactgttttctgattggttgtgcacaagatgtacttgaaaggtgcgattcaggcataatcaattcactgatgctgaactgcatttcgggaggatgcatgatggagagattcaggtctgttcaaatgactttgtactggattatttagaacactgttgatatagttagctatgggcaggctt

SEQ ID NO: 45695 - DNA, 277 bp, Gossypium hirsutum
  Clone ID: LIB3493-005-P1-M1-H11
acagttgggaagtatacagccactgcatgaggtgaatggaggagaatgtaattgtcagcattgttagtaagggaaacagagggtgaaatacttcaagcaaatcaatttgcaagacaaaccctaacagctgtgataacaaaaccacaaatacttctgaagattctaaaactccatctactggacacaggatgcaaagaacacagcccggaaataccgtcctcataacccgaagatagagggagaaacagaacaaacttgaactaatttgaactgaatc

SEQ ID NO: 45696 - DNA, 412 bp, Gossypium hirsutum
  unsure (1)..(412): unsure at all n locations
  Clone ID: LIB3493-005-P1-M1-H4
ttttcacaaagggactggaagaagtcgggatttccactataaaaagcaatgccggtttgtttttctggatggacatgcgaccactccttaaagaacaaactaccaaggccgaaacagaactgtggcgtgtgattatcaataaagtgaaactcaatgtctccccaggctcttctttcctctgctcggaacctggctggttcagggtctgctttgcaaacatggacgacaaaactgttgaagtagcacttgacagaatccgagaattcgttcttcaaggcaaggaggaaaacaatcatgaagcagacaagtctcaagctcgggctcagcgttggcgaaagcaaaatctacgcctcagcttctcttcgtctaggttatacgaccagagtctcatgtctncgaccatgatttcccc

SEQ ID NO: 45697 - DNA, 350 bp, Gossypium hirsutum
  unsure (1)..(350): unsure at all n locations
  Clone ID: LIB3493-005-P1-M1-H5
ctggtttagattggtacgtgaagcgcactgtccttggaggggtatactcaacaacagagatttacatgctgacagacagttccccagagtttcgtgatacatggctgttcttggataatcgcgtgaaagatgcatttgatttgaagaagacaattcaggaggcaacgtatttggcagaagctgtaggtgctggaatggggagctctttgcaaggctttgttggcaaggtgattcagagataaaaggttaagtgaagagagtatgtatgatcagcttcagactcaaaaacattttctcttttgaggagctatggaaactnttagtaggtcagacttagtgttgataacatg

SEQ ID NO: 45698 - DNA, 300 bp, Gossypium hirsutum
  Clone ID: LIB3493-005-P1-M1-H8
ggaatttcaactcctcgggaaaagttcccccaaacacttcaaaaatttcccttttagggtttcaatggatttatttcatactaaatcgggtttgtccctgggttttactaaatcctccattgcggatgatccgatttcgcttcaaatggacaccacctttcgcttctccgtctcacccgttccgttacagttgttcgaggaaaaagacgacggccaccgtgaaaatcgcatcgaaagtgatgaagaaattaggatttgggggcagtctatgtgtgtgaaaagacaaagggatcctaaacc

SEQ ID NO: 45699 - DNA, 403 bp, Gossypium hirsutum
  Clone ID: LIB3493-006-P1-M1-A2
acaagttttattccggttatgaagattctaataagtacaggatgcccacttcgggtgatctgtatagtagaacatttgggatgtgattgcttccagatgttggaacgaagttgttgcttaattggcatttctttgctaataagaatttttgtgcaatcttgcatgcatgccgagtctccttgggcagcctcatgagggataaatctcctgaatccttgtaaccggtgaccaagccagaaaagtttcgtctgaagaaacgtgcaggtgaagcgaacttccgttataatctaatctatatatatagtttgattgtacctcagaagtacaagattaaaaaaaagaaagggtttaactggcagggcaggttgatccactctggtggctagtgttttgactaaatacc

SEQ ID NO: 45700 - DNA, 405 bp, Gossypium hirsutum
  Clone ID: LIB3493-006-P1-M1-A4
tttcttttgaataaagaatcggttgtttatattttccttccttagggtttttcttcgtaaattctctcacagcttcattttttttataaatcttgtagttacctccatttccttaaaattttttgaaatgcttgttagcagctccgttagcagtctagcatgttcataaaatcttcagttcttatgttgtttcaagcttttgagctctatttccaaactccaaatcactgtcatcaagaatatggaagaatatccagcaagttttccgtgtgttattagttcttacgtttataaatacaaagttggctacttccttgtaatgcaagttccaaaaggagaagtctgcaaggggaaaaagtgaagctgcccagcatgatctatccttgggtagtaagatgcggatgc

SEQ ID NO: 45701 - DNA, 410 bp, Gossypium hirsutum
  Clone ID: LIB3493-006-P1-M1-B12
tcttagcgtacatgttccttttaagcggttaagactgaaaccaaatgatcatacagtcagatccaaccaccaacctctaacgtctattgcattcattctcttaatgatgaatcctattgaagcaaacggcaatatgtttgaaacccagatggtatatggagttccgacggtggcgactcaaggatttcttcctttacataactctttggttaccgattccttcatccatcgaaagcctacggcagtgatcaaatcggagagtagtttgacgtacaacaatcttcctttacccaggaagcgttccagagattccgctatggtttctttcccttctccacctcacaaaagcaacgaagcttgctctcgtttttcttttcttggccatgatatctcccttcacatggagcaac

SEQ ID NO: 45702 - DNA, 365 bp, Gossypium hirsutum
  Clone ID: LIB3493-006-P1-M1-B7
tgaaatgaggctttgccaacaacccaaaggagcaagtgattaaagctttatgttggcaccttaaagtccagggttaaagtcctgtcgtcccctccccttaaattgtaatgcacaaattcattgagaaatgcaaatgtggagcttcagtaatgcttccaaagattgagaaagctaagcgaataagggctgcaatggctcaacaggcacaaactattgctcccaccattccaggacttaatccactggaaggttcaaacttgaatgaggattatggatatactgttccatcaaagcctcagaatatgggtcttcaagttgcaaatcagactcctgcaactggcactttgaagacgcctcgcacattg

SEQ ID NO: 45703 - DNA, 435 bp, Gossypium hirsutum
  Clone ID: LIB3493-006-P1-M1-C7
cccacgcgttcggttaactcaatgaaagtgatggtgaagaaattgcacagagagggattcgaggttcttttggaagtagtttttacacatactgctgattctggagctcttcatggaattgatgacagttcctattactacaagggaagagccaatgatctagattctaaaagttacttgaactgtaactatcctgttgttcagcagttggtattggagagcttgcgttattgggtaaccgagtttcatgtagatggattttgttttataaatgcttcatctctcttgagaggcgttcacggtgaacagctctttcgtgctcctttggttgaagcaatagcttttgatccacttgttgcggagaccaaactaatagcttattgctgggatccacttgaaatgatgccaaaagaagtacggtttccacattggaag

SEQ ID NO: 45704 - DNA, 490 bp, Gossypium hirsutum
  Clone ID: LIB3493-006-P1-M1-C8
caattcttgattcgctaccatctttaccatgagcataagtgcatcaatacattgagaaacaacatgtagcatctctattgcacgaattctttaatatgctcatgtttgatgcttcatcaataggaagcgttatgtgagtttgacattaatacatcataaaagggaatactacccttgtgattcttgcaattggagtaggaagaagaagaagtgcaatccggcggttctctctggtttgactgacgatacatctaacgtagcccttctcaatgtactcttttgatatctatattctgaaaacctgtcttcacttgaacagtacacaataatcctctagattgttgagctatagtaattagagaagaagatggaaaatcgatgtggtttagggtgatgtcaaaaagaattgcatttaaatatgaatataatgatataattaatattttaaagaaaataactaaatgaaacaaaaaatatttaaacatgaaat

SEQ ID NO: 45705 - DNA, 375 bp, Gossypium hirsutum
  Clone ID: LIB3493-006-P1-M1-D8
cagaaagctcttgaaatggcagattttgatcctaacgatcttgacctaatcttgatgtgcacatctactccagaagatatttttggttctgctccacagatccaaagagagcttggctgcagaaattctcctttagcttatgatattacagctgcttgtagcggatttgtgctgggtctgatctcagctgctagtcacattaggggaggtgggtttcgtaatgtgttggtgatcggtgctgatggtctttctcgatttgttgattggactgatagagggacatgtatcctctttggggatgccgcaagtgctgtactagttcaagcctgtgatgcttgagaggatggttattaagctttgacttgcatagtgatg

SEQ ID NO: 45706 - DNA, 455 bp, Gossypium hirsutum
  Clone ID: LIB3493-006-P1-M1-E11
ttatcaccactggattgacttcccatcaatctggaggaccaatttttgcagagggagaaccaccaaagcttgccgaccccttcgattttggaggtggaattgtgaacccaaacagcgcggccgatcctggcctggtttatgacatgaatacagagaattatgtgcattatctttgtgccatgggttacaataactctgatatcttccagctcactgaacatccagtagtttgcccctccaaacaaccttctattctggacgtaaacctcccatccataactatcccgaacctcaaaaagccaacaatttttaccagaacagtcacaaatgtgggacctgtcaacttcaaatacaaggctagcgttgagtttgcatctggcataaacgtagctgttgtacctgaaacattgatctttaactttaggactaatgccatcttcttttttttgatgatt

SEQ ID NO: 45707 - DNA, 454 bp, Gossypium hirsutum
  Clone ID: LIB3493-006-P1-M1-E12
ttttccttcttttttgctttcatcatctctcattgctttcttttctctaacaaatactggataatagatatatgggtcctaacacctttgttaagctattaatatattttatttatatatttatttgtttgtttgttttgagatttgaagattgaaattttgaagcaggtttagggttcttatgaacttcccaaattggaagctcaaaaacaggattttgttttttgttggggggtttttcagctttatttagtagatctaattatgggttttgattcttggaaaatttggatcatgggaaaacgtgggcaaattagaacttagtttggaatctgaagtttccattttttttttctattgctatctttagatttcaatttatgctgcttcggaatctttagatttttttccttccattttttgcctatatgttcatttacttatttactggggg

SEQ ID NO: 45708 - DNA, 345 bp, Gossypium hirsutum
  unsure (1)..(345): unsure at all n locations
  Clone ID: LIB3493-006-P1-M1-E2
cccacgcgtccggttccaagaaatccttcaaattgtaattttaattttccccgagaggtctaggttccataaaagtttgtaggaagcactagatttggtctgtaatgcataagcagtaggatcttccaaatttttttgtaaaagtttataggcactgcgaaccaaaaactcctccgaagtctctccactccataccagaaaatcttcatgagcttcttgagcaagcgaaatctgaaggatattaacagcgtctgactgcaagaaggtctgagagttttcttctaattgcaaaaccgtccaaattgnggaccaagtcaacccaattttcggctgtacatggatttc

SEQ ID NO: 45709 - DNA, 133 bp, Gossypium hirsutum
  Clone ID: LIB3493-006-P1-M1-E5
gatgtagctcagcgcacacacaggacccttagagggttgccacaatacatatgtctgacatggtacggatacgagcacacatcaaaatacagccaatcatatgcccaatcaaatgctactgacactaaatcca

SEQ ID NO: 45710 - DNA, 403 bp, Gossypium hirsutum
  Clone ID: LIB3493-006-P1-M1-E9
ggtctcttcataaccacccaatgggtcgtgtcatccgagctcaacgtaagggtgcgggttccgttttcaagtcccacacccaccatcgcaagggtgccgctcgtttccgcagtctcgactttggtgaacggaatggctaccttaaaggtgtcgtcacggaagttatccacgacccgggccgtggtgctcccttagtccgcgtcgtcttccgtcatccattccgttacaagaaacagaaggaactgttcgttgctgccgaaggcatgtacactggacagttcgtgtactgcggtaagaaggctactcttatggtcgggaacgtgttgcctcttagatctatacctgaagggagcggcgtttgcaacgtcgaacaatacgttggtgatcgtggtgtttcgctagg

SEQ ID NO: 45711 - DNA, 390 bp, Gossypium hirsutum
  unsure (1)..(390): unsure at all n locations
  Clone ID: LIB3493-006-P1-M1-F3
cggacgcgtgggtgcagctgtcgtcgttgaccgcaatctgtagccaaagtaacgcgccatggctcgaacttggcttcacctaacttcctccattattgtctgtgccctgatctgcttcaatttcttcaccgtcgacgcaaaagatcatcatccacggccgatgctccttcctctgcaactgacctcacgcaatcattcccagcagcgccacttggacaatatccgccgtcatctgcagcaatcgggactctcttcttccactccaaacgctcgcatgagactntatgatgatctcctctccaacggttattatactactcggttatggattggaacgccacctcaggaatttgctcttatcgtcgacacccggaagtacttgtaactacg

SEQ ID NO: 45712 - DNA, 412 bp, Gossypium hirsutum
  unsure (1)..(412): unsure at all n locations
  Clone ID: LIB3493-006-P1-M1-F5
gaagaaccttcctcttctgctaaggattattttcatggaccttccatggctcctaattctgataggagatccaattccggttacggaaatgggttttcggggttaacccttgattctactggacatggagggaaacagagttcgaggtccgaccaagaaagaaggaaaggaatcccatggactgaagaagagcataggttatttctacttggtttagacaagtttgggaaaggagattggagaagcatttcaaggaactttgtgatatcgagaactccgacgcaggtggctagccatgcacaaaagtattttatacgcttaaattcgatgaatagagaccggcggcggtccagcatccacgacnatcacgaggttaacaatgggggatcgtctcatcaagcgcctatcaccg

SEQ ID NO: 45713 - DNA, 403 bp, Gossypium hirsutum
  Clone ID: LIB3493-006-P1-M1-G5
ccagcctccactcctgagtgcaatggtttatgagatatacaatagaactggtgatgtggatttggtgaagaaggctctccctgcattgcttaaagaatatcagttctggaattcagaaatacatacgatgatcatccatgatgctgagaattgtaatcactcattaaaccggtattatgcaatgtggaacaaacccaggcctgaagcatcagccattgataaaagatttgcttccaagttcttgaatgttaatgagaaacagaaattttaccgagagcttgcttcaactgctgaatctggatgggatttcagcacaagatggatgaggaacccttctgaatttacaagtttgagcacaacaactattttacctggtgatttaaatgcattcatacctgaggat

SEQ ID NO: 45714 - DNA, 345 bp, Gossypium hirsutum
  Clone ID: LIB3493-006-P1-M1-H8
gttacatgagcaagccgcatggcctgctatagatactccgtagtggctatacaaagtttcaactatatattatctatatttggccaaactaggtgaacgaacaacttttaatgaccggctttatattcacttccgacgtgtgagtgtcgccctcacaatagccaatcaaatttttgcgtctctgatcacacgttcgatgtaggtttggaattttctccctaactgtggatacataattactgatcaaggtccaaatttaattgtgtggggaccaatacatctccatgattattaaaaatatatccgccattcttgcttgttctctacaaaagaaacaaaataaat

SEQ ID NO: 45715 - DNA, 120 bp, Gossypium hirsutum
  Clone ID: LIB3493-006-P1-M1-H9
acgtccactcgtccaaaaagagtgagtttcgcacagcgtaacagagacggctcttagcttgaaaccttattgcctggtagccttatatttgccccgtataactttgaatgcattggatac

SEQ ID NO: 45716 - DNA, 256 bp, Gossypium hirsutum
  Clone ID: LIB3493-007-P1-M1-A10
gcaacttctttggaaaacttgtcttattggagctggtcctgatgggaaacacactgcattagaagcagtcactattgttctagacctcccaccacctcagcctggatcaatgtctgggtttacatcagtagacagggtatctgcatctgatccaaagtcggctctagcattacagagattggtccaagcagctgtgtggttccttggggaaaatgctaattatgctgcttcagaatatgcttgggaatccgcaacg

SEQ ID NO: 45717 - DNA, 283 bp, Gossypium hirsutum
  Clone ID: LIB3493-007-P1-M1-A12
agctcaatacccgaacaaatacgtaatgattctagatatatgccgcattttaaggattgcataggtgcaattgatggtacacacattgcggctattcttccaccaaatgaacaaattccctatattggaagaaaatgtatctcgactcaaaatgttatggcagtatgtgattttaatatgtgtttcacatttgtcatggctggatgggaaggatcggcacatgacagtagaatatttcttgataccaattcagatccaaaatacaaattcccgcacccttcaa

SEQ ID NO: 45718 - DNA, 335 bp, Gossypium hirsutum
  unsure (1)..(335): unsure at all n locations
  Clone ID: LIB3493-007-P1-M1-A4
gttctctcttactgtgattntactaatgacccatctcattcttgttttgggggcagttttttgcatccgtctcttcaaatttgcatacaacaccatatggatccctttcagaatccaaaaccatntcaagaagcaaggagtaaccggtccccgctaccgtcccatctttggaaacatgcctgagatccgccgtctgttcgaagaaagcaatgtcgaagccatcttcacttcacgacggcgaccacgatgtccttcccgcgggtgggctccggtctacccacaagtgggtccaacatatatgggaaaaaccgtttttgtattgggtctgggttcac

SEQ ID NO: 45719 - DNA, 350 bp, Gossypium hirsutum
  unsure (1)..(350): unsure at all n locations
  Clone ID: LIB3493-007-P1-M1-A7
gngattcaagaagacttttatgctgtagttgattgggcatacaagattgaccctctgcgttgcatatccatgcatggtataacagagcgctatctatctggccagaaagctgatgcagcaggatttgtgcgtctcctgcttggtgctcttgaatcaaaaatttctatgcagttcagcaagtttgttgacgaggcttgtcatcaaattgaaagaaatgaacgcaacgtgcgacaaatgggagtcttgtcgtacatccctcgctntgcaactctagccacccgcatggaacagtacattcaaagacaatcacgggactnggtgatcagcatacaccaaattgntagcgtatg

SEQ ID NO: 45720 - DNA, 312 bp, Gossypium hirsutum
  Clone ID: LIB3493-007-P1-M1-B3
tactctggaagctgtcgcctgggtccggccggattccgggtcgccacgcgtcattgaacctgaatcatgctctatttacgagatgcaaatgcgcatgctgcaagaagatacatgtgcgactgttagatcactgcgacgagggtatgctgctgatggaaaccaatttcataacggcagcctattacacttgtggaaacctcaccttaaccaatatactgtcgtccatgttgggcaaggtggcaagaataatccaaccgccccttttggataaagctgtcccaattagctggggggatatgtacaggttttggg

SEQ ID NO: 45721 - DNA, 263 bp, Gossypium hirsutum
  Clone ID: LIB3493-007-P1-M1-C12
aaaactaattgaagagttcatcttcatacatccgtgactgcagtggtagctagatggaacacgtacaagcatatcctcccccggctgcaccaagtgcttacccacctttggctactcctgtttccgtgattgggcctcaatactgctatcctcaaccagtagatctggctgtcgtcagaaaggttttgaccatcactgagggcaactttgctgtcactgacatcaatggcaacatcatgttcaaaatcaaaggcaaatttttc

SEQ ID NO: 45722 - DNA, 273 bp, Gossypium hirsutum
  Clone ID: LIB3493-007-P1-M1-C3
gggaatgagcattttaagacccaaagtcaaccgagaaaggcataggacaacttttttcaacaggttttttcgttggtgtgcagcctttcttttactagcactaattctgatgattcgtgcccgtaatattatggatagtgaaggaaggactcattacatggaaaccatgtttcctctttacagtttgttcggcttcattgttctacacatgttaatgtatgccatcaatatattctactggcggaagtacagagtcaattatgcctccatatt

SEQ ID NO: 45723 - DNA, 346 bp, Gossypium hirsutum
  unsure (1)..(346): unsure at all n locations
  Clone ID: LIB3493-007-P1-M1-C4
cggacgcgtgggttcatgaagtcactaagtgatgaagattatgaaactaaacagaatatcacagccccaactaatcacagcaatgtcaatggaaagaacaatgaaattcgtgtgggaataaaggactggttagtatattttctcttcgaaactntggctactctaatcattgatgaggataaacatatatgggaaatcatactgaaatagtcttacccgaatcaatttagcaatgccaaagtgcaggttcaagcccaatattagcaccaaatctctatgtcatacagttttcttaagggcacatattaaattgcagaaaacagcaccaaatccagcagagatctaa

SEQ ID NO: 45724 - DNA, 341 bp, Gossypium hirsutum
  Clone ID: LIB3493-007-P1-M1-C6
actcacccatatccacccgccctgctaaattctgcgactcgaaaaaaacacaaaaaacatatatagtttagctatgggtgggaacaagcacaagaagtccttctctttcttcactagcttgtttaaaggcaagaagggccgtagagaccatgattactactcctatggggatgatgcttggggcgccgccaggaagatttatcccagtgatgaagacaatactcacagggtggttgctgagcccggtatcgacaagagagcctcagctttcattgctaatttccatgcaactcgtgtttctgaagccatccatcatcaacaagctggctgaaaagaaaaac

SEQ ID NO: 45725 - DNA, 468 bp, Gossypium hirsutum
  Clone ID: LIB3493-007-P1-M1-C8
cggacgcgtgggtgacaagtgaactttctggaaatgtaattgatatttgccctgttggagcacttacctctaaaccctttgccttcaaggcccgaaactgggagttgaaaggaaccgagaccattgatgtaactgatgcagttggatccaatattcggattgacagtagaggtccggaggttatgcgtatccttccacgtttaaatgaggatataaatgaagaatggatatcagataagactcgtttctgttatgatggtttgaagaggcaaaggctaaatgaccctatgattcgtggtgcggatgggcgctttaaggctgtgagctggcgcgatgctttggctgttgttgctgaggttgcccttcacgttaaacccgaggaaattgttgggatcgctggtcaactttctgatgctgaatccatgatggcactaaaagatttgttaaaccgcatggatcaaacaatgt

SEQ ID NO: 45726 - DNA, 345 bp, Gossypium hirsutum
  Clone ID: LIB3493-007-P1-M1-D10
ccagcctaagggttgatcatgtgctagctatcaccatgaatgatagaaatcctaaatgcagggatgggttaaggtaataatattaagattaggaagaataggtggctgactgagcaattacgaaacatatggaatttgcaaggagaaaggggaggtgtatgcaatgaaaaagtgagccaattttgaataaaattcatgaattcagggcagggtttcaggattgtaaatctggttttgtacctaggaatgctaatcaggcccggaggacgtgtgtattgataacaacgaaaatcaattggtatgttctttggtgtacattcttcacaaaaatggactgattttagc

SEQ ID NO: 45727 - DNA, 296 bp, Gossypium hirsutum
  unsure (1)..(296): unsure at all n locations
  Clone ID: LIB3493-007-P1-M1-D2
ctcctactcctactactactaacatcaattttctcgatgaatgtggggagaaaaagaatcttactccaaaatccgcagccaataagagaaggtcaaagagtaaaggagggaaactggaagagaaaagagttttaaatgatgggtttgtgatttctaacaataattttaataataggagtgatcatgaccagngtaatgtggaaagactgggtggtggtggcggtggcagtggtgctggaggagaaagaggaaacctgacagcagtagtagaggagacggtgaagagttgttaacac

SEQ ID NO: 45728 - DNA, 227 bp, Gossypium hirsutum
  unsure (1)..(227): unsure at all n locations
  Clone ID: LIB3493-007-P1-M1-D5
ctgttctacttttgatgcttttggcatttgggattcttattctgtttcaaagatgccgaccaagacggacttttgaaactcatatacgacanaaggttgttcaagacaatccaacaaccggggtttcatccgaagttcttgcaaatgccagattcatttctgaagttgctaaaactggggacacaaggtactccaatatgtagactggtttcccatggaagagttgg

SEQ ID NO: 45729 - DNA, 194 bp, Gossypium hirsutum
  Clone ID: LIB3493-007-P1-M1-E11
gttggatttttcttaaatgttttgatgtagctctcctaacttggtcttaacatctagactgggtatggtgtgttacatttagtggtattagagccaggtttacaaaacttgagttgtgtttctaggctctaatttttgttaaaatgtgttttgacagaaaaatttattcgaataactctgaaaactaattttat

SEQ ID NO: 45730 - DNA, 185 bp, Gossypium hirsutum
  Clone ID: LIB3493-007-P1-M1-E2
attacatgctaatctttaccttctatattgactgaatatctatttccaatgtggggtacttgtctaccgtagactgaaggaacaaatctctttattatcgattgctactaaacttcacgtacaattcttaacgacttagagcgcttactttaattcgatcttaaacctacacaacaaaattttaa

SEQ ID NO: 45731 - DNA, 297 bp, Gossypium hirsutum
  Clone ID: LIB3493-007-P1-M1-E9
cccaccatggcctatctccccttcttcctcacctcccctgtttcaactttgaaccctttctctcaactccaaaacctcccacgtttattcacattactatctaaaacctgagcagctgaaatactaatgctttgaaaatggcttccacaactcaattcctcatctctctccctcctaaacccccttatttactatcctactcctccccttctaaacccaggtttattaacatcacctgctgcctcttcatacaacaagcttgaaatgatcaaaccactagcagcggcagcaacgccc

SEQ ID NO: 45732 - DNA, 225 bp, Gossypium hirsutum
  Clone ID: LIB3493-007-P1-M1-F11
gtggcacactggctggcttgacatccttagatactgatgaagagattgtaactgctccaaatctatggagactaaacggcgtgtcattctagaggatgacattgttaccttcgcttccattcgaaccaatatgtgcattatgaattctcctaattacaatctattctcagcaaggcacatacttcctgcatcaagacacaatcatgtacaggcacttaatcaact

SEQ ID NO: 45733 - DNA, 222 bp, Gossypium hirsutum
  Clone ID: LIB3493-007-P1-M1-G11
gaacaggcacacagctgctgacttgttggagtatgccaaccctcgaggtctcaccgtccttttgtatgctactgtgcaaaaaatcttgtttagatttagagggagaagaagcagaccagaggcatatggtgtgattttcagagatggatcagggattgaacatagagcatatcttaaatatgggtttaaaaacgaaatcattatatctgcgggagcattggg

SEQ ID NO: 45734 - DNA, 274 bp, Gossypium hirsutum
  unsure (1)..(274): unsure at all n locations
  Clone ID: LIB3493-007-P1-M1-H6
cccacgcgtccgctttggtatttttggggttccaatggttggtgcagatatatgtgggttctatcctgccccaactgaagagttgtgtaaccgttggattgaagtcggtgctttttaccctttctctagggatcatgcaaattactattctccaaggcaggagctntatcaatggaagactgtaaccaaatctgctcaaaatgcactaggtatgaggtataaacttcttccttacctctacacactcaactatttggctcatacaagcggagca

SEQ ID NO: 45735 - DNA, 311 bp, Gossypium hirsutum
  unsure (1)..(311): unsure at all n locations
  Clone ID: LIB3493-008-P1-M1-A4
cccacgcgtccgaattcctctatcagctgagcctagtccaccacaatcctggaactctgatccattagatatgttagatgttggtcttggaactcaagtcaatgaggttgatactttggtcacggtttccaaaagtgggcgtaaatgtgccaagagattggatagtgtttggngtgcttggtttttctttacctattattttaagcctgtcttcaatgagaagtccaaagttaaagtgactagggatgaagtggagtttcagggtttgataagtcagatctcgagctagatgtgtttttagtacaacatga

SEQ ID NO: 45736 - DNA, 178 bp, Gossypium hirsutum
  Clone ID: LIB3493-008-P1-M1-A5
gaatgtcacaactgatattaaagtggatccctactccaatctctataccaccataaccgttgatcaacctgcacccgggctgaaagcaatctttagcttcagagtccctgatcagaggtctggcaaggttgaactccagtatttgcatgaatacgcagggataagctcaagcattgga

SEQ ID NO: 45737 - DNA, 224 bp, Gossypium hirsutum
  unsure (1)..(224): unsure at all n locations
  Clone ID: LIB3493-008-P1-M1-B10
acggttnttcctttttctaattntgactggatctcatgaaatgtaaagtttctgaaatggaagaaggagggaatggagagcttagcatcgacactctcaaccttaatgctcttccacaagattgtatcgccaccatcatttcctttacctcccctcgagatgcctgtagaatgtcgattgtttcaactatatttaaattggctgctgaatccgatgctgtttgg

SEQ ID NO: 45738 - DNA, 418 bp, Gossypium hirsutum
  Clone ID: LIB3493-008-P1-M1-B2
cggacgcgtgggctctatattgctggtgttgcaggaaaatccaatccagagattcgttaccgatggtgggagtttttgaagtaggagctgttccatttaatcccgacggttggggtccacccgaatcaaccaccgctaccccaccaagcacgaccaccacactcccttcccatgtgccttacgccaccttctcccgttccgagaggctcggccgaatcgctgacttcacccgttctttctcctcttcgaacgccaacgcatctaatcgtccttcctccgggaaacccggctcagccgactcccccttcgatttctctctcgacctcgacgccttccctctcgctaaccccgacgatggttccgccttccgtttagtcgacacgaagcctactcctcggcctaaatttggccctaaaat

SEQ ID NO: 45739 - DNA, 481 bp, Gossypium hirsutum
  Clone ID: LIB3493-008-P1-M1-C8
cggacgcgtgggcggacgcgtgggttttgtattcttcttcatggctaattagtcttatgaggtcacccaaagggattgttaggaggatagaagaaggggtttttcaaggaaacctttgtgaaaaataccccaaatggcttctttcccaaaaggttctccaccttcatcacgtgtttcatcaccaccttcatcagcgggggataagtccacggcgccaccgccagttccagctttctcgtcaccaaacccaccttcggcgccaccgtctcccccagcagagtcaaattcaccttcaccaccttcatattcaagtacttcatcctcttcaccaccgtcgacacccgctttgctgccaccgacatctccttctacatcaccgtcaccaccatcgaccttgtcctcgtcacctttatcggcatcgtcatggacatcaccgacaatatcgacgtcaaaatcaccctcatcatcatcaacaagatca

SEQ ID NO: 45740 - DNA, 140 bp, Gossypium hirsutum
  Clone ID: LIB3493-008-P1-M1-D1
gttatgattgttattttgctatcaaacaattcctaactgaattagatggttttgaagagttgactggagtaatcgtgtatgttgcaacaaggatagtactcatggaatcatattgcattattacgatagtatctatactt

SEQ ID NO: 45741 - DNA, 396 bp, Gossypium hirsutum
  unsure (1)..(396): unsure at all n locations
  Clone ID: LIB3493-008-P1-M1-D4
tttgaatcaaaagaggatatggggttgttgatcatcatcattagcttgatgggtgttgtttggttttggtacaaaatgaagaagatgatgagaaaagaagatagaggaaccaacaagagtggcggcagtggcggcggcggtggcggtgtantgccaaaagggaacttgggttggcctttcattggtgaaacccttcatttcattgcttctggttatagntctcaaccggtcagtttcatggacatacgcaagcttttgcatgggaaggtattcaaaacacatntattgggaacacccatcattgttccacagatcccacgtaaacaaggtgtgtgcaaaccatggcacacctcatnctgctaccctaaatcatactgagtactggtaacactcatc

SEQ ID NO: 45742 - DNA, 426 bp, Gossypium hirsutum
  unsure (1)..(426): unsure at all n locations
  Clone ID: LIB3493-008-P1-M1-D8
agaagctcaaaatcaaaccctagtcggttcctctaacgccaacggagccccgaaagaaacgggtcaagaagaggatttggacgacgagccgttcgagaaacttctggaaccattcgggaaagatcaattgattacccttatcaggagagccgttgataagcacccggaatttatctcctcagttcgggagttcgcagatgcggacccgtcccatcggaagatcttcgttcatgggctaagttgggataccactgcggaaaccctcaccgccgaattttgtaagtatggggaaatcgaagaatgcaaagctgttaccgatagggtttctgggaaatctaaaggttacgcctttattctatttaagcattcgagtggggcacgccgggctttgaaacaaccncagaagaagattggaaatcgaactac

SEQ ID NO: 45743 - DNA, 430 bp, Gossypium hirsutum
  Clone ID: LIB3493-008-P1-M1-E10
ctcagtaagcccgttattgcattcgctacttcgaagacatgttccaagcttccatctctcaaacttggaacagtcctagtcgactcgccggagttcctctctttcttaactcaaccaaacatcggtaacgaggtcttcgatagtgtcaaggtgagtcagcacgacacggcagctatcctttattcttccgggacaaccggactagtcaaaggcgtactgctgagtcacctcaacataatcgcgttggttgctgggtattatcacctacgagaaacccctcacgaacaggaggaatcgcacccagagtcgtttttcactgtgcctttatttcacgtgtttgggttctttatgttagcgagggcattttcaatgggcgaaacggtggtttcacggacagatttgaatttgagggaatggtgagaccattgag

SEQ ID NO: 45744 - DNA, 301 bp, Gossypium hirsutum
  Clone ID: LIB3493-008-P1-M1-E4
ggcttggaggagctgcagatcaacaggatgcaatcaagtgcaatggaagcaacatatagggcatgaaacataggaagatcagggtcaattgccaggaatgattacaggaaggaatcggactccttgagccaaacagaggtagtggaatacttaactcaagagctggcatgcattcgtaatccatgttgaatattgagtatctaaggcacgacagccattccaacttaataaatgctggaagcaagatcggagagactatcagagattgccctgccctgtcaagcctgcaaacggtgcaaga

SEQ ID NO: 45745 - DNA, 408 bp, Gossypium hirsutum
  Clone ID: LIB3493-008-P1-M1-E8
gcaagaaggaagcttggtcacccaaaatgaactttcaaaagattcttttcctcagaatgataagtcaatcaaagggcaagaaattgcaggttgtgtcactaatatacaatctcagcctccattgtcgaaagacttgaattcagatctaaagttagagccttctaaagcagagaagcaagggaaggttacaagtagtaaaggagcaccagcacctcgtaaacgaagttatgaccctgacttgtttttcaaagtgaatggaaagctgtatcaaaggcttgggaagataggcagtggaggaagcagcgaggtccacaaagtcatttcatcagattgtacaatatacgcgctcaagaaaatcaagctcaaaggtcgtgactatgctagtgcatatgggtttgtcaggaaatg

SEQ ID NO: 45746 - DNA, 351 bp, Gossypium hirsutum
  unsure (1)..(351): unsure at all n locations
  Clone ID: LIB3493-008-P1-M1-F10
ctgcgatctataccctcaaagcttaaagcataacccaaatgggaggtttgttgttgtttgtggagatggcgagtacatcatatatacggctttggcgtggagaaataggtcatttggttctgcattggaatttgtttggtcatctgaaggcgagtatgctgttagagaaagctcatcaaagatcaaaattttcagcaaaaatttccaggaaaagaggagtgtccgtccaacattctccgctgagcgtatttttgggggtactttattggcgatgtgctccaatgattntatttgtttttatgattgggctgagtgcaggttgattcgtcgaattgatgttactgtgaaaaa

SEQ ID NO: 45747 - DNA, 442 bp, Gossypium hirsutum
  unsure (1)..(442): unsure at all n locations
  Clone ID: LIB3493-008-P1-M1-F2
cccacgcgtncgcgagatcaaagacgacaccgatcccacgaccgatgatgtcgtttttcgtgacatcggtttcggggccgacgatctggcaaacggattaacctggttacgaactcagttcctttcttctaggccatttcgtgcattctctcattggacacaacgatatattgatttcctcgatagcagattcaatacaaataatttcactcgcgaatcaagctcatggtggccatcatggttcattttatagcttcactgtctttaaatatatcaacagcctgcanactttggtaataatttcaacacattacaagggcaggatgtatatatatatatatagactttctattatatactaacaattaagactatcatgatggcaaaaaaattacttcaaggatatattggagcttttactggttcttaacagatgaagacc

SEQ ID NO: 45748 - DNA, 373 bp, Gossypium hirsutum
  unsure (1)..(373): unsure at all n locations
  Clone ID: LIB3493-008-P1-M1-F8
ctgtcttctcccccaaaaaagtttcttttctctgattctttggagctctattcccatttttttcacattttcactttcaaagttctttcgtcagattctttgttcttcttccgccgatgaaaacagaagaacttatctgaaaatctggaattcaggagaagttgataagaggcgaagcattcgtgcacgaaacctatggtgcatacaagacccttgaagaactttgggatggtgaactttgagagttactcttaaaatgtggcattcagtaggttagagtgatgcatttgctcggctatattatagaaggatgctgccaccactgacctnctgtcatcaatgagcgttacatttcagcatgaaaaagagtaaa

SEQ ID NO: 45749 - DNA, 367 bp, Gossypium hirsutum
  unsure (1)..(367): unsure at all n locations
  Clone ID: LIB3493-008-P1-M1-G1
gaaaatagttatgtgacaactcgtgtgatgggaacttttggttatgttgctccagaatatgcttgtactggaatgctgaatgagaagagtgatgtgtatagctttggtatacttattatggagattatttccgggagaagccctgttgactatagccgtcctccaggagaggtgaatntggtgagtggttaaaaaccatggttggaaaccggaaatctgaggaagtagttgaccctaagttacccgagatgcctgcttcaaaagcacttaaacgtgtattgctggttgctcttaaatgcgttgatcctgatgcgacaaagaggccaaaaatggggcatattatccacatgcttgagggctgtgatct

SEQ ID NO: 45750 - DNA, 379 bp, Gossypium hirsutum
  Clone ID: LIB3493-008-P1-M1-G10
gtaaagctccacctctagagcataatactcctgatgatgaagatgtccttgaagaggaaaaccttgttagaacacaaacaagggaaggtaccgttgatccaaatgttgcagttcagacacgtggtcttgcaaagacatttcctgggaccagaacatgcggtttctgctgtaagtgcaagaagactgcaccataccatgctgttaagggcttatgggtgaaccttgcaaaggatcagttattttgtcttcttggacccaatggagctggaaaaaccacagcaatcaactgcttgactggcataacacctgtgactagtggagatgcgttgatctacggtaattcttggtcgagttctgttggtatgtaaacattcgaaga

SEQ ID NO: 45751 - DNA, 453 bp, Gossypium hirsutum
  Clone ID: LIB3493-008-P1-M1-H10
aaggctttgaagaagaaaagccattgtcagacatggttgatccgatgttattacaagaagtgcatgccaagaaagaagtgttggctgtttttcaggttgctcttgcatgcactgaagcggaccctgagattcgaccaaggatgaaaactgtttcagataatcttgagagaattggatcatgattaacaacatagatgattattgtccgagaagacaaacaacatggtcgatggtttaggaagttcaaagatttactggttttttgcaaaagggctctccctgtttctttttgccatggtaaagttttgcattgttgtcaaaaattcactatccgttccctttaaaagtcttcagaatttggcccaaattttcctcaatattcatcggtttcttgaagctttctggagaccatatgttttaaatttaaatgtctctcattatattcatatgact

SEQ ID NO: 45752 - DNA, 178 bp, Gossypium hirsutum
  unsure (1)..(178): unsure at all n locations
  Clone ID: LIB3493-008-P1-M1-H2
cgaggagtggtggaagaccggaaaggcatttgcaacactgtatttgtttaacgagccatggaganttggttggtattttagaagacaaatcccatgtaagttctgttctacattcatctgctgcanaagacaatcaataagctgtttgtctgttccatttgcttgacacaatatgagc

SEQ ID NO: 45753 - DNA, 153 bp, Gossypium hirsutum
  Clone ID: LIB3493-008-P1-M1-H3
ctcggcctgcgcctggcgcctggctatcattgctataccctcatgcgatgaaacagtgcagtgatcgctactgcgacacagtggttttcgacacactacgcatgtcaattaacgtgccacttttacgatgacagtagctaatttcaccaacac

SEQ ID NO: 45754 - DNA, 202 bp, Gossypium hirsutum
  unsure (1)..(202): unsure at all n locations
  Clone ID: LIB3493-009-P1-M1-A6
catattggattttaattataattgtctctgcatttcgtagctttctaaagacctcaattggtttgtatctttctacccctctntttgccttttataggacctttgcactgtttctagttatggctttacataatgatccacatgtatggcatgctcgccttggttacacctttgtttcaacaatgaagaaaatagttcaatt

SEQ ID NO: 45755 - DNA, 273 bp, Gossypium hirsutum
  unsure (1)..(273): unsure at all n locations
  Clone ID: LIB3493-009-P1-M1-B12
gtgaaatggaaacacgataatctctatctcggctacatctatgccatgctctactttgggggcaccaatttactgctcaacaaccgacctattcgcatcaagaagtggcctcatcttcctctcaggttccgccacgatggtactttcaagatcctccaggtcgccgatatgcatttcggctctggtcttctctcccgctgccgagacgcgctgccgtnccacttacattactgttcccagctcaacaccacacgatttctttaaaccatgatt

SEQ ID NO: 45756 - DNA, 205 bp, Gossypium hirsutum
  Clone ID: LIB3493-009-P1-M1-B2
atggaagggacgaaatgaaagtgtgatctgggatgcgacattatactacccactatacacaactgcaggtggcgcaccagaaaaccggcatggtctaggtacatatagactgtatcgtcgatcatctgcatcgatgaggagctttatacctgcgccagggcctatgactggcggtcgtctgatgaacctaaaggaaaagctgact

SEQ ID NO: 45757 - DNA, 302 bp, Gossypium hirsutum
  Clone ID: LIB3493-009-P1-M1-B9
gaaacatccctgttggtggtggttcaaggaagaacaagagatcatcttcgtcatcctcttcttctattactacttctttaacatcatccaaaaagctacctggtttggttacaccacctagcttatcccagtgttctactcaaaaccctaagatccatgatggtcaagatctcaacctagctttccctacagctagtcaaggctctaggagtctctctgaattggttcaagttcccttagaaaaccaatatcagagccaaatacctagctcttcttcttgatcacctactacttcttaactt

SEQ ID NO: 45758 - DNA, 293 bp, Gossypium hirsutum
  Clone ID: LIB3493-009-P1-M1-D8
cggacgcgtgggtgattccagtgatacaagaaatatgggtttccagtttgcagggaaagctatatactctgcagtttgggttgctgctgtgtcattgttcatggagttgctgggtttctctacagagaagtggctgactgctggaggtctggggacggttttgctgactcttgctggtcgtgagatattcactaattttctttcaagtgcaatgattcatgcaactcgaccttttgttgtgaatgaatggattcaaacaaagattgagggatatgaagtttctggcactgttg

SEQ ID NO: 45759 - DNA, 198 bp, Gossypium hirsutum
  Clone ID: LIB3493-009-P1-M1-E10
gggttaataacactcctgaacgtactcacggtcggactcatgatggtcgagctttggtcggagaacaatgcttgaagaccaatgattgtcaatgccatgttacctatggagatatgtcaagcaccataggaatcttgagttccgatacttcgagcttcgattccataaatggtcagaaaaccacattctccacgtcta

SEQ ID NO: 45760 - DNA, 327 bp, Gossypium hirsutum
  Clone ID: LIB3493-009-P1-M1-E8
cctataccctcagtttccccaaatcaaaccctaagttgctttcctccatatttcactgattcaaggcctgagcttgatgtttcttctcaaacaaatcttcctttctttttttttaactctctttctctctcaagtcctcgattccacttcactctccagatctccccaagtaagttaggaagagttgggttagtgacaaatctgatgagccttcactgtgctgctgaacaatctgcttgttgtctagggcaatatacatcctgattcaaggctaggcatagaaaaccctttggagtgcctattttctagcagtttggcatcatatta

SEQ ID NO: 45761 - DNA, 318 bp, Gossypium hirsutum
  Clone ID: LIB3493-009-P1-M1-F12
gggagatgtttcactataggcagggtgtctcaagggaaggtcttggcctatacatcagtcagaagcttgtaaagattatgaatggtactgtacaatatctaagagaggctgaaaggtcatccttcattatctttttagaatttccattggctcgccagcttggccaccattgaaaacccatagccaagtgaagcttataagcatcgaaacaaggctactgcagcttccatatgaaccgtatcagtagcttgtcatctcaagcaaacaagcaccttaacaccttcggggtgatcataccgagtctggatgataccgggg

SEQ ID NO: 45762 - DNA, 372 bp, Gossypium hirsutum
  Clone ID: LIB3493-009-P1-M1-F8
gctcatttcatcgcgcagccactaaccttcatcggtttgatggccaatggcgcggataatggccggatcttaccaacggagccgcgattctggaaatctggtaaccttgctccctttttctctttttttttgtttaaaaaaaatgtgaatcttctgctattctttcaaaaaaaacgaaataaatttcaaagatttaaacaaaattttaataccgctcgatcctcgcccacatctatgcatatctgagatgtttgggctatcatcggcatcgaaggttccccttcatgtatttgtaccaaatttgcaagccaatcaaaggaaataaataataaatctggaaaatcacctttcaaactttttggcgtgattttt

SEQ ID NO: 45763 - DNA, 315 bp, Gossypium hirsutum
  Clone ID: LIB3493-009-P1-M1-G3
tgatgccagagtcagacgtgggagtctcggtatccattgacactgcagctgaaaagatgactccaccatcctcttcatcatcatcatcattggtgaagaatccctatgtgtcatcggatgtttctggtagcgaccttgtcagtggagtcattccctccatcacacctagatgaatgaagatggaagctattttgttgtgaaatttggaccatcgacagctactttgttggttcctgatatgaagcatgatatgtagataagtcacatgtttagattgtctttttgttagatagcttatttacgttatatgctctt

SEQ ID NO: 45764 - DNA, 332 bp, Gossypium hirsutum
  Clone ID: LIB3493-009-P1-M1-G6
tcactactataggggagctcgtgcgcctgcggtccgatcgcggtcgcccacgtccctgcctgacggccacttgttaatttgcaccatattgacaaacgagttgagccgctgataatcggccaaattgaagtcatgatatgtttttaatttagcaaataaagtagtaattttgtaagtatcagctttagcaccagttcgagtgtgtcaatggctctggccatagcatctgatcgactttcaggggttcatagccattgctatctctgcattttaactctattgtcaggaaaaatatagatttcaactctgtgactatcgacaactacctagca

SEQ ID NO: 45765 - DNA, 289 bp, Gossypium hirsutum
  Clone ID: LIB3493-010-P1-M1-A11
cccacgcgtccgtgtactgttaatttggtgagggatattattcgagataggtttcctggcctgcagggtattcttgtgaaatacatggatccagagggtgatctggttacgatgacttcaacagatgatcttaggttagctgagtcagtcggtggtctatcaggaggatcactaaagttctttattgttgaagttagtccagaccgggaaccagcttatgaaggagtaagtaaagaggacatggtgaagggtgaagagaaaatgaatgatgttgttgagaatggtgaag

SEQ ID NO: 45766 - DNA, 312 bp, Gossypium hirsutum
  Clone ID: LIB3493-010-P1-M1-A7
aagaacttcaccttaaatgatatagaaagagcgacaaatagctttgatgcttcacgggtgattggcgaagggggtttcggcattgtctatagaggcagtttagatgatggagctgcggtggctgttaaagttctgaagagggaggatcaacatgggggacaagaattcttggcagaagtggagatgcttagccgcctgcaccacagaaatctggttaaactgattggtatttgcactgaggacaatacacgttgtctcatctatgaacttgttccaaatggaagtcttgaatcccatttgcatggagctgag

SEQ ID NO: 45767 - DNA, 204 bp, Gossypium hirsutum
  unsure (1)..(204): unsure at all n locations
  Clone ID: LIB3493-010-P1-M1-B1
gcttacaataaaaaatatgtaattatattattgtattaaaatttcgctcctcccggtctttattctactccatcttcacacccacaacatttctataaacngccaaatatatattatcttaaacatggtttttggtttaaaatctttaaaaagaccttcatttttgatgccaccccaaccgtttctctagctgatgtgattaaa

SEQ ID NO: 45768 - DNA, 309 bp, Gossypium hirsutum
  Clone ID: LIB3493-010-P1-M1-B11
caccaaacgagaaggaaaaactccaaagctggaacccagttcaagccggagaagctccttggcaaagcctttcttgaaacgccacttgtcaattgggtctaggtggggtagattgctatcagagaacgactctgctaggaagaaggggttttgggtaagatatcgaaaagattgaattccctcttctactggcatcaggtgaggagcctgtctgtttcatcatgaaagttcattacggtcagtaaatatgtgtttgttccccttacttcaaaaggtttgtacgagtcaggcttccaagttttaatgcaa

SEQ ID NO: 45769 - DNA, 366 bp, Gossypium hirsutum
  Clone ID: LIB3493-010-P1-M1-B4
gttcttcagattatgataatgtccggtgggatccctgataatattacgtataatatgatggttcgcggtctttgtaagagaggacggatgcgatctgctattgaccttttggaagacatgagcttgagtggttgcccaccggatgtgattacgtacaatacaataatacgcagcatgtttgatcatggtatttttgatcaggccgttgggttttggaaggatcaattgaggaagggatgtcccccatatctaatcacctataccattctcattgagctagtctgcaggcattgtggaattgctcgggcaatggaagtattgcacgatatggcaatagaaggttgctatcccgacatcgtacttaca

SEQ ID NO: 45770 - DNA, 324 bp, Gossypium hirsutum
  Clone ID: LIB3493-010-P1-M1-C8
cttctcttatccatcttccaccttcgccaactccctcaaacctcatccaccaaacatgcctaccttaacctctctgaaacgatcctcgccgtcgatgctccatctctcccttatccaacaacgactcctaacctgccagttctcgtccctgcctctgaccgacgcttcaaacatcgaccccaacaataaaaggggttccttttcccgcactttcgtaaaatgggtctccggactcgctggtggttcgagcttaggtgcagtctattggtggtactcaacttcagtttcggaattgggttctgcttttttaaagaaacccttttt

SEQ ID NO: 45771 - DNA, 363 bp, Gossypium hirsutum
  Clone ID: LIB3493-010-P1-M1-D7
agaagattcacgacagatggctgtcaaaaagtgcttgtagttccgagaatagtgaggatgatattgaacagctcgacttaaaaagcttctgggggctatttgttatatgtggaattgcatgtatgcttgctctccttgtgtacttctggttgatgttccgcaaattcagccggctgcctcccgaggaacttgatactactagtcctagtacctcccgttccactcgtcttcaaacatttttgtcatttgttgatgagaaggtagagaaaccaaaaagcagctcaaaaagaaaacgcgagagtatgtctcgaaatggatatcatataaatgatgaatcgccacataagtctgggaggatggaca

SEQ ID NO: 45772 - DNA, 348 bp, Gossypium hirsutum
  Clone ID: LIB3493-010-P1-M1-E1
gaaaatccgaaaatttgaaaaagaaaaaggaaaatgaagaaatcaggagcagcagagaagaggaaagctcgaagatcttcggcgtccgtacaaaatgttggcagagatcccagctccgacactcctcctaggaaacaagctgccaagcaggatgtatatcaattgtttgctgagaaagttagagaccataaagatttggagtctagatgggctgtcttgcaagaaactcgtgttgaatattttagggggaaggattttgtaagctttatgaaaaatcatcctgagcttaaagaaatactggaatcagatagagatcttgaaactgaagatattgccaataatttgtac

SEQ ID NO: 45773 - DNA, 411 bp, Gossypium hirsutum
  Clone ID: LIB3493-010-P1-M1-E10
ctcgtatccgctttatgaacctgggtcatgttcctttgtcgatcaccagtttagttgtttcgcccatggaaggcgtgatataggttatctcaaatggaaatggaagcctaaaggctgcaccttgccaaggttgaacggcgggcacatgttggagatattgaggggaaaacgactggtatttgtgggggattccttgaacaggaatatgtgggaatctctactttgcatcttgaaaagtgctgcaaaaaatccaaaaactgttcatgaagttcccggaggacgttattttcgaggggagccttcctctagtttcattttcaatgattataattggtccggcgagtttttcgtattctccgttcttggtcccacaatggcaaatgctggacaaaaacgggacaaagaaaaata

SEQ ID NO: 45774 - DNA, 296 bp, Gossypium hirsutum
  Clone ID: LIB3493-010-P1-M1-E12
caaccgtcccttctctacccttctctcctcctctgtatccggccttgcacgtgtcctctgggtttttcttggaacaattaacttctttttttttatcttctgttaaacctctccggtgatagcagcgcctctggatccccgcatctgagccgactcgacgagaaagccgccacacttgaagctgctgatcttaaaaaaatcggactcgccatcgacttacttcttctcgacgagccttcgtcgccggcggttaatctaacacttgattccgacaatggaaaaaaccctctccgacg

SEQ ID NO: 45775 - DNA, 332 bp, Gossypium hirsutum
  unsure (1)..(332): unsure at all n locations
  Clone ID: LIB3493-010-P1-M1-E4
aaaaacgattcgattacctttgaaaaacgagattcgctttttatttctctgtttcaaaaggattacaatggttcgtgttattctattaggtaaatccctatacctttttttttgtttctctctgcttctaaaaactctgttttttgattccctgctattcttctctctgcttttgtgtgggtgtatttctgctatcaggtctttctccctacctgtctttttacagattaaaaagaaggctttatagcctcgactactataagttntggaaagaaatctccgatttctttccgtatttgcttcgcatgtctgctgagattntctttcctttt

SEQ ID NO: 45776 - DNA, 328 bp, Gossypium hirsutum
  Clone ID: LIB3493-010-P1-M1-E6
ttcaaaacttaaaagagcaaaattttcgaatttaggctaattgtgagaaattccaagactggctcccttacaattaaagttacaagctgtgatcagatgtcagaaagtcttcgtacactgctccatgtgctcctagatctgctataaaagtagagaaggaattcccggaaaaaaaatggagtgactggagctattagtttcatggcattgaacacatctacagttattcatgtacttgacacaaagccgaagaatttctgggcaactagaagaaactccttctggttcatagttagattatgcatggccttcctttttaacttcatat

SEQ ID NO: 45777 - DNA, 296 bp, Gossypium hirsutum
  Clone ID: LIB3493-010-P1-M1-E9
tttgaatattcctgaacatgagtatggacttgtgtttactgtaagtaggggatctgcgtttaagttgttggctgattcatatccatttcataccaataagaaattgttgaccatgtttgattacgagagtcaatcggtgaattggatggctcagagtgctagggagaagggtgccaaagtttatagtgcttggtttaaatggccaactcttaagctttgttctactgatttgagaaagcagatttcaaattaaaagaagcgaaagaaggattctgctactggtctttttgtttttt

SEQ ID NO: 45778 - DNA, 367 bp, Gossypium hirsutum
  Clone ID: LIB3493-010-P1-M1-F10
cccacgcgtccgctgctctgcaattattctcgcgtttaattttcttcatccagctaagtattcttagtttcttgttcttttcttttccttctccctttcgagtcttcactttttttgtctcatttttttcttttatcttagatctggtttagaactagggctttttttttcttgacttgcttgtttgttatttttcgactatattgttcatgtctgatctgcgaatgcggagttgagtctttattatagaactatttcaatgattttagattttctatgagctacgccatcctcatgcgtcgaattcgtattcttcactcggtttcagtggtttcccttactggttctacgtttctcatgaatcaac

SEQ ID NO: 45779 - DNA, 341 bp, Gossypium hirsutum
  Clone ID: LIB3493-010-P1-M1-G2
gagaactgcaggtttaagacttttctctagatcaagtgaacaaaaaattttggtcatagcgtggaaatgcttggataagactttcttgttgtaagagtagtattttcgtttgaagaattcacttctttttaaggtcagaagatcttcaggatttccagtaaaatgattatggataatcctgatggcttgggataaatctattaagactagaaattacatctgatctacttgattgatcgaattccaccagtctcttaacattcttgtaaatctggaaacaaattctaacaggatattgtaatgactttcttctgttaattttctgggtcaagccatgagtg

SEQ ID NO: 45780 - DNA, 455 bp, Gossypium hirsutum
  unsure (1)..(455): unsure at all n locations
  Clone ID: LIB3493-010-P1-M1-G7
atgaaattgaaaaaagagagatagtattgtcagagacaatggtagttatgtctgatttgtttgtcaaagaagaaaaaaaaataattgttggtttcttctttatttttattatttttaatcacattcttggtttaaaatattaattggtgtagaaatatggaaatgataaactagaagcaaaaggcaaagggtaattgtcttttgtttttgttttttaaacccaacccacttatgattggcttaataagtctctttccttgagccccttttgtctttattattaatctttatattctctacttaaactatggntgaagatatgtatgatgtttagagggcttaaactaatggaaggtttttttcaaanttgaaccaancaaacatacacatgcatgcaacatcataactcttttatagagtgacctaaaatcaattcaaatgtccgtcattttaca

SEQ ID NO: 45781 - DNA, 395 bp, Gossypium hirsutum
  Clone ID: LIB3493-010-P1-M1-H1
gcgccaatgccttgatagtcaacctggcctagaaacttaccctgatattggtcaagctgctttcggtacttatggtagaatcgccctctctataattttatacgtggagttatatgcttgctgtgttgagtatataattttagagggtgataacttggcatctttattcccaaatgcatacgttagtttgggtggattggagttgagcccgcaacgtctgtttgctttgatggcaacccttgctgtgctccccactgtttggctcagagacctcagtgttcttagttatatttctgctggtggagtggtggcatcaatcttggcagtactttgcttattttggggtggtttgattgaccaagttgggttccacaacaaagggacaaccttaaaca

SEQ ID NO: 45782 - DNA, 250 bp, Gossypium hirsutum
  Clone ID: LIB3493-010-P1-M1-H6
aaaacaaatcagatccctaatgttagggcttcaacttggagaccccgctgaaccaccatcaaacttggtggccgaccatgcgcagaagaaacacaagcagaggctagaggtaagtactccccttttttattcatttcatgccaaatataagagaaaagaaaggggaaaaaatattcaaaaaggaaaaaaagaagatcttgaaaactacaagaaagaaaactcgaaatcaacccttctttaattttttttt

SEQ ID NO: 45783 - DNA, 408 bp, Gossypium hirsutum
  Clone ID: LIB3493-011-P1-M1-A8
aagacatccaggggctcctcgagaggagttcattgcaggggtaaagtatctgtcagagattcaacatcggaatttggttactcttctaggctactgtcaagaaagtggatctcaaatgttgatatatgaatgtatacctaatggaagcatctgcaatcatctttatgataccggacgagaggctccaactagactagagttcaagcagaggttatcaatagctctgggggcttgctgaggtttatgccatttgcatagcctgcaacccccattaatgcataagaacttcaaaacagccaatgtcttggttgatgagaacttcactgctaaggttgcagatgcagggatagcaatgttacttgaaaggatagaagaagcaggttcatctcacagttctagcatcaatgt

SEQ ID NO: 45784 - DNA, 239 bp, Gossypium hirsutum
  unsure (1)..(239): unsure at all n locations
  Clone ID: LIB3493-011-P1-M1-B1
tgtttatttttctgtggttgcaacttgcgcataaaagctttggcctttcgctttgcctttggtattttcattctttgggggtaaataataaaaaaaaaaaaagggaaaaaaagaagggattaaagaaagtgaaatcctcttgttatgggttttaaggtggggttcgcttcaaatttgatttgttaagaataattgaaggaaaaaaaatgagagagatttcntggtttgactcaaacaat

SEQ ID NO: 45785 - DNA, 492 bp, Gossypium hirsutum
  Clone ID: LIB3493-011-P1-M1-B4
aagtactctagtacaccaggagctcagtcagaggcagaaccgtgttgtatttgtcaggaagaatataatgatggagaaaatcttgggacactggaatgtggccacaacttccatgccgattgcattaaacaatggttggtgcgcaaaaacttgtgccccatttgtaaaacaactggtctgactaaatgagaagacgaagaaaaagtggcatccaagcttgtactcattaaaacttgatgccttcgaatgttttccataagcagccttttaagtgttcacaccgagataatccatggcaattctaattcaattgcctgagccatttttacttccaattatgtcaaacaaagcaaagcttctgggtggagtggataacacaaatgcttgaagcactgtgaacagaaaagctaatttctatgtttttttcattctatcattgcacttgcactattagtttttatgtatggaatcttcagcccattggcgacatag

SEQ ID NO: 45786 - DNA, 207 bp, Gossypium hirsutum
  Clone ID: LIB3493-011-P1-M1-B8
gaagatttgtcgccacccagaagcgagcttattattaaatgtagccgtgacaacaagaaaatcctggtggtctaccatgctcataaccatagatgggtgtccctaataattcttgactgcaatgtttaggtgtgcatcaacggtggttagtccatcctgcgatgcgatccctatgaacgtttccaatcccgagaatgggctgcctat

SEQ ID NO: 45787 - DNA, 254 bp, Gossypium hirsutum
  unsure (1)..(254): unsure at all n locations
  Clone ID: LIB3493-011-P1-M1-C1
atcactacttggaaagctgtcgcctgagtccgtccggattccggtcgccacgctcggcggcgatngagacttngcagatgggttggacaactgctatccctggagatacaccataatcaggangacaatgcagtcatgctatcggcgtatctangcgtgtgttcggctcggtacagcgtatatctgtctaccatcgtgtcttctttatgaatttaaggcaacactaagattgtcgcgactggagacggcactat

SEQ ID NO: 45788 - DNA, 107 bp, Gossypium hirsutum
  Clone ID: LIB3493-011-P1-M1-C9
gtgaggcagccgccggttcctttgaccaccaccaccgccacctgtgtgtgatcaacctcactctcttttcagataatccacaggttaaggggaatcaataagctgtg

SEQ ID NO: 45789 - DNA, 489 bp, Gossypium hirsutum
  Clone ID: LIB3493-011-P1-M1-D10
gctttatttgataacgaggaggtaggttcagattcatatcaaggtgcaggggcaccaactatgtttcaggcaatgagacgtattgctggttctttagccaacagttatgctgtatctgctgatatggcacatggagttcatccaaatttcatggataagcatgaagaacaccatcgaccagaaatgcataaaggtcttgtgatcaagcacaatgcaaatcagcggtatgctaccagtggagtaacagcttttctcttcaaagaagttgcaaagatgcataaccttcctactcaggaatttgtggtaagaaatgatatgggatgtggatccaccattggtcccatacttgcttcaggagttggtattcgtactgttgattgtggcattgcccagctctctatgcacagtgtgagagaagtatgtgggaaggaagatatagacattgcttacaaacatttcaaggcattttaccaaactttcttcagcata

SEQ ID NO: 45790 - DNA, 380 bp, Gossypium hirsutum
  Clone ID: LIB3493-011-P1-M1-D3
gtcagccttaaactctctccttccaatgccgattcatcttcaccaggtggggttctttgcgtctggaggaatcttagcccgaaatccctcctcaacttcgatttcgacgaaaaaggaggagaaatccatgcctgctcgcacggaaggctccttgtcaccgtcttctatatttatacaatgggatgcccaacgagacgaacatgctaaagctaaggattggagaaaaagaatcacttgtattgatgtttttggcatctttttgtggcgtaatcggtttttgaaccggtaaaaagataaaaccttgctttatgccgaaagaagaaatcaaaaataaaatccattcttcgtatttccaattgtgctgtctggtggcttttttt

SEQ ID NO: 45791 - DNA, 249 bp, Gossypium hirsutum
  Clone ID: LIB3493-011-P1-M1-D8
cggacgcgtgggcggacgcgtgggtgagccgcttacaagacgcattggtctgggcagggtttgatgggatcagcagatacatattgagatggcgcatcaagatggaactgtttgaaggtactctctagaatgtgtttaagagctgtgacagagcactgctcttgtggctacaaatggctggaatagttaagcagatgctgaacaactaagatctcctggttaatcaatagatttatctgacctagcaca

SEQ ID NO: 45792 - DNA, 461 bp, Gossypium hirsutum
  Clone ID: LIB3493-011-P1-M1-E6
gcagaaaccaaagatgcaaaaagcttcacttctttgttcttcgaatccaatatcttcaccgccagcctatcttcacacatgttgtccactcacagctcccatcagaacccgtttctctccttctctctttgctttctcttctctccgcttctcattgaatcgtctccacggtcggcgccatggcttttctcctttgcacagcactgctactgaagaaatgattgaagctagcaagaacgtttctagttttgttgaaattgggtacatatccagtgttcatgggctacaaggagaaatttgtataaaacccaacactgattttcctgaactgcggttttgcaaggctgggagaagatggttaaagcaacaagtttcaggtaaagaaaccaataaagaagtagagcttgttgaagggagggaacatcctggaaagaaggagtggatactcagcttcagtggga

SEQ ID NO: 45793 - DNA, 299 bp, Gossypium hirsutum
  Clone ID: LIB3493-011-P1-M1-E7
ctttaatgggtatcagttaatttctttggaattctggttggaactccttttctttttctttttctttttttgtttttaacatgtttgggcaagaagaaaaaaaccggcttgccgggactgctgctgacgccgcccggcaaccatatctacggtcaatttcttggaccgaccgttcaccaactaagccgaacccaaaaccgcctacgaacacaaaaaggagatcacgtttgcctcctctttgtataaaaagaaggccggtggaagagtggccgaacgcttgctctgatgaccttggtgtc

SEQ ID NO: 45794 - DNA, 427 bp, Gossypium hirsutum
  Clone ID: LIB3493-011-P1-M1-E9
gccgaccctctggtgccattccagtgtattccaggagcttctggagctcttggctgctgaaattctttttttaggttcttttgggtttgggcccttttgcaaatcgggctaggaatattggtccttggtcctcagtatacgtttaggctattcgggcattgcgccaaatgtaattgggttgaatttgtgttttttattttttgggctagtttggtgtttattgaaaggttgtaagtggactgtttgggctacttcaattttagactttattcggctttttattttaatttatttttggtttcgtttattatttgggttttctctagtaagccccggcaaaatgggccacatacattatttatatttgttttgcctattaattaatctattgggtttaattaactgtttaaatattcgaatacgctat

SEQ ID NO: 45795 - DNA, 198 bp, Gossypium hirsutum
  Clone ID: LIB3493-011-P1-M1-F12
gcaactgctgcagatggaaatgactctgtatttcctgttgcttttgcttttgtagatgcagaaaccaatgataattggcattggtttttatcacaactaaaatcagctctgtcaacatcttgtcctctaacatttgttgcagacagacagaagggtttgcgggagtcaatctctgaaattttcaaggattcctatcat

SEQ ID NO: 45796 - DNA, 364 bp, Gossypium hirsutum
  Clone ID: LIB3493-011-P1-M1-F2
gatttaatggaggtttcccgtcaaatttgaaggtggatgtaacggtgtgtaaaaaccatagaaagtgttacaagacggtgcaagaggccgtagatgctgcacctaaaaacaaaaaggggagggatcaatatgtgataaaaataaggaaaggggtgtacgaagaaacggttagggtcccgtttgagaagaaaaatgtggtgtttttgggggaagggatgggcaaaaccattattaccggcgctttaaatgttcaccagcctggaatgaatacttataattctgctacagtcggagtacttggggatggttttatggcgagcgggctgacaatcaggaacacagcaggctccgatgcccaccaagc

SEQ ID NO: 45797 - DNA, 119 bp, Gossypium hirsutum
  Clone ID: LIB3493-011-P1-M1-G5
aggacgcgtgggcaaaggcctaccgatcgtcactcttgctcattagctttcgatcttcattgccatttgctgagtcctagtgatacgaaccctagattcattcggagtctttagtgata

SEQ ID NO: 45798 - DNA, 345 bp, Gossypium hirsutum
  Clone ID: LIB3493-011-P1-M1-H2
atcgaagatgagatggcaaggactcaaaagaacaaagcaacagctcatcatctgggcttgctcaaggccaaacttgcaaagctactaagagaactccttacaccttcatcaaaaggaggaggtggcgcaagtgaaggctttgatgttaccaaaagtggagatgcaagagttggtctagtacgttctacttctgtggggaaatctacgcttcttaacaagttgacaggaacattttcagaggttgcttcctatgaatttactacattgacttgtatcccatgtgtgatcatgtatagaggggctaaaatccagttgttggatctttcgggtattatccagggtgct

SEQ ID NO: 45799 - DNA, 302 bp, Gossypium hirsutum
  Clone ID: LIB3493-011-P1-M1-H4
cggacgcgtgggtttggctacccgcttgttactcactcttcttctcatctccttttactctcaaaatttgcccccgaatttcccatttccagcaacacaagtcaatagacctacactaatcacacttctttttccttttcatttcactgcactgaattcacccaccatagctactcctttttattttttgcactgaattcactttcccactcttcgatttagagctttcaatcaaaattacgtaaataaaaagcccaaattcgatcactaatttaaagaaaaatttaattattgcttaaaaa

SEQ ID NO: 45800 - DNA, 252 bp, Gossypium hirsutum
  Clone ID: LIB3493-011-P1-M1-H5
atatgctgatttaaacttctcggatcatcaatgactacagaactcattcgtacgtatgttttgcatcatatcagtgtatgtagcctagtcgatttagacaaaaaattattacggtaatgctaatttgattggaaccttaagagggtgctttaggggctgattggaaacactttaactcgataaatattgtattttaatttaggttcaatttaagtctaaaggaggaaatcgcaggttggtaagtagtgctac

SEQ ID NO: 45801 - DNA, 367 bp, Gossypium hirsutum
  Clone ID: LIB3493-011-P1-M1-H9
ctgatggtaatcttcatgttgctttgctcccaagctcaggcatgggtcatctgctaccttaccttagacttgctgcctcactcatccaccaccaatgttcactcactttaatcaccactcaccctattgtttcttcagctgaatctcagctcatctccactttcctctccgctttcccacaaatcactcaaaagaagttcacacccatccctctagatcccgtggctgctaacatcactgacccttttcaaatccaatgggaaaccattcgccaatcagctcacctgctttcccctctcatttcttcatcatctccaccactctcgttcatcatcactgatgtgacattgatgtcatctgtgatttc

SEQ ID NO: 45802 - DNA, 490 bp, Gossypium hirsutum
  unsure (1)..(490): unsure at all n locations
  Clone ID: LIB3493-012-P1-M1-A12
gggaaaatttaattgctgaaaccacgccaagatctatacccgagttagatatcgaagaagagttcgtattggctcgtgataccaaggaaggttgtcacgaaagtgaattggctcagaaaatgaaagaattgggtctacaaagggctagaaaatatggatggcaagacacctatgtgttcacaaaggctatgggagagatgatgatcaataatatgagaggagatttaccggtagtgataatacgaccgagtgtcattgagagcacttgcaaagaaccatttcctggatggatggaaggaaataggatgatggacccaatagtattatgctatgggaaagggcagctaacaggtttcttggttgatccgaatggagttcttgatgttgttccagcagatatggtagtgaatgcaancttggcagccattgcaagacatgggatgaccccaaaacaagatttaacatctacacatcgcattattagttgtaa

SEQ ID NO: 45803 - DNA, 251 bp, Gossypium hirsutum
  unsure (1)..(251): unsure at all n locations
  Clone ID: LIB3493-012-P1-M1-A3
gtcaaagctaaagattctgatgatgatggaaacccatcaggccattctcaaggtctttcatcaacaattgcagatgacgaggttgttaaatatttggagccattagcaatattggccgaaaaggttatcgaggatgaatctgtgctaagaataggggaaacttttgaaggtccctacaaggatcagagagaaccaaagatagtgcaggaggaaattgtgatgggagtatcagaacanacagttaaagatgc

SEQ ID NO: 45804 - DNA, 244 bp, Gossypium hirsutum
  unsure (1)..(244): unsure at all n locations
  Clone ID: LIB3493-012-P1-M1-A8
taccgatagaactcctcgatctcagtttgaggtccgagagacttcactcatatggaactataaatattcagatgttgagtttggaagacttcaagcgagagatctgttgcagcatctttggactggtccgatctctaacgcatctctcgatgttgtccaaggtagacggccttgtgagggtgccgcattcgatcgaattcctcgagaaatagttcataataaangcatgaaagaacctattgat

SEQ ID NO: 45805 - DNA, 446 bp, Gossypium hirsutum
  Clone ID: LIB3493-012-P1-M1-B1
caaaaacagtaagaacttgggtccttttcagcaaatgggattttgctttcttataattatttgaagtcgtgaccggatcaagaagaaggtctgagctgcatctgccagagctcacaccatagctaacagagccaaatccagttcatttccagcaatgattgcccctatagcggtagctttgacagtgggcctcctgggatggacttatcgagcattaaagccgcccattccaaagatatgtggctcacccgatgggcctcctgtcacttctcccagaattaagctcagtgatgggaggcatttggcttacagggaagctggagttcccagggaagaggctaagtacaaaatagttgtcattcatggctttggcagctccaaagatctgaatttacctgcatctgaagaacttgtagaggaacttaggatctatttccttttcttcg

SEQ ID NO: 45806 - DNA, 379 bp, Gossypium hirsutum
  Clone ID: LIB3493-012-P1-M1-B10
gtagctatgatgggattaaggcgataggacaatgctgccaaatgctcgaagaattgaccctttctgaacatagaatggatggtgggtggttagctgggctttcgttttgtgggaatttgaagactctgaggcttaggtcttgtaaaagtattgataagagtccaggggcggatgagcatttggggtcctgtttgactcttgaagagttgcatctgcagggcttgcaagttcgggacaagcaaagtgttaaagctttgtttttggtttgtgagaatgttagggatattgtgttacatgattggtggggttttgaggacgatgtgtttagccttgcaagtatttgtaggagagggaagcttctttctctcgaaggatgctc

SEQ ID NO: 45807 - DNA, 190 bp, Gossypium hirsutum
  Clone ID: LIB3493-012-P1-M1-B11
taaagagaaaagaagagagatggcgtctgctattaaatctgcgagtcttaattatgccggtgttgttatctgagcgctgcagttcgggtgttaggttgctccactaacagcccattgctgaccccagcaacatggacgctatttctcccattgatgcactcatccctaccgcgttgactggaccccgtgt

SEQ ID NO: 45808 - DNA, 416 bp, Gossypium hirsutum
  Clone ID: LIB3493-012-P1-M1-B12
cggacgcgtgggataaatttaagggtcgcgagaaattcatcagttaaagcagttcagagctcatctgtggaatcagatactggaagatgggttagaaaaagacgacaccagaatgtagatggcgacttctttgtagatcatacatgcatagattgtgatacttgtcgttggatggctccgcaagtcttcacaagagttggtgaaatgtctgcagtttataaacatgcaacttctagcgaagatcgattaaaggctctccaggccttgctttcctgtccaacaagctcaatccgtaccgaagtgcctcctcctgatatcctagaagctcaaaagacatttccgatttcagtagatgagaagaaactacctggtgtttatcactgtggatatcattctgagaaatcatacggagctgc

SEQ ID NO: 45809 - DNA, 471 bp, Gossypium hirsutum
  Clone ID: LIB3493-012-P1-M1-C2
tgaaaaccaccgattactctcttctttgctctctctcaaaatcccgatcgggaactatcaacgaattctccaccacggtggatcaactcaaagccatcatccattacgcgacgtcacgtatcgtccctcaacaaaacttccgtgagatctccgttacattcgacgttctccagaaacgatctccttgcaatttcctcgtgttcggactcggttacgactcgctgatgtggacttcacttaacccgggaggtaacactttgttcctcgaagaagatccgaaatggatcctaaccgttctcaaagacgcgccgagcctccgtgcacacgccgtgaagtaccgtactcagctcaaacaagccaactctctgctcgcgcattacaaatcggagccgaactgtcacccttcgaaagcttacctgcgtggcagcccatatgtgaagctcgcctaggacgggtttcccgatgagttta

SEQ ID NO: 45810 - DNA, 339 bp, Gossypium hirsutum
  Clone ID: LIB3493-012-P1-M1-C5
aaaatacacctctactacttcatttgttcccccgaccccccaacccaccccagacctcatttggattaggatcaagtttgataacacaatggaagttttgcatttcatttttggtgtctttgggaatgccactgctctgttcctattcttggctccaacgataacatttacgaggatcattaggagtaagtctacagagcattgctagggaataccctatgtcatggctttgctcaactggatcctctctggttagtatgtggttccctttgtatctaaatacaaccgttctgtttttaacatatcattggcactggtgcaggcatcgagaccatttat

SEQ ID NO: 45811 - DNA, 415 bp, Gossypium hirsutum
  Clone ID: LIB3493-012-P1-M1-D12
ggcaggaccctcggcgaacatcgaatacctatctcgagccaaggaacgtatcaaagaagggcttggagctcggcgtccatggaaacttatgttcaattttcactccatcaacttccctgggaacctctccgaagctattaccagggtcagaactaacgttgcttacttccgcatgaactacgccatgatcgtgcttctcatccttttccttagcctgttatggcaccccatctccctcttagtcttcgtagctatgatggccgcttggttgttcttgtattttctgagggatgagcctctagttgttttccggcgtacgatcgacgaccgcgtggtgctggtggtgtattgaggtgtgaccatcttgttcctgctggtgactgatgccaccaccaatattatggtgtcgcttttg

SEQ ID NO: 45812 - DNA, 333 bp, Gossypium hirsutum
  Clone ID: LIB3493-012-P1-M1-F10
cggacgcgtgggcaaaaatcttcgtgtttctataaactaatataaaatatttgattccgattttgcattctggagcgaaaattgctgcgagtaatgcacgacatccactcgatcgaaggtggctgcatattctgcggcggtggcggtggaagtagatgtgtaggagaggggacagaatgttgcaagcgcaccctcctagcctccataggacagtgaagagtggatttggcgattcaatgccaccaatttctggtctgcaacatctacctatctttatcagatcctttcttttgtacaaactgccaaagttactcatcagaatgcaacttactc

SEQ ID NO: 45813 - DNA, 272 bp, Gossypium hirsutum
  unsure (1)..(272): unsure at all n locations
  Clone ID: LIB3493-012-P1-M1-F7
gttttattattttattgacctaggccgaaattggctattacacatgttatcttaaatgttttctttatggaacaatgacttcatttattatgtgatgctagaaagccagtaaacatactaggcttgtatatcatctaagaaatgaatgaagagctctctgctttgcctttttaaaaaaaaaaaataaaagaaaaaaataatgatatgaataaacaagatatttanaaaanaaattaaanaaaataaaaatattttgtttaaaaattaaattg

SEQ ID NO: 45814 - DNA, 391 bp, Gossypium hirsutum
  unsure (1)..(391): unsure at all n locations
  Clone ID: LIB3493-012-P1-M1-G6
cccacgcgtccgcaaaaaccctcagtctttaattccacatctccttctgtttaggctttggggattccgagttatcttcgacagtaaccttaaatcttcagctatggctgctagaattcttgcaaacttgattgttatgggatctggaatattgggaagggctgttttccaggcataccgtcaggctcttgcaaatgcctcaaaatctggtgtcgctcaagaaacaatgcagaatatcaggagaggaagcaaaattatggccgaaccagaggcaaggcagatattaggtgtgacagagcattcatnnctgggaggagtcttgaagaaatacgacaacttgttcgagcaaaatgctaagaacgggagcttttaccctcggtcaaaggttcat

SEQ ID NO: 45815 - DNA, 395 bp, Gossypium hirsutum
  Clone ID: LIB3493-012-P1-M1-H12
aaaaaaccttacctttattgcttaaatttatataaagtttcttactttgcatatatatagttagcattatatcgagtagcttcttttttgtttcagttacaatgggtgactcactgaactcggaaactgagtctagcacggttagtaacaactcgtctccttcaacgtcaccatatgggaaaagattgggtactgagttaatacccgacccgaaaagggaaaagcgtccgagagataatagtaagcatccggtttaccgtggggtccgaatgaggtcttggggtaaatgggtatccgaaatccgagagccccgaaaaaagaaccggatctggttaggtactttctccacacccgaaatggcagcacgagcacatgacgtggcagctttgagtatc

SEQ ID NO: 45816 - DNA, 197 bp, Gossypium hirsutum
  Clone ID: LIB3493-012-P1-M1-H2
cggacgcgtgagctcggatgcacgggatataacgaaggtcaaggtgaaggtaactaacaccaaatggcagagcatgagccgtaactggagtcaaaactgaccgtcaaacaccgggttggtgggtcacgcactctcgttcagagtcaccgacagtgacaggcgcacctccacttctttgaacgtggcacctgcaaatt

SEQ ID NO: 45817 - DNA, 319 bp, Gossypium hirsutum
  Clone ID: LIB3493-012-P1-M1-H3
cgagcatggtaaattttatagaccagatcgacacattcgggctcttcacaaagtgttaccaatgtccaccaccgtcagtggcggtttcacctccatcccacggcctcaacaccaccgcagccgctcctctacaccaaccattcaaccacactcgccgccactgatttactatatatatttggattggctggtaaaattaattattgtaaacacacaatgccatccaatggttttttttttagatttagcttagagagtttgcaatgcatttccaagagaatattaaaaaaaaaaagttaaattttggttttcaaaagaa

SEQ ID NO: 45818 - DNA, 446 bp, Gossypium hirsutum
  unsure (1)..(446): unsure at all n locations
  Clone ID: LIB3493-012-P1-M1-H5
gaattttcttacgtcttcttcttctcttgtagacttctctgccattcgtgtaattaaatgttattcatggagaacttgcaactcgtttttagcacattagctctgctctgatttgttcagttgctgtagtagtctgggagtgattatgctcaggccatgttgctttggcttttaaatttccaatagcatgtaatctttattgttattattgcctttcctgaaagtgaattggagatttggattcggngtgcccttgtatatttgcaagttcgaacatccacgtcagataaaatggggtcctgtgggtgttcacaggctagttgtgattgctatttatggctccatactgtttatataccattccaagtggagagaaaggtaaccttgtatgttcatcttgaatgcactaaaactgtttgcttgtgcactaactggaaatggagcta

SEQ ID NO: 45819 - DNA, 382 bp, Gossypium hirsutum
  unsure (1)..(382): unsure at all n locations
  Clone ID: LIB3493-012-P1-M1-H8
cccacgcgtacggccacgcgtgcgacctaatcttgtacctctctcaacactagttcacgaagaagaagaaagcacagaacaaacttattagcgaaatggatcgtattcctcaagagcttgcacttgatatactatcaaggcttgcaatcccaagcttagtgcaatccaagtccgtgtgtcaagactggcgtaccttaacacatgatcaactacttgtcaacaagcatttcaagcagatggttgagaacgatccaagcttcattttgcacatcatgggttattccatccaaaaccagctntattttggagatttatccagcgaccgaaatgattggaacgtgacgatgatagcaaagaagcttaccataccaccattggttaa

SEQ ID NO: 45820 - DNA, 381 bp, Gossypium hirsutum
  Clone ID: LIB3493-013-P1-M1-A5
cggacgcgtgggaaaatttcgcacctgaaaacgagcttggccgtggtggcttcggagtagtttataaaggggaactagatgacgggacacaaattgcagttaaaagaatggaagctggtgtgattacaagcaaggctttggatgaattccagtctgaaattgcagtcctttcaaaggtccggcaccgtcatttggtatctcttttgggttattccattgaaggcaatgagagaattcttgcttatgagtatatgactcaaggagctcttagccagcatcttttccattggaagagcctgaaattggagcctctatcttggaagagacgactaaatattgcccctggtgtagctagaggaatggagatcttcacacactggc

SEQ ID NO: 45821 - DNA, 314 bp, Gossypium hirsutum
  Clone ID: LIB3493-013-P1-M1-B12
ccgcagttccgcccacgcctacgctgataatgttttttaacgaaaacgattccgcactgaattccgatgccaatcacttcattttcactgttccgcagccgcttacccggcataaccaccgttctccgccgtcactcaccaccctaccgccacctctttatcgtctccgccaaacagacccctcccaatccaagacaaagcgtatccaagaaaccccaacccaacaagaatctcctcaaggctaaacacaccttcaaagattactcctccttagctcccgtgcttgcccctaatgaaactccatctctttccga

SEQ ID NO: 45822 - DNA, 452 bp, Gossypium hirsutum
  unsure (1)..(452): unsure at all n locations
  Clone ID: LIB3493-013-P1-M1-B6
atgataatgttttgattgcaaaacttgtaagtttcatattgaatattttccatgttttggtccgatgaagtttttagcaataatgctagaaactgctttaaaacaaaaggttttggtgggttattgtgggtagaatagtctccgagaacaccatgatgaatttttttttcctttanttggtggcagcatttccactgattttagacagattattaggaatatttctttgtcaatagatagaatggtactttagagatattaattgttgcagggacccgcagctcctattagttctgttgacatcgtgtatgttaaattcatgttgctctggctcctcatttttaattgagtacctatgtttagtacccgtatcaaatgcatatgtggaaaatggatacaaccctntagggaccttccaattatatagaaaaaaaatactggaaaaaaataaa

SEQ ID NO: 45823 - DNA, 343 bp, Gossypium hirsutum
  unsure (1)..(343): unsure at all n locations
  Clone ID: LIB3493-013-P1-M1-B9
ccatctcatctcttgaatatttcagaaaaaaaggaagagtctaaacaatataaatcttatttagctataagattgctagtagcattgtcataagtttaaggtaaatagaaatgaaacatccaaagacctaaacatagaaatnnaagacaacttatcattttgacatcttagcanccagtttttttacaagcttagcagcaaccattgcggtcattccgtcgacggtgtcacgttgtggattgaactctactacatcggcagcaaccagatttccttcaagattgtgtaggatattgagaacatcacgaaaggaaaggccccccggttcgattttatgttcccc

SEQ ID NO: 45824 - DNA, 494 bp, Gossypium hirsutum
  unsure (1)..(494): unsure at all n locations
  Clone ID: LIB3493-013-P1-M1-C4
ccgcaggttcggcccacgcctacgccagctgataccatcaacaactgtacgatgctggcatcatctatgcacatgctaatgttcttggcatggcttctccggtcttaagaggcatgttgaaacgagcaaaaggctttggtaaaaagagatcaatttccatccatggtgttcaccaagatgcagttcgggttttcatccgattcttgtactcttccagatatgaatatgaagaaatgaaggagtttatggtgccattgttggtgctgtcacacgcatatgctgtgtcttcattgaagcgagtttgtgaacaacaactggagcatggattgcttaatctagaaaacgtagttgatattttccagctttcattactctgtaatgcgcctcggcttacactgattagtcaccgaatggatctaagtaattncaaaggctgctncgcaactgaaggatggaaatcaatgaggaacagtcatccaggacttgaaaaagag

SEQ ID NO: 45825 - DNA, 177 bp, Gossypium hirsutum
  Clone ID: LIB3493-013-P1-M1-C5
cttggtctgtttatggcattgcaaccaaagatcatagcatgtgggaatgtaagagaaacatattgcaatggcctgggcgatatatcccaagtgtccaaaataaaaaaaatacaattcttctttatttgctttcaaagtggctattgacgcggctatagtgtgcatgcggcttttcca

SEQ ID NO: 45826 - DNA, 445 bp, Gossypium hirsutum
  unsure (1)..(445): unsure at all n locations
  Clone ID: LIB3493-013-P1-M1-D5
tgattacaccatacggcaatatggtaaaccaaagacgggtcaactccttacttttgcccacttctaattgacaacctccgccaatagcaccaccgacgacgaggacagcaaaaatgtcgaaacaggatttacgacactactccgtaccctactcacgtctctctccaaaccctaaccatcaaaacgtcgtctttntacccgtctattacccccgccataacgataactaccgttgnctncgacactgnctngccttcacctccgtcatactcctcctgtctgcagccctattcttgctttaccccttccgatccaactctcgaactcgcccgactccaactcaaacacgtaggagtcaacacgtcgcccaaactcacactcgaccctctcattttttgtgaccattcagggtccgtaacaagggactttttttctttggactatg

SEQ ID NO: 45827 - DNA, 471 bp, Gossypium hirsutum
  unsure (1)..(471): unsure at all n locations
  Clone ID: LIB3493-013-P1-M1-D8
gaagagggataggcagcttactatgcagacaggccttgactggaccaagtatgtctatggactgcttaaaacaggcggaatgctttgagtaagacggttctatatatctaactgtgagaaacggattgcaatgcagcttgagcaagcaacactggaagatctactgatacctaatctgttctgacctatggaaacactatataangnntactgtgtgcaggaaattcttgcacattttattgcaacggaccagatcataggtggagcctctccatctgtggctgatgatgctgataccaccgcctcaccttcattaacaccagtgacactgtagccaagctaattgatgggtaccttgcacaggnngcctctgatgttaatttgaagctccccaagtttcaggctctngctgctattgttcctgactactccaggccgctggatgatggtctgtttcgtgcagtagacatt

SEQ ID NO: 45828 - DNA, 375 bp, Gossypium hirsutum
  Clone ID: LIB3493-013-P1-M1-D9
cggacgcgtgggtttttctccagctacagctgtaggcaaaaatgaagataggattctgtatttttggataggaagttttatcatcatgaaaaaaacttgattcagttagatagcagccaggtgctaagggatagagatgatattgactggaaccaagttggttatgatgttctaactcaagtgggtctgccagaggacacccttgtgaagattgtcaaagaagaagaagaaccaacagaatttcttgagttgctgaggacattttagctctgctgcaattaaggagaaacctacaagccaatagattttataaatcatcttcccgtttcttcaaatggcttaattttgctctggaatttcaggcatcaagcctag

SEQ ID NO: 45829 - DNA, 175 bp, Gossypium hirsutum
  Clone ID: LIB3493-013-P1-M1-E6
aatcccagtttcggacccagacccacgcagtagcgataccactacctgatcaagtagaatgaagcatgagaaatgcagacagaggctggaaacaaagatggaagatatctatgtggtgaacgagaaagcctaaatgggaaagaacgaagatgcgtcagacgcactcacagaaacg

SEQ ID NO: 45830 - DNA, 379 bp, Gossypium hirsutum
  unsure (1)..(379): unsure at all n locations
  Clone ID: LIB3493-013-P1-M1-E7
cggacgcgtgggcggacgcgtgggtttttattgaatttttttttgcttttacacatccccaacagttcatcccactttctctctctctcttttcatctatctatgctttcacaatcacctaaccgggagacaggcagccacccccccccccccccaactctcgcccttgactnnttcccctctcttcaataattctctcttttggggtactatatatgttacatgttgctgaactccatggganaaatattccttttctttcttccccattcttcccctctctatccatccatttcttctcttcttttttttttcctcagtttcaaaattaacttctttgagctttggggaataagccaaaatctggnngtgtgtgttt

SEQ ID NO: 45831 - DNA, 308 bp, Gossypium hirsutum
  unsure (1)..(308): unsure at all n locations
  Clone ID: LIB3493-013-P1-M1-F4
gngactgtcaggtcagcttcccattgccattggtaacttaactcagctccaaactctttctcttcgtttcaatgctctgtctgggtcaatcccatccgactttgccaagcttaccacccttcgaaacctttacttacaagggaatgggttttcgggtcagatcccgggattcttgttcactttgcaaaacctcattcggttaaatcttgcaaacaataatttcagtggtaccatcccctgaaagtgtcaataattcgactaggttgggcacattgtttttagagaacaatcacttatctgggtcaata

SEQ ID NO: 45832 - DNA, 411 bp, Gossypium hirsutum
  unsure (1)..(411): unsure at all n locations
  Clone ID: LIB3493-013-P1-M1-F6
caaactttatcttttgatttggttgatccatagatctgctaattccaattccatgctcgcatgaagttttttccttttctgtttccagatcctcttcttcaagtttaaaccaaagtggtcaaactacaagtactatttacattatcttgttgagaagcaaaggaggatacggcttcgttgttcaagtttctaaggtttggttgtatatagggcacatttagatgtggagagaacntnggaggggtttctggatgagaatgaagggaggtattcttggtttatgaactttttgagggcctgttttcggccaaagtcagatcaatacagtcacacaagtttggatacccggggtcgccaagatgggcttttgtggacaaggacacagggcagcacgtctnatggggagttctc

SEQ ID NO: 45833 - DNA, 184 bp, Gossypium hirsutum
  Clone ID: LIB3493-013-P1-M1-F8
ctgcccggcattacggggggacgacccacgcgtacgcagacgcgtgggttacttggtgaagaggccatgaatatcactttgcttggctgaaatgggagaaagagaacgaattgcgagggtaaatcgactggatgggtggaccgcgtgactgcggtaacaatctagaatgcgaaaccataagaaa

SEQ ID NO: 45834 - DNA, 514 bp, Gossypium hirsutum
  Clone ID: LIB3493-014-P1-M1-A11
ccgccttcaagaattggtcatcattttggacaattactaaaaactggaaagggaactgatgttagctttgaagttgatggggaagtcttttatgcccacaagttggtacttgctgcacgttcgcctgtgtttagggcacaactttttggtcctatgaaggaacagaatacaaagcagataaaagttgaagatattgaagctccggtttttaaggcccccttcactttatgtactgggattctctacctgacatgcaagagctcactggtctcgacttcaagtgggtgactacattgatgtctcagcatctgcttgctgccgcagataggtatggactagaaaggttgcgattgctctgtgagtccaatctttgggaggatgttaccattaacactgcggcaactacattagccttggccgaacagtaccattgttttcagttgaaagctgtgtgtcttaagttcgttgcagtgccagaaaatctaagagctggtatgcaaacagatggtttcgt

SEQ ID NO: 45835 - DNA, 441 bp, Gossypium hirsutum
  Clone ID: LIB3493-014-P1-M1-A2
cccaatttggagcaaaggccgatgagaaaacagatttgagtcagccattgctgaatgcgtggaaagaagcatgcgcatcgccagctccgtcccaaatagtgattcctgcagggacgttccttttaagtcgagcagccctggaaggtccatgcaagggtcctgtcgatattcaagttcaaggcaccataaaggctccgtctgatcctagtcatttcaaagacgatcctgggttattttcagccgcatcgaagggtttacgatgtccggcggtggtattttcgatggccaaggagcccttgcttggtccaagaacgactgtcataaaaataaaaagtgtactttatttcccattaacataagattcaattttctgacgaacgcctatatacatgacataaccaccaaagacagcaaacaagttaatgttaatgttttgggatg

SEQ ID NO: 45836 - DNA, 221 bp, Gossypium hirsutum
  Clone ID: LIB3493-014-P1-M1-A8
gcaaaacctaatgtggtggtcttttgactgggaagaaaaagacaagagaaaattttgccttcaatttccagtgatagaacaacacaacagtgctaggtttagttcatttccttgtatatccccaggcctgtttcatttggctttgcttatttacaaagtatataaaaaagttgcttttttttttttcaaactgatcctagtcatttacaagacgatacagg

SEQ ID NO: 45837 - DNA, 489 bp, Gossypium hirsutum
  Clone ID: LIB3493-014-P1-M1-B11
cgtggctttcctatcttcatttcttcacactctcctacgggggttgcgggatataaatgacattgtgttttactattaatagctgatactattatactttcttacaatcgttttcatttaagcttattaggtttctactctgattttaacacgtgctatcactcattctttttattagtatatgttattatttgtatactttagatttctagtttcacaaccctatctcttttgtgttccttataacatttcttcttagttaggctatgcttgttaacaactttttctattttgtaataatgcttttcgagccgatcaatgattctttatgctatactttcatactctgacttttatcaactagttgttgtttcagctgttgatatcaccataagagcctgtattttcattccattctggaagtagagacatgtcttacccaccatctgatgttcgtttttccaatgctactgagggagctgatcactt

SEQ ID NO: 45838 - DNA, 159 bp, Gossypium hirsutum
  Clone ID: LIB3493-014-P1-M1-B12
gttaaactcatgataaatacattttccaattcatagaatggttcacactcacaaacagtctaacccattataaatacattaacatttacaaataccaatccatggaatggttcacactcacaaacattctatggattggtaattgtgaatgttaatgtt

SEQ ID NO: 45839 - DNA, 418 bp, Gossypium hirsutum
  unsure (1)..(418): unsure at all n locations
  Clone ID: LIB3493-014-P1-M1-B3
gctttctactctgggatagtggcatatgcccctgttaaagaacttactgtgattattgtgcttgcatcagcggttctcgccattgctgaggctactgttcccaactccataagttgtcaaccatatatgctcacaatatccggtctcattggctatgcagccgtgactggctatatctctgagccactctactggactctattattggggttatatagtttctcgcggttattaaaaagcgagatgatgttacatcagcactgcctgttgcagctgtaatggctgccatcggngaaccttgggttaggatcttggtgatcacttcttatctagcgttagctatctntaaccattcaaagaagctctcagaagtaacggagcanacagaatgtattgctatggagagaccgcttcaatg

SEQ ID NO: 45840 - DNA, 453 bp, Gossypium hirsutum
  Clone ID: LIB3493-014-P1-M1-B5
gtttaaataaacctaaatcactttatagggctccaagaagtcaaagatgtacagctggtgttgttgaaattcctgagactgaatttgctagattttctcatcagatacctgctttccagcacactggagatgatagtcgctggagaggatattgggagctcgatcccttggcctttcctggtatcgtttgtctagactgaatctgctatttcctcgtcgcagtgtggccagagtatgctccgtatgagaaaatggaatgaactgacaggaaactccccctttggaaatgatgcgtggccttaaccgttaatcattttgttctggccaaaaatgatgttcaggtcttttggagagtgaactaattcaagtatttaagttttagttgccaacttgcagtgatgatgaatcgaatttttatatgatctgcatcagggcttatcttgtagctttcta

SEQ ID NO: 45841 - DNA, 532 bp, Gossypium hirsutum
  Clone ID: LIB3493-014-P1-M1-C10
tcgggctctcacacctcgtatgtgttatatataaaaagttgggtgtttttttgttttaataaaaacaaagaacaagccatccccctccctcttctatcatatattcctctttcttccttttttcttgttctattcatctccttaaatctctcattttcatttcggaatacaataaatcaatacggtctcattgtttgggtccaactccggtgaactgttcgatgaaccaacctggctgttttccagcgggaaaggagcggcgatttgtacgtatgccgggagcggtgaggcccactagagcgccggtggtgggaaagggaggaaagcgatgttggtttgcagggttattgcgggtcgggtctcgaaacgggtagggttcgggtacgagtcattgatggatggtcggatcgggtatgactcagtgagtggagacaacggcgagttgctcgtgtttgatccacgtgcagtattaccatgctttcttatatctacaaattgtaaatttcccttaattgatctctgactatagttt

SEQ ID NO: 45842 - DNA, 338 bp, Gossypium hirsutum
  Clone ID: LIB3493-014-P1-M1-C11
gtctggtaccacgatgatctatttacaatcttacttgggtatataggctttactcctatacttcacttccttctaacacttaatataactttcatctttccccctctactcatttctttcacaccccctccccactgcctatcttcacttcccatctctcaagataatatcacataatctctgaagaaatggatagttgagaggtcaacttgtcatccccaaggagacatgccactttcactaaccctcctttgtaccatccatttattccaatttcaatgtatattgataagcattgagttaataacacatacaataaaataaaatctatcatctat

SEQ ID NO: 45843 - DNA, 443 bp, Gossypium hirsutum
  Clone ID: LIB3493-014-P1-M1-C3
cagaattattcggtggtccccggaattacccatcggcaggatcatcggtaatgttagcactcgacggcgattttaaaacagcggtgattgttatctgcggcggagctgaatatggagcttttatagaaaggagtacggacacaccggctcacggtagttgtggtcgtattattgcgacggatccgaacccggtttgggaaatggaagatatgccattcgggcgggtatgggagatatggtaatgcttcctacaggtgatgtattgatcattaatggagctcaatcgggtacccaaggtttcgaaatggcttcaaacccgtgtttgaatccggttctttaccgacccgatcaacctatcggtttacggtttatgactttgaacccgggtacggttcctcgaatgtatcattcaactgctaattgttacccgatggtcggtttta

SEQ ID NO: 45844 - DNA, 355 bp, Gossypium hirsutum
  Clone ID: LIB3493-014-P1-M1-C9
ggcaagattgagatcacgatgctctagaacttattagaaggcaggtcacttactgaaagagaatgtatagaatcatgaaaaatgcttatgaaattactgtcattcgacatgcataaaaactactctaatctgctttgctagatcttaaaagatgctttattgttgcacacctactactaactagattgatatctcggacctatatcagaatacttctttatagagttattggatgcacaacatgagaatcttatcaactaattatatacaatcaagaaacatacttatcgcatgctaattgatctcactcatttaaatagttaggcattctcatctttgcttacaaggatctcat

SEQ ID NO: 45845 - DNA, 404 bp, Gossypium hirsutum
  Clone ID: LIB3493-014-P1-M1-D10
cagtgctggagcttcaaaaggcttggcctggttcagaagtgagatgggtcacaggtggccatgtctcgtcgtttcttctacataacaatgagttccgaaaggcaattgttgacgggcttaacagattagagtggaaagaatcctccttatgacagtgcatcagccagtcccggtggttaaatgactgtttttgttgatcacttcagaaaaatgggctatagcaactgaaatttgatggcacccccttaaaattgaaaagagaagggggtagtgctttgtgaatacattatttcttctctaatgtgcttataaatttaacttacacttactttataaagttaactacaccgcaagttactcgatttcttttacacttcattatttagagttttaagttcttcact

SEQ ID NO: 45846 - DNA, 501 bp, Gossypium hirsutum
  unsure (1)..(501): unsure at all n locations
  Clone ID: LIB3493-014-P1-M1-D4
gaacattccgtacggaaatgggagcctagcatcgatgggtacttgaaattccttgtggatagtaagctggtttatgatactcttgaatctatcattgacgaggctgcttttcctatctatgctgaattccgaaataccggattggaaaggtctgaaaaactggcaaaagatttacagtggttcgaagagcaaggctatgccattcccaaaccatcttctcccggtatacctatgctgagtatcttaaagaaatatccgacaaggatcctcaagcgttcatatgccatttctacaacacgtattttgcccactcagctggtggtcggatgattggaaagaaggtagctcagcagatacttaacaacagggagttggaattttataaatgggacggtgacctttctcaactgttacagaatgtccgggataagctgaataaagtagccgagagctggactagagacgagaagaaccatngtttggaagaaaccgagaaatctt

SEQ ID NO: 45847 - DNA, 282 bp, Gossypium hirsutum
  Clone ID: LIB3493-014-P1-M1-E11
gcgcctaatctcagtcgctatagatcaaaacttgtttctttgcgcgaaatgataacttgatgtcgaccactctatgtgtcatcgataaagactccagtcagtcattaagactaattgatgttgatacatatcatagtcgagactcatatatctacggtatatcatcaactatgcaggttaaacatggacctctgtgaggcgtttaatcactgtcagcggccaccggagtgatccagatgttgcattgtgctacaaggtcaagggcgttgactgattcatttt

SEQ ID NO: 45848 - DNA, 479 bp, Gossypium hirsutum
  Clone ID: LIB3493-014-P1-M1-E6
cggacgcgtgggcatgagcattgtcttcttcctatccacatctacattgtcgaagtaagcgccggcttttatatatatcacaaacctagctaattcaacaaaccagttcattagccacttcattaattaattcattttcccaatttcaaaccatatcaaacgctaatataggtgcagtataaaattaaccttgtgtcactgttgtttggagcagcggaaacagcgcggtgatgttggtgaagtttccagtgccgtccttggcaactatcagatcgaacttggtttcatttaatgaagcctgtagaagttttcgatctcttcaagatagccatgttgggaacccatttttcacgcgtccatatccagggaaaacctcgggtttcgatttgttgactccagggactttgttgagcatcacaagggagttgctcacatgatgagagatgttgtgcaggcccttttttataatgctcctaaca

SEQ ID NO: 45849 - DNA, 354 bp, Gossypium hirsutum
  Clone ID: LIB3493-014-P1-M1-F10
gccaaagcatggtgcacggtcacaaggcatcaaaatgagaatggtttctgaaaggggtacagacatttccacgataggtattcattcaattgttcacacatttgagtagaatttgattatgatcacttggaaacgaaattggggcttcctaattgtttttggaatggaaggcttctcttataaagaaataataatgttattgaacaagaattgggatttagtgtacttgttgtacttgaaaaatctttttatcttttcccttttaaactgtgttgatactggctgtgcatcttttccaataattactatcatttttttttttaataaaaatatacaaaccatggtcaaaacacc

SEQ ID NO: 45850 - DNA, 158 bp, Gossypium hirsutum
  Clone ID: LIB3493-014-P1-M1-F12
acgctggcgtgggagtatccccacatattgggtgtggagtatcccgacctctacccatgaaacacgaacgtccagcatgaccgacacttcatgctttaccgctctgactttaccaaacggtgggccatgcgctctatactagtgaaaccataaacaca

SEQ ID NO: 45851 - DNA, 305 bp, Gossypium hirsutum
  Clone ID: LIB3493-014-P1-M1-F5
cggacgcgtggccaaatcatcaaaatgagaatgtgttagggaaaggtgtacagatctttccacgatagatattcatacacatgtacacacatttgattagaatttgattatgctcacttttaaactaaataggagcttagtaattggtattggaatggatggcttatgttataaagaaataataatgttattgaacaagaactgggaattactgtacctggaaggcttgaaaaaacatttgaacatttagctttggaactgtggtggatctggagggacgtctgatgcaactagtactataattt

SEQ ID NO: 45852 - DNA, 324 bp, Gossypium hirsutum
  Clone ID: LIB3493-014-P1-M1-G10
ccgacgcaatcgcttggtgaggaatataatcacatgcttggtgttgcttgatcgagatctcaaacctgtaaaagaccttgttcgagaagatggacacataatgctatcggactttgatctttccataagttgtgctgataggcctatgctagtcaaatcaccatcacgcgagtcacaacccttgagaaagaatccatgttattgcctacaaccagcttgcattgagccctgccattcagccatcatgtgtagctcctacaacatgtttgtgcacctggtcaattttcatgaaaatccaaaaaggaccgagaacccatgaatgaa

SEQ ID NO: 45853 - DNA, 288 bp, Gossypium hirsutum
  Clone ID: LIB3493-014-P1-M1-G12
aagccatatctggagatgaagcactcatatctggtggatataaatacaagagcttgtctgatgcaaaaaaagcacctgatatatcaccagcggacaaacgaaaggtcgagcatgaaaagaacatcaaagcctacactaagatacagactgaagattccatagaagactagtccaacgcttacaactcagaaactgatgtccatgactaccggatgatgactgtgaataaaggaggcaaaatgatgaccataaatactcatcaggttggaagacttgtaaaaagagata

SEQ ID NO: 45854 - DNA, 477 bp, Gossypium hirsutum
  Clone ID: LIB3493-014-P1-M1-H1
ctcttgtgtatgatacaatatatgcacatcaggataaagaggatgatatgaaagttggtgttaaatctacagctttgaggtttggggattcaactaaggagtggactactgggtttgggattgcatgcataagtagtcttgctctcagtggatacaatgctgatataggatggccatattatgtcttccttgcagctgcatctggacaattggcttggcagactggactgttaatctaacatgccgagcagattgcaatagaaagtttttgtccaacaagtggtttggtgcgcttattttcagtgggattttatttggaagagtcttctcataaaggtattcatttataaattcttatggccccctaaaggtgctagtgtcctacctgtaaagggcataatataaacaataatagattattggtgtagaaatgaatttgctgtatttttatgaccagctaaatactagttggtaagg

SEQ ID NO: 45855 - DNA, 304 bp, Gossypium hirsutum
  Clone ID: LIB3493-014-P1-M1-H6
tctgtgaatttccaaaaccttctccattcccctcaaaccctctcttatccctctccacctggagacaccgtcttggagctgagctcgacacccttctccacacataccaacccgaatggtctccaaatttgctgaaggctaaccctacaaagccaattcccagaaccgtacgttctttgtcttattatcttagccgaatgctgctgttgcggtggctgccaccttgaaatccccccagttgcgaaaactctagccggcaccgatggttataccgggagcaactccaacaatgaggcccggctta

SEQ ID NO: 45856 - DNA, 527 bp, Gossypium hirsutum
  unsure (1)..(527): unsure at all n locations
  Clone ID: LIB3493-014-P1-M1-H7
cggacgcgtgggcggacgcgtggggccaaagactctctctcttccctctgtatcgttcccttttctcttttatttctaaactaaattacgttgaagcaaagaataaaagaagcccacaccttagccttttatccaatggcagttgaagctcctcatatgaatcctttccctcctcagttaatcaccaacagcagtggttttatgaaaacaaaccaacggagtggtaatatatgcagtggccaggtggattattgtattccgttggttgattcaatgaaacaagattcccagttttttccattatatcaatccattgtctgtgatccggtttcggccaaaacttcaatcaacaaagctgacagtggccttacctataatatgaatatcccagtctccgcaacaagaaaaaggcccagagattcaatcatcaatggctttgattcatacactgtctcccaaaagaacaaactttgtgggtttcctctcttcttgatgatgatgtcttctnccagatccaacaacaacaa

SEQ ID NO: 45857 - DNA, 194 bp, Gossypium hirsutum
  Clone ID: LIB3493-014-P1-M1-H8
gttatacaacggaatgagtacgaagcatcaagctccggagaagccgagcatcaattgacgtgtgtcatgaacttcggtggatcctcaatggcttccgctgagcgaacgacagaggctgctgaccttatactcacttcacccaatgaaagaccagtcattgagctttctgacatgtgaaagactaccaataaact

SEQ ID NO: 45858 - DNA, 273 bp, Gossypium hirsutum
  Clone ID: LIB3493-015-P1-M1-A3
gttgttcttcatgatttcatcattggcatccattgcttcaagccttcaacttcttgtcattagtaattcccgtttttatataatcaggactaggtaagatggcaactttctcagggattttctttggttattttaggtcaattaataaaaaaaaaacattgttttaagttattacttgggaacaactcttaactatgagatactagagctacattacttgcaactctggtttcctttcgaatatgatataatacataagttcttttttttccc

SEQ ID NO: 45859 - DNA, 343 bp, Gossypium hirsutum
  Clone ID: LIB3493-015-P1-M1-A8
cttgacctaatcttgatgtgcacatatactgcagaagacattcttggtgtctgctccacatatccaaagagagcttggctgcgaaaactctcctttagcttatgatattacagctgcttgtagaggatttgtgctgtgcctgatctcatatgatagtcacatcaagggaggcggtttcttgaatgtgttggtggtcggggctcatgtgctctctcagattgtcgatgctactgatcgacggatcatgcttgctctgtggggatgcctgaagcgctggtctctttccggcctgctttgctgaaggcggtcaccatttaagcgctgtcttgcatatatgcttgct

SEQ ID NO: 45860 - DNA, 279 bp, Gossypium hirsutum
  Clone ID: LIB3493-015-P1-M1-B2
gaagaatcagatgaggaagacgaggaagatattgattttgatgatgatgatttcgaagatgatgatgaagatatgcttgagcactatcttgctgagaagtccgatttgtccacgcactcttaagatagatgcctaaaagaacgtcttgtggtctgagaattaaatatctattatcatccatgcactctgaacgtcttgcggtttgagaattaaagatcttttatcaactcccattgataagtgggaactgtagtttcattagaagcttcctgtcatttt

SEQ ID NO: 45861 - DNA, 399 bp, Gossypium hirsutum
  Clone ID: LIB3493-015-P1-M1-D4
cggacgcgtgggttcttgtgcttgttcaggatgatcaattcattgacatgttctaccaggcattgcaaacggtgcatcattcatgagctctaaagctcatcctcaaagcttcacttgaaagttccctgtgcaccatgtacttttattttcttcggtcaggtatcttaacttagacactggattcgatctataccctaattgttaacggatgatagtgtgaaacactaccacgctagcattgtagcttgtattactggagctggcataaattaaaatggactcatggctgctgatgcggcaaaaaggttgaggcctgcatgatgaacataaacctacaagtttcaacatgcaccaaaagaactgatcttttaaggttgtgaagagatgaagaaattaaaa

SEQ ID NO: 45862 - DNA, 513 bp, Gossypium hirsutum
  Clone ID: LIB3493-015-P1-M1-E11
gggtgctagagaaacacttaggctgctcatcagtggttcaacacagagtaatcctccattgattgatgtattgccagcagttctaaccaatgctgatgagaaaaaaggtatctttgttgctggaagccggggtctatacagtggaaccagagatgttagcgccattgccaccgttagtctggttacacttacttccagctccgtggtagatagtattataaaacaatgtagtagcagtagcaacagtcatgacgatcctgatacgaagaagctgacgggatctagcagctcggatgaatcatgttctagcagtaatggtgctaaactttcaggctcgagagaagaaaaagttgagtaaataaattaatgtttttctttcttctatttttctttgaaaatgaaaaattgtagataaatgcatctgcagttttgtcataatttaattgtaattagagtcccaatcttttacccattttagggatttgctctattgtagtattttactattgtatt

SEQ ID NO: 45863 - DNA, 429 bp, Gossypium hirsutum
  Clone ID: LIB3493-015-P1-M1-E12
ggcaattgcattaaaaggcggccacttccttgaggcacctgtttctggtagcaaacagcccgcagaaactggtcaacttgtgattcttgcagctggagataaggtcaattggcaatactattttttttatttactctaagctcacacagaccaggtaaaaatggaataagtatcggatatgggtatgtttaatgctttttttaaagttttttttcatgtatttggtaaaccataccgccgtatctttatgtgagtggcagatatggatatgttaagaataagagaaatttgacaagaaagtcaaaatggattgcgtttcctctatcatgattctagggacgatctattttgaatgattgttcaactcgtcgaagggagacgagaactctagggttcatatcatattaaataaggaaaaccaactaaaat

SEQ ID NO: 45864 - DNA, 314 bp, Gossypium hirsutum
  Clone ID: LIB3493-015-P1-M1-E3
gtaaaaaactttttatttatttatagattaagttgctaaaagccatgagttttttcttttcttttttcttccgagtcaataaagaagaaaaaggttacaaaaggaggactaataatgtaaaatcctaaagcatattctgatgcttctaaaaaggcagaggaggtgttattgaggttcaacttgtacttgcagatctgctaaagaaaaacaactctgcgatttgagagtgaccttcagcttgctttgctgctgcaacttgggttttatcgctgctactggtacgttgtcatttgatgatgatgaaaatgacgacg

SEQ ID NO: 45865 - DNA, 466 bp, Gossypium hirsutum
  Clone ID: LIB3493-015-P1-M1-E9
gtagacctttatgctttcgtcattggaagctatttcatttggacagccatggctggggctagatacaccattgagcacataagaacaaagagggctgcagttctgttgagccaaatctggaagtggagtgccattgtcatcaagagctcagtgctcttatcaatatggattttcgtcatacctgttcttatcggtctgctttttgagcttttggtgattgtgcccatgcgggtgcctgtggatgagagtccagttttccttctttatcaggattgggcattaggtctcatttttctaaagatatggactagactggtaactgttataccaaaatttattatgtacaatagaaaaaggaaattgttccgacatgtcttagattttcgtgatagacattggaggatattattccacgacagtcaaaagttgatatcttatattcacaggttatgctggatcatatgat

SEQ ID NO: 45866 - DNA, 257 bp, Gossypium hirsutum
  Clone ID: LIB3493-015-P1-M1-F3
ctgacgcgtgggctccacgtgaggaaagaaaaagtgcgagacagaataacagcatttcaccaacttgtttcaccatatgggaagcatctaaaggctgactcaagccacatgtttaagacagtctacgatctcgaagtgccaagagagcattggcctttctataagattcaacctcacaccgaaatatatactgatggtcaacaataaagccgtgcatgtacatttggagcctactatgtctctagaaacataggacg

SEQ ID NO: 45867 - DNA, 445 bp, Gossypium hirsutum
  Clone ID: LIB3493-015-P1-M1-F6
attcattaccaaggaaaatggcgacgggtggcatggatgaagcaagcaacatgaaggtggtactgaaacactatgtatctggttcaccacaagaaaccgatatgcatttgacagccggaaccatcaaactcaaagtaccaaaggattctaattccatcatcctcaagaatctttatctctcatgcgatccctcaatgatcttcaaaatgatgaagctcgaacgacaattaacagatccttacgtcctcggttcgcctataactggatatggagtggcaaaagttttggattcagcacatcctggctttgcaaaggatgatttggtgtggggaataactggttgggaagagtatagtctaatttcagaccctaaaaatttctttaaaatccaacacaccgatgtacctctttcctactatgctggaattcttggtatgcctgggat

SEQ ID NO: 45868 - DNA, 363 bp, Gossypium hirsutum
  Clone ID: LIB3493-015-P1-M1-G7
ctacttggaaccaggaaatcaatttgcagcctcaagaccactcctcagacttcgattttagcgaagcaaagaagaatccgtggcgattttgcaaagtatggagaaacgaccgtacggagaaagtcgctcgtgaaagccgtgcgtgagctcgattgcagcactggtgtgttctagaaacccttaggtttctggcatttccaagcagctgggccttttgggccgtttgtgaattgggctgcgggtttgggttattagttattaggttttaggattgggtcaagttttatgtgactggagtaagtttatattaagggactctgggtataagttacttctggcccaaatatttgtaaccggacattg

SEQ ID NO: 45869 - DNA, 298 bp, Gossypium hirsutum
  Clone ID: LIB3493-016-P1-M1-A12
atgattgctagttgcttggtgaaagatccttcaaaaagaccttcagcgaagaaattattaaaacattctttttttaagcaagcgaggtcaagtgattatatatcacgaacacttctagatggattgcctgctcttggtgatcgtatccaagcattgaagagaaaagaagaagatatgcttgctcaaaagaaaatgccagatggtgaaaaagaagaactatcgcagaatgaatataaacgtgggataagtgaatggaatttcaatcttgaagatgtgaaagctcaggcttccctgattc

SEQ ID NO: 45870 - DNA, 310 bp, Gossypium hirsutum
  unsure (1)..(310): unsure at all n locations
  Clone ID: LIB3493-016-P1-M1-B1
gcaccagatgctttgagattgttagggaatcaagcgacatatgatgaatcaacagtgcttggtgctttccaatatgtctatagtgatatttatcttcatcgtgacaaaaatttaatgcccaaaaacccagcagcatggagtgcttggaattttcttggaagtacagacaagaatgtatctttgacatactggcttaatgtgcttcagaatctaggagaaacaagcctaccctttttggtcactctcaatccagattatacaccacaacacancctgcttaagtggagaacaggccatccagtaccatctg

SEQ ID NO: 45871 - DNA, 380 bp, Gossypium hirsutum
  unsure (1)..(380): unsure at all n locations
  Clone ID: LIB3493-016-P1-M1-B4
cagaaaccagcttcaaacaagagccccaacgtaacaccagcaaaaaggataatgctttcagggttaactgcaggaagtcaactccagcctaaagttttaagctttcattcgaggcanatcactgttcaaaatggaggaaaattgttggccttaagaatcaaggcgtatccaaagaataaagtcagatgcanaattgcagaatcggaccaagacttctcttcaatcaaggggtatgaaaagaatcatcctttagtcaaaatgtgtggtattacatccgctagagatgctgctatggcagcagaagccggcgccaatttcattgggatgatcctttggcctaagtccaaacgctccatttcgctttcagttgcaaaggaaat

SEQ ID NO: 45872 - DNA, 402 bp, Gossypium hirsutum
  Clone ID: LIB3493-016-P1-M1-B9
ggaagatattcgaatgccaacaaatgctaggctcaaggcaacaagcatgttgatgcagttaatctcatgtggttcgatatctgtgaaagaccatagttttggccttgttccaacctacaggcctaggttttcccattcaaaattttcttcaccattgttctctacttcaatcatgttgggtgagcttgattgcttatccgagaatccgaggttgatgggcctgagattggaagacaaagaatatttcagtggtagcttgattgagacgaagatgctcaaagaaggagaagggcataccactcttgaacgttcttcttcatataatgatgatagggctcgtaaagagttggaatcagcttgagacaaagaagagatgaattcaagtattcaaaatgcatcccc

SEQ ID NO: 45873 - DNA, 334 bp, Gossypium hirsutum
  Clone ID: LIB3493-016-P1-M1-C10
ggatgttgacattgattctgaatataagaattacagtgcatctacaagacattcacttgaagcatggtcaggttcacagattgatttgggtctggtggaggccacacttgagcatatttgccgccatgaagctgatggagctattcttgtattcctcacaggctgggatgacatttctaaggtccttgacaagattaaagtgaacagctttcttggggatcttagcaagtttctggttcttcccttacatggttctatgcctaccattaatcaacgagaaatatttgaccgtcctccacctaacaagcgaaaaattgttttggcgacaaatatt

SEQ ID NO: 45874 - DNA, 331 bp, Gossypium hirsutum
  Clone ID: LIB3493-016-P1-M1-C11
gtttgtttttcttttttctctcaagagtgctgtgaaccatgatgccatagtgaatgccaatgatgaagagaaggtgaggcttgaggaacaggcttcacaagtggcacaaagagcagcggaagcattacgacaatcacgaatgcttcgaagccatgatagtatttccgttcctacttggaccgggaaatctggagctgctggtgcaccgtcagcagttcgaaagaaattcggctcagctttgaacactcagttagtaaaaccctcaggtgagtcatctagtaccggcatagcagctggggccgctgccagcaaggcattatcttcagcagaa

SEQ ID NO: 45875 - DNA, 316 bp, Gossypium hirsutum
  unsure (1)..(316): unsure at all n locations
  Clone ID: LIB3493-016-P1-M1-C2
gcgagagagaaagcaaaaatggagatcaatgaagaaagtttcttagaggaattattagctctaagagagaaaattgnacacagttccaacacanatgaatgaagttntctctaatggatggaactntgattgctntgatgatatgaacctttcaactagtttgtttccaacgactntctgccatgaattctcaacagctntgcctttggaacaagactngngttacttcaatggagtntactggccgtttggtgatgaattctcagcaccacaactcacagattcatcaaacaacacctttgatacaccaccacca

SEQ ID NO: 45876 - DNA, 406 bp, Gossypium hirsutum
  Clone ID: LIB3493-016-P1-M1-C3
tagtggttccggccataaccgacgtcaccatgttcgcactttgccccggcaccgatgaatgctccctcgccatttacctctctggtttccagcaagctgtgataggagttgggaccgctctaatgatgccacttattggaaatttgtcggatcaatacggaagaaaatcacttcttacattacctatgactttgtcaattatcccttatgctgtattggcatgcagtacaacaaccaattatttttatgcctattacaccctcaggacactcactgccatgatctccgaaggcagcattaactgccttgctcttgcttatctggcagataacatatccgatacccaaagagcatctgcattcggtattctttgaggtataagcctaggtgcatttgatttgaacac

SEQ ID NO: 45877 - DNA, 396 bp, Gossypium hirsutum
  unsure (1)..(396): unsure at all n locations
  Clone ID: LIB3493-016-P1-M1-C4
catttcttggatgctgcccgtgaaaatttgtctcaggaacattttgttgcctctgacgtgcacaaggcgactaatttctactgtgtcccgcttcaagagttcactcctgaagctggaagttacaatgttatttggattcagtggtgcattggtcatctcacagatgatgactntatctcattntttaagagagcaaaggtaggccttaaacctggtggattctttatcttgaaagagaacattgcaagaaacggatttgttttggataacgaagaccgaagcatcacaagatccgatttatacttcaagggacctattcgtcaatgtggattgcacctgtataaaatgaaggaccagaagggacttcctgaggaatgtttgctgtaagatgtatgc

SEQ ID NO: 45878 - DNA, 106 bp, Gossypium hirsutum
  Clone ID: LIB3493-016-P1-M1-C6
gagagaccaggcctaggatggatgcccacctgattgatcaaacaatcaagggatagcacgctattgaagctactatagagactcatgcgtgggctctacatgacaa

SEQ ID NO: 45879 - DNA, 330 bp, Gossypium hirsutum
  Clone ID: LIB3493-016-P1-M1-D1
tgcatttatcagtgaaattattgctctacacaagtttcttagcgagtatggaccagatgatgatgaccaatcgctatttcaagtatttggttctcacaaagggaaggacaaggcaactacaggtgccattaatggcattgccaggcttcaagcactccaatctttgcgaaagttgttggatgatccaatcaaacttgtcccgttctcctttttgcaaaaatgcacccggtggggatgctgttttccaaactctagctgtaaaataattgggggggtcatttagttgcagaacttacagaatgcggttatcctcaagctcaaggaatgagc

SEQ ID NO: 45880 - DNA, 328 bp, Gossypium hirsutum
  Clone ID: LIB3493-016-P1-M1-D11
gatctttccaacaatcacttgactgggaatatcccagagagtctgggtgaactgtcgtataacaccatcaacttttcaaacaatgaactttatggtccaattcctctctcgttgattaaagacgggttggtggaaagcttttcaggcaatccaggtctttgtgctcctgtcgaagttcaaagtttccccaaatgttcacacaagcacaaccaaaagaagcgaaattctatgtgggcaatcatgatatcagtcattgtctttactatcggagccatcctgttcctgagacggcgttacagcaaacaaaagaggtgtagtaaaaacatga

SEQ ID NO: 45881 - DNA, 391 bp, Gossypium hirsutum
  Clone ID: LIB3493-016-P1-M1-D3
ccgaaaactgaacttgtgttgcattgtgtttgacttcactgacccgacaaaaaatctcaaagagaaggatctcaagcggcaaaccttgcttgagcttgtggattatgtttcatctgctaatggaaaattctcggagattgttatgcaagaaatcgtgaagatggtatctgtaaatttgtttagagcgctaacatcttcgccccgtgagaacaaggttctagaagctattgatttggaagatgaagaaccctcgatggaccctgcgtggcctcatttgcaagttgtttatgaatttctcttgagatttgtggcatcacccgagacagatgcaaaattggcccaacggctatatgatcactcttttgtctaaaggtggttagatcttttcgat

SEQ ID NO: 45882 - DNA, 374 bp, Gossypium hirsutum
  unsure (1)..(374): unsure at all n locations
  Clone ID: LIB3493-016-P1-M1-D6
cacgcaagcaacgaaacctgcccattgcttctttccatgtccaattcccctgtttcttactcaataacctaaagcttttaagtttcttcttcatcttcaagtttaagacatgtcgagctcgggggtagtgcgaagaggaattcattatttgcaaaagctaaaagccgcgaatataccttctgatttgatagaaaagggccaaaatcgtgttatcgatgcgtctcttacccttattcgggagagggcaaagctcaagggagaactngtgcgtgcttntgggcggtgctttagcatcaacatcactgctttgagttcctttaggacataattcatcgttcttcaaggacccgcttttgctccttctcgtattcggg

SEQ ID NO: 45883 - DNA, 358 bp, Gossypium hirsutum
  Clone ID: LIB3493-016-P1-M1-E1
tgcagccatggttggaggggaaaaaagtgcagaagatgtgcaaaaacactatgtcgtgcttttggaggatttgcagtatatagagtcgggcaaacttgaccaaaaacttggtggtgaacctcaatcagtatgctggactgatggagataataagtacacatatataatctctttcttttctgatcatagcttcttaatgttttgattctcttctcccaattctttttgttgatatttatgatgtttgtagtattttgggttcgattggacataaactgatccatctccacagcttagacactgctggttgctgatgctgaccgccatagcttatgttccataagaacgcagagcattt

SEQ ID NO: 45884 - DNA, 265 bp, Gossypium hirsutum
  Clone ID: LIB3493-016-P1-M1-E3
gtccactacggaagtgccactgattgcaacgtcggagactcaatcctcttcatctcctccagaaaacgagtcgggggcggaaatatttaagtccgagagaacccggaaatcggaaactggaaatgaaaggaagggaaaggttaaaaacgatgaaatatttgaagggaaacatcaaacatacaggggagtaaggatgcgtcaatggggcaaatgggtatctgaaataagggaacctaagaagaaatcaagaatttggctgggcaca

SEQ ID NO: 45885 - DNA, 341 bp, Gossypium hirsutum
  unsure (1)..(341): unsure at all n locations
  Clone ID: LIB3493-016-P1-M1-E4
aaaaaggaagagagaaatggggagaggaagagtggagctgaagaggatcgaaaacaagatcaacagacaggtgaccttctccaagagaagaaatgggttgctgaagaaagcgtatgagctttcagtgctttgtgatgctgagggtgccccttatcatcttctctaatcgtggcaagctctacgagtntggcagctcaggtatgaccaagacccttgagcgataccaacaatactgctntactcctcaacctcaacacaacatccctgaacatgaaacacagagttggtaccaagagataaataagttgaaggcaaaatatgaagcacttgaacgcactcaa

SEQ ID NO: 45886 - DNA, 407 bp, Gossypium hirsutum
  Clone ID: LIB3493-016-P1-M1-F8
cgtatatgtcatccgtaaaaggatcaaactcagtgctgaaaaggcaatattcatatttgtggacaatgttctccctccaactggtgccattatgtctgccatatatgaagagaaaaaggatgaagatggatttctttatgttacatacagcggggagaacacattcggggatcagatctctcagtagcctccggtaaatccatttccgatgcggcttttatctttcctcatttcaccgaccccgtgtattatctccagccttaccatttccattgcctttgggccggtaatttcgttattgctagtattatttaaagacatggtgaccatatggtgtacagctgaatatattgtatataaattttaagatttccacattatggtaaaagtccttttatttatcatcc

SEQ ID NO: 45887 - DNA, 347 bp, Gossypium hirsutum
  Clone ID: LIB3493-016-P1-M1-G1
cccacgcgtccggacaataactatgacaatggtgacgaagatggtgatggttcttgtttttatggcagccaatactggtgtgaaatgggtcggagcacaagtgcatcacgtggtcggaggtgaccgtggctgggacccttcatttgacgttgcatcttggtcttccggcaggatcttcagggtcggagacaaaatctgtttcccctcctctgcagcacaggagagcatcgtagaggtaaagagcaaggatgaatatgagtcgtgtgatgtaggaaaccccataaggatatatacagtgggcttagatggcatcgaattggattgggaaggattcgatacttcatgag

SEQ ID NO: 45888 - DNA, 399 bp, Gossypium hirsutum
  unsure (1)..(399): unsure at all n locations
  Clone ID: LIB3493-016-P1-M1-G4
gcctcctcaggggcaggcagatattaccctgaagcatgtgagcaatgtgaacaatccaccgctttcccgtttgtccatccctttttccgcataaatcttcctgtatttcaaaatatttcttattcataaaatagggtcacaccaatggctcattgataaagttgtgtttgtgaggttntgatttaaatcagtcttttatttgaaacctaccaacactactatcatgagcatgtgacatcaccgttcccgttgtcatccttttcgataaacttctgtttcaaaattcttatcataaataggcacaccatggtcattgatagttgtgttgtgaggtttgattaaatcagctttttattttaaactcgctattttattggaatgtaatggcttatttatatg

SEQ ID NO: 45889 - DNA, 394 bp, Gossypium hirsutum
  unsure (1)..(394): unsure at all n locations
  Clone ID: LIB3493-016-P1-M1-H2
ctcagaacacacaaaaagagagcagacaaaaagaaaaatcgtaaatcatcgagtgggagtgggagtgggaatggcgaagaggaagcaagggttgggttggatcgaatggttgagaggatngatgtacgtgatctacgagatgcttttccagagaataacggcgagtcacctgcacaacccattagagttgccgcccttgagcgacctcacctgcatcgtaactggctccacaagcggcatcgggagggaaattgctaggcaattggctgaagctggggcacatgttgtaatggctgtcaggaatcctaaggcagctcatgagttgattaatcaatggtctgcctcttggcatgggctccctttgaacaatgaggtcatgcaaactgatcttcta

SEQ ID NO: 45890 - DNA, 323 bp, Gossypium hirsutum
  Clone ID: LIB3493-016-P1-M1-H5
ccctcttttttttttttaaatagatttaggctatttttaaaaaaaaaggaaaacacaacaaaaaaatgaaataatggttgaatagcaaggggagaaaactcccgtcttcgccgctcctccgaccctcgtcgaaacccgagtgggttttgtgacgtttgggtcaccggaggttctcaaccgcgacagagaacgaaccacggtaagattgtattattatttatgcttttattttgaataaataaataaatgaggcacctttaaaaaacaaattaacccaaattttcaagggcctcatttatttatttattcaaaataaaagcata

SEQ ID NO: 45891 - DNA, 387 bp, Gossypium hirsutum
  unsure (1)..(387): unsure at all n locations
  Clone ID: LIB3493-018-P1-M1-A4
atttcctttggtttaaggggaaaaaaaaaaactgatcttctttccttatttccttttcatcagaaatcagagaagcagaaaatttcttcttctttattagaatcttccattctctctctctccatctgtctcaaatttcccgccttcttttcatctcttcatttgattgtcttccttgttttcgttcaattttattgaagccttttccacgaaaataattcactactttttgttttcttttcgtttttattcaataatgtggctcattgatccaataatttccgactntnttgattaatttattattttttgattaattctattggaataatcaatagaattttaatcaatttattatggatccgggttgcggtggaaatttaaaat

SEQ ID NO: 45892 - DNA, 446 bp, Gossypium hirsutum
  Clone ID: LIB3493-018-P1-M1-B12
gttttgacatttcatgctgtggcatttgctgtgggatattggatctcaaaagttcctgctttcagacaaagagaagaagttagtcggatggtttcattgtgcactggaatgcaaagctccaccatggcaggtctacttgcaacccaatttctcgggagcagtagtcaagcagttccacctgcatgctctgtcgtcgccatggctattatgggtctttctcttgcctctttctggggcaatggtttccgtattagagacctaccatctcaactcatccctcacactggctctgctttccaggctcaatggaataaacacattagacatcttagaggaatggatcaaggtagctttaattttcagagagagagagatggtcatgttttttaactgatcctcacatgaacatgttcctcctcacaataaaacagcagtggcagtcgagc

SEQ ID NO: 45893 - DNA, 410 bp, Gossypium hirsutum
  Clone ID: LIB3493-018-P1-M1-B2
caagatctgtagaaggtactgtcgtcttccgctgatctactacgaatatactacttgagaaaccaaacactcacaaagaaagcatttattttgatctagcaagatgcgaaagcgtgatataaaataaaagtgattattgtattaaagtaaagttggtgggaaatagagagaaagattagaaaaaaaaaatgcacgatgaagatcacatcgacagtagcactgaagtgcaacccagagggatccgatccgataatactagcgaacgctaccgatgagagccatattcgatacttgcaaaggtcaagcgttaaggagatgatcgactacgtttctcgaacatgttctaaacgtacttcttttgtcagcgccagtccgttcagcacgaagagtacagggtacatgcttacaac

SEQ ID NO: 45894 - DNA, 445 bp, Gossypium hirsutum
  unsure (1)..(445): unsure at all n locations
  Clone ID: LIB3493-018-P1-M1-C1
ggcattcagagccgctgtacttcgccacattcggttgcctgttcaaaccctaaagccaactgcttcaagagctccgtcgcaatggagtctcctccggctattctcatcgcacgacgatcaccttactaaagaagaagtaatcgacagagtcctcgacgttgtcaaaagcttccccaaagtcgatccttccaaggtgacacctgatgttcatttccagaaagatttagggttagatagcttggacaatgtggagattgtcatggctttagaggaagagttcaagctggaaattccagataaggaagctgacaaaatcgactcatgcaatcttgctatcgagtacatatacaaccatccaatgggctggtaataacaagcaaaggtgttttcttgtttgaatntcatttggaaagaaggatgatattcctgctctgttcttgttcga

SEQ ID NO: 45895 - DNA, 310 bp, Gossypium hirsutum
  unsure (1)..(310): unsure at all n locations
  Clone ID: LIB3493-018-P1-M1-C11
gctaaatccaccactttccagtccctcggctgccaagctcctcaatgcaagcaggtacaaaatcccagctgcgatggcagtggcaacacttgcatattcaacatgacctacgggggttcagccattgcagcaaacctctcacaggacacattcaccttagccaacgactctgtctcgagctacactntcggttgcctgcaaaagacaaccggcaactcggtgccaccacaaggtctattggggctcggccgaggtccattatcccttctatctcagacccaagacctgtaccaatccacattttcatact

SEQ ID NO: 45896 - DNA, 425 bp, Gossypium hirsutum
  Clone ID: LIB3493-018-P1-M1-C12
cggacgcgtgggtttatagataaagttaaggaagctgtcactagatgccaaagaacacagcttctgattgatatgctatccacaggtgaaaatgaagcggggcttgaagttcctgatatgagtatcttcagacctgagattgaagaaaatggatgttcaaatgatcagaagcttgatatggataagatattaagcatattggatgtcaattctcttgtggaagaggcagtttcagctaaagtgctggggaaaaacagtgatttttacggtgttgggttatggatactagtttccttcatcaatcattcatgcaatccaaatgcaagacgtttgcatgtaggggactgtgttattgttcatgcttctaagggatgtaaggctgggggaaagatcactttcatgtattttgatgcactttctccatt

SEQ ID NO: 45897 - DNA, 443 bp, Gossypium hirsutum
  Clone ID: LIB3493-018-P1-M1-C2
aaaactaccaagaccaaaaaaaagaagaaaaaccaccctaagccaacaaaacagcagctctctacaagccaaatatcagccaaacaactttattcgccttctgagaaaaaaatcaagactggtaaaagaacaaaaacgaatgctttgaatccaaaactggagattcagcgaaccttctcctctttcaaagcaaatcaaagggaaccatgatgactctggttccaagccagacaatccttcatcgccatcatctttacagaattaggcattccatcaacccaaaccccaaaaaactatcttctctgtccttccaatgctaaagtgtaagccgctccattaaccattcaaggacaaatagggaataccttccacatagacgccggaacccatcgacccgccaaagaatgcctttgcatccctggtttgcacaaggctaacacatc

SEQ ID NO: 45898 - DNA, 367 bp, Gossypium hirsutum
  Clone ID: LIB3493-018-P1-M1-C5
acgagccgtaccatgagctagaacatatcatcgctgatatgaaagcagagaacggtgctgagaaagcttctcctgcagatgattccgcggatgacaacgagtcatacagcgaatgctaatggaaaagctgaaggtaatgccagatataatggaagctattttagacagtatctgcttcaggccatgtctaaagtcatatggatactaccatgtatactagcgtttcaaatattggtacataatattatgccttatagccgacattaagggctactctaatagactacgctattgactagcgcctaaatctgtaactgaatgttgagaagcatgatgaacacgcttagcatcctgcatcttattcttt

SEQ ID NO: 45899 - DNA, 289 bp, Gossypium hirsutum
  Clone ID: LIB3493-018-P1-M1-D12
attacaccgaactgttgaaccggaagttgttggattgggtcaattcgacgggtcgggtttatatgactcatacgaaagttggtggaatatatatcctgagatttgctgtgggcgccacattgacgggtgacaaccacgtggttgctgcatggaagctgatcaaggaaggagctgatgcattgctgaagactgtttgactgcctcacttccaccgtagctagtgtggacgtgctttagtatttggaaatgtcattaataaggctgaatatgccataacttgcaagcattt

SEQ ID NO: 45900 - DNA, 350 bp, Gossypium hirsutum
  Clone ID: LIB3493-018-P1-M1-E1
ccttcttctactccttcaacgaaaaacaccgagaaaactactcaatcccaacaatggaatcctttgcaaagagcggcggctatggctttagatgcggtggagaatgctttagtttctcatgagcgtcaacatcctttgccgaaaacagctgaccctggtgtacaaatctccggtaactttgctccggtccctgaacaacctgttaaacaaaggcttcccgttattggaacaatcccggattgcatacaaggagtctatgctcgaaacggagccaacccgcttcatgaaccggtggctggacaccatttcttcgatggggattggatggtcatgccggtcattcaaaaatg

SEQ ID NO: 45901 - DNA, 468 bp, Gossypium hirsutum
  Clone ID: LIB3493-018-P1-M1-E2
ctgatttagagcatatagatatggttgtactctcaatagggcattggtttcttcatccagcagtgtattatgagggtgtgtcggtttaggttgccattactgccctggactaaatcacactgagattggattttatgatgtgatgaggaaggccataaagaccgcacttaaggcaataattgaaaggaagtcgactgatggtaatggaattgatgtgtttttaacctctttttcaccttcacattttgaaggtgaatgggataaggctggtgcttgtcccaagacgaagccttacgaggaaggagaaaagatggttgaaggaatggatgcagatatgagatcaatcgccaatgaagaaatggaagctgctaaggtaaatgctaagaattcaaaggattgagactagagacctttgatgtgacccaaatatcattaatgagaccagatggtcatcccgggccttacatg

SEQ ID NO: 45902 - DNA, 469 bp, Gossypium hirsutum
  Clone ID: LIB3493-018-P1-M1-E8
ttatgcagcatctgacatgttcataattccatctattttcgagccttgtggccttacacagatgatagcaatgagatatggttctgttccaattgtaagaaaaactggtggtctaaatgacagcgttttcgatgttgatgacgacacaataccttaccaatatcgaaacggttttacatttgcaactcctgatgaacagggactaaatggtgcattggatcgtgcatttaatctctacaataacgacagcgagacttggcaacaacttgtccaaaagaacatgaacatagatttcagctggcgttcttcagcatcacaatacgaggagctgtacgcgaaatccgttgccagagcaagggcagccacaagtcgcacgtaagggtcagtcccaaactctttctttttgttcgagcaaagccgaatatccataaatcccgattacaagtgagttcatccatatatatatttt

SEQ ID NO: 45903 - DNA, 315 bp, Gossypium hirsutum
  Clone ID: LIB3493-018-P1-M1-F11
gtttaaatggaactattcatcacgaatacgactaggttcatatcctcgacaggatgggttaagtctagttatgggattgtgacaaccaaatccattcaagatttaagttatagtaactccatggtgataaatgggaatctgcagatcataaaccagacaatccattttaatgacagtgtttatgcagacatcccggctcctaatgctgaatcgaagaaatcactcaagaggtttcttttctacttatactcttacgatatcgatcatggaaacagaattactttctttgtttctaatgctactctggaatttgat

SEQ ID NO: 45904 - DNA, 392 bp, Gossypium hirsutum
  Clone ID: LIB3493-018-P1-M1-F3
atttcctgtggggaaaatacgagcccgaggtgctcgttagcatcaattcaaccttcccttacctcaacttcagactttaccacttcgactccgaccgtgttcgtggcaagatatcaaggtctattcgccaagcattggaccagcctttgaactacgccaggatttaccttgccgacatgctaccaccagacgttaaacgtgttttatacttggattccgaccttgtcgtggtggacgatatcgtgaaacttctggaagttgatttggaaggcaaagtgttggcggcaccagaatattgccatgccaatttcaccaagtatttcacggacttgttttggtcggaccaaggagttgtctagtacaattaatggaagaaagccatgttatttcaa

SEQ ID NO: 45905 - DNA, 485 bp, Gossypium hirsutum
  Clone ID: LIB3493-018-P1-M1-F4
ataaatggtaccaccctccactatgataacaaagatgaagaggttttcatatgttgccttaagtgcggtactgtcactcatggtggtggcggccccagcgttttcgggtgaaacacggtgggcagaggcggcagtgacatgtaaccccatagagctcagcccatgcttggcggcggtcatgtcgtccacgcctccatctgaaacctgttgcagcaggctgagggagcagacgccatgcttttgtgggtaccttaacgacccatctttaagacaatttgctgataaccccattattagaactgttgggaacgcttgtggagtgcatatcctcagtgctaaaacctcttcattacaatactatacatacatgcatacatacgtatacatacatagggcagcatataaggctgattctgctgtcaactatattactgtctgaataaatgaataatgatgatgggatgtgggtaatattttattgttat

SEQ ID NO: 45906 - DNA, 356 bp, Gossypium hirsutum
  unsure (1)..(356): unsure at all n locations
  Clone ID: LIB3493-018-P1-M1-F6
gctgttggtgcagactcttgtccccagctcattgcttgtaaagcagaagcctttctgaagctccaccaaattgatgactcggattcctgcttatcgaacatttcgaacttggagaaatatactgcctcttcacagattaggtactttggctttgtggctgaagcttatgccctttttgttcaagctcaagttgagatggcattgggaagatttgagaatgcagtttctgcagcagagaaggctagacgtattgattacaacaatgttgaaaattgcagcggtatttaaataatgtgaaaatggtagcaagagcacggtcacanaggcaatgactttttcaatgccggaagatatgc

SEQ ID NO: 45907 - DNA, 203 bp, Gossypium hirsutum
  Clone ID: LIB3493-018-P1-M1-F7
gcaccccggtagaaagcttgaagctgacatcttggagggcgatcttggttgaaaatcacactgtttttggatcgattactcaaggggtactatgagagagcggatctgccatttaaagtgtaattgatcaatacccgaccgttgtcatcaacttgaccgaactgcaataagagagccagcatctggataacagtggcttacaa

SEQ ID NO: 45908 - DNA, 405 bp, Gossypium hirsutum
  Clone ID: LIB3493-018-P1-M1-G4
gttttattggtgatgttcatgacttgaactgtggttgatgtttagaactctaatattccctatgttgtaaaattttaatgctgtgatttccaaacaccattctggccttgacagatgcaaatcagattgttgattcaagttatgacttctccgtggtggattccaactctttgctgtttctttttaaatatgcacccgaattggcaaaggagttgaacattggtcctgagttttctttcgaaaccgctaaaatgtctaaccaacggacttttttgacactttttccggtcaactttttgttctcaagaagtatgcagttccctgcaagaagtgatgagattttgaagcaatacagacagtttcctcatttgtatactaataagccacaaacaatgtccagtgatg

SEQ ID NO: 45909 - DNA, 265 bp, Gossypium hirsutum
  unsure (1)..(265): unsure at all n locations
  Clone ID: LIB3493-018-P1-M1-G6
tccttctggttttgattggttaaagactgttgatgactttgatgaatttatgaactggatatgngtaccgtggtggtgtctttgcaaaggctgaacagagctgggagcgatggtggtacgaggagcaagatcatctaagaacaactggcctttggggaaagatactagagatagttctagatcttcggtttttcttttccagtatggaatggtatatcaaactgggaattactactaatagtaccagtatttatgtatacttgct

SEQ ID NO: 45910 - DNA, 390 bp, Gossypium hirsutum
  Clone ID: LIB3493-018-P1-M1-H1
ctcatgcaacattttcatgtgatagccaactggtatatgccagctttttggatgcaactatttgtgtgtttgttgctgcaaacctcagaccacgttgccgtataaatccctctgcttatctgccagctagtgtcagctccaatgttcaccctcttgtaattgctgctcatccatcagagccaaatgaatttgcggtgggactctccgatggaggggttcatgtcttcgagccccttgagtctgaaaacagatggggagtgcctcaaccagcagacaatgggtcagccagcagtataacagcgacaccttcagttgcagctcaaggatcagaacaagcgcaaagatgatgatgaaaaacgggtgatggagcccaagtttcttttatatact

SEQ ID NO: 45911 - DNA, 298 bp, Gossypium hirsutum
  Clone ID: LIB3493-018-P1-M1-H10
gcggcggggactgcaataggatttgttggccgttatggtaacagtcatgctggttggtcggaaatctgcgaccgtttgaagaaatactgcgacaaggtgaccacttctatggtgctgtcgtatctgtcagtgatttgtttagtggtgcttacagtcatctccgccggcaagtcccgacaaatcatggtttaaaagttatttgaatttgggtcatgatgacgatgcaatgcgtgtctttgtaaactttgttcactctttcgtagcaaaaacgaaagtaataaaatttagcctttttttt

SEQ ID NO: 45912 - DNA, 439 bp, Gossypium hirsutum
  Clone ID: LIB3493-018-P1-M1-H8
aaagaccgtagatatacattttatgattgcatcagtccattttttgttgaatcccattctaaacatcacttcctttaaaaaatcccactccactctatcgtatgccttgctcatatcgagtttaactgtcataaacccttttttttccaaatctcttttgcttgagcgcgtgtagtatctcataggctaataacacattatctgataatagtcttcccagtacaaaagcactctgtgcgcaatcaaaacatttttcaattactcgtaatctgttcgccatgttctttgccaatactttgtataccaaattacgtagactaatcggtctaaagtgtcatatttgaaggactagcactttttggaataagcactaatattgtggatttatagaattaaccttcatgtctccattcaaacgggtaaacaaaagaaaatcatg

SEQ ID NO: 45913 - DNA, 260 bp, Gossypium hirsutum
  Clone ID: LIB3493-018-P1-M1-H9
gccacgcgttcgactaatacacatactgctatatgaagagagaagattgatcagacggcagaaaacttgctatcacgtgataactgagagaacagccacagtatgggctggcagagatccttgaggagtattgactgcttacacttacactatcaggaacactggtgctgatgcagttttcgaaaatggaatggctgtggaatctgccacactgatcttcatgaagccactactgatcttgtgatgtcaaactacccaat

SEQ ID NO: 45914 - DNA, 404 bp, Gossypium hirsutum
  Clone ID: LIB3493-019-P1-M1-A4
acgcccacgttgagatcggatcagccacacatctcaaagccttgctcataggcttcaaaatcttcgccttgatttcagtttcgacgaagcaaacaaggagttcaacgcctcctccaacaacaaataagtcttctttctttcttttctttcttataaatttattttcatgcaatagataaggaatgacgaaacagaaatgaaaatccaagaagaatacaatctaaaatcaccttaaagctaatttcgaatggatttttagtatctctgctattctctttgtgactagaagaaaaaagaaaaaaaaccccccatttatatcgtttttcttcggttttatagcccgaaaacaaaaattaattaattaaattaaaaattttaatttcatcattgtcatttgctgtcta

SEQ ID NO: 45915 - DNA, 384 bp, Gossypium hirsutum
  Clone ID: LIB3493-019-P1-M1-A5
gcaacatttgtctgggacacgtatgttgaacagcgaaatagttggggtactacaaggagcttcaaaactagaaaaggttttggttcagatggtggtcgaagattccgtagaatgtgaagatggaggaaaaggaattattagagaaatgtcgccatacgaggttgattcaatcatattgaagcttttgagacaatggatagatgaaaggctaaaaaaagggaaagatcttctttctagagcaaaagaaaccgaaaattggaatcccaagtccaaatccgagccatatgcgcagtccgctgaggagctactgaatttggccaaggaaatggtgaaagatttcttcgaaattccaatcggaattaccaacgatctgatttctgatct

SEQ ID NO: 45916 - DNA, 363 bp, Gossypium hirsutum
  unsure (1)..(363): unsure at all n locations
  Clone ID: LIB3493-019-P1-M1-A9
gagttcggcgctacgcctcacgctttcgttgcaaagctacatacactactccctctgaaacagccgcaaaccgcccaaaaaatgaaccaaaaatcctaatttttatttcttctttaactcctgtttcttgttacgaagcatcaaatccttgccgatttgaatctatgtattgtgtttttctcgagaacgattaagagtgggcaagcaaataccactttccttttcttttgcgagtttcgtcctttttttttgtcggttgatgaagaattgtcaccgatggcagaggattctcatcctctctttgctatctttctctgtattcgctcccntcgtgttggtctctcagagacttaaaaccctcac

SEQ ID NO: 45917 - DNA, 374 bp, Gossypium hirsutum
  Clone ID: LIB3493-019-P1-M1-B11
cggacgcgtgggtgaggagttgcctaagttgttagaagaagctatgataaaaaagcgaagcgaggaaaatggtgagctaaccgacagtgacaaggactatgatttgttgcctaaggtggttgaattctcggaagagaacgggcatggaagtaaagaaaagcctgtgttagagatcccatcggagcgtcctgaggagcccaaaaatgaaaactcccgaaagttaaacaatggcttgaaagatgaggctcttcaagcaaatgaaatggagaatgtgaatggaaaagtaaagaaagaagatgaaagaaaaagtaaggatgatccggtcgaatttaagatgtgggaaagctgcaaaatcgaaaagaaagaattctcac

SEQ ID NO: 45918 - DNA, 403 bp, Gossypium hirsutum
  unsure (1)..(403): unsure at all n locations
  Clone ID: LIB3493-019-P1-M1-B6
atataagcaatccataaaacttgcacttctcattacgcccaatttttaaagcaatttattttccatcgcttcatcttcaagatcaagagtaatccaaccgccaattcaattccccccccctttttttaatctttttcttttcattattattatcattgttgaatccttaatcgttttcttcttcacaacccaaaaccaaatttcagtataaaaaactctttcaatggcgtctctgacctcaatttcccaatcccacacacttctcaaaaaacccaacttcacaccctctattcctcacaatttgtncttcagtttcaccccccgggacttcctgtttccaaaacgcagcgtttaaactcccccagatggcttcccggagctacgtctgtcggcctgacgacgg

SEQ ID NO: 45919 - DNA, 131 bp, Gossypium hirsutum
  Clone ID: LIB3493-019-P1-M1-B7
atgatatgtaatacgatgagttatgtctctaggctgcaactacttggactgatgatcttactctgtatgacaagtcagtgggatgtggaatacagtggagtgataatggttagtcccaagaacttttatct

SEQ ID NO: 45920 - DNA, 481 bp, Gossypium hirsutum
  Clone ID: LIB3493-019-P1-M1-C5
agacaatgttacttgggaatccctgttccctgaatggattgacgaagaagaagtatttgaggttcctaattgtccttcactacctagtcttcagtttcctggaaaaccacggattgatcttattgctgttaagcttccttgcaacaaggcagggaagtggtcaagagatgtcacacgtctacactttcagctagcagcagcaaggcttgctgcatctgctaaagggcttcacccagtgcatgtgctttttgtgactgactgcttcccgcttccaaatctttttgcatgcaaggaccttgttgcacgtgaaggaagtgcttggctgtatacacccaacctacataggttaagagaaaagattcgacttgccatcgggtcatgtgaaccttagttcctctccaggcttaagggtcttctattcagagagagcacaccgtgaagcatatgcaacaatcctacactcagctcatgtatttgttgt

SEQ ID NO: 45921 - DNA, 340 bp, Gossypium hirsutum
  Clone ID: LIB3493-019-P1-M1-E1
ctgggggctgcatcttggcacatgcccctggttctggaaaaacatttatgataatcagcttcatgcagagtttcctagccaaatatccacatgctaaaccactagttgtgcttccaaaaggcatcttggctacatggaaaaaggagtttgaaacatggcaagtagaggatattccactgcttgatttttatactgtgaaagcagataatagatctcagcaattggatgttttgaagaagtgggttgagtgcaaaagtatcctttttctgggatacaagcagttctctaccataaattgtgatggtggaaccagccagacttctatatcttgccgagagat

SEQ ID NO: 45922 - DNA, 335 bp, Gossypium hirsutum
  Clone ID: LIB3493-019-P1-M1-F11
tttgatttttacccccggttccatagccttgttttttgtgggtgctgcacacatttttttttgaatttttttttttaaggaaaaaggggtatatttccttggatttacacccacaccaaacgatgggtgcctgctgttctacgcaattcaagtacaaaggtagacggtatgaaaaagaaggatcagatgaaaaagaggatgaggggcaccatcgagaccacaacatcaacagtgatgacaatagcgccaatgttaccaggattggacatgccggggctattgttagattgcaaggcttcttctccttgaccttaatgtacactcgcaagggcaag

SEQ ID NO: 45923 - DNA, 385 bp, Gossypium hirsutum
  Clone ID: LIB3493-019-P1-M1-F4
gccgatctctccatatttgtcgggttagcaaaaaagaaattgtcatttagactcccgtgacccttcaacacccatttttcagttcttcgctcttcaagtaacgaaccaatggagaacaggttgaagccaatggatgctgagcagctgagagagtatggtcacaagatggttgatttcattgctgattattacaaaaccattgagaatttccctgttctcagccaagttgagcctggataccttcgtaacttgttaccggattctgctcctaatcaaccagactcttttcagcatgttcttgatgacattcaagcaaagatattgccaggggttactcattggcagagcccaaattattttgcataccatccttccaatagcagcg

SEQ ID NO: 45924 - DNA, 354 bp, Gossypium hirsutum
  Clone ID: LIB3493-019-P1-M1-F9
cggacgcgtgggttcgtctggtgttcctatgaatcatggacctttagatcagatgccatcttctcgcaattatggtccccttggagtttctgctgatgaatatgctaggaatttccatttcatgaataatgttagaggctcgtataagagaaagacttctgaagggattccaggaaactttcagcattttaatgcctcatcaagctcgagttcctcagttacacagctaaataccaggcattctggatggggtgtcccagttgatcctgcatccttcaccattcctcagtatagggggaacgaccctccaccaattagagatgcagggtctcaaaagagtgtgaggaacagatt

SEQ ID NO: 45925 - DNA, 480 bp, Gossypium hirsutum
  Clone ID: LIB3493-019-P1-M1-G11
cccacgcgtccgtgttcacatcatcataatgactaccctttgtaaaatgggaaactgggcggccatttagtgttggaagtcgggaatctaaatttccagctcatgcaactccaaacagacaaagcaaggtaccttttgaaggacaatgttcattcaatttcataacttctaccgcaaataactcctcacccaacacctgcttgcttatcaaatcattcacatgctcaaataatatgaaatataatcactaaattcaactctgaatactaaatgccaaaaggtcttgcacccaaaatcaatacaataattttttatttactcatttaatgttcaaaatttaaaactttcttaatagtaaatattaaaaatttttacttttttatttcttttaatataagcacacttgtattcatataacttatttgcgtataatatatacctttttttaaaataaaattaactataaagtgttttaaaaat

SEQ ID NO: 45926 - DNA, 381 bp, Gossypium hirsutum
  Clone ID: LIB3493-019-P1-M1-H11
cgacaaacctgatctcagaggtcaagcagaaatgatagattacttcaaacagaatggaggacttgatcaagaatttaagtccttgcaacgtataaaagtcagagctgatggaaatctgacccctacccttattgatgattcgaaagctgctgatgaaactaaggctggttccgatcactctcctcttgcacctcctttgccaaaaacaccatccgagtcttggctttggcgtgctctgccttcaacggcatctagaaaatcatctttgcagccttacaccggtactcgttttaaacctaagaaacaagaacctaaggaaccttctactgataccaagtgggaaacaattgtcaaaactttctacttgcatcatgatcatgt

SEQ ID NO: 45927 - DNA, 300 bp, Gossypium hirsutum
  unsure (1)..(300): unsure at all n locations
  Clone ID: LIB3493-019-P1-M1-H12
cggacgcgtgggtatacactagtttctggtggtagtgataatcaccttgtgcttgtggatctaaggccattgggtattgatggggctcgggtggagaaaatacttgacatggcctctatcaccttgaacaaaaattcggtgcctggggataagagtgcacttgtgccgggtggcattcgcattggatcgcctgcaatgactaccagaggatntacagaaaaggaattcacggctattgctgatttcatccatgagggcgtgcaaatcactattgaggctaanggattagcttttggatca

SEQ ID NO: 45928 - DNA, 240 bp, Gossypium hirsutum
  Clone ID: LIB3493-019-P1-M1-H9
cggagtttcggcctagacctacgcgtcacggtgagatgggaagagacacgctgcgcttatgcgtgctgatgatctcgattatgttaagatgaggttcagttgatactacggagtgttcgtcttcatcctctcctacgacagcaaagcaggctaagttctttatgtggtctatgatgaagttattgacaagcattagatcgcgaacgtcgacgcattcattataacccggagttgctacga

SEQ ID NO: 45929 - DNA, 472 bp, Gossypium hirsutum
  Clone ID: LIB3493-020-P1-M1-A1
tgcgtcaataaattttgtaatgatgtgggaaaggatttttgtattgtgaaattgtaaactactacttctttctttaacatgcttaaatttgtgctataaaacaactctccttcgcttttattattattttttctgtaataagaaagcacgaagcaaaaaagtgaagaggggatttgaggaagtgaaatatatttatttatgtgggttttttggttggatttttaagctgggttttgcttgaatttttaattaagatagtgaaagaataatggagagagattttctgggtttgaattcaaatgaaccattggctgtggttaaggatgatgttaacactgataagtacaaacaaataggttttactaaaagctcagggatacaatggcccttttcaaacaaagttttcgctgttccacagctgatgaactttaattttgcccaaggggataaaaccaaaaagactggttatgat

SEQ ID NO: 45930 - DNA, 291 bp, Gossypium hirsutum
  Clone ID: LIB3493-020-P1-M1-A12
ttttaaaagactttcactatgtatctactggttggttttgatatatgcatctgtcttgaggttctacaacatttctaagaatagtaagattgagaggattcttcttcggaagtactaccatctgctggctgttctaatgtttttgcccgctctgatttaccagccaaaatttcttgatctagcatttggtgctgctttggctgttttcttggtattagagatcattcgagtttggagaatttggcctttagggcaacttgtacatcaatttatgagtgcctttactgatca

SEQ ID NO: 45931 - DNA, 361 bp, Gossypium hirsutum
  Clone ID: LIB3493-020-P1-M1-A4
aatagtttctagacttagatggataccattgatagagaaatccaagctccaaattcaggtcgcaaacatggcggctgggtcaccttccctttcattaccggtgcagtgttaggcttaggacttgctggtacaggatggatggccaacctcattatctatttgattcaacaattcaatgtaaacgccattgatgctgctcaggtttccaatatcgttaatggcggctcaagtttgtttcccatagttggagctatcattgctgattctttcttgggctgtttctcagtcatctcattattttcatccatttctttacttgggaacaagttttattgccttaacagctacactcaactcactg

SEQ ID NO: 45932 - DNA, 216 bp, Gossypium hirsutum
  Clone ID: LIB3493-020-P1-M1-A7
tcgatgacgtttgtgctgacgtggtaggggttttcattacctggaaattgtaaaatactacttctttctttaacatgcacccttttaaggcaccaacttggggatctatcgctttattatattgtctttgcatagaaagccgaagcaaaaatgaaaggggttgaggaataaattttattattggttttggtgattaagtgggtgctgattttattt

SEQ ID NO: 45933 - DNA, 348 bp, Gossypium hirsutum
  Clone ID: LIB3493-020-P1-M1-B11
ggaaataacaacaacccaacatgagcttcacactcgtatgtttggttctcagtttgtacttatgttttttttcatatgttcatagcttagacagcttttccaatggttccttggatacatttcttcaggattttgctttcagagcattggttattaggcacagacctcatactggagctttatacaaagccaatcttccggtttatctttcaggcatgggcgtttccattgcacgaatccgaagccggacgttgtggaagaaaggggctaattttagttgttttcgtatcccatcacggacttttctggttcctcacgtccgaagggtcgcgatagtctacgagaccc

SEQ ID NO: 45934 - DNA, 393 bp, Gossypium hirsutum
  Clone ID: LIB3493-020-P1-M1-C1
gggccttttcctgttcacaaatgcgattggaaatgccaaaatgaacatgtttgtggcaacatgtatcgctgcaaactaacaggaaccacacatatctgtgacaagaactgtaaccagagaattttgtatgataaccatagttccctttgccgggcaagcggccaggtctttccgctttctcaagctgaggaacaggtgatcagaggcgtcaggaggaagcttgatgctgacaatttcccaccctctgatagctgtggttttaagcgcagacgtgatgtgcagattcgtccttctccttttgagagatctttctctgctgttagtcccatctgcagccaagttggagatggcatggacttgagctagattagtttcgaatttagattacatata

SEQ ID NO: 45935 - DNA, 430 bp, Gossypium hirsutum
  unsure (1)..(430): unsure at all n locations
  Clone ID: LIB3493-020-P1-M1-D6
cccacgcgtccgttccccgcctgtatcccaagatcaaccacggctggtgtgaaggcagcaactaaactaactttcccttcatctggacaggagcctaagattacagctgcaggatcttgcagtgtatcgattaaattctcggcagcagcttttagtgaatcagcatccacatcatccaatgactcaactagcaccctggagttaaatgttcagaagccaaagaacaaaagtcagaaatgagttccattaaatagcaaaatttgatatctttgaaacaatattacacattaccttatcgtttgtgaagttcctccttcaaatgccttgtttgcaatcattagtgctttatattcggctgcttttgtacgcanattagcaacttcagttcttgacattcttaactccttttagagtttttctacccctgtag

SEQ ID NO: 45936 - DNA, 396 bp, Gossypium hirsutum
  Clone ID: LIB3493-020-P1-M1-D7
attttagacaaatcaaatcgccaggttgaagtacgaagagactgcccttaccttgatactgttaaccgccaggtgctagattttgattttgagaggttttgttcggtctctttgtcaaatttgaatgtgtatgcatgtctggtatgtgggaagtattaccaaggaagagggaagaagtcccatgcttatactcatagtctcgaagcaggacatcatgtctatatcaatcttcgaaccgagaaggtgtattgtctccctgatggatatgaaattaatgacccgtcattagatgatatacgatatgttctaaacccaaggttttccagagaacaagttgaacaacttgacaagaacaagcaatggtctagagcacttgacgggtcaaattacctttca

SEQ ID NO: 45937 - DNA, 467 bp, Gossypium hirsutum
  Clone ID: LIB3493-020-P1-M1-E10
cttgcccacactcacggcaaaacttcattcagtcaaagagaagtacttggctgccacacctccggtgccttcgaatatcaaggacaagtgggacttttcatttgcttcgatttggaataccattgtgtggcttatgcttatgaacttctttgtcaagattgttaatgcgactgctcagaggtatctgaaaaagcaacaggataagtcacttgcggaaatattacctgattcaacacattcagattcgtaattcgacgaaagcactcatcatcctttttcgtctttcttatttacaagtagcgttattgaattagaagtgaattctccttcatgaattaccattaaagctatccactataagaagcttgtatatatataaaagaaaaaattgaaaaaaaaaaaaaaaacccttgacaaacagaaacatggtttagttataattgtttcgggcttttttttacccattg

SEQ ID NO: 45938 - DNA, 367 bp, Gossypium hirsutum
  unsure (1)..(367): unsure at all n locations
  Clone ID: LIB3493-020-P1-M1-E4
gtagtcggtcacttggaatcgtgtgacgggaatgataattattgccgatgccataatagtggtaactttatctcatcttttattctttcaaatggcagtctattatattgcttagggatttcctttaaaatgagaatctaaccaccaatttcgtcttgaaagattactttcgtagtgtgaacatcctgttttatctgccttcgaagatagactaagggacatatcttctgcatattagatgaggatacaaagtggaatggtttaaacttgttttaaagaaattaaccgtacgagagaaagagagagagagagagagagagtnaaaggagtgtttagatatttgctatacttatgcttaatattcatg

SEQ ID NO: 45939 - DNA, 393 bp, Gossypium hirsutum
  unsure (1)..(393): unsure at all n locations
  Clone ID: LIB3493-020-P1-M1-E6
cggacgcgtccgcccacgcgtccgaacgaatgaaggccagagcattagattcaaccaccaggaatggtgatttcttggacgtgcttcttgatcaatgggaagaaaacagatcaattctcaatcgtgaagcaatcaagcctttgatccagaacttgttcattgctggaagtgagacatctgcaacaactacagagtgggcaatggcagagcttcttcgaaatccccaagttatgcaaaaggcanagaaggaactccttgaagtattggctcggaaagaactgtgaaagaatcagacatagatgaactccaatatcttccagctgttgtaaaaaaaaccctgcggcttcacccagcagcccctctccttttaccatataaagcaaggaatgatgt

SEQ ID NO: 45940 - DNA, 446 bp, Gossypium hirsutum
  Clone ID: LIB3493-020-P1-M1-E9
ctaaaacatgtccttgtctcctgtgcaaaagctgtatcagataatgatctattgacagcacagtggttaatggatgaattacgacggatggtgtcagtttctggtgagcccatccagaggttgggagcatacatgttggaagggcttgtggcacgactggcctcctcggggagctcgatctacaaggctttgagatgcaaagaaccggcaagtgctgaactattatcttacatgcatattctttatgaggtttgcccttacttcaagtttggttacatgtccgctaatggagctattgcggaagccatgaaggatgaagatagagttcatattatcgatttccaaataggtcagggcagtcagtggattactcttatataagcatttgcggctaggcctggtgggccgccttacattcgcattactgggatttatgatttcacatc

SEQ ID NO: 45941 - DNA, 418 bp, Gossypium hirsutum
  Clone ID: LIB3493-020-P1-M1-F2
cggacgcgtgggcaggtttccatggaagaaactgatggtcttaattatggtctggttttccttctttgccatctatctccttcgtgggaatcgctatggacagggtgtcataccactgaagccttgtggaataggatattggtctctctccttgcttcaagttcccctcgccatagcttttactgcatggatccttcgcaggaaagagtccattgcaggccaaggtcccaaatcaacagggggggttaacaagctaattttccccttaatggctctaatggctggggcccttgggttgagttttggaaatcggggtggcatgcttataagcccacttcttttttaaagttggagtaaaccccccaggtgacagcagcctacatgttcttttcatggtttcttctcatcccacgatgtc

SEQ ID NO: 45942 - DNA, 338 bp, Gossypium hirsutum
  Clone ID: LIB3493-020-P1-M1-F7
cagaaagaaaggatggatggcattgaatcaaaatgtaggagcaacagcattgaggaaaatctgaagttgtggaaggaaatgattgctggctctgaaaggggattgcaatgctgccttcgtgggaagttagatatgcaagacccaaataaatctcttagggatcccgtgtactaccgctgcaatccggttccccaccatcgaattggatccaagtacaaaatatacccaacttatgattttgcttgtccgtttgttgatgctgaagaaggtataacacatgcactccgatctagtgagtatcatgatcgcaatgctcaataccataggattcaagagga

SEQ ID NO: 45943 - DNA, 140 bp, Gossypium hirsutum
  Clone ID: LIB3493-020-P1-M1-F8
cagttgcgctgaaacaggcaacaactccggagtacaaggcggaccaggagcaagttctcagtaattgcgcgaagtttgcacagactctggctgtaaaaggatactaacttgtttctggtggaacagagaattatgttatt

SEQ ID NO: 45944 - DNA, 348 bp, Gossypium hirsutum
  Clone ID: LIB3493-020-P1-M1-G12
catgataaaaaggctgtattatggtacacggacactttgaagccgaagtctacgcttgaagaacattcatgtttgattactgatgttcgtttcagtccaagcatgtcacgccttgcaacatcttcatttgacaaaactgtcagagtctgggatgccgacagtcctggttattcgcttcgtacatttatgggacattctggtaacgttatgtcacttgacttccatccaactaaagatgatcttatctgctcttgtgatggggatggtgaaatacgatactggagtatcaacaacggggactgtgccagagctttcaagggtggtaccggccctggtacaggccaattg

SEQ ID NO: 45945 - DNA, 342 bp, Gossypium hirsutum
  Clone ID: LIB3493-020-P1-M1-G6
cttcctgtggacggtgacgtatgttatattccaatggctccttcatgcatgtgtgaatatttggtggccatacccattccttgatttgtcatctccatatgctcccttatggtacttctcggtagcattgatgcatttcccatgctatggtgcctttgctttggtgataaagctgaaacaccatgtatttacaagatggttccctgaatcttatcaatgtgggaggtagctttggcaatttgattgagaaaaaaggttttgaagagaaatgtaattttccccacagaagcaatagggagtctgaaatatactggattctgtgtaaaaaaaacacgcacacac

SEQ ID NO: 45946 - DNA, 354 bp, Gossypium hirsutum
  Clone ID: LIB3493-020-P1-M1-G7
ctttttaacgcaattttgtttaatttaataatttcctcaagttttcatctgaaatagtttgctttgtcggttgtctattcaggaaattaattatttatgaccataatttactagttttgattttgattttgattttgattgttcatgatttatgaaatgtaaataactgtctcgcaattaagcaactcattgccttcagtacttgcttgttatttgtcccaattttccatcttttcgtagtagcttgagtttgcagatgcttgtttcacgaatgtgattttgtcgtggaggcaactaattgttcctatacttgcccaaatgcataacttgagactttttccctttatgaatctt

SEQ ID NO: 45947 - DNA, 365 bp, Gossypium hirsutum
  Clone ID: LIB3493-020-P1-M1-G9
ggctaagtcagctaactttgtgatccgtcttggcattgacataggcggtggaactggaaccttcgctgctttgatgaaaattttctacaatgtcacgatgctgaccaccaccttgaacgtcaatgcgccttacagtgaagccgcggtagcaagagggttgatgcctttacacgtgccgttgcagcagaggctaccggttttcgacgggacgatggatctggtccggtgtgggagggcggtgaaccgatggatacccttgccggttatggagtttatgttttatgatgtggacagagtgttgagaggaggtgggtacttgtggttggatcggttctttagtaaagcaatggatttagaggaagttt

SEQ ID NO: 45948 - DNA, 363 bp, Gossypium hirsutum
  Clone ID: LIB3493-020-P1-M1-H11
ttctgggccaaagttgagccaaaatgaaccagagggatcacataaggacagattaatagagcaccagattatatcttatgatgagttctctagagacagaaattttgttaaaattggaaatgaggctaaggaagtacttcttagtttgctagctaagttgcagacacaagttgaattgattactactgaacatggcattctacaaccaacagaaaaaatttacgtgaaattggttaaggctttccttgaagcaaggaagctcaaggatttggctcggtttcttatcaaggctgagaaagaaaattccccagtttccaatgatgattcggcattggttcatgttatcaagtcatgcattttact

SEQ ID NO: 45949 - DNA, 174 bp, Gossypium hirsutum
  Clone ID: LIB3493-020-P1-M1-H3
atctggaaacagcttgtgatgcaccatagtgtactagtttcattgctgagtggaccaactcatttatgaagcgatgacaatacatgttgtgccttatcatagagctattacactctataagaacatccctggaatgatcatacgtggactcaataccggcgtactgcttaagct

SEQ ID NO: 45950 - DNA, 375 bp, Gossypium hirsutum
  unsure (1)..(375): unsure at all n locations
  Clone ID: LIB3493-020-P1-M1-H6
aatctctcttttttgctgccaaaaaggaaaaaacaagtaaaccatgtcttctcgtgtcctctgcttcgtatctcttttgctctgtattttccccgccatcgcctttgctttgcatttaccactaacgctcacacatttcgatgccaatgacccatctcgagatccgtaccagatcctcagctaccttgcctcttcctctttagccagagcccatcacctcaaaaacccccaaatcaccgncactgncaccagcgacgccaccaccaccaccccacttttttcccacagctatggaggctactccatttctctcagctttggcactccacctcaaatccttcctttcgtcatggacacccgcagtgacttcgtttg

SEQ ID NO: 45951 - DNA, 400 bp, Gossypium hirsutum
  Clone ID: LIB3493-020-P1-M1-H8
ggggatttggggataaaactgaaccatgggctactgatctggtttactctatggacttatggaaggatcaagttctctatttcgtaggagagtcgcttgttgatccttggtgatggctaacactcactccgctgacttcgactctgttgagcctagtggcgcagtattcaatggtgatcgcgtcattacgttatttcctcggcatgatgtggttaagctcgatgagggctcctttcttcagtggcaatagcaggtaaggcatattgttgctggttatgatttggtaggatttctggatggttctgtttctgctccaccttgatttgttcaaacttcaggcggtgaacttggtgtgaatccatctggcttggtcttcttttaacaagatcatttacttacc

SEQ ID NO: 45952 - DNA, 462 bp, Gossypium hirsutum
  Clone ID: LIB3493-021-P1-M1-A9
atttttaacagtaaaaatggatgattattttaacaaaatgactaatttattctttgatctaacatacagggactaatttactcatattttgaataaataggtgaaatgtaatatgatttctaatacaaaaacttctatagtacttttactaaaaattccataatgtgtgggataaaatatttaatccttttttgggcttatttgcagtgacttcatagatgactgggtgaaaattggtttgcctgcaaagaaaaaggtcctggaagaaaataatggcctgccttgcgaagaactattgaagctttgcgaaaaggtaaattaatttaagctgattaactatggatatgttgattgcaaattaagggagtaaaattagagcccgcaaacttttaaaggtatgattgcattttattccttttactttaaaaatatataacttattccttttacattagaaaaagg

SEQ ID NO: 45953 - DNA, 341 bp, Gossypium hirsutum
  unsure (1)..(341): unsure at all n locations
  Clone ID: LIB3493-021-P1-M1-C1
tgacggctctcagtatcaatacaaagaatcttttactaaagggaaaggaggtgattcttcactacctggggcctgaaggggagatggattggatgcctgcattttctgaaatcagtcacttgttaaacgggttgggtaatatacaaatcattatggtaggacctgaagttccgacaaacttgtcaggtaccacgtcaggaattagtagcagagttagggtgaatctagtaagggtgtttatcaggaagaagccacctacttgccttccccccatgttatagttgctctgaactgtgcattnggataggtattccaacttggggggtgctcttgatctgatt

SEQ ID NO: 45954 - DNA, 422 bp, Gossypium hirsutum
  Clone ID: LIB3493-021-P1-M1-C9
ccctaattatgcagccttgtagtcgtgaaatgcaagcaatgaactctctcttaaacccgacccaacaaatccctctccaagaccttcaaatcaacggtaacagacaccaccatcaacagatccacgtcccatcatcatcgcagttccagtatcccacacccacttcaacaacccaccatgacgacagcttcttagaacaaatactctcctccaccacgtccttcccgtggtccgacgaaacgggtcctcccaaccccgaggataacaataacgccggcttcaactacgatgacatggttctagcttccaagcttcgacagcatcaaatcaacggcggagctgctggtaacccttttgccgctatgaagatgatgttgatgatgcaacaacaacaacagcaacagcagatgatgttagcggga

SEQ ID NO: 45955 - DNA, 326 bp, Gossypium hirsutum
  Clone ID: LIB3493-021-P1-M1-E1
ggttactgagaaggaattgagggattccaattggtattctaatatggaatctgcttctaaggatgttgagcttgtcgctaatggaggggttgctcaaaaagtgtttaacatgaagaaggcaaggggctggaaaaatgtgtggagtatgtgggtttgatatataggcgaaaacaaagtgatttcggagatgaggataggagtattggaggagatgtaggtaaatggaggctaaactgagtcgttgcacaagccttagaagggtgactaatggagatgaatgtaaaggtgttagaagaaaatgtgggtgaaggaacacctgcagactc

SEQ ID NO: 45956 - DNA, 460 bp, Gossypium hirsutum
  Clone ID: LIB3493-021-P1-M1-E10
cggacgcgtgggaaaccctccaactggaacctttgtcaaggttcacaagtcggggtcctttgggcgctcattggatatttccaagtttggcagctatgatgagctgcgctgtgagcttgctcgactatttggccttgaaggccaattagaggaccctcagagatcaggctggcagcttgtatttgttgacagggagaacgatattcttctccttggtgatgacccatggcaggaattcgtgaacaatgtgtggtatatcaagatactatccccacttgaagtacaacaaatggggaaaggtcagaatcctgctacttctattccgaaccaaaggcttaacaccaccaccaccgctaccaccagcagcagcaatggcaaccactgcgatgactacatgagcagacaggacttgagaagttctgttgcatcaatggggtctctggaatactaaatgaaaatc

SEQ ID NO: 45957 - DNA, 460 bp, Gossypium hirsutum
  unsure (1)..(460): unsure at all n locations
  Clone ID: LIB3493-021-P1-M1-E3
ccaaagccagcactctgtatctagtagctctgaaaaataccgaacaaaagctagtgatctatcgcccttcaatcctaatcagcaagttggagatgttttgggagcaagagaacctgtggcgaatgtgggcaacattgaggtgtgcactaactctgcattgaggcaaaagaggcaaagcgttgatcttgatgagctattagcaaattcacctccctggcctcccgttgtcagtcctgcccaaaacttcagggatgatgagaaagaattaggctcgggtgagtgggtggataaggttatggtgaacaagcaagataccattaacagagtgggaagccctctaggatgttgggaagcagaaaatgggaacttgtctgatgtcttttaccagaaatatctncacgattctttaaagatttatccagaaaaatcatataatatgttcttgggggctaatggattc

SEQ ID NO: 45958 - DNA, 450 bp, Gossypium hirsutum
  Clone ID: LIB3493-021-P1-M1-E7
cggacgcgtgggcggacgcgtgggcggacacgtgggcgaatctcttggagctagcctccggtgaggctccatctttaggccgaattagccgtaggattccccggattatgacggtcccggggatcatttccgatatcgacgatgatccatcagagagtgtatgctctgatccatcctcctcctccacccagaaagaccgaattatcatggtagctaatcagctgccgataagggcacataggaaatcggataataataaaaatgggagtagcagcagtagcaccaccaccaccagcaataattggattttcagctgggatgataattcacttctccttcaaatgagagatggtttaggagatgatgatgttgaggtgaattatggttggtgtttaaaggaagaaatccacccaaatgaacaagatgaggtctcccagattcttttagaga

SEQ ID NO: 45959 - DNA, 350 bp, Gossypium hirsutum
  unsure (1)..(350): unsure at all n locations
  Clone ID: LIB3493-021-P1-M1-E9
tccacgcgttcgnccacgcgtcccggggggcatcatatacctttgctcaccatgcaaaaactatccatccatgtttgatgcatacagttaattatcatgagctcaaaacaactctttaaacgcaccaggtatcaataaccattttttttctcctaaagatctggacatgtttctgcctattgttatcattggtaggatcattaaaaatgttttttcttttaacgcttagatatacatattagctttttttacttttttagattttttatttttgttattcttcttattattttatattatttttatttttatatttatgattagatgtattttatttaatttttttattt

SEQ ID NO: 45960 - DNA, 461 bp, Gossypium hirsutum
  unsure (1)..(461): unsure at all n locations
  Clone ID: LIB3493-021-P1-M1-F3
ggattgtgctcctcatctcaatattaatcttcaaatgaactattggccatccctaccttgcaaccttaaagagtgccaggaacctttgtttgattttatttccagtctagcaatcaatgggagtaaaacagcaaaagtgaattatgaaacaagtggttgggttgcacatcaagtgactgacatatgggcaaaaacatcaccagatcgaggtgaggctgtatgggctttatggccaatggggggagcatggctctgtactcatttatggnaacagttcacctatacaatggacanagattttctaaaaaataaggcatatcctttattaagaaggtgtacatcatttcttctggactggttgattgagggccccggaggctatctggaaaccaacccatcaacttcttccgagccatatgttgtgctcctgatggcaagcctgcctacgtaagctactcgtc

SEQ ID NO: 45961 - DNA, 464 bp, Gossypium hirsutum
  Clone ID: LIB3493-021-P1-M1-F7
atcgagttcaacttcagctagaatgtcttggacaggaacatgtaggttacaaacgtctggactttcctttactaaagctcagtattgttggtggacggccattttcatgtggtggtcaacaaatatttaggaaaaggcttctgtctgcaaggtatggaatccaagatatggaaggaagtgccaagagaatctatgaagctgcgcttgggaccccagaagatcatctagttatacttcttgcacataatggatccacaggtcttggcagtgaactgaatgacatttgtggaaaagactgggtgtttggtggtggtgatcatggtgatccagatctagcacaagccatctcccacttgaaagagactactaacgtctccattccactacttgtgtttggtcacatgcataaggaattggcacatgggaatggtcttcgtaaatgattgtagtccgggctgacgaca

SEQ ID NO: 45962 - DNA, 359 bp, Gossypium hirsutum
  Clone ID: LIB3493-021-P1-M1-G1
cggacgcgtgggttacaacccaatgctagttccagagggtcacgataggatggatgctgacctggaattccttctccattatttgaattgtttacttctaaattagatatctgttgcttaagaatccaacgactgtaccagaaaaaaaagagtcaaattctatgaagatataaaaaacacatacaccccacaaaatagatatataaacagctgaaaaggcactaattgtattttctagcagcctattgtcgcatttgagatcaatgtattaacttcatgggttttttggaagataggagtttctgccctgcaaaacccaattaataaacatgtgaaaataagcgtttagaatatctaaa

SEQ ID NO: 45963 - DNA, 184 bp, Gossypium hirsutum
  Clone ID: LIB3493-021-P1-M1-G10
attacatgtttgctgcttgtttttattactcggacttgggtgcgatgtttttaattttttccttctttttctcgaattgcttctatcattgctgtgtgtaaattagccatgtttgtaagtatttctcggaatcttaccgtttattgtttaattagcaaatgaaataatcccgtatttgaatgtt

SEQ ID NO: 45964 - DNA, 395 bp, Gossypium hirsutum
  unsure (1)..(395): unsure at all n locations
  Clone ID: LIB3493-021-P1-M1-H6
tttgaacaggaacgagctgagggagttggaattgagctaaaatcagcttgcaccaagatgcaaggagtcttcaagaagttggcttgagcttctctatcatccataagctgattctccttacaaagtctaagtaatagagctaaaacagcttcacgaaggcgttgagatcgagcttgagtcattggtccttttgggatctcaatggaatcatggatgggacttggtagtgttggggtcatggtcacatcaatctaacaaaggccgaaagcatgttgtgttcgaaccggnggattgggtttggtgcatatgcgcaaggaaagatttcctgcgcaaagatgatctaaacttcttccgggaggagatggaccattccaagtccttgagcgaataaatat

SEQ ID NO: 45965 - DNA, 110 bp, Gossypium hirsutum
  Clone ID: LIB3493-022-P1-M1-A2
gcataagctgcacctttaggatgatgctgtcaagtcatctgagtctggacaggagatacatagccaagagatgctactacactggtacactcttaccttcatgatgacgc

SEQ ID NO: 45966 - DNA, 216 bp, Gossypium hirsutum
  Clone ID: LIB3493-022-P1-M1-A5
gagacgcttgagtcatacttcaattattcaaactaaagtctatccttaatccaatcgaacggatttaagcccattaaatccgccatttccaattataacatccgtatggtatcatccgttatccaagcttaaaatcacaagaaaactcctatcttccaacccctagcaaaatagggattgagccaaaaaactcgttaacgaccctaacgactactt

SEQ ID NO: 45967 - DNA, 225 bp, Gossypium hirsutum
  Clone ID: LIB3493-022-P1-M1-B11
acccacgcgcacgcgctcgcggggccacccataaaaaaaaaagaaagccagcacgcgggcgcggaaccttttgcagaggggggccctgcaccccacccaaacggtgctggaaacggatagagatcgtcgcgcaagcagcaacccaggggcacaaagagaccagaacccgcaaacgcacacgacaaagcataacgcgccacggacgccgccaaaaagggaaacaca

SEQ ID NO: 45968 - DNA, 391 bp, Gossypium hirsutum
  unsure (1)..(391): unsure at all n locations
  Clone ID: LIB3493-022-P1-M1-B5
cccacgcgtccgtggggccacccataaaagaaaaagaaagccagcaggcacgccagatcctaatgcagaggtggtttctttatctccgaaaacgttgctggaatcggatagatatgtttgtgagatctgcaaccaagggtttcaaagagaccagaacctgcaaatgcataggagaaggcataaggtgccatggaagctgctgaaaagggaatcacaagaggtgaagaagagggtgttcgtttgccccgagccaacctgcttgcatcatgacccttgccatgctttangtgatctggttggcatcaagaaacatttccggcggaaacacagcaatcagaaacagtgggtttgcgagaaatgctctaaaggttacgctgttcagtctgattac

SEQ ID NO: 45969 - DNA, 137 bp, Gossypium hirsutum
  Clone ID: LIB3493-022-P1-M1-B6
aatagttgctggagctgctgagtacaatataaaacatcatcagcggatgcttcaaatgcttgacgcgcctaggtacatgggtagcatcgttgaagattgttacagataggatgcgatgaatatttcgaagattgacg

SEQ ID NO: 45970 - DNA, 183 bp, Gossypium hirsutum
  unsure (1)..(183): unsure at all n locations
  Clone ID: LIB3493-022-P1-M1-B7
ggaacccgtgtcaaggaaagnngtcttcgcaccctacaaagatacctgtcagnttcacaaatccagtatnngcagtcgtttgaagaacatcncgnngagcaaaaatggttacaaaggaataaggannagtgcagcnnctcctttaaagtgggatgatganagaacanncagcgcaannatatt

SEQ ID NO: 45971 - DNA, 363 bp, Gossypium hirsutum
  Clone ID: LIB3493-022-P1-M1-C11
cccacgcgtccgaaacatgtcaaaaccctaatcaccctctccggcacggccccttctatctttttcgatggcaaaaactttcaaaccccattgaagtcccaccagccgtttctttctcttaagaagatgaagaggtgacttcttttgatgaataacaagaatggtcttcaactgatgaagaatatgaggaataccccaaaaccgtgtcaactccattgatccaaaagagcccatcacccataaagcctgtatccctttcgtctggcttcgttaacaaaaaattttattaattcgtaccaattccgaattccaatactacacctttacacctaaatgttaacctttttgctaccaaacctattg

SEQ ID NO: 45972 - DNA, 392 bp, Gossypium hirsutum
  Clone ID: LIB3493-022-P1-M1-C8
gaaaaattatgactcggttttgtataaatgctagtgtaagtctggtaatgcctcgtaaccctattccgatgatggatatgggttaagggtgttacaaaatttgtggttgattttcgtgttttgcagtaagctttggggaggtttttaaaccatatgggcagccacacgggcatgtgccacttggatattaggttaattgtttgttacacggttcgggacaggtcacacggtcatgctttccctgtgtcctgcaagttagtaagttacatagcctgtgcacacgaccgtgtaccttattcacacggacgtgtgtcttggccatatggacgtgtcccctctgtacttaaaattgacaatgagctacaaggctagctcacacaggcatgtacctt

SEQ ID NO: 45973 - DNA, 471 bp, Gossypium hirsutum
  Clone ID: LIB3493-022-P1-M1-D1
gtcccgtatgctgtgcctatgatgcagggagcagctgaaatctgtgccaagatggaaacacctgatgaagagacagtggattatggcaactagctgctactaattatatccgaaactgatctgggtattctccaaggttttaagaccgtgaacactgttgtgatgtagctctatgccatacatctgtagatgttcatagaattggcctttaaagacaatctaaggaatgtaaacgtgtcaaaggcttccctactagtgatcgtagagcttatacattctacctgtttcaacatagactttctgacataagaccacgtggtgctcgagctatctctattgaaatgttaccgatcagttcacaatctcatgcttggcgagcgatggtgcacgccaacccacaaatattgcagcctatgcttcatgagctggggatacagaattctaatctaatgagacttattcaagatcatc

SEQ ID NO: 45974 - DNA, 465 bp, Gossypium hirsutum
  Clone ID: LIB3493-022-P1-M1-D10
tatagcaaactacaccatcagagtagcaaatgatccaagaacatgcaataaaatagtgatttataagatgcagaagaatattttgtcccagattgaattaatttcgttgtgggagaagaaaacaggtaaatatttcaagaaggttcatgtaccagaggaagaacttgtgtaactgacagagaccttaccatttttcggattatgtacgtgcattggttctttacggtctatttttatatggtgtttttgtttattttgtgcgttggttggatgacttagtatgtttcttttatttttttattattttttttccttatttcttttaatttgttggtatgtgttatttttcttttttttttttattgttttgttttatattattttattttatttatatttgttctataatttctgttgattcattttattttgatgctttgtttgttttattttatttaattttat

SEQ ID NO: 45975 - DNA, 363 bp, Gossypium hirsutum
  unsure (1)..(363): unsure at all n locations
  Clone ID: LIB3493-022-P1-M1-D4
cccaccacaatggaagagaaaaggaaaggccccggtcggttcgtcggagcaccccaaacagtggatcggaggtattttttactccttttttttattcttgcttcgtaaacgaagaaatataaaaaaaaaacccagagaatcgaagattgaaacatccacaaaaatattcacctttcgaaaactctattccttttttgattttagtgtgcgtacccgtgagaagggatctcctctggctttttaaagccggattacaatattttacaatccattttcttgtcgttttgctatttgtttcttctatttgncatttttcttattatttttttactgctcgcgtgtttctctctttgcaggtgtgtc

SEQ ID NO: 45976 - DNA, 323 bp, Gossypium hirsutum
  Clone ID: LIB3493-022-P1-M1-D5
cagatgtctatgaaattatacgacgtacctgtttcccatctgtccttgattcagatcaaccacaaacaattccagctcatgagtaagcaaaatttcagcatctagttttgtttatgcagctagcaagaataattagtttcccttactgatcttttctggttgttacctatattctagttttaacagcatgaactgtgccagcttaagaatatgccatacctcttgtttcttagtttaactgtacgaaagatttaacttaaagtgaaataaggttaataggagatggattagtaaaataatgaagttagacttgaaatgatgct

SEQ ID NO: 45977 - DNA, 462 bp, Gossypium hirsutum
  Clone ID: LIB3493-022-P1-M1-D7
ggaacttcaggatcgaatggaacatgactataacattggttcggcaattcgagacaaactgattcctcatgcagtatcatggtttacgggggaagctgttcaggggaatgagtatgatggattagaaagtgattatgacagtgatgaccaagatggtgatgaggatgaagatggggatgaagaagatgagagagaagaaagaaagggcaaaaagatgcagcgcgcaagtgcaaatgccggcctaaatcagcatgttgaacgccctccagagtgtaagcaacagtagcatttggataccgtcttggttgcttaaaattttgagtaatatatattccctaattgtgagtatctcattcaacttttttttttactttttgttttttaatggaggattggggttgcctattaatgttatgtggcagtggaactctaaacctacgtaatgtttctagtttctaaatc

SEQ ID NO: 45978 - DNA, 231 bp, Gossypium hirsutum
  Clone ID: LIB3493-022-P1-M1-E2
gtcgatcttcccgaatttccaacaaagaggagaagaaagccaatcattcggggtggtaaaagtgaatttgttgatgcccattaaagtgaactaccacattcggtcccagaacctcccttgaaacccgtattgactgaaatacctgatacacagatagtagctcctcttgatgaagaggaaacaatccaacttgctgaggaaacactttaagcatgggaacacataaggaga

SEQ ID NO: 45979 - DNA, 401 bp, Gossypium hirsutum
  unsure (1)..(401): unsure at all n locations
  Clone ID: LIB3493-022-P1-M1-E5
cggacgcgtgggttgttctgttgttattagtagcagagggaaattgagtgtggctgactttgtgttatccgtttctatctcgttttttcgttgattttttgctggaatatttgtagatctgtgcggcttttgtgtttgtttggagtttttagcgtgtatgtatgtttttataataagatgcgagatttttgaggtttgactatggattgtttatggaagttatattgcaaaaaacggttcattttgtaaagctttgagttgacatgagtaaataaatgttgccgcgcgttgacttaaactntaattggttttacttttcttcttttacttaaagagtagctaatttttgagtgggatctactgaatctgtaaattttacctcatttttgtcttttaaattt

SEQ ID NO: 45980 - DNA, 433 bp, Gossypium hirsutum
  unsure (1)..(433): unsure at all n locations
  Clone ID: LIB3493-022-P1-M1-E6
caagtccgtcccatctttttttcagttttatgatctttttgctttctgttttattctatattctccaagcttcatggatttagcacataagctcctattcgcagctttgctcatctttgcagcaaccattgatgggacgcaggcagctgccatggtttctggtgctgttttctgtgaccaatgcaaagatggccagagatccctctntgattatcccctttctggaatgaaggtgactgttacctgtgctgatggtactgggcaagtgacaatgtcaagggaagagactacanatgtatttgggaactatgtgatgaggtttgatggcacaccaganctaagtaactgcaatgcccaggtttcagggagtggagaaggtcaaatgattgtggtgcaactgctggccctgcccagaaacttagacttatgttca

SEQ ID NO: 45981 - DNA, 402 bp, Gossypium hirsutum
  Clone ID: LIB3493-022-P1-M1-E7
tgaagtcttggttccctctggtgatgcccaagaaacatggtatagttgtgtactaaagcaagtatctgtctatggagtggcggcaggatactgcatttcagcttctcttctctccatcatcaacaaatgggctgtaatgaaatttccttatccaggggcactaactgctttgcagtatctgacaagcgcagctggtgtagttctctgtggatggtttaaggtcctagagcatgatccacttgaccttcggaccatggggcagttcctacctgcagccattatattttatctctctctctttaccaacagtgagctcctcctacatgctaatgttgacactttcattgtcttccgatcagcggttcctatatttgttgcaataggaaagaccctttacttgag

SEQ ID NO: 45982 - DNA, 230 bp, Gossypium hirsutum
  Clone ID: LIB3493-022-P1-M1-E9
ctttgtgttaaataaaaaagtaaaacttcaaaaatatcacattgtaagaataaaattggctcaatactagtctctctagtcatgagctgtgattgtattactctgtatgtaatcatctatgttctatgagtacctgtaacagctttggattagctccctagtctctaccatgtaatcacttcctatttcttaatgaagttaacttaatgtaagaaataaatgattaattt

SEQ ID NO: 45983 - DNA, 159 bp, Gossypium hirsutum
  Clone ID: LIB3493-022-P1-M1-F11
atatttcttgtcctctattatgatatttaccaaattaaatcacgcgacgcttctttattgaaatactcatcactccacaatactaattcttctaccactctatctttactcgactcatttttcaaacatcaaactattcaacccacctcaaaacttatt

SEQ ID NO: 45984 - DNA, 409 bp, Gossypium hirsutum
  Clone ID: LIB3493-022-P1-M1-G10
gggccgggtccattccaacttcggcgccgtcaatatcacccgtgaccctttaaccaactccatcacaatccaatcaccggcccctttctccccatccaacgtcaccgttttatcgttattcaaaaccctcccttacaatatcacaatcctagccgttgattccctccttgttccctacgacttcaatctattggcctctgaaacccggcccccccttggcctcaacattaccaaagccctaatcgatggccataatttcaacgtcgccgcctcaatgttagccgcttccggcgtcgtcgatgaattcgaagccgacgagggcggtgctggaatcactctctttgtccccacagatgatgcgttcggtgatctgccgggcaatgtcaaatggcagtcactcccagctgat

SEQ ID NO: 45985 - DNA, 237 bp, Gossypium hirsutum
  Clone ID: LIB3493-022-P1-M1-G2
gttaaaacccccgtccagataatatattcccttgcttccaaaggaaattagtgagatggggagaagaccatcttatggaaatactctctttactttactattctttaaacgatgaacgctaaccatgcttcccttggtcgacggaccctggaagagattcgtcaaaagagagcctcctatagaatcagcagagcttctttcgaatcggatctcaccaaagctccaatccctaactga

SEQ ID NO: 45986 - DNA, 149 bp, Gossypium hirsutum
  Clone ID: LIB3493-022-P1-M1-G3
cacaaaattctgaaacgttcatataaagctcgcattctattcaccaaattgcgatgtattgttgaacattagactgcaaatctaaaagcttggtagcttgatataggaatccctttactgtatgacaaggcttcactcttatatatgtt

SEQ ID NO: 45987 - DNA, 358 bp, Gossypium hirsutum
  unsure (1)..(358): unsure at all n locations
  Clone ID: LIB3493-022-P1-M1-G9
cggacgcgtgggctctgaagtacttgaatggtattcagaactaagtgctcaacagatatgggatgagaaggcttattctccaaccaggaagaaactattgtctgcattggaaagcatctcaggatacagtcctgaggctttgttgaaacgtcttcctccagatgctctatttgaagagcgtgcgattctgttgggaaaaatgaaccaacatgagctngctctatcactatatgttcataagcttaatgtacctgaactggcactggcctattgcgatcgggttatgagtcatctgttcatcaaccaccaacaaaatcttctggcaatatatacctcactctgtaacagatatatctga

SEQ ID NO: 45988 - DNA, 448 bp, Gossypium hirsutum
  Clone ID: LIB3493-022-P1-M1-H2
gcgcggacgcgtggcgctttgagttcattcacaaaaatttctctggattaataaggatgtattatattcttttattaccagagatttactgtgattaaggaaaaagcatgtgttattttttatataccttgcaagtgtgtatgagtcatgaggcgaggttcaacttagtcaggtcggttcctcatatgtataattaatttaaatttggattctaaattttttgtactttaatatttatgacaacttgagttttaacttttggattttaattgtgttattaatttattattttaaattttaaaactaaattaattaattttaatatttagttttaaagttaaaattttcattgaaaattaaatttaaataatattttttatttatccttaaaagtttatctaaagttcaaatttaaaaataaaaaattattaatatttatcataaaaat

SEQ ID NO: 45989 - DNA, 474 bp, Gossypium hirsutum
  Clone ID: LIB3493-022-P1-M1-H3
actgcctggctggacccacccatgcgttcgggtattgcagctcatttaccaaaaagaacagacaatgagattaagaactactggaatacacatctaaagaaaagattgaacaagatggggatcgatcccgtgacgcagaagcctaaaactaatgccctcgggtccgcaaccggtaaccccaaggatgcagctaccctcagccatatggctcaatgggagagtgctcggttagaagccgaagccaggctggtaagagagtcgaaattcgttggctcctcctcttcctcttcttcttcttcttcttcctcggctccacagcacactagcaacactgtatgactccgccggcgactaggccacaatgcctcgatgtgctcaaagcttggcaaggtttagtcaccggattgttcactttcaataacacaactgacaaccttcagtcttcgacgtcaacgttgaacttcgtggagaaca

SEQ ID NO: 45990 - DNA, 344 bp, Gossypium hirsutum
  unsure (1)..(344): unsure at all n locations
  Clone ID: LIB3493-022-P1-M1-H4
aagaccgggcatcaccttgaatctacagattgtaattatttagtatggatttcctttagcggattaggaaataggatactgaccctagcctcagcatttctctatgctctccttacaaatcgtgttctactcgttgaccctggaactgatatggttgatcttttttgcgaaccatttccggaggtctcctggtttctccctctggatttcccccttaaaaatcaattcgacagctttgatcagaaatctcctcattgttatggaagaatgctgaagaacaaactctttgctaattcaagcaaatcgatattggcaccttntgtatatctccatctgattcatga

SEQ ID NO: 45991 - DNA, 236 bp, Gossypium hirsutum
  Clone ID: LIB3493-022-P1-M1-H7
cggacgcgtgggcaaagaagcaatcagaggttcagctctctaatcaccccacaggagcagcctgaaaactttaaagccccttctattttgagttccaaagggaacaaaatctcttttttattatatattttttttagtttttaagtagtccagaggatttcttagttttggtttatgctttatgacttggttaccttgcctattggtaatggattaggtttaattcttttcttttc

SEQ ID NO: 45992 - DNA, 325 bp, Gossypium hirsutum
  Clone ID: LIB3493-022-P1-M1-H8
aaaaaaagaaaagaagagggagagaagaggaagagagggggggaaggaagggatttccggtcaccggacggccaccgggggctcgccggcgccggccaccgcgaaaggtatgaaatttttttattttttatttttagttcttttttcctaaagtatatgcatgcgatggatttaaagattaaaaagcaaaaatcaccttgaaccctgttttggtattctgttttttttggattttgtcgattcggggttttcccttccctgcgatatcactgtgactgtatctataattttagtgttttcgttcttagagtaatgaaaatgtgaa

SEQ ID NO: 45993 - DNA, 287 bp, Gossypium hirsutum
  Clone ID: LIB3493-023-P1-M1-A11
ttcaattcctaatttcccaccggtcccccaattaatcaattgttcacggactgtcttcctcctcctttcttccccaatcaacttggttacatccgccccctcaaatccctagctcacaccaccatgtcgccggacggtgatggagccatcaatggctgctgcccttgctccttttcctccggcgagaatggtatccccggatcccacgacgacacttgtaagcactgcacaagatccaaatctttgtcatcttctccctctgctcttggctctgattctgttctctt

SEQ ID NO: 45994 - DNA, 427 bp, Gossypium hirsutum
  Clone ID: LIB3493-023-P1-M1-A2
cccacgcgtccgaaaaaaaacctgttattgaagtcattaccagcattttcacttggaatggctaaattcaagaatgctaatccctcttcttcatcaacttcaatttcagacaagacatttacaagtttaggtaaccttatcaagctccttccgacaggaactgtcttcattttccagttccttaaccctgttttaaccaactacggccattgcagccctgttaacaaggtcctaaccagcaccctcattggcttatgcggcttctcttgtgcattttcttgttttaccgatagttacaaaggcggcgacggtttagatcattacggcatagtaacggttaacggactttggccgtctttcggttcggattcggtcgacttaatcgaagtataagctgcgtataggcgaattcgttcatgcttttttt

SEQ ID NO: 45995 - DNA, 389 bp, Gossypium hirsutum
  Clone ID: LIB3493-023-P1-M1-A5
attttctcttcttattcaactctttctctcttcaatatattgccatcccacttgcagctaactagaatcattccttcaccaaacgactcttcctttgaaacctgaaaatcccttcttcttctttttggcttaaacaagtttcgatcttcttctttttttaattattgatttattcttattgataaaaatggcacttgaatcctcaattttcagtcgacctatttttatttattcaacaaattcctcatctttcatgttttttaatcgaaatttgaagaaccaatcaaagtttttacccaaaaccaatctctacccagctcctgttatatccacctgttcaaacccccaagctttcaaagcttttggattccctaaaaatggtagttttg

SEQ ID NO: 45996 - DNA, 345 bp, Gossypium hirsutum
  Clone ID: LIB3493-023-P1-M1-B1
ggaggatgaagatgaagaactgagcagtgccctggaaaatggggttgccataaatgataaaacgagttctccatctccaccaaatccaaaaacaagagaaaactttaagacaaagagggcttacttttattgggtaacaagggaacaaggctcttttgattggttcaaaggcatcatgaatgaagtagctgaaatggaccatgatcatgtcattgagctccataactattgcaccagtgtttacgaagaaggtgatgctcgctctgcgctcatcaccatgctccagtctctcaaccatgctaaaaacggtgtcgatgtcgtctctggtacacgtgtaaaatcgca

SEQ ID NO: 45997 - DNA, 408 bp, Gossypium hirsutum
  unsure (1)..(408): unsure at all n locations
  Clone ID: LIB3493-023-P1-M1-B4
aaagaacctcacaagtattttgatcaagtaatcatcaccgtccgttcgggtgatggcggccatggtgccgtccttaccatgcctagccaacaacgagctacgaagtggcaaggaaaacatgagaataaagagaagtcaaagaagaaactttcgtataaaagggattttgatgggtcacttatccttccagtgggtggtcatggtggagacgtagtaatttatgctgatgaagggaaagatacgttattggaacttcataagaagagtcgacataatgcaaagcgtggtggaaatgtcgctggtantggtgttttaacttctcagctgcgtgatggccttgctgccccaactttgcgtattcctgttcctgttggcactgttgtgaaacgcaaacctgggaagttattg

SEQ ID NO: 45998 - DNA, 318 bp, Gossypium hirsutum
  unsure (1)..(318): unsure at all n locations
  Clone ID: LIB3493-023-P1-M1-C12
gaaaggatacaagtgggattgagaatagatattttgatcttggatgtgttcccatagcaatttgtgtggtttcaacaatgttagaattgagatctaacaggtccatttactcgaaatcggtacgaggtattgggttggttttacacggaacatggtttgtgcaagtgggattttcattttacactaatttgatggttcatggatgtagcttacatgaaaatagtttagggaattatactattaaatgcagaagtcactctgattatcatagagcatggtctattgccacattgtanttcaattgccatctttcttttc

SEQ ID NO: 45999 - DNA, 380 bp, Gossypium hirsutum
  Clone ID: LIB3493-023-P1-M1-D1
gaattactgctcacgcgcttgccaagcgcttgattggaagctgcgccacaaagccgagtgcgcgccagtagagcgatggcttgatgaataaggcgatggtggcgagggtaacggtgcggtacatgggaacgatgacgttatcgccgaaagttaaaaacgattaactgcttatggtaattaattttttactattaggtttaaggccacgagaagaaaaaaaaaagtggaaatggagaacaggaggccagctttggttgggtatttggaggttaaaatcaacttttaagatgacgatagtcgctgaaacgacacagtttagttctatgtggattgtaagaggaggggggtaatccgaaaatggtcccacttgtacactatag

SEQ ID NO: 46000 - DNA, 138 bp, Gossypium hirsutum
  Clone ID: LIB3493-023-P1-M1-D4
cctgagtcgttttataccagtggaggcttgaaattaagggttgtgtggggcggtgggctcgttaatcgcagcatcagcaatgcattaattgctgcactccataattgcagagcataagacgctggatagcttggtttt

SEQ ID NO: 46001 - DNA, 394 bp, Gossypium hirsutum
  unsure (1)..(394): unsure at all n locations
  Clone ID: LIB3493-023-P1-M1-E8
aaaaaaaccatttatttttcttcagctctaagcgacaagaacgatggctgacttcaagaaagccactgctttgattctcacagtggctttgcttgtgaatctcgctttaatggttgatgctgatggtgatgatgatatgaagattacagtcactacacataccggccaccatgacctttttctgtgttttgtgagctctcatcttgggctttctacgtagcctcanaccctgtctaagacaattcctccttgtttctttacacttctgacacgactgacttggttcgtnttcaatttaactccaaatcttctactcttaatatgcatggcattgcttgggcctctaacggcattatttttgatcttgtttattgccccgctggggttcaggtgg

SEQ ID NO: 46002 - DNA, 203 bp, Gossypium hirsutum
  unsure (1)..(203): unsure at all n locations
  Clone ID: LIB3493-023-P1-M1-F4
attcttactgcctgtcctttctatagctaaggcattctacaatggcggggaggagcatggttttagtcattgtacgcactttatacatcataaagtgcattgttgaagccagtgtgaaagatggtcatacaacttnagcttttctaagatagggttcattttcagacccatttaagggaaaggttattaacattttcaataac

SEQ ID NO: 46003 - DNA, 369 bp, Gossypium hirsutum
  unsure (1)..(369): unsure at all n locations
  Clone ID: LIB3493-023-P1-M1-G11
tggcataattcagttcaccagggacatctctatggcaggccgtgccaaagacagggataaagctggcaaaactaccaaacactttgccactgagagagaaaggagagtccatctaaatgacaagtaccaggctttaaggacaatggtccctagtcccaccaagaatgatagagcatccatagttggagatgctatagactacatcaaggaacttcttggaactgttcgtgagcttcaaatactggtggacaaaaagagatgcggccaagaaaggagcaaaaggcttaagactgaagatgcggctagtgctgctgatgcangggatgttgagatcaagtctttaggtgatccaaaacaatgctataatac

SEQ ID NO: 46004 - DNA, 173 bp, Gossypium hirsutum
  Clone ID: LIB3493-023-P1-M1-G4
cgaagagactcccttcgccaaacttggatgcctacaggggaaaaacggaagaaattagagaaagagaaagggatagtcataagatttgtgatagggcacagtgcaacaactgtgtggtgttctttcatagcattgtacaaacaacaggcttgctctccgggttttttaaggct

SEQ ID NO: 46005 - DNA, 360 bp, Gossypium hirsutum
  Clone ID: LIB3493-023-P1-M1-G7
ggctatcgcactgtgaatccaccaccaagaaggtccggatcctcagcattgacggtggtggaacctccggcattgtctctggtgccgctcttatacactttgaagaccagatccgcttcaaaatgggtgatcctcatgctcaaattgccgatttctttgacatgatagtcggcactggcgtcggtgctcttattgctgccatgctctctgtcgacgatggaattgggcatgcaattttctctgctagagaagctgtcaagttcatcactcagaataactctaagctcttcaaagtgaatagacttgccagagtactataccgtcggaaaagattctccggtgagagcatggataatgtgc

SEQ ID NO: 46006 - DNA, 365 bp, Gossypium hirsutum
  Clone ID: LIB3493-023-P1-M1-H10
aagacctgaaaacatgtcgttcgacgccagcgtccacggtggcggcggcgacgctaacaccgacggcgcgaccaataagcctttcttttgctaccaatgtaaccgtaccgtcaccgtaacaatctacccttccgctgacccttcttgtcctctatgcaacgaagggttcctcgaagaatacgaaaaccctagctttgaaaacccgaattcgaactcaaacccgttatccgaaccctttttgtcggtatcggatccgttctcttccttggctcccgctccttttccttcctcttcttcaacgacgagttctttaccgtctcctgcttcaattgaccttcataaccctaactcattcgggtcgaccc

SEQ ID NO: 46007 - DNA, 244 bp, Gossypium hirsutum
  Clone ID: LIB3493-023-P1-M1-H11
cttccggggccccgtgggtggaaatttctttctcggatttcccgtggagccaggaaagatgcaaaccttcgttagaaccttaaccggcaagacgatcactctcgagggcgagagctccgccacgatcgacacctggaggaccaaaattcaagataaggaaggcattcctccagaccagcagggtttgatcttcgccggaaaacagcttgaggacggccggaccttggcgcgttacaacatccaa

SEQ ID NO: 46008 - DNA, 416 bp, Gossypium hirsutum
  Clone ID: LIB3493-023-P1-M1-H8
attgtggagtagatgcccatgcaattgatagggtgcttctttgatcttccaagccttctctatacgcaaatatcaactgcaatgcgctatctaccgctgtcatttgtagacagacctctattgttagatcacttttctaggctggcatcaagatggacttaaaggtgagagttggatcctggtcttgatgctgcgaagtggatattcatgtagtggcaaactcaacttgcagagccacaagctcacttgaagctgggagctcatctaaagctgcgagctcacccaaagacgcgagctcaactcaagttgcgagcacgttaaagtgtgaggtggtaaggtttttggtgaaccccgagttaaaatgcaagcaggggtcacatatgccgatgtcgatgttttggttaagctggttggtt

SEQ ID NO: 46009 - DNA, 294 bp, Gossypium hirsutum
  Clone ID: LIB3493-003-P1-M1-A1
taaagttccagcaatccaaaccaagcaaaagttgagtaaataacttgtgcttcaggcttgggctgttattttggcattgaaatcagatgccccctgtgatggagatggttcatttttgcatgggttcttttgaaggactttggatgaggggactagtgcaggaaaagggatgtcgttgtaagatatcggaccattatatgttctagcggcactcatttaaatattatgtttcctttgttgttatcgtattcatttgatcataattgaagggaggtggtgggtaatctaactata

SEQ ID NO: 46010 - DNA, 527 bp, Gossypium hirsutum
  unsure (1)..(527): unsure at all n locations
  Clone ID: LIB3493-003-P1-M1-A11
gttttcagtactctaagagtcttgatgaggcatttccaaatgtcacttgtcattttgaaaattcagttactctgaaggtttatccacatgagtacctattcccctataatagattgtggtgcattggatgggccaacactggaatgcaatgcagggatcgaaagaatatgacccttttgggagatttagtgctttccaacaagctggttttgtatgatttggaaaatcagaccattggatggactgagtacaattgttcttcaagcatacaagtgctggacgaaaggactggaactgtgcatttagtaggttcccaaaacatttcttctgcttgccatttgaatgcctggtctattacggttttgatcttgttagctacgttactgcactttntgggctgctagtaaatctttagacaatacgaaaaaaagctaactatcagtttaaagataaaagaaatcaaatattaaatagaaatcaagacattcatcttgatattagtgctgaaatgatagaatagaatagat

SEQ ID NO: 46011 - DNA, 388 bp, Gossypium hirsutum
  Clone ID: LIB3493-003-P1-M1-A12
ggaggagccgattaaatttgtaaaaggggggattcccgaatgaataaaaaaaaaaagagaaaagaatacagatattaagaaaggaaattgaatagcagttttggaaaagaagtgattttctgattgttttttcttttctttggtttttttttccttttttgcaaaacaaaaagagcaaaaggggatacttacctgcgcggaggcgacgacggagccctatttgctccgtccaggtcggagctagatggggcttcgaattgtttgaggcgggagacaagagaatgggccatggggctgctgttgtttcagaagaaaagggaaatggcttagggttttctgatttagggtttaaaatagcatttataggtgctcgaaacggcaccgttta

SEQ ID NO: 46012 - DNA, 471 bp, Gossypium hirsutum
  Clone ID: LIB3493-003-P1-M1-A4
attccattgttccattaaactattttttcaatcattatactctccaaaggagacaatttttaggctgtggtgacggcgaagaaggcggtgttttatctaaagtttacgaggaaaggatcgtcatggggtattcgccagaacaattatttgatgtggtcacagctgttgatttgtatcacggatttgttccttggtgtcagcggtctgacgtaattaaacactatccagatggatcgtttgatgctgaattagagattggttttaagtttctggttgagagttatgtttctcatgtagaattaagcaggccaaagtttgtgaagtcaactgcatcacaaagtagccttttcgatcatttgataaacatttgggaattcaatcctggaccagtcccaggaagttgcagcctttactttcttgtggactttaagttccagtcaccactctatcggcaggtggcattcatgtttt

SEQ ID NO: 46013 - DNA, 130 bp, Gossypium hirsutum
  Clone ID: LIB3493-003-P1-M1-B12
ctctctcttcaggataaatgcctattgcagcattcatggtgagccctggagattagatgtcatcttttctcaaagcatcacacttgctagctcatctaatgtattgagctactttggtctctctgtattc

SEQ ID NO: 46014 - DNA, 450 bp, Gossypium hirsutum
  Clone ID: LIB3493-003-P1-M1-B4
cggacgcgtgggtaaaaacccctccgctttgtccacataaaacccctttctcctctctcaataaaactctgttgatcaacggtatccgccgtccaccaccggccacggccaccagctaaattaaagactcggggggcaggaataaggccatatacctgttgttaatactgaggtatgtgtggcattgactttaacaatctgacactctgtgatggattctagatttaaaggtattgactgggtggggggcatttaccagaagtttgaaacgctgtgccatgagatggataatatcgtgaatcaggacactgtcaaatatgttgagaatcaggcacaaagtgtgggtaaaagcatgaagcgattttattctgatgttatgcttactctaaaacatgatgccaaaggagtggctttaaaaagaagcactacaattggtacctcttttgaatc

SEQ ID NO: 46015 - DNA, 349 bp, Gossypium hirsutum
  Clone ID: LIB3493-003-P1-M1-C3
gtggatcatatctcgttcgacatactcggactacaattgatgaagggaagttgcaagacaaagacatcgatagagctcttctgaaccttttctcggtccaactccgtcttgggctgtttgatggagaccccacaaaggggcagtttggagagttgggacctcaaaacatttgtaccatagagcacaagatgctggcacttgaagcagcaaggcagggaattgttcttctgaagaatgagaagaagttcctgcctctggatagaaatgttgtttcttccatagctatcattggtccaatggctaacaacataagtaatatgggtggtggctacactggttttccatgtga

SEQ ID NO: 46016 - DNA, 358 bp, Gossypium hirsutum
  Clone ID: LIB3493-003-P1-M1-C4
gttgttttctaggaagtaggagcgtccctcagcctggcctagaaaaggcacctcgtcttcactacctgctgtataatatagattggtgggcatggaaacaacttcaattccattgataaaagcaaaagaatcagagatatcaggacttggggtgaaggttaactttagcctttgacttccatcaacgtttacacaaaattctttgatcagagtaacttggccttgcgcatggagtaaagcactgaaattcttgagaagggtatagggacctgctttgacagagaagaaagctttattattataagggtcgtcaaagcctggatatgttgttgggtagaagtagaggcgaatgaacttt

SEQ ID NO: 46017 - DNA, 173 bp, Gossypium hirsutum
  Clone ID: LIB3493-003-P1-M1-C6
aaaatatcacaaatcttcttgttcttctcagaaatcttaatattatgactatgggctgaaatcccaagggcttttttgacatgacgatcgggggtgaacccgcttgtcggattgggatggagcttttcgcagattggacttctcgcactggggaggaatttccgtgccttttg

SEQ ID NO: 46018 - DNA, 137 bp, Gossypium hirsutum
  unsure (1)..(137): unsure at all n locations
  Clone ID: LIB3493-003-P1-M1-D12
gttggagtcaaagatctcatgtttcgatgaaagagatggtgtatgtgaacaactcatggngattcctatgcctctatcatacactcggttgacatcaaggtntttggtgctatggcatctcactcttcctatcatac

SEQ ID NO: 46019 - DNA, 137 bp, Gossypium hirsutum
  Clone ID: LIB3493-003-P1-M1-D2
ctctgtggtttccttctctgtagcatgcttcttctatagtctctactcaccccccatggctatgcttatgctatttgcttattagagcttctcaaatatgaatatctctcacttacaataaccctctcatccaatca

SEQ ID NO: 46020 - DNA, 381 bp, Gossypium hirsutum
  Clone ID: LIB3493-003-P1-M1-D4
cgaaatactcactccaacatgaagcttatgctgatttgcaaataaaaaaatgataggattacagctgcccttgagccaaacgcaaagaataagacttcaaagagcattggaaaagcttcagtctctttcttgtaaagcgaattccgacgcttccgttaccgtcgccgataccattcccgtcaactatgaagacgcttttctcaaagggcatgggacaacggacctaaatggcgatttggtggcaactgtgtgtggcgtggtggagcgcatcaacaaactggtctatgtacgcgccttacgtgctaggtacaagccagaggttggggatatcgtaatgggacgtgtagttgaggtttctcaaaagcgatggagattggagat

SEQ ID NO: 46021 - DNA, 446 bp, Gossypium hirsutum
  Clone ID: LIB3493-003-P1-M1-E1
ggtgtccatgatgtattcaatgttgttggcgctggttcagcaactgctgcagcctttggtctaattatgcctgggtctcttcaatggcgtgcaaggaatgtggtgctaggttcggttcttggagcagctatatgttttcctcttggatggatccacttgaagcttgtagagaaagcaaatgaagggaatatggctgctaaaagttcaggtgaaattggagaagcaaagagtggtcttggggctgccattgatcggcttgaagaaaacttgaataagtagacccaccaatttttgcatagatagagaacactactgacagcattggcatggaactaaatttactgcttttggcaatgtattcattgtttttaagggctaaagttttgcatgggataaagggctgaggagattggaagtatggaactgttatttggtaatcttattct

SEQ ID NO: 46022 - DNA, 143 bp, Gossypium hirsutum
  unsure (1)..(143): unsure at all n locations
  Clone ID: LIB3493-003-P1-M1-E3
caaaaacagatattcactcacacagccgggtcgaaaagttgtgcatgtgtagctgaagcggatgaactgtcgtccggtcaaaaagttggacgccttcaactngttgaagttacacataggaagaaagatggatctcctatgac

SEQ ID NO: 46023 - DNA, 419 bp, Gossypium hirsutum
  unsure (1)..(419): unsure at all n locations
  Clone ID: LIB3493-003-P1-M1-E4
gagaaatcgttaccggaggtcttgattcgaagtttatcatatgggacttctcaaaagggtgcccatccaaaattgtggattttggcctgcccgacatgcatagtggtagtaatgctggacaatgtttaaatccagcttttgttcactcagtaaaagttccagatgttgatatgttggacaaaataggcaagatatgtgttgtggcaaggggtgatggtgttattgatgtgattaatacagaatcagaacttacagccacaaaacctaaaagttccacgaaatcccgaaaaggaactcagtccaaaggaagcgacggtggagttcccgatgaaaatggaagaaaatggttgcatttagattactctttaggtggtcatactgctgccgtgtcttgcatgacattntcgttgtttggagag

SEQ ID NO: 46024 - DNA, 378 bp, Gossypium hirsutum
  Clone ID: LIB3493-003-P1-M1-E7
cgactctgtcgtggaatctccaactggtcatgaaactgctgcacattatgaaaacaacgatgaagaagattgccatgaggacattgagaatgattatgacaacgagcatggggttgattcttctgaaaatgctgctgatgatttttgtaaaggtatcactgaggaagaagatgagggagatatcgatgaaatttcaagactccatggggaaaagttcattgatgattacagttgcagtgattttcagcttgtgactagggttaaggggaataatgaggatgattataatgatgtccaggatgactcatgcacatcatacgagtatcaaggggagcaggttgattcccatggtctgcctgagacggcgatggatgcaaa

SEQ ID NO: 46025 - DNA, 391 bp, Gossypium hirsutum
  Clone ID: LIB3493-003-P1-M1-F1
gttctgcatttcctttgggttttccgagtcagtttcccagttgattaatctctgaagcctaaattattgcccagttcatccaatttctggacttgaaaaaccctagattgctttgcggacatggctggccaatctgatcctcatatctctcttttctcagccgaagaggtggaatttatggctgaagatgaactgatagagattgtcccaaacatgcgaatggatcctctcaatttcatctgcggtgattttggtccatttttaccgcaaatagcatcccaggtgccgttgtggctcgcggtggctttaaagaagagaggaaaatgcgcaattcggcctcctcagtggatgtcagttgaaaatttgacccgggttttggaaggagaacgag

SEQ ID NO: 46026 - DNA, 361 bp, Gossypium hirsutum
  Clone ID: LIB3493-003-P1-M1-F10
gtactttcttcttgtatgagttgtctcctctcttcatctgccatgaggggaacttagggttttgtctatcttccttctttcctccccttatttcttcaaagctctctgtttccattgttttgaataaaaaaaaaattaaaacttcccccctaaatccctgagcttgaccgtagctcaaaaccctagcttccatggcaaaaacaagaccaggaatttctggcaccaagcccaaacaagggaagaaggacctcgactcttacaccatcagaggcaccaacaaagttgtcagagttggggattgtgttctgatgcgtcctttcgacactggtaagcccccgtatgtggcacgagttgagaaaat

SEQ ID NO: 46027 - DNA, 289 bp, Gossypium hirsutum
  unsure (1)..(289): unsure at all n locations
  Clone ID: LIB3493-003-P1-M1-F4
taaaacgtgcttagaaaattgctttataaaaacacaggaaacgctacagtttctgtcaacgtccatgggccttggtatataaccttgattggcaatatgtgattgtatttgtagatttgtggaaggaataagaagaaacataaatacaatgcacacctgtaaatataagtgtgtacaaactaaaaccctgcacttaactgtggcgtttcctgtgttttaataaaacgtgcttagaaaattgctctataaataaaaaacacttntattcctcacttaaaaagacactctg

SEQ ID NO: 46028 - DNA, 186 bp, Gossypium hirsutum
  Clone ID: LIB3493-003-P1-M1-G1
catgcttactatagttggtgtcacatcaaacacacatcctgctcaactcgctgtaaggtttgcttaatcttaaaggcctacaaaggtggcccttgttcctattgcactgtatggagaccccatcaatctatatcttgataccaattgtgctcttgatactatatgttatgtcgaagcccaacttat

SEQ ID NO: 46029 - DNA, 361 bp, Gossypium hirsutum
  Clone ID: LIB3493-003-P1-M1-G4
ctgaagctgagtttgttgatcaaatcattggtcttgtaactcgcatgcatgaacggcttgtcctaataaaacattcgcagacttgtagcccggttcccatacctgctgatttctgctgccccctttccctagagctaatgactgatccagtgattgtggcatcaggacaaacctatgagcgggctttcatcaagaaatggattggtcttgggctcattgtgtgccccaagacacggcagactttggctcataccaatcttatacctaattatacagtgaaggcactaattgcaaactggtgcgagtcaaacaatgtgaagttgcctgatcccatgaagttcatgagcccccttcttttgca

SEQ ID NO: 46030 - DNA, 394 bp, Gossypium hirsutum
  Clone ID: LIB3493-003-P1-M1-H5
gctatgatagcagttgaaattgattccgatgactcggttgaggagcatgttaaagtggaggcaaaggtagccaattacaaaaaatccagaccgtcaatgttggataatggtgaagcagaatcaggttatctgaaggaaaaagccaacgaagatgcgtattcctttggtaaaaagagaggaagagtgaagctaaagaagttgcccttgagcatttgttcctatagggatcgagtgaatcttaaggaagagatgattactaagaacatgggcaattcgactgctgttgttaaacctgtgtttttctctggaaccctctgctgatggttttcaaggactctgcatgtatcgaacaaaagtatatcatgcaatcataaaatttgagttatggtcatat

SEQ ID NO: 46031 - DNA, 353 bp, Gossypium hirsutum
  Clone ID: LIB3493-003-P1-M1-H6
ttatgatcaatgctctggtaaaataccggaagatgagatgttgaagaacaagattcttccaatgttcccaccagttttccaccaatggtttttaactactttttcagagcccgctgcttggtttagagctcgagttgcttatgctcacacaacagctgtttggtctatggttgggcatattgtgggtctgggtgaccgacatggggagaacattcttttcgattctaccacaagtgactgtgttcacgtcgattttagttgcttatttgataagggattgcaattggagaagcctgagctggtgcctttcaggctaacgcaaaacatgattgatggactgggcattactggat

SEQ ID NO: 46032 - DNA, 279 bp, Gossypium hirsutum
  Clone ID: LIB3493-041-P1-M1-A10
ttctagttcttctgacttttgggtgatggtagcagctttgaaggagttcattgcaaatgaaggtggtggggaggtaccacttgaggggtcgataccagatatgacatcttcaactgagcattatgtaaacttgcagaagatctatcaggctaaatctgaggctgattatcttgttcttgaagaacgagttaggaatattcttaagaaaattggtagagatccacatagtatccctaaggcgacaataaaaagcttcagcaaaaacgcttgaaagctcaa

SEQ ID NO: 46033 - DNA, 354 bp, Gossypium hirsutum
  Clone ID: LIB3493-041-P1-M1-A12
ggtttctactgctagtttaggttaggggctaattatttgggcttagggtttttactattgggctgttctgattgggtctatttttggatttgtaatggatttggtttattttgggtttgggtttgatttggtgggccgggcaaaatgggttcgtatagaggacagagaagatggccaatagatagacaaggtcggtgttccaattagggattggtgatgcataagaaactggagtttggagatggttcttggtcaacatagagcatgtgtttttgtcatgatccgtgagcaaagctaccagaagtactagatcgagatcggaacgatgcgagcaccagaaaacctattcacaaa

SEQ ID NO: 46034 - DNA, 305 bp, Gossypium hirsutum
  Clone ID: LIB3493-041-P1-M1-A3
cggacgcgtgggccgggagtgatttaatatggactcaatgcaagccttgtgcccaatgtttcgatcaatctaccccgattttcgaccctcaaaaatcttcgacgttcaccaagttgtcatgctcgagcgacctatgtgaagcacttccgcaatcaacatgcaacgatggatcatgtgagtatctctacacatacggtgattactcctcgacgcaaggggtcatggcaaccgaaacattcaaatttgacagtgtttcggttcctaatattgtattcgggtgcggagaagacaatgatggggacggt

SEQ ID NO: 46035 - DNA, 396 bp, Gossypium hirsutum
  unsure (1)..(396): unsure at all n locations
  Clone ID: LIB3493-041-P1-M1-A7
aaagaaaaaggaaattactttgtctgtgggaaaagtcggagagccgccatgtttggccgccggcggagtgcataaagaatctccccaagccaaacactgccagatctgtctttgaggataccatttattggccgttagggtttcactgtctcgattttccgatcgtagttcaactgaagcgttcaattacatgtcacctccataaatctgaattcttttgtttgcctcctaatttagcaatcgaatttttgatatttggcgtgatagaaatccaatcccactttgtgngcttgttttttacctacgaaagggacgagaaaaaaaatactggattcggtctcagaaatgggtgatttagtgcctatttacctcggcattcttgcttttttttgtact

SEQ ID NO: 46036 - DNA, 203 bp, Gossypium hirsutum
  Clone ID: LIB3493-041-P1-M1-A9
cagcttagttcaacttcacacccaccaccattggctgtttgtgatcattcgaaaaaaaatggtgaccggggaagaagttcttaagggttaacgtgcccaaaggccttgcaccgtgttgggcatctgcacattaaccccgccttattgtgttgatcagagcacataccctgactactattttcgtgttacaaatagtgagcaca

SEQ ID NO: 46037 - DNA, 371 bp, Gossypium hirsutum
  Clone ID: LIB3493-041-P1-M1-B12
tttttatttatttatttttaacatgtttgaggaatcagtttcagctcttcgtatatgaagctttcccctgttttcaaattctcatttgttttacgaacttagaatcatcaaaattaagggtttgaattcgataaaggaatcatttcgtaatcttaggaagaaagaatttagcggagtttcgggaccatgaatccgtattttccggtgaaggaagagtatccgaactcgagttattcacagtccgacgatgacccgccggtgatgatgatggggccgtcgccaccgcagccgatggagggtttttacgattcaaggccaccgtcgttcctcacgaagacctttgacattgttgatgagcctagcactaatta

SEQ ID NO: 46038 - DNA, 342 bp, Gossypium hirsutum
  Clone ID: LIB3493-041-P1-M1-B4
aaaaaaagagagagaaagagagaagctgttcactttagcacaatttctgtctcttcatcaatggtggttttggtggagctttacgcaaacccaatactcacccaaccaaatattctctcttatttttatttttcttttgatagagaaatgaaaggaaagacccagtaaattttttttctcttctaaactcctttcgattccaaataaggtttttttttcttttcattttcttggggttttgagggaaaaatggaaaacctataaatttttacttggaactggatcgaacctggttataaaggctttcctttataaatatttgcaaaaaattccgggttattt

SEQ ID NO: 46039 - DNA, 340 bp, Gossypium hirsutum
  Clone ID: LIB3493-041-P1-M1-B5
cggacgcgtgggtggtgaaccaaaagaggaaattgtggctggtgatcaagctctaattgatgttggagttgagggatctctactcaaacctcaatctcacccaaccaaatattctctcttatttttatttgtcttttgacagagaaatgaaaggaaatacccagtaaattttttttttcttctaatcttctttcgaatccaaataagtttttttttttcttttattttcttgggttttttaatgaaaatttgtaaacctataattttttactttaaactgttttttactttgttttaaagccttttctttctaaatttttgctaaattttcccgtttatt

SEQ ID NO: 46040 - DNA, 273 bp, Gossypium hirsutum
  unsure (1)..(273): unsure at all n locations
  Clone ID: LIB3493-041-P1-M1-B9
caatgggcttccacaggtgagcggcagctgcttgatggggaatgggtttgatnacatcaattcatgcatttcaaattctcaaatacttcttaacctcatatatatcactctaactttatctatcactacttcttttatataaatattactaacactcatactaattttttcaaattatttttatatatatttccctttactacaataatttcatttcactatttttataatttttcttctcaccttttctaattttttactttcccatatttt

SEQ ID NO: 46041 - DNA, 366 bp, Gossypium hirsutum
  Clone ID: LIB3493-041-P1-M1-C1
cctgtcggaggttgttcaagaaaaaccaaaagatcatcatcatcatccaaaaagcttcctgatttggttaataaccctaagatccatggaggccaagatctcaacttagcttacccagttagtgaagtttacaccacaagtatgtctgaatttgttaaagtccctaatagtagtgtagaaaacagtaagaaggaaattccttcttcattgttccctagatgtcatgtttcagctttggagttggttactggaatgtcatgcaaggggtggaatcctttcattcccatgccagttccagatccaaacacagtttatacgcctgggtttgccttgcacgagattaaaccagactctaattcctgcgtg

SEQ ID NO: 46042 - DNA, 435 bp, Gossypium hirsutum
  Clone ID: LIB3493-041-P1-M1-C4
aaaaaaagaagaagaagaggtgctacagaaaagaagagaaaaaaagagaagggaagagaaaaagaagccatgtaaattttatgccggaaaaaatttatcactgtcctctggcgactctccaatgagttgatagcaaagtgcagctggatcggtgaatgaagatacttccgttactggacttctgtcaattggttgcccaagctgtactgcaacatctttctagtacatcgtttatcttacattctgtaaatgttttgtgatggttttcggggggtgttctctttatatatttttggtttttttattaatattctctgtctatgtttcattattttttcttttgaattgttttataatatttctcctgtctatctcctatttattttatgggctatttggcttaatattttcttttattatttttttatttttttt

SEQ ID NO: 46043 - DNA, 272 bp, Gossypium hirsutum
  Clone ID: LIB3493-041-P1-M1-C7
ggtgtctcgattattctcttgcaatccaatttgttgaggagtaacacaggggcttaggacctaccgtgataccattggatgagtggctatacaacacaggagcgcaccctttacgaatctgtcaccggagtgatgcaaatcttgcagcattggaagggcaacatacacctgtgatcaaaatacgaagcacgataactgttcgattgggtggtcattaggatctgttttcagttttttgttccttgctgaactatgagattttaatcctttaa

SEQ ID NO: 46044 - DNA, 315 bp, Gossypium hirsutum
  Clone ID: LIB3493-041-P1-M1-C8
aaaaaaaaaaatggagggcaaagaggaggatgttaagctaggagccaagggttctctgagagacaacctattgttacatcaactcaatcatacacggactacaaggagcctccaccggcaccattggttgtgcctgtagagcttcaagtcttggtttttctacatattacggtatcgttataatatttttgctctctattctggtccttttcattgctattattgatatcttatttcatgttcttttattttattttatcctcgatttattaatcttatatttttacgtccatgttcatttttttttattgtttt

SEQ ID NO: 46045 - DNA, 303 bp, Gossypium hirsutum
  Clone ID: LIB3493-041-P1-M1-D1
gaaacctttggtcttgaaaatgaaacattttttcaaagacaaccatttgcgctaatgtttccaacaacaatgaatctagagatgatcacgagatgggttctagttctatgtcagcaaatggtgatattttgatccaaaacccttctttccattgcttcttacaaggcaaagatctcaaccctgctcgcgcgattatagctgagatgttggggacatttattttgatgttgtgcataagcgggatcatagcaagcgctaagcttacaggtggagatgcgttgtttgcgtatgcacttacggtgg

SEQ ID NO: 46046 - DNA, 134 bp, Gossypium hirsutum
  Clone ID: LIB3493-041-P1-M1-D5
tcccggtcacccacgcgtcgtgacgcttcggcttacgcttgtatgaaaccgtgactccttgaggtggttggaggttactaggtttgcgcaaatcatctcctgatatgcatatcactgattaggagttccaaata

SEQ ID NO: 46047 - DNA, 137 bp, Gossypium hirsutum
  Clone ID: LIB3493-041-P1-M1-D9
caaccattaattttgatttcctttttcaagtagttttggctgcttcagattctttgatggtttgtcattggaggtttcatactccctcattttactctaggtttaactagatttgaaagcttgtttgcatctcttat

SEQ ID NO: 46048 - DNA, 392 bp, Gossypium hirsutum
  Clone ID: LIB3493-041-P1-M1-E10
gccactcctacggtttcaatgcatcgataatcgcatacatcaacgacccggctagtgaatacaactgaccagcatgtcactgtgatactaatgccatggactggtatacaagtgttactgctgtgatgactcatgccaaaacagattgtactcagatgtatgaaacttgcttcgaacttgctgtgctctgcgaatgaacaatggcatagaaggtgtgctgcaagatttgcttatctggacatgtttgccaggtcggacgaattgcaagatgatacaatcgatcatgacatgttatgtccaactttgcacctgataccgtgcatattgttcttacaatgtctattctcaaagtatgcatgcctgggaagccacatgcgatttgggtgtgacag

SEQ ID NO: 46049 - DNA, 394 bp, Gossypium hirsutum
  Clone ID: LIB3493-041-P1-M1-E11
cagaggtggtagttggaatttttctagtgagaacaaggatgtactatatgctatatgttaaaaacggaccagaacggctcgattttccgatttgcatagaccaatatagaattgtcgatgctattgtgactcgtacctgaagtctgtgtagtccaatggtgccactacattacgaccggtctgtactctgcaataaacaattccgtagaaggtgtactgcaggatttgcttatctggacatttttgccaggtcggaccaattagcattgtgatacaatcaatcctgccatgttatctcccactttactcctgagtactgtgcatcttgttcttacaatgactattctcaaagagtgcttacctttgaagccacatgctattttattgttacagc

SEQ ID NO: 46050 - DNA, 197 bp, Gossypium hirsutum
  Clone ID: LIB3493-041-P1-M1-E8
actcgataaaggcaaccgtgccttcgaatgcagatgtctataactcaccagaaagcaaccctgttccatcagctggtcggtttcggcctgatatcagtggacttatgacacagattgttgaatttctagccaagaacggtgcacctttcaccataaacatctaccctttcctcagtttttatggaaatgatgacttt

SEQ ID NO: 46051 - DNA, 393 bp, Gossypium hirsutum
  Clone ID: LIB3493-041-P1-M1-F1
tgatgagaggatagaagtaaaaagaaagattgtaaggcagcggttgcgttggcatattgttgccatctgcatctacaactacaccgaaggcatcctcattgatactggatgcccctctagctaaggtatgattgccctgcgacatacaatctcctttgatcacattcattggtcctctaccagagcataacgcttcctatatccctccagactctattcccacataacgcgatgaaatcgtcatatcgtatccttggccaagcataatggccaatggataaccacattgagcacttggagatccattaccctgacatccattgagcatgtacccttattcaatgttccatcgcaccatctgattaacgctggtgctgattacatatcaggccc

SEQ ID NO: 46052 - DNA, 145 bp, Gossypium hirsutum
  Clone ID: LIB3493-041-P1-M1-F3
ggagggtgttatcaacttctacatgatcatgcattacactcattcacagatgcttgcgggttacatctgaatcaacgggctatatcgaatacataatctactttaaaagttgccctactacatcaggaatcacagcctagcgaca

SEQ ID NO: 46053 - DNA, 209 bp, Gossypium hirsutum
  Clone ID: LIB3493-041-P1-M1-F9
acccttgtgcttcttgcagttgtttgtgaccttcgttaacatttaaggggagttttttttgttgcactgcattcaacttctatatataattgattactcgttacgaaatatctatggctgcttaactctaaatttcataaaagagtccactgattggtttatagatcgaccataatatactcaaaattatatgacattattttatattg

SEQ ID NO: 46054 - DNA, 118 bp, Gossypium hirsutum
  Clone ID: LIB3493-041-P1-M1-G1
ttctcaacatactgcgataaccaaccctgtgtattaatccaagtttacgagggcgtacgagcacaaacaagagatcacaacttattttgcaaattcagactctccggcatggcaccgg

SEQ ID NO: 46055 - DNA, 465 bp, Gossypium hirsutum
  Clone ID: LIB3493-041-P1-M1-G12
attcttccttacgccagctccgctcaacaaaaattctatcgtttttaaccaaaccctaaattaaccaatcccagtctccattttaatcaacaaaggtatttttttgaaaactatcaacactgactcagctattccatcacttgcagactcactgctccactcttaagcaagcaaatggaccgacattcatccgacgaagacgacgatcgccaaaccttaatccaccaaaacgacaccaagcaccttccacgccaaatctcaaccagcccacgcgctttcaccgctccaagatccggtttccacatcgaagagctggaatctcaaatccggcgacgtttcaagctcaccttcaacaagcgttacctcttcgccatctttctgcctttcgtcctcattcctatcttactctccaccgacattcgtttcctcttttcttccaacatttcctcccttaaattcaataag

SEQ ID NO: 46056 - DNA, 336 bp, Gossypium hirsutum
  Clone ID: LIB3493-041-P1-M1-G7
gggaacccggttcaacgatgataatcccgggtcacgaacacgaaatattgtcgtgtgattggaataaatatgatgaatgcctgcttgctagttcaagtgtagataagagtattataatttgggatgtgagaaactatagggtcccggttttggtgcgctgtggacaggggtatcctgtggcgaatattcaactccacttgtatctgaggtagatggggggcccctgtggtttaccaatgaccttgacattgttgatgaaggaaacatatattttacttgatgcattagtaaattccatattaggtacttcatgctgcttgttttttcttcagagaa

SEQ ID NO: 46057 - DNA, 140 bp, Gossypium hirsutum
  Clone ID: LIB3493-041-P1-M1-H10
gggtaaacaaggaaggagaagaatgggttcttatgctctgtttttgatggctctctttctatgtaaatgcttggctgttgcaatcttggacccactcgattttttagctttacagtccattatgaatgtcttcaccttta

SEQ ID NO: 46058 - DNA, 188 bp, Gossypium hirsutum
  Clone ID: LIB3493-041-P1-M1-H3
cgcatgtctccctggcacgtgctcgtcatggtttctgtttggttaacgagaaaatgttggaaattgatagaattaaaataaaaaaaacatcttttaaattaactgaagatcatcggtgatttctaggatgtgcgttgagtcttgttcgatgttatttttttcattcttacttatttaacaattttttt

SEQ ID NO: 46059 - DNA, 260 bp, Gossypium hirsutum
  Clone ID: LIB3493-041-P1-M1-H6
ctcagtggaaatatatcaggaactgacccattgaaggacaaccgcttacttctggaagggaaagctttagatgacacagatgaagcaagacacacggctgcagttgttaatgagttatcctgggagatttcgaggatactggtgtctcacccgttgaatgcaaaaagattagcagaagggaagaacattgctaacattgtccttctaagaggctgtggtattcgaatcgaggatccttcatattaaaagatacatgactt

SEQ ID NO: 46060 - DNA, 433 bp, Gossypium hirsutum
  Clone ID: LIB3493-041-P1-M1-H7
gctggttgcagaagttgctggtgaccctcggattgatttccttatttcgatcttatctttctcttcttgtcatccatgtcgtggataatacagataggaacctcatcacgttccgctcttgcatctgattcgtagcttcggagtgaaagaagagagaccattttgtttggtttccaaactgagtctcggaccaaattcgtttaagctaatatttcatggtaacactacttaatatgcaaaataattttagtgttcatttccattagaagcaaaaaacaaaaaaaagtcttgaatgataaatctcaatgattcattgggctgcattgattggttgtattcatgggttggtgatgattaggtgatggtgatattcagtccattgtgtcagatggttctaatgttattcagaagtatgttctatgcatctcgctga

SEQ ID NO: 46061 - DNA, 246 bp, Gossypium hirsutum
  Clone ID: LIB3493-041-P1-M1-H8
gtaaatacattcattcccattagtacttccttaccaatcttgttcttcttctttcttctccaacatttattgcctttgaacttccaagaaatggcaaaaatcgttgttgcattagccatcttacttggattctgctctcttgctagcaccgtgcttgccttcacggcttctggctggactaaagctcatgccacattttatggaggcggcgatgctttgggaactatggggggagcttgtgtgttt

SEQ ID NO: 46062 - DNA, 328 bp, Gossypium hirsutum
  Clone ID: LIB3493-028-P1-M1-A4
tcaatcctcaatctatttccatttttaaagaaactgtttaatatcatagaagaaaaaaaaaactcttgaaaaatgatgatggttgcttgttaccatccaaaatcttgccttgaatcaaactctacattgacaccaaatctttatatcttattattgcattaagttttttcaaagaaactctttttgagatattgttcttcactataaatccttttccccattaaataaaacacactaacttaaataccctaatcattttttcttttcacttttctcttccatctccaataccccacttttctcatcatctttctccctttattataca

SEQ ID NO: 46063 - DNA, 467 bp, Gossypium hirsutum
  unsure (1)..(467): unsure at all n locations
  Clone ID: LIB3493-028-P1-M1-A6
ctttcaagtggcctcagagccnanatgggtgcctggtacagcaatatcccccacagagaactcagcattgagaaggctattcagaattggattcaattagagggtaatcgttttagattccctgggggaggtaccatgttccctcggggagctgatgcatatatcgatgatattggccggctcattcctcttactgatggaactattagaacagcaattgatactggctgtggggttgcaagttttggtgcttacctcttgaataggaatatcttgacaatgtcttttgctccaagagatacgcacgaagcacaggtccagtttgcgctggaacgtggagttccagcaatgattggaattatggggtcacagaggcttccataccccgctagggcttttgacttggctcattgttctcgctgcttgatcccttggcaaaaatatgatggtttgtacctcgctgaaat

SEQ ID NO: 46064 - DNA, 120 bp, Gossypium hirsutum
  unsure (1)..(120): unsure at all n locations
  Clone ID: LIB3493-028-P1-M1-A8
ctcagtcaaacattttgctcagctacgttaaatttcctatatatcccttcactctngcatgttacaacaataaatgttgactctctacacacgtttcaaataagctcatgagagaattct

SEQ ID NO: 46065 - DNA, 246 bp, Gossypium hirsutum
  Clone ID: LIB3493-028-P1-M1-A9
gtcctgcccaccctcaaaacggctcaggcggaagtagggtacagcgaacgaacaaccaccgtacgtcacatgatgtccggtcccacggctgtttgtctggataatctgggagccggtgtgccgcttcatactatttgtactcataaacgcataaaggctgctaggataacagcctctggtcaatggaacaatggccgcaagggaagtcagcataatggatccaaaacctacgaaaaaggatttgct

SEQ ID NO: 46066 - DNA, 321 bp, Gossypium hirsutum
  Clone ID: LIB3493-028-P1-M1-B7
gcgatcagcccactgtgttcgtccccgcatcacaagcgccagcatcaaattggcgcaagacctagtggcccaaaccacgaatacccccgccgttgcgtacctcatcacaccgatcccctgcggcatgaaaagcgacaccgccgataatatcaccaccggcaacatacagtaaccaaccacgctcgtacacgtgtgcagatctaggttgccgttgttgcgacccgccaacatgttaaaaaccacgtataggaaaatttacgataccaccatccaccccaacaatatcccgaactggatcttgccctcttgagctgcaataat

SEQ ID NO: 46067 - DNA, 424 bp, Gossypium hirsutum
  unsure (1)..(424): unsure at all n locations
  Clone ID: LIB3493-028-P1-M1-C6
gccaaaccccacttcgagaattcattcgccgatgcgaacaaggacttgaacaatgcctanaagactaaagaaaagaagatttcaactcgttcaatctccaatccttttcgcaaacgaaagaagcaatagaagaacaatgccgacgactctacacattcaccatcttcaaaatatttcaagacgagctcttacaatcttacagttacatcgggataaaaacctatgaagaaggaacgatatgccggtacttagttagacggtctgggaatgaaaatgacaagcacgccgtcacattcagtgcggtcaacctcagcgttaattgtagctgtcaaatgttcgaattcgaaggcgtattatgcagacatgtcttgaaagtgttcaaattgttgaacatacgagaactcccgtctcaatatatcttacc

SEQ ID NO: 46068 - DNA, 201 bp, Gossypium hirsutum
  unsure (1)..(201): unsure at all n locations
  Clone ID: LIB3493-028-P1-M1-C7
ccgggaccgtcantcttccgaggcaccgtcttttctagaaaaagggaaagctcaaganagaagaccatggccgatcaacttacggacgatcagatctctgagttcaaggaggcttgcggcctctttgacatttatttctatggtcgcattactaccaacgagctggggactgtgatgcggtcacttcgacctaactctact

SEQ ID NO: 46069 - DNA, 223 bp, Gossypium hirsutum
  unsure (1)..(223): unsure at all n locations
  Clone ID: LIB3493-028-P1-M1-C8
tgaagaaacctatttntatataganccggtttaattaagcgcaagaaactacattanctacnccnccttaaggatgaatgctgttccatgcaatcaaccaggtcgatcctactataattgtggcattttttttttttctaatccatacactaaacaatacatcgtcttaacccttttccgtctattcatattttaaaattaatcaatttttatttatttctca

SEQ ID NO: 46070 - DNA, 275 bp, Gossypium hirsutum
  Clone ID: LIB3493-028-P1-M1-D2
gctggccactgttttttttttcttcctgattatggtaccttcatacaagattatgtttcttttcttctttttttagtatttcagtcaaattgatgtttgcttaaactcttgtctaatttcaaaattttcctgctttttattttttggtttctcatactttgcctgattttccattattttcgaattttttttttttgatactaaatcatttcttaaagggatctacataaacttactttctgctttcccccccttttttttagaattcggaattt

SEQ ID NO: 46071 - DNA, 444 bp, Gossypium hirsutum
  Clone ID: LIB3493-028-P1-M1-D9
cggacgcgtggggttttgctggattcgccattcggaaaaaaaaagaacagaaagttctctctgttgatcaaagttcacgtaaaagagacttgtcaactagctgatggacgttgaacagtactttgaagatactgaagcttatgaccctccaagtacagaagggaaaagatccttggacaagtgggagaattcaccaggtccgttcacaggttccgatgatgatccctctgctggttttgactgcaacatctgcctagactcggtgcaggatccggtggttactctatgcggtcacctctattgttggccctgcatttacaaatggcttcattgtccgaccatctccactgataacctagaccagaaacagcagcaatgccctgtgtgcaaagctgaactttcaaataccacactgattcctctttatggcagaggccaaacaac

SEQ ID NO: 46072 - DNA, 478 bp, Gossypium hirsutum
  Clone ID: LIB3493-028-P1-M1-E12
ggataatgccttttttttcggggtatggatatatctctatgtatatatgtcaatggttatctctatctatagctgttttagccgatgaaatatctaataacaaaactgagaacataagatcaaaaaaaaaggtgtatttaatatgacatgacgtattggaaggacacagataaaattgtttccacgagtttatcgaaaggtactatcaactgcactgaccttggagaaaattgaatatcagaagctattttcttgagaaaagctaaaggcgatgtatatggcggatgctaataatgaggctaacaaggatggagggtcgaatcatattgctgcacacacatttactattcgtgaattggcagctgcaacaaagaatttccgggctgattacattttgggtgaaggaggttctatgtcgattgtataaaggacgattgggttatcacttaattaaatttgtgggttatgaaaattattt

SEQ ID NO: 46073 - DNA, 164 bp, Gossypium hirsutum
  unsure (1)..(164): unsure at all n locations
  Clone ID: LIB3493-028-P1-M1-E7
taaaaagagtttctctctttctgacctcgcattattcatcttccagaagactctcctnatgcaatccactaaaatcattctcgtaaggactcctcccttcgccgatcttcattcagagctttttccacaccaattttgaacatattctgcataagactcaaaat

SEQ ID NO: 46074 - DNA, 359 bp, Gossypium hirsutum
  unsure (1)..(359): unsure at all n locations
  Clone ID: LIB3493-028-P1-M1-F4
gggcgaaacaaaagagctgtactgacaggtaaagacaggggagttgatcactgttctttttcgagtttcnaagtgcaccttgttggtttctgcacttaacaagactttttctctttcgaactcagcactgtgaatgaaaccaggaatttctattctttgtatcaatggcgtttaggcgtagcctttccaggagagcaaccctaatcgctagacgatgtcaaccgtcattttcctacattgtccattaagattaccgttaaaatcatcctttaatctagttctactctcatccaaaacctagctatttgtttcatcatatatcttttggaactgggtctagtaatctattattaggcttt

SEQ ID NO: 46075 - DNA, 182 bp, Gossypium hirsutum
  unsure (1)..(182): unsure at all n locations
  Clone ID: LIB3493-028-P1-M1-G10
cagcgaaccggtctccataccgaagaagatactcacaagtataagcaaattanatcnaggttctccgataaggtcttcaatttgatattggcttggtagttgcttctccaaaattcaatatggttgttttttttttttctgttctaaacaaaaatagcttatttcttttttcttgttaattt

SEQ ID NO: 46076 - DNA, 292 bp, Gossypium hirsutum
  unsure (1)..(292): unsure at all n locations
  Clone ID: LIB3493-028-P1-M1-G12
ttcgactggcagcactaacacggagacgatggaagggaagagagaaaaactaagaagatggaggctttgggatggtggttaatgctggtgggttcacttnnattagcattcgtttggtgcggctttttttttattttggcttttcggcttgatgatatttctaacaccacttttgttttaagttcttgtgattagattattgaatttttttttttaactactatttttcttcttctatgatttattttttgtatttttatttttatatgataattatttttttttatttatt

SEQ ID NO: 46077 - DNA, 133 bp, Gossypium hirsutum
  unsure (1)..(133): unsure at all n locations
  Clone ID: LIB3493-028-P1-M1-G3
tatggcccctgaggttcttgaangtaagccctagaacatatcatgtgatgtctacanctttngcatttgcttgtgggaaatttattgctgctatatgccttatccagaccttatctttgccgatgtgtcattt

SEQ ID NO: 46078 - DNA, 316 bp, Gossypium hirsutum
  unsure (1)..(316): unsure at all n locations
  Clone ID: LIB3493-028-P1-M1-G6
cgttgatctacaccttcntggcaccacgcacccgtntcttatcaaaatatacggagttcaccntaaactttaccnnaatatcttctcattttctccagaaactttcttcttcaaacaacaagttcacttacaactttctattgccatctttaactatcaaaacaattacttcttctcttattttatcatttttattctatacctttacttacatattaaaaaattatattcttacaataaatactattaacttctcttctttctaacttattcaaactaatataatatattcttatcataatatatttaaatttat

SEQ ID NO: 46079 - DNA, 355 bp, Gossypium hirsutum
  Clone ID: LIB3493-028-P1-M1-G7
cttagatgcagtatttcaaatggtctagtctctcatcaatgtgggttttgttgcctttaaattgtgttctctttattttcctacaattgaggatatggtccatttttattgtgaactctttaggcatttgttcaagtccgttaaattgtgctgttcttttaatcaaaagttaaagaaaaaagaattattgttaaaaaaaaaatataaaataaattttaaataaaaaaatatataaaaaaaaaaaagaaaaatattataaaaatttataaattaagtatataataatataataaaaatgaagaagaattatataattttgatatgttagggggtgtaaatgaataatgtagtatat

SEQ ID NO: 46080 - DNA, 151 bp, Gossypium hirsutum
  unsure (1)..(151): unsure at all n locations
  Clone ID: LIB3493-028-P1-M1-H10
gtaatttgtcgaggcaaaaagcagcttgtcgtgtttggcttgagccattattcttnaattgcatgtatgatcaaggaatgttaatgcaatattgttancactggtcattttagttggtggatcttttttttttttttttatattttatata

SEQ ID NO: 46081 - DNA, 277 bp, Gossypium hirsutum
  Clone ID: LIB3582-001-P1-K1-A10
ggctggagattcaagtgaaccttctccagttttcaaagcagatcaaaatgtactgtgaggaggtctggaaccagtccaagcggtccttcatcgccttcttcttcacagcatcggtcacttcctcaacccagaacccaaatcgttgaaaccttcttccttccattgccaatatgtgcgccgcttcattagccaaccggggagcaaaacgggaatcgccttccacaatcaaatgtctgagccccattattcctgcaaaaattaccactctttcccatgt

SEQ ID NO: 46082 - DNA, 274 bp, Gossypium hirsutum
  Clone ID: LIB3582-001-P1-K1-A12
accgtccggattcccgtcgcccacgcgtcaaaaaattcattaaagaaaaaaaagctccaaattcaaagtcttcactttgcccaaatctgtcttttagctcttgtttattaatcgatctgctgggtgttttctgctggagaggtgaggagatccaaatcgagcgcatttaacctaccgcgtttgtgaagggaatccagatgctggatgatgcttgatatatgttaaacctttggaaaggaccgccacgggaccggctgagcctatttcttttcat

SEQ ID NO: 46083 - DNA, 248 bp, Gossypium hirsutum
  unsure (1)..(248): unsure at all n locations
  Clone ID: LIB3582-001-P1-K1-A6
accgtccgnattcccggacgacccatcctctccgtcttcacacaagctcaatatcaccacatataagcttgttcataaagagtctgctgtggccctgtgcacgtgtggccgaactagtttgcaggtatggtgtaccttgtgaatggatattagacactgctgctattaaccatatgttgtctggctttcattgtttacaatctgctgtctcatgtgtattatctccatcttacgtccggatacctact

SEQ ID NO: 46084 - DNA, 199 bp, Gossypium hirsutum
  Clone ID: LIB3582-001-P1-K1-A8
cccacgctccgcggacctgggcataaatttgcattgtgaggcttatgagcatgtcatttatactgtcacaaaactgtgatggtcttcatgaagactgaaggtgtaactgttcttaatatatctagcgactggactgcaagccgtcgcaattttgcgcactgatggaagctactggaatggtttccgtgccactgttgat

SEQ ID NO: 46085 - DNA, 166 bp, Gossypium hirsutum
  unsure (1)..(166): unsure at all n locations
  Clone ID: LIB3582-001-P1-K1-B1
cccacgcgtccgcccacgcgtccgtttctattgtaatatcttcttcctaatcaatctgtccgtcattttaggcagtttaatactatgactttgttaattacagcaattntgcttagcataatttacattgaaagtttgtcggcgtctttggttctaacttatttgt

SEQ ID NO: 46086 - DNA, 127 bp, Gossypium hirsutum
  Clone ID: LIB3582-001-P1-K1-B9
taccgccgattcccggtcgcccacgcgtcgtacgctttacctgctttggtcgccaatctaaagactcctgaggacagtttgagtctgatgtaagaaagtacatacatgggcatggctgcacttggag

SEQ ID NO: 46087 - DNA, 148 bp, Gossypium hirsutum
  Clone ID: LIB3582-001-P1-K1-C2
aaacgagtagatagattaaggggaagtgacctttgattagagtttccaagttgattttgtgtagtgttctcctttgtaatagtacttttagttttattattacatgatgaaattcagatatgtaaatatattctttcaactttattac

SEQ ID NO: 46088 - DNA, 178 bp, Gossypium hirsutum
  Clone ID: LIB3582-001-P1-K1-C9
gtcacgctgtgacaaccttgctgggcaatcttgccacctgcagagagattccattcgctgcgactgggtccgacgccttctccgaacggccaacatggttggggtggagccttcctacaaagcagagctggagaaaagaatttcgtggcagcttgaccaagcatcaactgaagaactc

SEQ ID NO: 46089 - DNA, 217 bp, Gossypium hirsutum
  Clone ID: LIB3582-001-P1-K1-D9
caatagacagcaaattaacgtttgcagctgtcgggtctctgtgtctttaaactactgttttcttctccctttttattttccttttctggctttctcttttattaaccaactcatcaaataataacaacaggcaacaacttctgtaacatcataaacaaggcttcatctcattctctgaccctcttcaatgattcttttgtggtgaacaaaaagggtg

SEQ ID NO: 46090 - DNA, 203 bp, Gossypium hirsutum
  Clone ID: LIB3582-001-P1-K1-E3
cgactaaaaacccatagcattcacggaagatatgattgcagtcctcctcttccagtttacaacgaggacatcaagcatctgcaactattcgttttttcttcagattagcaaaagtagaaaagtagttccaagagaagccccatattgaagctttgatttttgaaggaatttgtagattccaaaagtttttatgtaaaaagctt

SEQ ID NO: 46091 - DNA, 212 bp, Gossypium hirsutum
  Clone ID: LIB3582-001-P1-K1-E7
cggccgcgtgggtgcaagaccagcaggaactttttggaagaatttcgaaggttgacaggaatagagcctgatgatgggtggttcgatgtatctccctacgacaggcagtctaatgatagagctggtgatcaggaatgcaaagttattgttgaacaagaaggtcaagatggttattcgagcctgagtggcaataattcaagtggggggaattt

SEQ ID NO: 46092 - DNA, 190 bp, Gossypium hirsutum
  Clone ID: LIB3582-001-P1-K1-E8
ttgtcatctgctgtcactcactccccccttctcttctttcacctttcttctctctttaccctggctttctgccgtataaaccgcgttgttttaagatccagcaccaaaaaaaaaaccaatcttctggtatctgatcaatgtggttggagtagaaattttcaaaaggtgtttggatttgggtttctagatg

SEQ ID NO: 46093 - DNA, 255 bp, Gossypium hirsutum
  Clone ID: LIB3582-001-P1-K1-E9
gcttactttggtggcattggagagcatgttatgctgaccatcaacgagaaattgaatgtgcttgtacaaggaacgtgataaggcattgcacggtttcaaggattttctggctactgcaaaggactttgatggccagtctgtgagcactggtttattcccttgacttgtgctgcactactagctattttaggtgcgttggtccgtaaactttggccttccttatttttttcttttttaatgattggggggattaat

SEQ ID NO: 46094 - DNA, 183 bp, Gossypium hirsutum
  Clone ID: LIB3582-001-P1-K1-F2
cccacgcgtccgctagactcaggagtaaagaaatgtgataaaaattaatttacgagcattggggcagaagtgcaaatatgcaaaagtttatgggtcaaaatgaaaatttgtaaaaatatgatttttagacccatatgaatattgtgactgattggtaggctaaatgtgatgttatagatgatg

SEQ ID NO: 46095 - DNA, 364 bp, Gossypium hirsutum
  Clone ID: LIB3582-001-P1-K1-F3
cggacgcgtgggcggacgcgtgggctgttctagatcgcgagggccgcccttttttttttttgttcaggtccccatcatgatgctgcctactcaactcaacttccagctctcataaagaaagactgcgacatataaacgctgcttttcccttaaagatatggaaatgcaaattaagaatgaaacatttgttgaggcagacttaagataacccaatcaaggtttttgaattgttataaaaaaataaaagggtcatatttgtccaagaacttgaaagaaaagccttaaaaaaaaaattcttttttttaaggggggggggggggagaaaaatttccctgttgtgacaattataaaaacgacttttttt

SEQ ID NO: 46096 - DNA, 347 bp, Gossypium hirsutum
  Clone ID: LIB3582-001-P1-K1-F8
cgccctctttcctctgcaagtaaacacagtcaatcccaaaatcactgcttttcttcttgctgagagtactattttcatacttccatcttatcaaaaccaatcccgtcccactgctcaccctcttctgttacagagattcctttcggacttctcttcttcataacatatttcaaaaggagaaaagcttcctccccaaaggcctttcccaagccctaaccacaggaaaacgtttttgtactactttaatggaaacttcccccccttccgtcctcttttttaggaaaaaacccccttcttttaacccgtgggggggggggggggaaaaaaaatctttttcaaatacctca

SEQ ID NO: 46097 - DNA, 324 bp, Gossypium hirsutum
  Clone ID: LIB3582-001-P1-K1-G4
gactgctggagctgccattagtgctcatatggacattgataaagtgactttcacagggtctacggaagttgggcgtaagataatggcagcagcggcagcaagtaatctaaagccagtgtcactggagttgggaggcaaatcgcctctcttaatatttgatgatgctgatattgaccaggctgcagatattgctttcagaggcatgttttacaacaaaggagaaatttgtgtggcgagttctcgtgtttatgttcaagaaggtatttatgaaaaacttgtgaaaaaattggtagagaaggcaaaagcaactgttgttggggaccc

SEQ ID NO: 46098 - DNA, 230 bp, Gossypium hirsutum
  Clone ID: LIB3582-001-P1-K1-H11
tctggatctccagacccagcttgaaacaaggaacattgaagtagataatctttcacacagagttgggtcgttggagtcggagaagaccagcttatgtggtcaactggcaactttgacttccattttggaaaggaatgaggaaaatttggaaatctcaaaggaaccgcaatcgattagggatcttgaaatggaagttgtggagttgaggaggttgaacaaggatttacaga

SEQ ID NO: 46099 - DNA, 284 bp, Gossypium hirsutum
  Clone ID: LIB3582-001-P1-K1-H2
cccacgcgtccgacttgatcaggctgataaagagatacaaaagtggaataaagccaggtttagagctgaccgatgaattaaaagcaaaaagggcaaagcgatcagagatgctttcgcaagtgagagcgctgaatgttgattttgagcaatttaagacaattttagatgagaaaaaaaaggaaatagaaccactgcagcaggctttaggcaagcttcgcaataataaagaatgtgataatcgacttaagttatgtgcatctgaggaggagcttgatttttttatc

SEQ ID NO: 46100 - DNA, 173 bp, Gossypium hirsutum
  unsure (1)..(173): unsure at all n locations
  Clone ID: LIB3582-002-P1-K1-A11
gtgcaggtatgactagtagtttcatcgttccatacttttgttttctctttaagtcaggggtgggtatgaaatatttgactgtaaaaatatccttgtatgacagtcncagcacaaaaaataggaaaaaagtacattgagntcgtacatcttttttataatagtactaattatct

SEQ ID NO: 46101 - DNA, 116 bp, Gossypium hirsutum
  unsure (1)..(116): unsure at all n locations
  Clone ID: LIB3582-002-P1-K1-A5
ccattaatcacctttacaaaaccctacctcattcactcactgccgccaatttcacccaattatgtggtattaaccgtcgaaaacgatgtcnnacaacnaggcgaaaggaaaaggag

SEQ ID NO: 46102 - DNA, 140 bp, Gossypium hirsutum
  Clone ID: LIB3582-002-P1-K1-A9
cagtaccgtccgatcccgtcgacccacctcgccacgcgtcgtttttgttcactgctccttgcgcagcgaaacctggggaagctcgggcatgcttagtcaattcagtttatcatcattatcccggttacctgcctgttcac

SEQ ID NO: 46103 - DNA, 204 bp, Gossypium hirsutum
  unsure (1)..(204): unsure at all n locations
  Clone ID: LIB3582-002-P1-K1-B11
taccgtccgnatcccggtcgacccacctccgaaaaaatacagacttatagtaatcatggtgaggaacagtcagttttcgtattgggtcttttctcttttctttcctttggcttgcttctctgccagacttcccgcagaagagcgaggatgatcctcacagaggtcgaggactgccggaagctatcctttgttacacctgtcaaa

SEQ ID NO: 46104 - DNA, 271 bp, Gossypium hirsutum
  unsure (1)..(271): unsure at all n locations
  Clone ID: LIB3582-002-P1-K1-B12
ggaaggacaaattaaagagtttggaagataaatattccgggcttactttcacaacacacgtcttncaaaagatgaagatcacacatggaacataccccattaccataaccatgtgaaagtgcagagataggcttgtcacatgagaactacatccttaacgtaggaagaatacccatcttttcccataaaaccactctttaccctcttattgcctaaacaaatgtgacaccaccttttttatttccaagttctaatattctacgaggggggg

SEQ ID NO: 46105 - DNA, 257 bp, Gossypium hirsutum
  Clone ID: LIB3582-002-P1-K1-B8
ccccacatgctcacaacatgcatctgaggaagatgaaagagaggaacctggaggaggagggagaaagtcacgaggcggattaaaaaaaacattctgctccatgttactgaaacacatgtcctctgcttcatttgctcatgtgaccaaccctcgatgtggtcatatcatcacagttaacagtgttaattttaccattcttcattacctctaacttagcgcctttcagggcagttcttttccaattctcgatatcccat

SEQ ID NO: 46106 - DNA, 227 bp, Gossypium hirsutum
  Clone ID: LIB3582-002-P1-K1-C10
cctgcgtaccgtccgattcccgtcgaccacgcgtcgccaccgtcggcagctaacactgtttggtgggaggcaaagccaccaagcgagggacaggaatgtcgtaaccaccaaacaaataagcattgaccaaaaccactttcaagagaaaagtgcaagatcccttaattatgaccaaactctgtactcaccaaacggcgctctattagttgccacaaaatacgtcatct

SEQ ID NO: 46107 - DNA, 275 bp, Gossypium hirsutum
  Clone ID: LIB3582-002-P1-K1-C11
gtttcatctttatttcaaatttgcttctttccttcttccattatttcttcggggaggggtaactttaactcttttcaggaggcagactgatggaccagctatgggcttacacctagagctctggaagggagcctactgccattcaaaactcggatttcatcactgggccgggggtcattgctccacatgctcgagtctgatagcaacgactacatcatggcttcgactgaagagaactagcccagactaactacaggggggggggggggcccttc

SEQ ID NO: 46108 - DNA, 236 bp, Gossypium hirsutum
  unsure (1)..(236): unsure at all n locations
  Clone ID: LIB3582-002-P1-K1-D10
cggacgctggtttaacantaccaaacatgtaatatccaaaaacccctaaaacggaggggattatagcaatttctttgatttctcctataaaatcaagactatgaaagaagacgactgcaccggaccttcgaacagagaactgtacgcactgttacacctatcaccggaagcctccgatgaagaaatcctcatagcttattctcaatggtctcaattttaccatcctcacatatacc

SEQ ID NO: 46109 - DNA, 317 bp, Gossypium hirsutum
  Clone ID: LIB3582-002-P1-K1-D3
aaattgccaggtcatgaggaatcatataatccttctttagaatacataccaacacagaagagatcgactcttatagctgatgtacgaaaaatcgccctaatttattcctaaaaagtcaatcctttagaagcatcccggctatgagaatgctataaggactcatttgaacgatgcttggatctatacttggccctagagtacggaagaaacgtattaatatcgaccctgaatcgtcagcccaagttacctcgtgaatgatctaggccttacccactacatgtttgtgggttggaggtatgagggtgcacttttgttaa

SEQ ID NO: 46110 - DNA, 230 bp, Gossypium hirsutum
  Clone ID: LIB3582-002-P1-K1-D5
tccacgcgtccgtccacgcgtccggttttctctacttccacttcttatactgctctccagtcgctgtccttgccgcaaacatttaacaaaaaaacacccttttgtatacccaatgctagtgtatccacacgcgttctattttcccatgtcaagacactcccgcatcgagaatacgctactctgcttcgctcaatgtccctcggaagttatctgtccctatgttaaaccca

SEQ ID NO: 46111 - DNA, 331 bp, Gossypium hirsutum
  Clone ID: LIB3582-002-P1-K1-D6
ctttctcaatgctcatcttttcctatctcaataatgtcctcctgaactggtgaacaaagacgtctttagaacttagatatctgactttcagcaatatcagacacttgttgtatctaacttgaattatgaaggcctccttggtgcttgaacatatagttcctaggttgaaacagaagcctttagtatcaagtagacctgttaattgggcgggtcaagttggttttggacctgatcaatctgggccggataaatacaggttttaaaatcttttggccatttagggtctcgccctgatgggggggggggggggttattcttataccattttcta

SEQ ID NO: 46112 - DNA, 285 bp, Gossypium hirsutum
  Clone ID: LIB3582-002-P1-K1-D8
tgcgtaccgtccgattcccgtcgacccacctcgaaaattaggtttccgctgcggggtgaaataaggcgtcactcagggaagggtagagctcacggaaactttagtggagaactggcgtgatcctaccacaacctgtcaggcgatgcccacatcaacctctcaaactacagagatcttccaagtttgaaccgtgaacctgtcgatctggtgcttttgccagatttgttacttcctcaatgtcgctacccttattgccgggggggggggctttttcctcccttcttt

SEQ ID NO: 46113 - DNA, 221 bp, Gossypium hirsutum
  unsure (1)..(221): unsure at all n locations
  Clone ID: LIB3582-002-P1-K1-D9
gttttatatttttgggattattacttttatatgaccgaatgtgtgttttgtggggggactagtttagccataattgttcatggtaatgacacttnctggattcaggatctcctcaggtaatttcaatgttaggcaattcttatcctagtgctgggggtacactttcccagggccatgttcaagctgtgaacaatctctgctctcttgagaatgtcgactga

SEQ ID NO: 46114 - DNA, 110 bp, Gossypium hirsutum
  Clone ID: LIB3582-002-P1-K1-E10
gccaccgtcgtatactgttgttatgcaggatcccccttgctttgaggagcggacctaccgatctgacatttcttcaaacctgctaaaatgatgtaccttcatttacatac

SEQ ID NO: 46115 - DNA, 269 bp, Gossypium hirsutum
  Clone ID: LIB3582-002-P1-K1-E11
gcaaaaccccagttattagaaacctttttccgagaagcagagaaaatcacctgttagattgtagatatcaaatggcttctgatggcacacagcagtcctctcaaaacaggatgcacaccaggaaagacatgtcatgaatcctatctgagtactacagcccaactaccaccttcaacaagcttaagggaaggtggcattagtactggagggattcggggattggccagcagttgccacttgtcctcgaggatcacgtgtcttaggggggg

SEQ ID NO: 46116 - DNA, 154 bp, Gossypium hirsutum
  Clone ID: LIB3582-002-P1-K1-F10
accgtccgattcccgtcgcccacgctccggcagcaatgcttttctaaaaagcttgcacgtcgtaaaagagggaatttgataatggtgggtaattataaaaaacatggttctctgctgctctctatttttcgtcctcctctctgctcctctgctc

SEQ ID NO: 46117 - DNA, 336 bp, Gossypium hirsutum
  unsure (1)..(336): unsure at all n locations
  Clone ID: LIB3582-002-P1-K1-F11
gggaccgtgggcagtcatattcgagcctttatcggaaattcttgagcctggttgatacacaaggagcagctagacagctgttggggaggcaaagccgcaagcagcaggacagggaatgttcgaagccagcngaacaaataaggcattggccagaagctcttaccaagggagaaaagggcagagattcgcttaacttatggccaaccctcgtactcaccaaaacggcgttcttgaggcttgccactgaattcggggggggggacatatgtaccgttcaccttgatttaaccaaggataatcttgtgccgactacattcaaggctcattttgatcctt

SEQ ID NO: 46118 - DNA, 239 bp, Gossypium hirsutum
  Clone ID: LIB3582-002-P1-K1-F7
gggtaacccgtttggctaagcatccccttgctgcctgtaaaattgatggaaagttttggtggtaaagttggaatcatccaagccctgtatgagtttttcaatatttttcatttcggggttcaaggatttgagccggtattggcaatttatagttagtttgaagctcataacggaaaagcgaggtgcaaagctcaaatgtatcgatggtattgcaattaagttttgtggggatctatttt

SEQ ID NO: 46119 - DNA, 111 bp, Gossypium hirsutum
  Clone ID: LIB3582-002-P1-K1-F8
ctcgccaccgtcgtctgaattatttaagcagcacgtacagggatctagacaagttaggaccttgggttgaggagaatataaaatatgtgccaaagtcttttttctttgctt

SEQ ID NO: 46120 - DNA, 216 bp, Gossypium hirsutum
  Clone ID: LIB3582-002-P1-K1-G11
gtttgcccaggaagtttttatcatgatgaaagttcggcataagaatgtcgtacagggtcttggtgcatgtacccagcctccaaacttgtgtattattacagaatttatgtctggcggaagtgtatacgactaccttcacaaacagaagggtgttttcaggcttccatcgttccttaaagtttcgatagatgtttctaacggactgaactacttgcc

SEQ ID NO: 46121 - DNA, 269 bp, Gossypium hirsutum
  Clone ID: LIB3582-002-P1-K1-G12
gtttgaaaagaactagagcagcaacagcgcctatccactcatcgaacgtcccgggatctgggccggcacttctagctctcacatctttagtttctgaccaccttgttagaggaggaatcgagtttcttgtgacgagacctatgtttcatccttaaagattgtaattatcacatttaaggccaatagtaagcaatcctcagacttgacgatagcgggaataaccgcattgtctcagcaattcttcaatatttctaggggggggggggggg

SEQ ID NO: 46122 - DNA, 265 bp, Gossypium hirsutum
  unsure (1)..(265): unsure at all n locations
  Clone ID: LIB3582-002-P1-K1-H1
cgncgcgtgggcggactcttagatcacaaaagacatcctcaactgtccttcgtgccccagtgatggctctgattttcttgaggatcttcacgtcaaccgggaattgatggatgtgattgagtcactgaaacacaagagcgaggagattgaggtgccttctgcatacgagcccatgaatggcttggaggaaagtacagacctagggttccagtgacgaaaaatctgtgatgaagactgataatgttttaccgacatactgacttat

SEQ ID NO: 46123 - DNA, 147 bp, Gossypium hirsutum
  unsure (1)..(147): unsure at all n locations
  Clone ID: LIB3582-002-P1-K1-H10
gcccacgcgtcgccacgctcgccacgcgtcgtagttctagatcgcagcggcggttanagatcaagcttactacctcatgcgacgtatactcttttaggtacctaattcaattactggccgcgtttacaacttggactggaaaaccct

SEQ ID NO: 46124 - DNA, 256 bp, Gossypium hirsutum
  Clone ID: LIB3582-002-P1-K1-H2
gctcctcctcttctcttcactctgttccaaaaccatgaaaacccgttaacccaaacaaaagaatgtgtctctttgtttccaaagaaagaaagcccaagaaaaaaagaagaagaagttttttttttcttgatagagtcgaagagatattcttgtaatgggttgttttcttgcatgttttggttcttccaaagatcgtaagaattgaaaacagatgctcaaggtccaacatcgatcgtaaagatattgctggtttcat

SEQ ID NO: 46125 - DNA, 171 bp, Gossypium hirsutum
  Clone ID: LIB3582-002-P1-K1-H8
gccacgcgtccgaattcgacacttgcctttttcagcttcaagtcaaatacaagcagtttggaaaatgggcctgaaacaagtaatgcaccgacctaaaacgatgagacggcttgagaagaagagagacttttaatgaggaagtatgaaaggtcacatctgctctatctcaaa

SEQ ID NO: 46126 - DNA, 215 bp, Gossypium hirsutum
  Clone ID: LIB3584-002-P1-K1-A10
accgtccgattcccggtcgacacgcgtccgttgaataaaggcctaatagctgaaatcttaacgcttaagccaatttccaagatagcgattctgaaaggaatgcaatcgaccacccataaagtctgtgagagagcttggatctaggatgtattatctttctttttcttttttatacttttgaatttgatttaatctaagcgttggaaaaataaatt

SEQ ID NO: 46127 - DNA, 122 bp, Gossypium hirsutum
  Clone ID: LIB3584-002-P1-K1-A2
ggcaagcgagcaaggcgagaggcaacgagaaacagagtgagagaaggagacaatgtgggagcctggctttgagtgcatggggcgctggtgtaaccaaatctcctaggaaagactggagaggc

SEQ ID NO: 46128 - DNA, 409 bp, Gossypium hirsutum
  Clone ID: LIB3584-002-P1-K1-B11
gcagtgatgatgatgaaacgacagagaaagcaggaagcaacgccatcatcagtggaggccccaccatcaaatgtgcgagcaaaagggtacaagggagaaaaacacgggtcgccaggcaactcaaggaatggaaagagggctcccgaggcgactgttaaacttacattcgtgagggatgatagagagaggtttgatttgccagacttgctaaaagcctcggccgaggtattgggaagtggatcctttgggtcatcgtttaaggctgctctgtcaattgggcctgtggtggtggtgaagaggtataaacagatcaacaacactgggaaagaagagttccttgagcatatgatgaggattttgatactgtcccattaaaaacttgcttcttttcgtttgctattactattag

SEQ ID NO: 46129 - DNA, 457 bp, Gossypium hirsutum
  Clone ID: LIB3584-002-P1-K1-C5
gttagacaaggggaagcttttagatacactccataaagctgctcatgcgacattgtcaagctgtcctgtgaattgtcctctagctcacatggaaagaactgtttcagaggtattgaggaagacagtaaggaagtatagtggtaaaaggcctgaagtaattgccattgcattggagaacccggctggagttctctctgatgagctgaatgaaaacctatctggcaattacaatgctggttttgggttaccaacattgagaaaagtggtagatgggcatccaagaaggggaccaccaaacaagatgaaagtagaagatgacggcattttgcatttagagaatgcctcggaacaaagtttattagatgatgatgctgaagctgaaaggtttttacctcggggaagacaccaacactttaattttccgactatacagaacgggcttacaccctaatactgt

SEQ ID NO: 46130 - DNA, 244 bp, Gossypium hirsutum
  Clone ID: LIB3584-002-P1-K1-D1
cccacgcgtacgcagaacgaaaggatgatgtataggcgcttggatacgtgctaatgggcagcctggggggaagacgcccgaggccaggcccgaaagctcgcacctacgaacagatttacgagaagataggtgagacgaaagttgatacctcaagtgaaggcttatgtacagggtatcccacagagttcgactaatgccgccaacataggcgtgcacaaaggccagacgatgaggcacacaaagc

SEQ ID NO: 46131 - DNA, 300 bp, Gossypium hirsutum
  Clone ID: LIB3584-002-P1-K1-D11
cactgaagaactatgcaagatgggttgttctgagaatgatacatctttaaatatttgaagactgtgttgagatgattccgaagtcatctggagatgcaattaacacatccatggatgagaaacatgtgggatttttattatatgcaccaactcgtccgattgtggatatctaggggatatttttgtgggctatggctgtgggcacgattgttactgcttcactttggcaagagtttggcacttttgataattctgacgaacgctataatgaattatataaggaatctcctaaagctggta

SEQ ID NO: 46132 - DNA, 139 bp, Gossypium hirsutum
  Clone ID: LIB3584-002-P1-K1-D6
cccacgcgtccgttttttttttgagggaatcatattttgcatcggagaacggtaaaagggtacgctatattgatgccggcggattgaatttttaagctacccatctgactttacgattacctggatagcctacattaac

SEQ ID NO: 46133 - DNA, 309 bp, Gossypium hirsutum
  Clone ID: LIB3584-002-P1-K1-D9
taccgtccgattcccggtcgacccacctcgatctttatgaaaatgtggagactgttaatgattctggctggttcttaggagtctggagcctgattaccgagatctttgctgacaattcaatctttgaccacacagcatattacaatataaggactgatcacctaaagcagagactgcactgtcaacagttgatattactttggagaaaccagttccattcatgaatacgttaagcgtgtgaagtcatattatgagggtttgcatggcagtcatggaatctggattccttgatagaagaacaaattgaca

SEQ ID NO: 46134 - DNA, 261 bp, Gossypium hirsutum
  Clone ID: LIB3584-002-P1-K1-E1
ctcctttcctcgtcctacgtatgaaaaacctcattccagattaaagccaagaattggatcagcaggtttcccatattttattttccaccccagttgttgttggcctattctgaaacctctaaattctgtatcggttcctctcttatcaccatcgacttcctcccgtaaccagacactattcatggataacgcccttcgtgattgcgcttttatacataaatcccaccccatttctataattttcacttccaggctcatctt

SEQ ID NO: 46135 - DNA, 457 bp, Gossypium hirsutum
  Clone ID: LIB3584-002-P1-K1-E7
caaaactgcagttgagggacaccggactaaaactggaggagttgcaaagggagctcagcatggtaaatgaagcaaagcaaaatcttgagtctcaactcaggaacatggaagcagatgtagagacaatgtcatcaaagattgaatcattagaaaaagaaatcgaaaaggaaaggaccttatctgctgaggtttcagttaatgcaaatgaatcaaagaaaatgttggagtctcaactcattagcatcgaagtagaagctcgaactatgtctgcaaagatcgattcattagaaacagaagtcgaaaaggaaagggcactttcagcacaaataacagtcaagtgtcaagaactggaagaagagctgtcgaggaagaaacaggaaactgagctccagcaaactgttaactcgaacgtcgaagtgaagataaaacaggaggatttgactgctgcttgtggaaa

SEQ ID NO: 46136 - DNA, 376 bp, Gossypium hirsutum
  Clone ID: LIB3584-002-P1-K1-F1
gctttaaggtacctatatattcgttggggcatggagttatcaggcattgttgtgtttgccggagaatgtggagacacggattatgaaggcttgcttagaggtgtccataaaacagtcatattgaagggaattggcaacactgctctcaagcttcactccaacagaacgtaccctctagatcatgtcctgccatttgacagtcccaacatccatcatgctgaaggatgcagcaatgaggaaatacggtcatcacttcgaaaacttcaggttagcaaggaatagtagttctggtttgacgtgatataaagtagacgtccggtctctctgatttctaaggtattggatacttcctgtccatatataactcacaccttcg

SEQ ID NO: 46137 - DNA, 396 bp, Gossypium hirsutum
  Clone ID: LIB3584-002-P1-K1-F10
atttatttatgttaatttattaaatctttgggcacatgcctgttggtgctctttatttatgtaacatgtccaaacacctgtcatacattttattatttgtatgaaggaaatggagcacattagtattgaacataaaaattccttctacatgtgcttgaggaaatattgtgcaaaatttctccccaaaacttgtgcgttctttttagactgatgtattatttttatatgaagaatttggtactccaaatgaggatacatggcctggggtgacatattgcctgatttaaggctgctttcaaagtggcctgctaagaattggcaactgtgttctaatcttgagtagctggattgacctatttctgtaaggattatttgggggggttgatctttgtgatc

SEQ ID NO: 46138 - DNA, 271 bp, Gossypium hirsutum
  Clone ID: LIB3584-002-P1-K1-F3
cccacgcgtccgttattaggaatagcgctatctgtttttctaaatactgcaatgttaagcacgagagagtgccttgctttataaagtttatagttgcaccgaatacacgagaaaagggtattgtgcaacatcgaagtttgttggcgccacatttcagttctttgcttgaattttatgtcactcatacaatgtttggagcctgaaaattgagctttctttcatttgctcatttgcttttttatcagaataactgcctagcagaatgatgaaa

SEQ ID NO: 46139 - DNA, 431 bp, Gossypium hirsutum
  Clone ID: LIB3584-002-P1-K1-F6
gggtgaggtttcgaagttgcgggaagaaaatatggttttgagggaaagaggaaagtctgctgaggaaaggtgtaatagattgtcggaggaagtgaagggcatgtatgagaaacaacacgaaattataaatttgagaagcaagaattgcgagcttgaaaatgagaaagccaaagctgaatctgagttggaaatactgaggaagagattcgaggagttggataagagggttttgtgtttagagactggttttaatactctacaagatgaagatgattccaagagcaacaataggaatgggggagaaattggggtttccgaaaatggggggcttaaaccaattgaagctaaccggtattcaccaaatgctgggaatgggagacctccatctcaaaaccgtggtgagattgttgatatcgacagtcgattattat

SEQ ID NO: 46140 - DNA, 341 bp, Gossypium hirsutum
  Clone ID: LIB3584-002-P1-K1-G9
cccacgcgtccgcccacgcgtccggcaaatccacgaactatttccatggaacgtgagagtcgttgaaacccaaggattgttacatgctgaggttgaccacttccaagttccacagcaaacaagaaaaacaagtctatccatcaacaaaagctcaaataaagcctccacaaaggggttttcagcaagaccagaattactgcaaatgtattcaacccatcatttggaacattcaggtttcggttttggttggattaatccaattattctcatcaacatgagaactgacacctttggtatgagctcggggtgaatttcatcaaaagggaaaacgtctgattcac

SEQ ID NO: 46141 - DNA, 371 bp, Gossypium hirsutum
  Clone ID: LIB3584-002-P1-K1-H1
cccacgcgtccggggacattttcctcctccaaaattagatccgtgggcccctcgccaaaaggatgggtaattaaaaccccactgtccagattacgccagttgttggtctctttaagaacaatttgctgatttgatttcaaagagataaatttaggatttgaaaattgattccatgaccccccttaaattatgccctaaatcattcccctatttattactttgattgttgccttccaaactctcgttgctccactatgaaccatcagtctgtcggagcccctttacttgccatcatattggggcgggggggtgcagcacgcaacgatatgttccaaccaaagataatctttggctgtgtctatttctaagac

SEQ ID NO: 46142 - DNA, 356 bp, Gossypium hirsutum
  unsure (1)..(356): unsure at all n locations
  Clone ID: LIB3584-002-P1-K1-H10
cagatctcatcggaatttgttgaataccttgcagtctgccgaggctganatgcctagaaaacggaaagttgcctcctctacctcgttcggagagcaatggaaatgttgaaaccccagcttctgagagggagcgtttactgctaggcaagatcacggaactacaatctagaatgatgaatctgactgatgagttaactgctgaaaagttgaaacatgatcaactgcaacaacaattaaggttcgtgtctggcgtggaagagaacgggattcgaagggaagtggatgcgtgaaagctgtagaaaactctactaccggcaaagtgaacttttctgattctataatcggtaccaaagatg

SEQ ID NO: 46143 - DNA, 282 bp, Gossypium hirsutum
  Clone ID: LIB3584-002-P1-K1-H2
caacttttgtctgttcattgcttcaaatgtacccagtctaaagggtttttgtcaacattccggagacctgcaaaatggaatttctgctttgcaagccctttcatctgcaatggtgtcattacaaagatatgaatttaaaacaaaccatgaagaatggcttaaagatgttaaaccaagactaggacctgaagtttctcgttgtgttcttgctgcaatcaacaatacatatgagaatataaaaagtttgtacaaagtcaacgactgagatgcggactgcaatgc

SEQ ID NO: 46144 - DNA, 299 bp, Gossypium hirsutum
  Clone ID: LIB3584-002-P1-K1-H3
gtttttaacatatctttcgttttgtttaatttcaattggggttcatttcatcaaatcgctggatggatctgtcatctatctattagttttatggatttctttgatgatttcgcctctcatgatttcttatatttgaaattcgatcttacccaattgctattatacatgaaaaaagaaagtcgtagttaaatgtgaacctgttgatgtattccttggcctgtgaacctgtatggccctgggcagagccgaggcacaccagtggtatcctgcttcccgatatcccattggtctcatccggt

SEQ ID NO: 46145 - DNA, 359 bp, Gossypium hirsutum
  Clone ID: LIB3585-001-P2-M1-A6
ttaaatggaaacagaagtggaagccgttgataacggcaacggcaccactgttgctgaaatcaacgtcccatcaccaccgcccctagatggcggcgaagggggcgattgtggaagccgcgacgattcggcggtgggagggcgagctcgtaaacagcgagtgaaggggccctgttcccctgaggaagatgcgattctgagtgaacttgtgagcaagtttggggcgaggaattggagcttgattgcgcgtggaatctccggtcgttctgggaagtcgcgtcggctacgttggtgtaatcagcttgacccggccgttaagcgcaagccatctactgatgaggaggatcggttgattatttcag

SEQ ID NO: 46146 - DNA, 219 bp, Gossypium hirsutum
  Clone ID: LIB3585-001-P2-M1-B12
aattaatgtttgacagtatggggtggcaaaagctaatatgctgtacctcccaccacgggaaggagtgggcttctttaatccggctaataactaattttacaccgttttaaacgatgacttagttccaggagacatttttgttttcctggagaggtggttacttgatgtcccctcaatacaggattagagatttcatctttatcaggagaaagattttac

SEQ ID NO: 46147 - DNA, 366 bp, Gossypium hirsutum
  Clone ID: LIB3585-001-P2-M1-B3
cgctggttgctactaatgctggagatggagattaattttgctcccgttggacttgctgccatttgcattgcaggaagcaatagtgtgaaggaagcctttgatgatatccaaatcttggctagttgttgtttatatttgattggacaactcttctagtcatccttttgttttctgtatgtgaatgtccatcgccgtcttccatttgggatttcccacgacaactggtagcactgagagcaatttgttctatgctcagaacaaaattgagtcacaggatggtgtacagaaaaatctttttctgagagggtgaatgtactctggtgggtgttgccttccttcttggaggaacctatggaggaaagagct

SEQ ID NO: 46148 - DNA, 351 bp, Gossypium hirsutum
  Clone ID: LIB3585-001-P2-M1-B8
ctcacccgtacgttttactgcatttcgcactgacattctccatatcagccatcctatcgaccgctttttaaaaggctgcttcactgccaccattggctcaaacatcacaccagtctccatcaatgctgttgttggacctgtatttggccaagatttcggagcacatctctgtggtgggcttccaggtgttgctcaaggacttctttacctacccgtcaaccgttccatgagagtaatggagttcgtgccagaagaggtggtgcatctcttgagacataccgcgagagaagtaccatgcaaaggtttcctaaaccagaatctagacagcctgaatggaagcaagaatggact

SEQ ID NO: 46149 - DNA, 301 bp, Gossypium hirsutum
  Clone ID: LIB3585-001-P2-M1-C4
ccaacgcgtccgtatccttccagatgaccgatccaaatgtgctcagttttcgaccaccattggtcatcaacaggtttacagcagtgccttgaagcttgttcgttcaatgctacctttaccctatctcaaagagggaaatatgactgcaccaccagttggaaacgcaattgccccgaatagtgattggaagagaacagagttctttttgaatcatgaagcacttcaacaggtcatcaaagccgagcagaaacatgtttttcgaagcctttttggcacaattgcagaagtaacaaatgaagaa

SEQ ID NO: 46150 - DNA, 247 bp, Gossypium hirsutum
  Clone ID: LIB3585-001-P2-M1-C7
aaggttgccggcggtcacatggttggtggcatgcatgaggatgttcccgttcgtgcaagtgctactgtccctaatattgagagaatttgactaaaacattgatcgtcttcatctgcgtgctatattgggatctccactgttttacgcaacttaaacggcttgatcacattctgggtatcctgtatcgcctaaacctgaacttgcccacattggtaaccctgcccatcttgactgcttactaaatgct

SEQ ID NO: 46151 - DNA, 403 bp, Gossypium hirsutum
  Clone ID: LIB3585-001-P2-M1-D12
cccacgcgtccggcacctatgaattagaaaagacagtcccacatgggagaatttacatacagaataggacctccgatctccctttttttttccaataaaaatgaggaaatctttttcctgaattttaatttttcctttttcgattttctttctgggttttgatttaaacaatgaggagcataacatgttgttacattgaaaaagccatcaaagaatcagatcttaattgctgatggccttcaattaatcaagcttatatatcacccaaccatgttcctgtaaccccaaacactataacatgcatatacaaggctaaaaccagtccccaaacacgcctttctatgacgctgacatggcgtaatataagccaaggcttatcaatcaaagttagtgacaacttaaa

SEQ ID NO: 46152 - DNA, 328 bp, Gossypium hirsutum
  Clone ID: LIB3585-001-P2-M1-D8
gcaattctttttctcactcttctgtttagccaaaaaagacgcatcacctttgttaagtctctaaccggcaagactatcactttggaggcgaatagctccttcgcgatcgtcttctggaacaccaatttccactgtatggaaggcgttcatccagaccacctaggtctgatcttctcggaaaaacagcttgaggaccgccggaccttggccgattacatcattcacaaggagtgaattgtcaatgttggcctatgtttgccaggtgggatgcaaatttcacagaaaaccttgaccggtaagacatttactctcaagggggagaggtcca

SEQ ID NO: 46153 - DNA, 423 bp, Gossypium hirsutum
  Clone ID: LIB3585-001-P2-M1-E1
ggcaaatgatcagtgtgtcctactattcaatgaagttcaaaaggcgtggaaggtttcttttactctgcattcagacctaaagtctgaaaatgttatgcttgaggacaggcttaagatagagaaggaccagattgcacagctcagaaatcaagttgctcaattgctacagtcggaacaggagcaaaaactgcaaatgaaacaatatgattcgacgattcaaacattgcaggcaaaagtaaaaagtcttgaatcgcaactaaatgaagccattcgttctggtgaagctaagtccgttagctcagaaaaggggtctggagtttcaacaatttcaaaaacagcagcggatggtatggattcttcagctgtgactaagaaacttgaggaggaactcaggaaacgtgatgcttttgattgagaaggttg

SEQ ID NO: 46154 - DNA, 242 bp, Gossypium hirsutum
  Clone ID: LIB3585-001-P2-M1-E2
ggcaaatgatcagtgtgtcctactatgcagtgaagtgcataaggcgtggaaagtttcttttattcggcattcatccctaaagtctgaacatgttatgcttggggccaggcatcggatagagaaggaacagattgcacagtttacacaccaagttgctcaatggttgcagttggaacaagtgcaatatctggaaatgaaacaataggagcggacgatccaaacatttcatgcaaaattaaaaa

SEQ ID NO: 46155 - DNA, 233 bp, Gossypium hirsutum
  Clone ID: LIB3585-001-P2-M1-F3
attttataatatcttaatatttatagtggaaaatattggaaaacatttttttaaagaatttcaaattaattagttggtagttatatattttataacatttaatttctttataatatttaaagtctcatgtaatgacctattggtcaaggatgttcattgtttcaagtgtgactggagttcaagttgggctagtaacatttgaaaaaaaaaaaagaaactaacaacaatctaaa

SEQ ID NO: 46156 - DNA, 370 bp, Gossypium hirsutum
  Clone ID: LIB3585-001-P2-M1-G5
gaaaaagggaagaaggtaaggcaaggcacatagggcgataaattgaaccattcaatcctgtttgtttgggctcattttggcagaaaatattgtttctgggttcttagattgcctagaaatttagtaataaacattagacaaatttactctgctacacaattgtagtcctgaatttcttacttattcttagttcgatatttatattcagtctcattcatagcttacaattataaggtggatgatgtatcaattaaaagttacatttattcatttgctataaatgtcatatttttcgtgaaatagagtaatctaaatttaatatttccaaataaagataaatttggatttgttttcagactaccctattcta

SEQ ID NO: 46157 - DNA, 312 bp, Gossypium hirsutum
  Clone ID: LIB3585-001-P2-M1-G8
tttgtttcctggcatatggcccggcagcaatgcatcctcttggtagtgatacattgtcgcagttggaattcttctggtagccttttaccgaatattaattccgtcttcatttcctcgtcctctgagatcaaagcttccgaggaaggtgtggacgtgtaatactgacagtgataatgatgaaaatcatacttttttaatatattcataaaaaaaaaaactaggaagataactacaattacttaagtgacttgggttggcttgatttgtggaaacttctttggatcatcaatgtgatcggtggaatctggccat

SEQ ID NO: 46158 - DNA, 156 bp, Gossypium hirsutum
  Clone ID: LIB3585-001-P2-M1-G9
cttacctgttcgtatgttattggctgtatttaataaaaaaaaacctttgtttattacagttgaaatggtacctttaacattcatttaatcaagaatcattgttggattaacaacaactacaaaagtgattactttaggttttggattatgtaaact

SEQ ID NO: 46159 - DNA, 404 bp, Gossypium hirsutum
  Clone ID: LIB3585-001-P2-M1-H10
cccacgcgtccggaattttgggtttatttaaatttggggaaaattaaacttggatggttaaagttaaaagggaactttaaaaacaaccttgaaattaggttacaagatttaaagaagtttttgggcattttaatggattcgttggttttggaaccattattattgggattctttttttttaagttggggtattgggtggttaaggatgggcttctgaggcccaaaattttgtttgggtaagggaaacttttttttgagactgggggtgggtccccaaagctaatgaaggtttttcctggggattcttattattataaactgctgggtttttaaaacattaatttttttttcacctatgcacaattggggtttttttggtgtgattgggggatgtttttttatat

SEQ ID NO: 46160 - DNA, 248 bp, Gossypium hirsutum
  Clone ID: LIB3585-001-P2-M1-H11
cttcgagggattatttaaaacctggaaaaccatgccagggtttaaaaaaagaccttgaagctttggttggggggactaataccttcatggtagcttcacatttattttgggcggtatgggccttaattcaagcaagggtggcacccatcgattttgattatttgggggatttttttttggggtgccatggggtttagaagccaaagaaaatggggtttttccttgcaaaattttacatatttggtttt

SEQ ID NO: 46161 - DNA, 224 bp, Gossypium hirsutum
  Clone ID: LIB3585-001-P2-M1-H5
ccctcccgcttggtttttttacaacgacccctggaaaaccattccagggtttagaaaaagaccttggagctttggttggggggactaataccttcatggtagctttacatttattttgggcccttttggccttaattccggccaggtattgaaccctcggttttgattatccgggggatttctttttgcggtcccatggggttaatccacggaggaccaccttt

SEQ ID NO: 46162 - DNA, 388 bp, Gossypium hirsutum
  Clone ID: LIB3585-001-P2-M1-H7
ttcaactggagcctgggtttcaactcaatgggtttatataagatgaccaacctggcactcataccatccaccggattattggaaaccatgtccttaaagaagcaattgagccaaaagataaagatgtcactcttggcttaactagttggagtggggatggcctccataactgatctccaactcaattttgttggcacaatgcttgctcttcttgccatcgtcaccacgtgcgtaggccaaattctgacaaacaccatccaaaagaggttgattgtttcttgaaccaagttgctgtaccaataagctcaatttcaggcagccattctttttgtctctggcccttcggtggaccagttactcaccaaacaaaatgtgttggccttcaaat

SEQ ID NO: 46163 - DNA, 254 bp, Gossypium hirsutum
  Clone ID: LIB3585-001-P2-M1-H9
cccacgcgtccgcaaaaatccaattccattaacaaactcaaaatcatcaagttgttcaaaaaaaaaaaaaaccatttcagctttgactttaaggaatggtttttcttttgtcagctgaaaaaaatggtaaatttcaagcttcgggcgtttttgttttcaatcatacctgattatgttgaaggacaaatctttgattcgatccttggaagaaataggcgtcggaattccgaacatagttataaactttgggtttt

SEQ ID NO: 46164 - DNA, 125 bp, Gossypium hirsutum
  Clone ID: LIB3585-001-P2-N1-A1
tcggcaaaggccttgccggaaaaggcggtaataatggctgcgcatgcgcaagctgaagggatcattgctggaagctgtagttaaaccaagatataattgtccgttgatgagaaatggtcaatgat

SEQ ID NO: 46165 - DNA, 132 bp, Gossypium hirsutum
  Clone ID: LIB3585-001-P2-N1-A11
cttgtacgcctgcatgtgccggtatgctatagacgggccgacctacgcgttcgataaacctcttcctctttcatgcaaaaatctcactctcaacttcctgtgtgtaatttgaagtcttatgccttatgaaaa

SEQ ID NO: 46166 - DNA, 325 bp, Gossypium hirsutum
  Clone ID: LIB3585-001-P2-N1-A4
tcgtttttgggcaacatggatttatattcctacagtagtgacaaataagtatagtagcgggttcaagatcaaattaaaaaaatgcataccataggaagacaaatggtaatatgagtcatctcctaacgggaagcttgatttacttccacattcagaaaacagtatagctaaataaatgcatgtatacaacaaagagatgtactttttactatggattgaattaataaatattaaacctgttatgcttagggcattgaaccattgataccaacgtttcttttaccaaatttagattcctaacaaaggacatgttggatgagagctg

SEQ ID NO: 46167 - DNA, 312 bp, Gossypium hirsutum
  Clone ID: LIB3585-001-P2-N1-A5
cggtatagagtggacggcccaggcgtacccgtctaatatacttttaaatctgaatcgctaatgctaaacattgaaattagttcatgcgttttacagtctgggatatacaaagcatgaattgcttttgacattttggggatgatctgcgtggaccatttgaagcctcgggagatcacacctggcccatggttgcctttacacgtgctgctccggccacgtttaatggcgagcctatgtgcactccatgttttctaaagggtaacactgcctataggacaatggctacatttggattgcatgatcacaacaaaa

SEQ ID NO: 46168 - DNA, 394 bp, Gossypium hirsutum
  Clone ID: LIB3585-001-P2-N1-A8
atgctatatcgcggccgacctacgcgttcggaataagattcaagcatatctggatacaaaaagacgacgttgctttgctttctcgcgaaaatggagtcaaattcatggagctttcgattctacaatacttcttcttcttctacggcttcgacaaggcgtcggcaatcacgatctgatatgttctaggatgaggatattaagaaattgaccgggttgcggtatttaaggcacagcttttactgacattttgcgcttaagatttcgacattgattgacttatttggcatatccatgaagaacatcctgttgaacccaaaaacggtgtgtgccctgtttgtgccaagagggtctgaatggatatttgtagccacattaccatgcaacatgggaattt

SEQ ID NO: 46169 - DNA, 181 bp, Gossypium hirsutum
  Clone ID: LIB3585-001-P2-N1-A9
aatcttttgtttggaggggtttttcccacaaatccgaattaaacccggtttataccaaaacaaattatgcttttcttataagtttgttaccctgtttttatgcgggtgaggttgcttaacctgctgttttcttgggcaaaaacacccctggcttttttcaggggaccccttggaagaaaag

SEQ ID NO: 46170 - DNA, 143 bp, Gossypium hirsutum
  Clone ID: LIB3585-001-P2-N1-B1
tatagaggggtcgacccaggcgtacgcggacgcgtggattgtaaatacacaggctaagaacacctgcgataacatgctatagcaaaatgtacaatctatctttctcctctatatttctaactgaatatatactttatatcggc

SEQ ID NO: 46171 - DNA, 396 bp, Gossypium hirsutum
  Clone ID: LIB3585-001-P2-N1-B10
tcgatagcatggcaggaggagcagaagataacatccaagagccaactaggaatcgcgattcacaaggagagggtgttatcgtaatagcagactattactacttccggcgaagatctgagtgcgaagatgtacatgctgagacttttacacacagcttgagatgccctctatgccgcgggaacgtgcttcgctgggaggatgtggaacatgccagaaagtgtctaacttcggagaacagaacctgaactagggaatctagctcctacgacggaagttaccaggaactgcgtcggcatgcgaggagagttcatcctgcactacgagcttcatatatagacccatccagagaacgagcctggtgacctcttgagcaccaaagagactaccgcgacattg

SEQ ID NO: 46172 - DNA, 301 bp, Gossypium hirsutum
  Clone ID: LIB3585-001-P2-N1-B2
acgcccacgcgttcgatgggagcacgctacaaaaatctatgaagaagctgtccagctcaactggagtagcccccatgctctaaacaattggggactcgctctataagaactcactgctattgttccagctagggagatgctaacaagtgtcaggactgcaactagtaagtttcgagctgcagtacagttgctatttgatttccatcgaggcctgtacatacttggcactgttctgtgtggactacctgacgataccttaagacaacgttcggcgtaaattgaagaaacttacccggatgag

SEQ ID NO: 46173 - DNA, 207 bp, Gossypium hirsutum
  Clone ID: LIB3585-001-P2-N1-B3
gctggcgcgcgtgcgcgtgccggtaccgtatagcggggtcgacctaggcctacgcgtttgttgttactcatgcgcgtcattgtgaataattcctcgcacactctagttgttgtgatttgcattgattcaagcagtcgtgtgaatgaagtcttcgatgatatccatgtcttggatggtaacagtttatatatgataggactacccaac

SEQ ID NO: 46174 - DNA, 247 bp, Gossypium hirsutum
  Clone ID: LIB3585-001-P2-N1-B4
tgatgatataaggaaatattcaatcattcagacttgcatgaatcacatgagtcatcctgatatatcacatcacatgtgcgcgagcacggatgttggatactgctatggagcaccacgttgacaacaagtgctgtgcgtgctacaataaagggctgaatgtgctgcagaaacatgttaagatactatagccagtgtgctatgagataaccgactccgacgaccctatcgcggtacgctacatgattga

SEQ ID NO: 46175 - DNA, 218 bp, Gossypium hirsutum
  Clone ID: LIB3585-001-P2-N1-B7
tcgctcttcctctcagtaacactggagacgcggacggtgttacgcgctgccaccatagtctgtgttgccttacatcaatgccgagcttgctcgagactctgtcatggtttcgggtgcttcagctaaagctatctgatccgactgataaggctgtaactgtgacaaggtcgagacagctacagccagcgctgttgctcgagatctagccggtcaataaa

SEQ ID NO: 46176 - DNA, 256 bp, Gossypium hirsutum
  Clone ID: LIB3585-001-P2-N1-B9
agctacgtcatatagtgagctatagtggcagctagaattaattaactgatcgctgtttcagcgtaaaactgataaaatcatagtgttacacaacatactagcctggagcatatacgttatcctggctgcctaatagcgaagatgctcacattgatcgcccttcgcaacactgcccgcatttctaaatggcgaatgtgacgcgccatgtgcatgaacaaaagcgcaacgggcgtggtagagtacgctcagcgtatac

SEQ ID NO: 46177 - DNA, 319 bp, Gossypium hirsutum
  Clone ID: LIB3585-001-P2-N1-C10
tcgttcacacgtacgcacacgcgaacggctcagatatatatgtctgggtagacacatcgagtgcgatgcatgattaacaaatgcatcatacacgaacaaactagattgcattgcagcacattacgttcatcaagcgctctaactaaacatcaagcatataaatgtccctgagaaacatacatacattgatgtgacgtaaagacatcttggttacagtcacatgacattaatgaatgttggcaaaacgaagaagacgttcattacttaaaatgttgcaagacattagggcgaaaatatcatgtatttaggagagcttaga

SEQ ID NO: 46178 - DNA, 370 bp, Gossypium hirsutum
  Clone ID: LIB3585-001-P2-N1-C11
tcgatggaggtcgcaaccgcagccgcatgaagctctgcgcttcacgcgcgcatgtcatgaccgacaacctacgcacgaatcgtaaacactacccgaaccctaacgtatactacatccgacttctctccgagaaatctctctccactaacttgctctctccctgtcccaccgaaggcagcgtatacggagattgctacgggttgaagctactacccgaatctctctacccggtttttttatgtcggaccaggcccaaacgaggagttgtcaccatggttattcctttttagaggggaagcgcatgggagcaacctacacgctgacttagaatggcatttgcacaagaatggggtcgtttactagggaatga

SEQ ID NO: 46179 - DNA, 314 bp, Gossypium hirsutum
  Clone ID: LIB3585-001-P2-N1-C3
agaaatccctagaagctgaaagtaaggtgggtttgatgaggccgatgccgatggacttcgctctgacccatacgacccaggttcacccatgtaggtcgactatgttgacactccgttgatcttcggcgaaggcgttatcgctccctacaacgcgctcgtcgatgccgatttattcaacagcttcgtacacgaaactgatgacttctgtttcaactgaagaaacagagatgattcgattcaagttctcatctatcttttatttccctttctactttctctttttagggagtgaaatctcttaaaactatgatcaa

SEQ ID NO: 46180 - DNA, 179 bp, Gossypium hirsutum
  Clone ID: LIB3585-001-P2-N1-C7
tcgcagggtgccgaagggaacatggttggagatatggatgacgctgctcaggctagagagagaagagctgttcctaagaatgaagaaggtgactgatacatagacacactataacaggtgctactgtggagctcccatgaaaggcaccatacaaaccgaatggcaaataacatgggata

SEQ ID NO: 46181 - DNA, 227 bp, Gossypium hirsutum
  Clone ID: LIB3585-001-P2-N1-C8
ctggcacgcctgcgtgtgccggtacgctatagagcggtcgacctacgcgttcgttcatagtccagaactcatattctctacacatatatgagcatgtccactcagccgcgtcatatgagcttttcattacatacattcactgcgcttaccttatataacagaatcagcccatttcactaaactccatcatgattcaaaaagggactcatgtggcttccatgaaacct

SEQ ID NO: 46182 - DNA, 117 bp, Gossypium hirsutum
  Clone ID: LIB3585-001-P2-N1-C9
tcgaaaaccagcttgctgaatcaaccgcattacatcatgatggctagaggatagaagaaacacttgatgaggcataatgcctctaggcattggatgctagacaagcttggtggtgct

SEQ ID NO: 46183 - DNA, 410 bp, Gossypium hirsutum
  Clone ID: LIB3585-001-P2-N1-D10
tgccggtatgcaatagacgggccgacctacgcgtacgaaaaaggaaaaaaaaatgaagctcttgtttctaacttcgctgcttagacctcttcttctatgttcttcagcacttgaactaacaatggctcaagctcgatcacctctttgtgaccggaaattcaaagggaggtgccctaaaacagtcgtctgggatcgatgcttcaaatattgtcgcatatgtcgcgcggagtgtaaatgtggtccttccatgtcttatggggacaaacaccagtgtcctttgttcaaatacacggggaatatcaagggcacacccaaatcccctctaaaatgaaatatattcttgttcggcatttcatatagcttcaagatcccggacgaagaggctatatatatatatctgcatgctgatg

SEQ ID NO: 46184 - DNA, 377 bp, Gossypium hirsutum
  Clone ID: LIB3585-001-P2-N1-D12
acgcccacgcgtccggcaactatgaattagaaaagacagttccacatgggagaatttacatacggatttagaccttcgatcttactttttttttccaatgaacatgaggtaatttattttctgaataaccatcattcctttttcgaaaccaattctgggttttcattcaaacaatggggagcataacatctcggtacattgaaaaagccatcaaagcatcagattctgattgttcatggtctttaattaataaagcttatctatcacccgaccatgttccttcaacaccaaacactataacatgcatatacaaagcttaatcctgtccccatactcgcccttaaatcaccctcacatggtgtcttataagccaaggc

SEQ ID NO: 46185 - DNA, 380 bp, Gossypium hirsutum
  Clone ID: LIB3585-001-P2-N1-D2
tcgtggacgcgtggacataagcaaagcggaacctgtgacaaagaataccataccagcagctagatcctgagccaatgccgtgaacaatactaaggcgagcaagctcattcgatgtcaagtcaagtcttgtaactggacgctgcacagcgtaaagcatatgctctcagccgctgtggggactgacattatggatgccgcataccatgttggtgtgcagaaagctcgaagctccgatgaatgctgtaccttcaattaatacactacttgtgccaaagacatcttcaagggcaagaaagctgtcaacattggactacctggagcatacacaggcgactgttgacagacaacatgtgcctaggtacacgaagaacatcgataag

SEQ ID NO: 46186 - DNA, 325 bp, Gossypium hirsutum
  Clone ID: LIB3585-001-P2-N1-D3
gtatatgagaaagctggcacgcgtgcatgagctggtacgctatagagcggtcgacctacgcgttcggtcgaagaaaatgaaaaaaataccgttactgctatggatagtgcttgggatcatttcacaacagaattcatatgacattatcttaagctaattgattaataaacacaaggactatattgcacatgtgaagcatagacaaacaagtttcaatgcggaaaaacggagacgagcttatcgaaattcaagaggttgagggcgtatggcaatgaaaaacagcctccactgaagtgcaaacatagaatacaatgatgacataaat

SEQ ID NO: 46187 - DNA, 361 bp, Gossypium hirsutum
  Clone ID: LIB3585-001-P2-N1-D5
agctggcacgcctgcgctgtagctgggccggtatagagtggacggcccacgcgttcggttacgcgaaagaagacacatgcagctattggttcaaagtagtgaccagtagactataagactatgatttgcacattctgaacctacactggcacaccttacgctgccgtcgtgtgaaagaaataaaagggtgaagtacactggatcgacccccgtagatcgacgcttcaaatattgcgtcttactggaggaggagtgtcacaacaggccttccaaaactcatgggttcgaacacctgtgcctttgctgaagactcatggcattgagcaagggcaaattcacatgctttttaagaagaaagaca

SEQ ID NO: 46188 - DNA, 243 bp, Gossypium hirsutum
  unsure (1)..(243): unsure at all n locations
  Clone ID: LIB3585-001-P2-N1-D7
ggccgacctacgcgttctgccatgcgtncagccacgcgttcgcttattcaaagaaaaaaatccattctctatcattactgaagcgggcagattcaagactgaaatcggcttcctcacttgaggtaacttgatgacacgtgtcttagaactgtaagtgagtggatgacacaagagcattgtataggatgcgtcgaacggatgcctacaatgcttgatgcagctgtcgaacatcttgatgactct

SEQ ID NO: 46189 - DNA, 317 bp, Gossypium hirsutum
  Clone ID: LIB3585-001-P2-N1-D8
ctacgacataagtcatatggcgacgctggcacgcgtgcatgagccggtacccaatagcaggggccgacctacgcgtccggaaataggctaacacgcacatctctttagccgaaaaagattccaatgttgctaccgactataaccgactagacattcactataagggcagagagctgcaccgcgatcgacgtcgtgccggccaacctacattatgggggacgcataggttcagaccagaaccgtatgacctataacagggaacagattgggctccttcggaccttggacagcatccacagaccaaaggagttaactct

SEQ ID NO: 46190 - DNA, 359 bp, Gossypium hirsutum
  Clone ID: LIB3585-001-P2-N1-D9
tcggctgtatctttccttacatattggcggggagtagatggataatgaaaaatggagcgttatgagatactgacagatattggatcagggtacttatatgttgctaagctgtgaagggataaaaggactggggagatctatgctgtcaagtatattgaacgatgctccaggatcgatcagcatgtgctaagggagaatattaaccataagacttttaaagcatccaagtatcaggaaaattgacttgcggtctcggtacaccaactcatcttgccatagaaatcgaagatacggctgttagagaactggtttgcagaatgagcaacgctagaagaattagcgaatatgaggcatggttt

SEQ ID NO: 46191 - DNA, 376 bp, Gossypium hirsutum
  Clone ID: LIB3585-001-P2-N1-E1
acggtcaaatgatcagtgtgatctactattcaatgaaattcacactgctatgaacgtgtcttttactctcgattcacacctaaagtctgaaaatgttatgcttgatgacaagcctaagatagataaggagcagaatgcacagccttataactcacagttgctcaattgctacatgcggtacaagaccaaacactgcagatgaaacattatgattcgcccattcacacattgcaagcaaaagtaaaaagtttagaatcgtagcttaatgaagccattcgttctggtgaagctaagttcgttagcttacaaaacgggtctggagattcaacaatctcaaaaacagcatcggatggactggattgtttacctgtgacta

SEQ ID NO: 46192 - DNA, 235 bp, Gossypium hirsutum
  Clone ID: LIB3585-001-P2-N1-E10
gcgacctacgcgttcggaagcttgtgatactgcccggctaaagtttcttgtcataacgactgttgaagaggcactggatctggtcttgtcccctccttaaggagcgaatgcacgctgattatggcaagaaatccaaggggggcttaactgacgacctatcatcaaacagtattcacataggacgcagagtcatacaacagatgactctcaactgactcactatcggagcacacat

SEQ ID NO: 46193 - DNA, 309 bp, Gossypium hirsutum
  Clone ID: LIB3585-001-P2-N1-E3
accacttgtctggaacatacaagccagcacgtggcttcctcactatgtatatgagagacttattacaaaggcgcagaaacctggtttttttcagctgctggccacacagactgccagagctgatcgtcatggactatatcctgagtacatgcttttaatttggtcagacacatctgatgatagctggatcgagagtaatttatctgtgggagcaaactacaaatatgggtactgtggagaaagcacttgagatcatgaactttgtttacgcactgttgattctcaactactccggtgttggatagatgg

SEQ ID NO: 46194 - DNA, 141 bp, Gossypium hirsutum
  Clone ID: LIB3585-001-P2-N1-E5
tttttgtttttgaagatgaagacgaagctagccttgcataacagacacaaaacgatatgcagctttgaaaggacgcttgtcccaaagcatgtaccgccgcccaacctgaggaagcatttgatgtatcaagatataccatcg

SEQ ID NO: 46195 - DNA, 126 bp, Gossypium hirsutum
  Clone ID: LIB3585-001-P2-N1-E7
agcgccactacgacatcactcatatggcgacgctggcacgcgtgcatgagccggtccgctatagcgcggtcgacctacgcgttcgcaaaacactctacacaccgctttcttcatatcatacagggg

SEQ ID NO: 46196 - DNA, 143 bp, Gossypium hirsutum
  Clone ID: LIB3585-001-P2-N1-F1
gttttgggactgacgaatcttgataccgtggcagttcagggccttgcctcagttgatactgacaatggcacatgtgctgatgcccatgcacttgctcatgctggacacaggagtgagataactcttctggtgcttgatgccaa

SEQ ID NO: 46197 - DNA, 333 bp, Gossypium hirsutum
  Clone ID: LIB3585-001-P2-N1-F10
tggcgaagctggcacgcctgcatgagccggtccgctatagagcggtcgacctacgcgttcgcatcctcaagcactccgtctcatcaccaaagcataaagcgtgatatccttcatattcacggcgcccaatgctgcatccaaaacgccgccatgttctgtgaagctatatgcgcatgacacgagctaaatcctacggcgctgttcaatggagatttgcatcttcagctcgtgatgttcaatgtgtactacaatgaatccagtcatggtatgtacgctcctcgtgctgatactatggatcttgagcaagtgaccattgatagcactagatctgct

SEQ ID NO: 46198 - DNA, 233 bp, Gossypium hirsutum
  Clone ID: LIB3585-001-P2-N1-F12
tcgtttacgcgtacgtccacgcgtccttctacatgtacgatagctaaggggcttcaatgattctaaacggtgcataatttgaacaataatcgacaaacacaccaactacagtacacctatctatgctagatttaaagacaaaggcggggggtgcatttccgaactggatcacttttatgcgaacgaacctggattctttatgatagaaatatatccagctggaatcattcttg

SEQ ID NO: 46199 - DNA, 307 bp, Gossypium hirsutum
  Clone ID: LIB3585-001-P2-N1-F2
tcgcccacgcgtccgattcaagcctacttcacgatttaataagtgaactgaagaagctggacagctgacagctgaagagattattaaggtacgctcggtgatacattcgaacattgctgccaacgcaattgctgtacaaatgccacttgctacatatgctactagagctatgcttgacgtgtaacctgaagctgagggacaacgaactgatatcaaagcagctaacaagaagctctgatggcgattgaagaagatcgtggttggatatgagcatacactttgtgcgatgttggcatgtttttaagaa

SEQ ID NO: 46200 - DNA, 230 bp, Gossypium hirsutum
  Clone ID: LIB3585-001-P2-N1-F3
attttataatatcttaatatttatagttgaaaatattggaaaacatcatcttaaagaatttcaaattaattagcttgtagctatatattccataacatttaatctctttataatatttaaagtctcatgtaatgacctattggtcaaggatgctcattgcttcaagtgtgacttgagttcaagtagtgctagtcacatttgtcaactataaatattacgatattataaaa

SEQ ID NO: 46201 - DNA, 106 bp, Gossypium hirsutum
  Clone ID: LIB3585-001-P2-N1-F8
ctgagatagcgcagttgcttcgcactgggggttggatacatatccagagacgcacaattctacaggtggagcagacagagctatgaccacacagatgatgtgggat

SEQ ID NO: 46202 - DNA, 311 bp, Gossypium hirsutum
  Clone ID: LIB3585-001-P2-N1-G1
aatggcttcgcgtcgactcctctgctcaggactccgctccacttgtcggcgatctatatccaaagctgccagccatacccctcgcctacagaggacttggctcacgcgcccacctttttctagcccatactatatctcacgcgatgctgagtactctacatctgcggatcgatgacgatagtgctgcatcgcagccttcttccgctctggagggccgtcatggtacgatcactgatgcgtccactggtgctgacagccatcggtcatgtctgtcaagcgacccctgccgtattcgatgaaagactcgatga

SEQ ID NO: 46203 - DNA, 187 bp, Gossypium hirsutum
  Clone ID: LIB3585-001-P2-N1-G12
tcggtctcgttgagagggtcgagatatcgactttagacgacaccggtctgggttctaccgagaaccccgccctaacaggtctaggagagacggctaacctaaggctgcaaggcatggctccacggctaacgtctgaaacagggccatccagtaagagaaacaacggcccccttagcaagatacttta

SEQ ID NO: 46204 - DNA, 213 bp, Gossypium hirsutum
  Clone ID: LIB3585-001-P2-N1-G3
tcgttcacgcggtcgtagaaagaaatgatatactcttttattctctctaggggcaagacaaggacctaactcgagcctgacattttgttgcatctatctatacactgaacatgtcaactatatacgaagccaaattttattacttcactagccggattcataggaggtgatgctagcaaaaaggactgaaaatgacttgaagcttgaacatgg

SEQ ID NO: 46205 - DNA, 229 bp, Gossypium hirsutum
  Clone ID: LIB3585-001-P2-N1-G7
tgccggtatgcaatagacgggccgacctacgcgttcggtatctgttcaggcaatcgtcactctgtcattttttaagatcagagaagcatacgctggatatgcatgatgcatccagttatacacacgcgcttttcacaggtgtgagacactcgtgctgagccgtatatatgccagcttttctgtatatcaccatgatgtaaaagctgatgactgaatagagtgtgacaac

SEQ ID NO: 46206 - DNA, 228 bp, Gossypium hirsutum
  Clone ID: LIB3585-001-P2-N1-G8
tcgtttgtatgctggcatatggcccggcagctatgcatactattggtagtgcttcattgtaacagttcgtattcttctggtggccttgtaccgaacatccatgccgtcttcattaccaatgtactcagagatcaaagctttcgaggaaggtgcggacgtgttataccgacacgcgcttatgatgaaagtcatactttcttaatatctgcgtaaagaagacaagactgg

SEQ ID NO: 46207 - DNA, 194 bp, Gossypium hirsutum
  Clone ID: LIB3585-001-P2-N1-H11
tcgaggcatactttaaaacctgaaaaacgatgctgggtatcacaaaaaagaccttgaagctgtgtatgtgtagactaatacgttcatgttagcttcacatttatattgtgcgttatgggcctgaatccaggcaaggatgtctcccatcgactgtgattatctgctgtatcattcattgcggtacaatgagtata

SEQ ID NO: 46208 - DNA, 373 bp, Gossypium hirsutum
  unsure (1)..(373): unsure at all n locations
  Clone ID: LIB3585-001-P2-N1-H3
attttgcgacgagttaccttgatgttgaccatgctgaaaaggttataagaggtcatcgaacttggttgtcacacaatcatgactgcgctctgacgtgtgcaaagactgcagatatgcctgctttaaatgctaacagtgcagactatctcagaggctttacaggactcattgtcaaagaggcttcagtgatagatgtgaaacacatcttctctatagacagactgatcggcctgccttcatgtgtatgcacaataagtgtgttcaagtattgttagagaggctntggctaatacggcgcgaaccttgccgggtccacatgttggcgctctacttacattaggatacgcattgatggcagcctcttgtatccatg

SEQ ID NO: 46209 - DNA, 315 bp, Gossypium hirsutum
  Clone ID: LIB3585-001-P2-N1-H5
gcgcgtgcgcgtgcggtacggttgcgggcggcagcgtcggttgattttcaacgacctgcggttcattacatgagggaactcgactcgcatgctaagttacatgcagcttatcactccgctcgacaaagctgtcacattgagctgatattaggcatgaaatcgaatacctagtatgtgtaccgattatgattggcatcctctttcttttgtttgagtactatgatgatcaactattggctctcatgggttttaattctggtctggatatgtgaactttttatactgatcagtgttcggacaccaatatcaatgaag

SEQ ID NO: 46210 - DNA, 300 bp, Gossypium hirsutum
  Clone ID: LIB3585-001-P2-N1-H9
tcgtccacgcgtacgctaacatccatttccattaacaaactcagaatcatcaagtggtgcaggaaggaaacaaaccatatcagctgtgactctaaggaatcgcaattcttctgtcagctgaaaaaaatggcaaatttcaagctatgggcgtgtttgttgtcaatcacatctgattatgtggacggtcaaagctttgatatgatactaggaagaaatctgcgatggaattcgcagcatactcatcaacttttggttttaattgctatgtgatgggatgattacagatcagttcttgaaact

SEQ ID NO: 46211 - DNA, 429 bp, Gossypium hirsutum
  unsure (1)..(429): unsure at all n locations
  Clone ID: LIB3585-026-P1-K1-A10
aaaagccaaaccaacaaangcgcgaccagccgccagatcgncacaccaacagacctaccggcggacgaggagctagacccgagaggcgctacgcctactacgcctgaaacaaatttggaacaagaactgggtaaccgttaacaataaacacgaagagagagatgccaaactggtctaaggaaactgaaaaacatgacactgactctgggcatcatacgatagaagatagtgaatacgataggctggttattgtaatgaacctaccgcaggtggagtggacatattacaacctgaaccacccacaaggagcgaaacttttagctggcgaaacaaagccttcatctgacgcatcggtgctggtataaagattctcgatggccagaaaaggggagtgacgcttcttttcgagaagattctttgcccaatcat

SEQ ID NO: 46212 - DNA, 277 bp, Gossypium hirsutum
  unsure (1)..(277): unsure at all n locations
  Clone ID: LIB3585-026-P1-K1-A12
cacgcgccggncagacggacgccgccagagaccaactacgacgcggcagcgacgcaagccncataggcaccaaancaagcacggcgcgttaacaacgcggctggaaaacccgcgtaccacttaacgctgcacacaccccttcgcagcgcgaaagcaagagccgcccgacgcctcccaaagtgcgcagcgaaggcgaagggaccgccagagcggcgcataagcgcgggggagggggtacgcgcacggaccgctacactagcagcccctacgcccgctc

SEQ ID NO: 46213 - DNA, 463 bp, Gossypium hirsutum
  unsure (1)..(463): unsure at all n locations
  Clone ID: LIB3585-026-P1-K1-A3
gcgcccacgcgtncgcacacgcgtncgcccacgcgtgcgaagacgcgagggtttttccagtctctctaccttgagcgaatgctcttcttcttcacccagattttggtaatttatattagatctaacaactcaacacccaccaaggatatgagaaatggtgaagatctgaggcatcggtgctggctatgtcggagggccgacaatgactatcattgcattgaagtgccctgaaaccgaagtggctgacgtggatatctacgactcaagaatgactggcgggaacagtgatacactgccgatctataagccgggacttgacgaggtggtgaagaagtgcatagggaagaacctcttctttaagagagatgcacagaagcaagactccgaagccgatattgtgggagattcagtaacaccccgacgaaaacacaaagtctgggagcagggaaagccgctgatctga

SEQ ID NO: 46214 - DNA, 433 bp, Gossypium hirsutum
  unsure (1)..(433): unsure at all n locations
  Clone ID: LIB3585-026-P1-K1-B11
aaggngccanacaacganaccgcgggcaaccacgggcgaacgngcccggacaaaagcaagggcagccccaagagccgcanagaagaagcagagaagagaacacggagagggaaannagcaacgggccnangagagaacccaggagcagacaacagcnngagggaccaacggggcagncaggaacacagagaggnggcnagagaagcagngagaaaagcacgagcnnagcnaaagaaagggcacccngccgancagccagagccnccccgacccaagaagacancaaaaanacgggcagcaggnagncaagcagacaacccgggacancaaaggggcggaaggaccancgagnggcaagggcncagaggcaacgacccgacaaaagggacaacagcccgaaaagccagcaaaaacacaggngangcaagcacga

SEQ ID NO: 46215 - DNA, 488 bp, Gossypium hirsutum
  unsure (1)..(488): unsure at all n locations
  Clone ID: LIB3585-026-P1-K1-B9
cccacgcgtccggntcgacccacagagaagccggctagatctcgcccgcatgattatattacatggctaccccttagccatgggtgaacatgttggattcaaggcatttgtcaagaatatgcagccattgttcgaagtcgtgcataatagcaccatcgagctgtctcgtgtggaaatctatatgaaggagacgcagaggatgtatgatccgttgaggaaactgcacggcagaatgaacctcaccattgagatgtggccgtcccctgagaatgctaaatacgtgtgcttgacagcgcatcatgccgatgatgaatggaaactacaactgaagattctgagttccctaacactcgattcttcccataccgaaaacatgctttcagatgtaactatcaagtgtctgatggatggagacatagactggatgtagtggcccatgacatctgatgattgttcgactgatgatgacattgtcttgagaataaaag

SEQ ID NO: 46216 - DNA, 476 bp, Gossypium hirsutum
  unsure (1)..(476): unsure at all n locations
  Clone ID: LIB3585-026-P1-K1-C1
cccacgcgnccgcaaaggcacnncnccagaggagnaaagacaacggagncaacnnnnncgacaacgccgagggnnatgccaaaggncgagccgaggagancaagggncaggcnannagggaaccagggaggaaacgaacgganancgaggnnncaaccaagaacnnnaggggaggnccngggccaaaaganaagggnnngncnagaaaacananagaggaaggaaccaagagcgccnngaagaggcnaganaaggannaagnagangagcncnanngncanaggccagacacacagactccaanngaggagacngngagggcaaagaannatgngannganaagggnagggcatnnnatagggggacaagagagaggncngcacaacagaaaacggaagcatggggagtagctgagagggtggacctggtaggcccaattgtggagcagccggagtataatctattgactaggcac

SEQ ID NO: 46217 - DNA, 504 bp, Gossypium hirsutum
  Clone ID: LIB3585-026-P1-K1-C10
ctctttcaactctggagcattacatgcagagtggaggacagaccgtcttgtttcttggtgacctctcttatgctgatagataccaatacaatgatgttggtattcgatgggattcatggggccgctttattgagagaagtgctgcttatcaaccatggatttggtcagctgggaatcatgagatagaatacatgccagatgtgggagaagtccttccttttaaatcattccttcatagatttagtacaccacatttggcttccagaagcaagaatcctctctggtatgctatccgacgggcatcagctcatattattgtcctctccagctattcaccccatgtgaaatacactcctcaatggttgtggctaagagatgagctcaaaagagtggatagaaagaagacaccctggcttattattatcatgcatgttcccatctacaatagtaaccaagctcactttatggagggtgaaagtatgcgagctgtctttgagcgctggt

SEQ ID NO: 46218 - DNA, 375 bp, Gossypium hirsutum
  unsure (1)..(375): unsure at all n locations
  Clone ID: LIB3585-026-P1-K1-C11
cccacgcgnccgcccacgcgnccgcccacgcggccgcaancacggaaaacaaaccaaagaaagggncaaaggcaacccncaaagggccagnncacaggccgncnccnncggaagaagcngagcaaccncggaaagcnnnagaaggccggggnacgaacgagcaanngannancgacananaggcncacaggaaggcagcacagncgcaagcaanncggaaaggggaaggagaagcnnaaggggaagaacnncncaagaggggggagaaggaacnnacaagngannncgagcgggcngagcggcnnnnnacgnnggacccngcagagcgagaagcncaccnggcgaaagaagccacaaagaanggcacancaagca

SEQ ID NO: 46219 - DNA, 585 bp, Gossypium hirsutum
  Clone ID: LIB3585-026-P1-K1-D1
gagcgttactacattcatcggcatctactttacccactcttttttttttttttttttggtctctctagaaactttgaaacccattttataaatctaaagaacttgttactattttactgtgtttgaaaaccttttttgatttgatcagttctttataggaaaaaatggggtcagtggcagagttcgaaagtgaaacaacccatacaccaaagcttttactatattcgtttccaagtaaggcggcggaagagcctccatgtatcgcgacgccgtcgatccatacctcagcttcgattccattccagtgggaggaagcgccagggaagcctatgtcttgtcccgccgctgaaagtcaaccaaagccacatactgcaagatgcttggaactgcctccgaggttgttagccgaggctaaagttgctaacatgccgtctccaacgactgtcttggacgggcctgattcgggtcgggttgtgtctcgtaccttgtcgtttctgaaaggcgggtcttttaagaaccctgattacaagagggtgattaagaagaaagtcttgttcggtccaagtcgtgggggaattttagaaa

SEQ ID NO: 46220 - DNA, 473 bp, Gossypium hirsutum
  Clone ID: LIB3585-026-P1-K1-E12
atcttcctcctcccagtatcttacacccaagatgaacccagtcttagccagtgttttaatgtttttgattgtggaagcgtaaagggcctgacgttccccttttggaaagaggatagtcctgaatattgtcgccaagaaggcttccaggtgatcgaatgtgaagatgatcatcagccagtcatccgtattggcgagactaaattccgattggtttccgtggatcagcctctttatagaatgacaatcgctagggaggatttgtgggatcaagtttgtagttcagatcccagtcgtatttcaaatgtgactctggcatactctttcctgcgctattccgataaaaaccacaaccttaccttcttttacaattgcaattcatcatttccagcacatttccggtgcggccaagagttagttccaatctatgcagatggtttagtggatagaggttcttatgaacagttttttggctc

SEQ ID NO: 46221 - DNA, 286 bp, Gossypium hirsutum
  unsure (1)..(286): unsure at all n locations
  Clone ID: LIB3585-026-P1-K1-E4
gnaggaggacccgncacaganagcagcngagnctagagacgaggangaagagggggaagaagcggangaagangangcngaaggggccagggagaagaaacgaagcaagaaagagaaacngaaggagcgggagnncaagaaagacccnagcgagaacaccngggacaccggcaacaagaagnnnaaagaggnagcggcngccaggggaaggaagggaacnggaaaannggaacaggncgagcagcncaccngcgagacaaagggagccaagacgccggcncagaag

SEQ ID NO: 46222 - DNA, 581 bp, Gossypium hirsutum
  Clone ID: LIB3585-026-P1-K1-E6
gcggagggaggatggagggttatcttagagctccggcggaggagaagacggaagtggcggcgtctcctacgtgttgcgtcaccggcgccaccggttacatcgggtcatggttggtgaagcttcttcttgaaagaggttataaagttcatgccacagtgagaaatccagaaaaggctttacatctattacaactatggaatggaggtgaccgactgagattattcaaagctgatttgctcgaagaagggagctttgatgaagctgtcaagggctgcaacggtgtatttcatgtggcagcttcaatggaattcgatgccaatacaaacgaaaatattgaatcatacgttagatcaaacattattgaccctgcaatcaaaggcactgaaaacctcctcaaatcttgcttgaaatccaagacagtgaaaagggttgttttcacatcctccataagtactatcactgccaaagacagcaatggaaattggagatctgttgtggatgaatcttgccagaccacaattgatcatgtcttgaatgcaaaagcaagtggatgggtttatgtgctctccaagctttgactg

SEQ ID NO: 46223 - DNA, 340 bp, Gossypium hirsutum
  unsure (1)..(340): unsure at all n locations
  Clone ID: LIB3585-026-P1-K1-E9
gccggaancccgggcgcccacgcgccgggnagacncnncaaccggccaaaaccggcggangnnccagaccgaaaaaaggggcagcnnncaccaagcagcagccggcagagcaaaaaggagagcgcaacagaggngggcngaagcgcggaaaaccaccancnnnacaagggaagnggagagaaagcacaccancccaccacggngcaaagggaaccgngaaacaagaacacagcncacagggggaagaggggccaggacaagaccgccanagggaacactagnccaaacagcaagacnannncgggngaagcaagancggaccgagggngaagcagagaga

SEQ ID NO: 46224 - DNA, 355 bp, Gossypium hirsutum
  Clone ID: LIB3585-026-P1-K1-F3
agagattggcttggctctaaagaagctttctgaaaatggtgtagtgaaacgtgaaaaactttggatcactttcaagctttggaacacttatcatgcaccggaagacgttccacaggcattgaatggtaccttgcaagacctgctactggactatgtagatctctatcttgtaagcataagctaatggcaaccatgttttcgacttgcccttatcacaaagtagattttgtaaatgttttcttaccataaatggtgattctttaacattgaaagatgcactggccggtcagcatgattaaaggagcagttggctttgaacaaaatgacctaacacaacctgatataaccagttcat

SEQ ID NO: 46225 - DNA, 310 bp, Gossypium hirsutum
  unsure (1)..(310): unsure at all n locations
  Clone ID: LIB3585-026-P1-K1-G12
aaccangaagaagacgaaganagggaaggccaggcngcagcaaaaaanaagaaanangggaagcagaaagcaaagacggaaaaaaanagggaanccccaaccanagaggagcgggagccgcgagggaannaggagaggccaccngnncngaaagnnagannnncnnccggnnaaggaagcngcgcgccaacaccaganaaggaggnaggggagnncaaagggccngnnccanacgnaaagcaanaaaaggaannggagagaagaagagaagaacangaagaanngcncnnggcagaaagggnangagaga

SEQ ID NO: 46226 - DNA, 135 bp, Gossypium hirsutum
  unsure (1)..(135): unsure at all n locations
  Clone ID: LIB3585-026-P1-K1-H2
aaaagnccttgcggaggacttaactcgacatctgccaagatatgcaaggtgctccataagatgaacactcggcctgataaagaaacaaaagatctgacgttgggagacaaggcataggctcaataacgtcgagat

SEQ ID NO: 46227 - DNA, 275 bp, Gossypium hirsutum
  Clone ID: LIB3585-027-P1-K1-A1
cttggatggcgtcagaaaaatggctacgaacttgtggcacatgagaagatctgtttcgacaagtggaaatatgacgacgcacaaaggagatcctacgagcagaggaacgggcctgtagcaggtgcctcccgccagagctcaagccccggggcctgcagtggcaccagcggagaccactgtgagctcgtcgttcggattgccagtttggaagtggagaaccagagtctgcgtggcgtggtacaggatctgcagcagtgcctcttcaaaatggaggc

SEQ ID NO: 46228 - DNA, 139 bp, Gossypium hirsutum
  Clone ID: LIB3585-027-P1-K1-A4
tatacttgctgggaggtccactgttcctatgcacactctacacaacagatccgcggcgtgttggcagttccggtggatcaccatatcacgactgttgacgctggcacgttacggaacttaatgtctgtcctgacttttg

SEQ ID NO: 46229 - DNA, 237 bp, Gossypium hirsutum
  Clone ID: LIB3585-027-P1-K1-B10
gctactcctactggaccatctgttacaatatatggtgtcaaaaggccgttgccactttatcggatcatagaggatcaattgtatcctactttgctccacctacacagatacttcttattgagctatctctgattacacacactagttcacaaagaaccacttcgacaggatgttctacgtgtgaaaataacatagctaccatcaaaagctgaaaaactattaaaacagctagacatg

SEQ ID NO: 46230 - DNA, 157 bp, Gossypium hirsutum
  Clone ID: LIB3585-027-P1-K1-B4
atatatatatatcaacagtagagttgtaagttggaggatatgggaaacttttgtattaagaataagatacgtaaaggaaagtcaggccttgcttttaagttggttcttatatcaacatattaagtttatgattgaataaaatgattttgttttgagg

SEQ ID NO: 46231 - DNA, 204 bp, Gossypium hirsutum
  unsure (1)..(204): unsure at all n locations
  Clone ID: LIB3585-027-P1-K1-B5
ccgcgnccgctatatatatattaacagtagagttgcacgttggaggtttttggacactctcctataacgaatcaggcgcgtgacggatagacacgcctcgctccataagctggttatttatatggacagaggcgagatatgcttngggctctttacgcattctacaaaaaatcaagaagaaaaggggcggtcgttaaatcatac

SEQ ID NO: 46232 - DNA, 462 bp, Gossypium hirsutum
  Clone ID: LIB3585-027-P1-K1-B8
attctcacctagcaaagaaatagcatacatggagactgtctaccctgttttcagtgtatttgcattattaagcttgcacttgtttttgtatgggtgcaacttgttcatgtggaaagccacaagaataaactaccacttcatctttgagtttgcaccaagcacagccctcaagtacagagatgcattccttatttgtaccactttcatgacttctgtggttggtgccatggtcatccacctgttattaagggctggacgcttttcaccttctcatgttgacaccattcctggaatcctccttctgattttcattgccttgctggtgtgcccatttgacatcttctatcggccaactcgatactgtttcctacgaataattcgtaacataatatgctctccattgtataaggtcttgatggttgattttttcatggctgaccaacttactagtcagattccttt

SEQ ID NO: 46233 - DNA, 369 bp, Gossypium hirsutum
  Clone ID: LIB3585-027-P1-K1-C5
gcacctataggcgcccacaatctccattttcaccaatcacaacttagcagctttgaccctttccctttgtttttctgctttgcttttttactttcttctaattcccctgtttcatacattattatataagcattcattctctcttgctctctttgcttttgctttttttttgctttataaaagagctaacaatttctcaaagttgctcccttttcttggattttcactgatttttgatgttgtaatgattttgggtttttgaattttgatttatatattgatttttcagggttttaattcagtgttttagtgggatttcggatctttttatgtatatctaggtttttttttcatcaagatctgattttt

SEQ ID NO: 46234 - DNA, 461 bp, Gossypium hirsutum
  Clone ID: LIB3585-027-P1-K1-D2
cccaaactgtttttgtaatctggaaaaaatatcatttggtactgcctgtgttttcgcatctctcttctccaacacccatttgttagataatggctgataataagatcaaattctttgaactcaacacaggagctaagatcccttctgttggtttaggcacttacggtgctaaacatggtgtccttcaaaacactgtcatttctgccatcaaggttggatatagacatattgattgtgcttcaatgtacaacaatgagaaagaggttggttctgctttgaaaaaagtgtttagtgagggtatggtgaaacgtcaggatgtatgggtcacctcaaaactatggtgtactgatcacttgcctgaagatgtaccaaaggcattgcataaaactctgcaaggtttgcaacttgattttggtgatctctatctaatacattggccagggagtgcaaaaaggggagca

SEQ ID NO: 46235 - DNA, 513 bp, Gossypium hirsutum
  Clone ID: LIB3585-027-P1-K1-D5
cccacgcgtacgcccaccaccatcatcgattcatcaaaaataagcagaaaaaacaattcccgactccaaaatccaacaatggcttctttagaaacccatttgttagcaagtctcttctttaccccaattggcatccgacgtttcctttgttcatcatcccatttcttaaaaaacccatctttattcaaatcaaaaccatggtatttctccaatcccaaatggaaaaacttagatctttacatcctcgccgttgctcttccccttgcttcttttgccgaaatcttcattttttcatcactttcaggccattccacgtatcgtatgtgcttcttccagcaattttcaagcctttctctgttttggatactcattattttccttgttctttatgattcccttgatcatctcctttttaatgaaagtttcatctttctttacgcttgtatagcttttcttgttgagtattatttcattggtggtggtataactggtcttggtactatagttaataac

SEQ ID NO: 46236 - DNA, 490 bp, Gossypium hirsutum
  unsure (1)..(490): unsure at all n locations
  Clone ID: LIB3585-027-P1-K1-F12
attaggacttgcatgccatttgggtagaaaggttggaatagtggctattgctggctctctgtcccctgtataaaacttgacttttgccagttcttatttcttctgcatgtacaggtttgtatctcatttcccccattctagaaaactcacaagttgttctacttcaatttccttcatccttgttttcttgcaacgcttgtaactaatattcacaatatttttccttaattatctgtatctggatgagttatgtaatgattcttaaagcccattgatgaacaattttgtctgataaaatccaaaatcaagttctccttgaaatcccggctagatgccatgccttaattttcagtgggctaatttaattagaaaggttaagaagaacgaacatccaagctaggaataagcaggtgagatgctgcaatcctttttagttatatatatatatgttgagnggttttctgtgtgccttcttagtgggaaaatcaag

SEQ ID NO: 46237 - DNA, 472 bp, Gossypium hirsutum
  Clone ID: LIB3585-027-P1-K1-F9
gggaccatgaagcacctccccgccctacaaagagaaaccctgaccagcatcatgatcgtgactatgaccgtgatcgccatcatcaccatcgacctgagtcttccaagcttgcccctgaaacagtcaccaaagccacttccacgactgctactgcagcaatggataagagtcaaaagacaagtgtgttttctcgcattagctttcctgaagaacacagcaagaaacgcagactatcttcggatgcacctgcatcttctggccatcacaagtcaacttccaatggatactatgatgactacaagactagttcagcagccccaaaggcaatttctggtaccagcgggggtggtaggaagagcagtcgtagcaatgctgtagattacgaatctagtgatgatgatagacatttcaaaaggaagccgtcgaggtattcacggtcaccatcggctgagtggatagaacaaccacggca

SEQ ID NO: 46238 - DNA, 465 bp, Gossypium hirsutum
  Clone ID: LIB3585-027-P1-K1-G1
gattaagaagaaagactcgggaagttggatggtagatcgacttaataaagatcataatcatgatctcggagaacaaacggcgtacgtgaacaaattttcgacagcttcaaagaaattcatagaggaagaaaccaacggtatggtctctatggatctcggtgaaatgaacaccggcaagcttattaaaagaagccgagaaagcaaaatcggaactgattggtaccctgtacttttagagtattttcaaaccagacacgcagaagatacgggattcttttattcagtggaggtcgataatggtagttgccggagtgtcttttgggcggatggtaggtcgagatattcatgcagacagattggtgatgttgatattttagatacttcgtataggaaaagtaactatgtggtgccattcgccacatttgtcggagtaaaccaccataaacagccagtacttctcggatc

SEQ ID NO: 46239 - DNA, 466 bp, Gossypium hirsutum
  Clone ID: LIB3585-027-P1-K1-H8
cccacgcgtccgttcattttttatccgaagccaatacccccagaattttcacaaacgaaatgcgaccgcagccgcaggcgaccggtgagcgcctggtgcggttgtccccgcagctttcgtcaggggaaccagaaatgtcttccacttcaacgtctacgtgtagcccccatacttgcaggtggcggtcttacccaaaatcgaatgacttggaagctaatgtagccacggtgttgatcattctcttttgtggtttaatatgttctttggctcttaacgccgccatccgctgcttcttgcgtggcagtgagggccgccgcccgcgtcatttccgcaacgacattgcggaagcagatgaagaagttgagcagagaaagcccgtgggggaggcaggtgcggcactcatggtggcggctccgacgctggtttacacgagcgggatgaagttggcgggagcggaaagctgatg

SEQ ID NO: 46240 - DNA, 332 bp, Gossypium hirsutum
  Clone ID: LIB3585-030-P1-K1-A12
ctcttacaggacaaaatctatatgatactaagagcataatctcaaaattttattttatgtggttacaattgagaaattacatcaagcaatgatgatgtattgacaagatatctaggcacaactccaatggggaaatgaagacaccatatcattatgagggagcactcttgtggagggataccctctaacttgccctcatcttccatgacaaatttgttcacaaatgtgagtgagcttctgagaagtgtcttgaaccgatgtgagacgtgcagaactctcagggggccaaaggtattgaactgttaaatgcaaagacttggtatgatgaatag

SEQ ID NO: 46241 - DNA, 507 bp, Gossypium hirsutum
  Clone ID: LIB3585-030-P1-K1-A6
cgattacgccaccatccctttccttgctgaggtctttaagcttatcgtatcaagtgtttttctatggagagaacgaaagaaatcgccgccgccgaaaatgacaacggattggaagagtgttagattgtttcctattccttcagttatttacttgatccataataatgtacagtttgctactcttatgtatgttgatacatcgacgtatcagataatgggtaatttgaagattgtcactactgggattttgttcaggttgtttcttaagaagaagctttcaaatctacaatggatggcgattgttctattggctgtcggaacaacgacaagtcaggtcaaaggatgtggagaggcttcgtgtgactccctgttctcagcaccaattcaaggatacatgttaggaattttgtctgcttgtctttcggcattggctggtgtttatactgagttcctgatgaagaagaacaacgacagcttatactggcagaacctacagttggacacttt

SEQ ID NO: 46242 - DNA, 499 bp, Gossypium hirsutum
  Clone ID: LIB3585-030-P1-K1-B7
ggcccggcatgacttgcccgggcgacgcacgcgttcgacaaaacaaatgaacttgcgataacctttatctgaacctcaaatcgatctctgaatcgagggaaaaaaaactaaccaagggctgtgtacatttcaattccgcactgaacgccaaaaaaccagagtgccttgctcagaaaagagatggcgatgaaccatgcgggcgcgcagatagaggcgttaggaggactaagggctatgctaattcggatacatagatggtgcaccacatatactggcatctcatggatggcttgggtagcgagagtcgcactttcaacacttgcccgcgaagcgtttgtgattagactaatgagccacttttcacactccgtgaatgagtgatcaatgcttgctttaaaaatgggcatatgatgacccggaagtgaccgaagagtctgagaagaagtctacagatcttttaatggtggaactgaagctcagagaaagctaagcttttgaa

SEQ ID NO: 46243 - DNA, 304 bp, Gossypium hirsutum
  unsure (1)..(304): unsure at all n locations
  Clone ID: LIB3585-030-P1-K1-C12
ccaacaacaaacgaaaagagagagacaancatgacatcaaacggtnaaacccgccacaactcacaaaggtacccaagaccggtgtgaccttagccggatacgaaaaaaccgcttgccagccaggacactgcaaccagctcctggctggaaacacggcccacgagaacctcacacacgggacgctggtaggacaaacgtgggaccgggctcgaccggaacacacttcggccgaatccaaaaagcgaagcggagaagacatggctccgaaccaaagatccgacgccgagccagaaccaagggagga

SEQ ID NO: 46244 - DNA, 368 bp, Gossypium hirsutum
  Clone ID: LIB3585-030-P1-K1-C3
cccacgcgtccgcccacgcgtccgaatcgttgtacggttcgtgataggaagaagtgcgaatcgcagagatagtttagacagggagattgacaatgaacacaggcagactgatgacatcattgttctgaatcaagtggaggcacccgaggaatgttcaaacaagataaaatttttctttgttcatgctgtggagagctgggatgcagagttctatgttaaggtcaatgatgatgtttatgttaatattgatacactaggtgcaacactctctgctcattcagataagcctcgtgtttatatggggtgtatgaaatccggacaaagtttctccgaaccgactcacaaatggtatgaacctgactggtgga

SEQ ID NO: 46245 - DNA, 398 bp, Gossypium hirsutum
  Clone ID: LIB3585-030-P1-K1-C6
aacacacgtacaaccacacgtacgatagcaaccacgataccctatctgggattcaaaggcacgagggcgttcaaacccgatggagggggcaccagccgctatcttcctctgaagaagatgaagaggtgacatcttcagaggaagaagaacaagggtcttcaactgacgaagaagatgaggaagaccccaaaacctagtcaactgcattgatccaaaagagcccaccacccacaaagccggaaaccgctacgcctggagacgttaacgatgaatctgaagaatacggtacaaatacgaatacgaattcaacacgcatacaccgaaagtgtaacctgttggtacgaaacctatggaggaaagttgaaatgcgaagaaacccaaatctaaaaaacccatga

SEQ ID NO: 46246 - DNA, 509 bp, Gossypium hirsutum
  Clone ID: LIB3585-030-P1-K1-C9
acccctccttacatgtttcactcaagaaggtgattatctcgccattttgtctccggatggggctgttaaaatttggagcacaggtactgggagtttattggcggagtggaagcagtcagatggcaaccttcctaatagttattcctgtatggcttgcagttttatcccaaagaagcataaaaaggggcgtggaacttgcttacttgctattggattaaatgaaggggacatctggattattgatgtcttagctggtgacaagaagtggtcatctactggttattatcctagtggaatcgcaggtctttcattcagaaataaaggtcatagtctgtatgtcattggaagtaatggaaaggcatctgaaataaactcagaaaatggagatttgataagggagttcaaagcttccaaaaggtccaatacttctttgacattttcacaagatgggaaggatttggctttggccaatggtaagctttgtggtttccaggcctggaaaacgggga

SEQ ID NO: 46247 - DNA, 135 bp, Gossypium hirsutum
  Clone ID: LIB3585-030-P1-K1-D12
cccacgcgcactatatcacagcaactactcttaccctagaacgatccattacaagcgggggaggatcaatgaacgcaccttgctcaaatgcaaccacaaacaggaacacttgaccttcaatttagtgaccactta

SEQ ID NO: 46248 - DNA, 612 bp, Gossypium hirsutum
  Clone ID: LIB3585-030-P1-K1-E2
tttaggtaaacctgacaaggacaaagatcttgctaggccggttttgggtggcgaggaaaggccttatcctaggcggtgtagaactggccgaccggcttctaaaatagatccactttgtgagagtagaatcgaaaagcctcatcctgtttacgtacctcgggatgaggccttcgaggagatcaaacaggatactttctctgctgggaggttgaaagcacttcttcacaatcttgtaccattgatggctgctactttatcgagttctgatattccgttcacatgcttttcggagatagataagctatacaatgacggtttcatcttgaaagacgatgagcaaagaaaattaggtgacaatctattcatcggcaatatgatgaaacaagttctcaatgtaggccaaaagttgctaaaatatgaaatcccagctgttataagaaaggacagattttcatggttgcgagacaatgaatttgcacgccaggctttggccgggtcaatcctgggaatatcgagattttgaaggaatttccgattcttagcaaactaaaccctgctatttatgggccccccggaatcagtgatcacttagggaattggatcgagccaaga

SEQ ID NO: 46249 - DNA, 259 bp, Gossypium hirsutum
  unsure (1)..(259): unsure at all n locations
  Clone ID: LIB3585-030-P1-K1-E8
cccacgcgnccgcccacgcgaccgagctagggaancagnggngaaggggacaaacaagggcgcaccacacagcagggcatgggcncgcgncngcnncncnccaagacgcccccaacggaaaagcnggaacaccncaaaacagccggcgctgcccacncagaaancagcgaaaacgagaaaaacggangcagcaaaccggacacccgctaacacagnggagaagctcagcacatagagcggaagaagacccacacgccaa

SEQ ID NO: 46250 - DNA, 362 bp, Gossypium hirsutum
  unsure (1)..(362): unsure at all n locations
  Clone ID: LIB3585-030-P1-K1-E9
cacgcggccgccgcaagagcancaacaaaaangagcaaacaacncacagngccaccggnggacnacccgggaggccgaagaaacaacgccgaacagccccaacaccaaccaacgccgaggcccaacagcaccagcccagcccacaaccaccgccaaacccgacaaggcccncgaaaacggaccgggnccaacaacaaccagagccaagggcgacacaaacaccacgacagccaaacccgcgaccgccccaaacgaagacaaagaacccccacccgacgaacagggcagccacccagaccaaaacgggcacaaaacgaaaaccaaccncaancgcagccgggacaacccagcggcccacaaag

SEQ ID NO: 46251 - DNA, 310 bp, Gossypium hirsutum
  Clone ID: LIB3585-030-P1-K1-H1
ggctaatgcattagtgtcctatacagatcatttgtcaaaaggcagcactcgtaacaaagaagcgatgttttgaatatcatatgttacttgtcacgtgtgagtgttgcatataggcatgttcaattgtcgatttcatttccatgtatttagaggatactatgaggaattatcttttgtatgtgtcgcacctgaaaggtgtggatatttatttcttcgggaaggtatccacttaaatcggtgtaaaattattattttttgtatatcttcgtataatgaatattttaataaatcaataattgaaattatcaat

SEQ ID NO: 46252 - DNA, 630 bp, Gossypium hirsutum
  Clone ID: LIB3585-030-P1-K1-H4
ccagactctgaaagaacccaccttcaatttcgctgatcccctctttcttttcttttcttcagccatctttcaatccaacacctcccttcttttttctctttttataattttaatttcttggcttctttcattctctgaatcaatcgcccattctccatgcctaagagagttctttgcaagttctttgctcatggagcgtgcctaaaaggggagcattgtgagttttcccatcaatggaagcacccacctaacaatatttgcacgtactaccagaaaggaaactgcttttatggtagtcggtgcagatatgaacatgttaaggcttctcaatcagatccatctgcttcgtcttcatcaacagcacctcaacaatctacgttatcagatactatgcctttagctccttcaaaaactgcatttgttgggtcggttgtatctccagctgcttctagtaaggttcctggttccagtagagcttgccttgctcccttcaacaaccatgcgatttggaatcttggccccaagatctatcagattatggtgaatctatagagcctaggagaactaatccagttgaaagtctatctgctcatttgctgtagctggaaaatgtccccgtggagaaaaatg

SEQ ID NO: 46253 - DNA, 597 bp, Gossypium hirsutum
  unsure (1)..(597): unsure at all n locations
  Clone ID: LIB3585-030-P1-K1-H8
aaggaaattcaagaaaagctgttgagaatgcagaaagtactgagaaggttcctggttcatgtagtgagaaaacttcccttccgattgctgatttagatgttaaccttgaaaaacctgatacatctcatcgtaatagtagtcttgataatttaaatggtgttggcttgagcttaaactcttcattctcacacggaaacaagcacccagtcaatcctaatgttagagctgcatctatcgaatctgatgaggagaatgatgacaactcatctagtatgtttggacttggtcgtaagttacttgtaaatggttttcacagaaaagtgtcgattaaccatgatgttgaatctgaaccagccacttctactaaaactggggtgtctgagcagaggaatgggcaacagagcacctcaaatcagaaaattccttggacaaccttcagtcagcagtatggaaatggatctcctgtaaattcgcttacttcttctccaccacttgaacatatgaaaatatncttcacccccatagatggatttgagacttctaaactcagattgcaattccctgatgcgaatcattgtcaggaaagcgttagggata

SEQ ID NO: 46254 - DNA, 479 bp, Gossypium hirsutum
  Clone ID: LIB3585-032-P1-K1-A10
gggaagcttccgactttgccatcatttgagtcccaccctttatacatctcactctcatcggcatccaatactagtggaagcaagagcaccgccagtagtcggttgtccaccgccactgccactaccagcagcgtcaacattactgtctcatttgcttcatccgattatgtgactgccaccgaagaaactatttatgaaactgctgaatttggagtcaatggttccaatttatccaccagcagcagccgtcgtccaaccaacttctttatggtcgatactccgagggaaatacccttcaaggagctcattgtcgccactgataatttcgcggaatcacgaagggtggcggagcttgacttcggaactgcctaccaaggtttccttgacaaccgtcatcacattcttgtgaagagacttggcatgaccaaatgccctgcattgcgaacaaggttttcaagtgaactccaaaacttaacgag

SEQ ID NO: 46255 - DNA, 698 bp, Gossypium hirsutum
  unsure (1)..(698): unsure at all n locations
  Clone ID: LIB3585-032-P1-K1-A4
gttatggattagggtgctgtcaagcaaatatgttttagtagtagtgattagtgaaagtaattgacttttctggtgtggctaagggctaccanatgaataaaaaagttggacctttgaaaaacgtagggttataaaaaacctctcgttttggtctatcaattcaaagaaaataacaagaataataattttggctgtaaagcatacattacaacttatttatactagacttttcctgcaagtaaagttactaggctttcttgcaaataaagttttattcctagcctttaaaccctaaagttagctaataatccaggctgacaataatatatctaatacttaataaaaatctaaaataataaaatattataaaataaataaaagcttctacatcattttcactctcactgaatcattccatacattgtactagattttggacatccacacttgtattttcttccttgagtccgctttagggaaattatatgccaactgggacaatatgagccatttaaccatttcctggtggggaaaatttttaaattttcccttgtggggttaaaatgaactagagcttgttaaaaattcaagattgtctgtagaaaggttctagataacaaaacctttggaggcagaaccatatctgaacccatttggtttctcatgcatgcatataattttgctatgcatctaatgtg

SEQ ID NO: 46256 - DNA, 675 bp, Gossypium hirsutum
  unsure (1)..(675): unsure at all n locations
  Clone ID: LIB3585-032-P1-K1-A6
ccgcagaaaaggatccatagcaggaggaaatggcttcaagaggtgttgagatgggtctaatcctagtgctgatggcaatggtatgggctggagccagcgcccaaagctgcacctccgcactcaccagcctagccccatgccttaactacattacaggaaattcctccaccccttcatctacatgctgctcacagctgctgaccgtcgttcaatcatcacctcaatgcctttgctccgtgcttaataatggcgcttccttaggaatcactataaaccagaccctggccacgcaactccctggtgcttgccgggtgcaaactccaccaattagccagtgtaacggtggaacgcctggaactccatcagcagggtctccaactggttcaccatcagagtcttctgatgatacacctgaaggtgccattacaccatcagcatcaaacattccttcagggtctaaaactgttccatccgtcgacgagggatcattcggggcaagcatggagaaaggctccctcaattgggttttcttccttctttccattgcagccgtcgccaaattctgatgagttgatccatgcagggaattgttgcccgttgccgtgttgatgatgattctttttcccttggtttcctcatataangctttgtttccgatgtgatttgaatttgact

SEQ ID NO: 46257 - DNA, 309 bp, Gossypium hirsutum
  Clone ID: LIB3585-032-P1-K1-A7
tcttggtcctggtgggaatggtcactcacctgacatataacattcaccttctggcggcaatgcacctgctggagcttacccacctaaaggctgttcaccagctgactaccctcctcaaggaggatacccccctgaccgctatccaccatacggctatgctggaggaggccattcatgctaaaccacctacataatcgaaacgtgggccaagaaaggtcatgccaaatgcgagatgccaataattaataaccctctttgtgtgatgaagtgaagactgtgtgctttacaggacactgttgcactctgagc

SEQ ID NO: 46258 - DNA, 507 bp, Gossypium hirsutum
  Clone ID: LIB3585-032-P1-K1-B1
cggacgcgtgggttcaacagttgtgttttgacaccgccagctccatctcggattttgaccaaccagcaggcagggggttgtgtttagttagggtgagacaatttaacaaggtaaaaggtggttctggcaatatggctcagatactcttcaaatctaccatgttttcgtgaagggaggtatatgggtaaagggtaaagtttgactactagatctagaagcaccggtgggagttggggctcacaggttttgcgttgcactcgcatctgccattttaaggggcaacagctgcctgacttcctgccatattttgtttttatataaacatatgatcaaattaaataacatacaattaaaacttgcttttttgttttttttattctggctttgatgatgaagttgatgaccttagcgtaaagtaatactaaaagaaagacattcctaggaaaaaaatgtttagaggccgaagaattcttttgactttggtcaaatgttatgcattttcacaat

SEQ ID NO: 46259 - DNA, 669 bp, Gossypium hirsutum
  Clone ID: LIB3585-032-P1-K1-B10
gttctggggaacgccttccctccattgatactcggccacctcgtatccgtgattcagatgcaattattgagattgtttgtcaggatactctagacgatgattcctccactggcaatgctgttgaagaccgaacagaaaatgatatgccaagggaggatcttagaggagatcttgcacctgaagctgatattgcgcatgaagatactgaatatgttaatggttttccagatgcttatagcagtcgaaagagggagctagttgaaagaactatgaactctgttcggactaatgtgcctgaagatgatggcattttgcctgtctgtggggaaacatcacgcccatatggtcctggatttaggagccagagtcctatgtatcataatggaaactttggcagtcctcgtgatgagaggcataggcagggaagagcacgtgagagatcccctcacatgacatctagtcgaggtaaatgggacaagttaagtgatacccattcccatgaggaggaatcttggtgaaagcattggatcacaaatctcctctcctcgttaaggatgacgttgatgatgagcttgagccagctgatagaagccctgttacagaaaaggatgagctgataaatgaccccccgtaagatgagagtccacatgatcctaagaaaaatgaaga

SEQ ID NO: 46260 - DNA, 476 bp, Gossypium hirsutum
  Clone ID: LIB3585-032-P1-K1-B6
ggcacataaaacctgagaaacacccaacacataagaaaattttgaggtaaagtagatatatttagggtagatttctaggttatagggatagagagaaatgagaacaaggagagggctttgttatcctagagccgatgtttgtgttgataagatagtagttaaacggagggatttcgccggatataatatggcttgccggaaacgccaaagattctcgccggtgattgctggaaacagtgatttgtttgacgctttacccgatgatcttgtcatttccatactctccaagcttagctcttccgcctcttgcccttccgatttcatcaacgttttgattacatgcaagagattaaatagttttgcacttcaacctttggtattatcaaaagcctcttcaaaattgttcgccattaaagctgaaaactggtcggagtcagctcacagattcttgaagtgttgcgccgatgccggaaatg

SEQ ID NO: 46261 - DNA, 504 bp, Gossypium hirsutum
  unsure (1)..(504): unsure at all n locations
  Clone ID: LIB3585-032-P1-K1-C4
aaaatctaatccaaactcggaactctgttcttccccgttctcccgccaccatggccaccactaccaccgccaccctcttcctctccccaccacttttcactgcanaatactcctcctcctccctccgcatcaaccactccctccttcccttcccttctatcaaaccaaaaccgctccactccccctcaacttcaacccttaaaccctccttcctcgtccgagtcgacgacggcgacgccgatgccggaggacccgatgactacgacatggacgaagaagaagtcgaagagctggacaacaagaaagacttcgatgttgaatacgaccctttagctgccgcctctgctgccaccgcttcttctgctactattgacgtcgacattcaaattactgaaagcaagagctttgtgtcaactcaagggtgggactcggatatggtggtagactataggataaatgaggaggagtttcataagattagcttgatggattgcgattttttta

SEQ ID NO: 46262 - DNA, 669 bp, Gossypium hirsutum
  unsure (1)..(669): unsure at all n locations
  Clone ID: LIB3585-032-P1-K1-C9
cccacgcgtccgcccacgcgtccgcccacgcgtccgcccacgcgtccggaagagtttcccttgaatgcaatggtaggtgattgatgctttcctcagcaagatagttaataacttctcaacacttctagtttctcaaggaatcaagcttggactgtttttgaagaaaatattgaaagctgatgatggtccagtgtccaaatctgattttatagaagcgacctcagattatattgacaaaagaagtaacctgcaggcagcaactgatatctccaaagcctacatctgtattggcaataatgaggttgttctcaatagtgtttgtcgttctcctggccgtgtcgaaatacttaccgatcttatacaaagacatatcgaggatcttaaattattttttcgcgaaacaaggttagaagttagaaagtttcattcatattgggaggcagatattaaaagattagagcatcatgttagagatcttgaagtggcatcttcttcttacctcaagatcttacaagagaattaaattgcttgtaaaggaagtgttaaaccttaaaggaaaaataagaatttctgtcgagtaaggcccattttaccaggggaatcggnagatcaatcaactgtagattatgttggagaaaaaggaagtatcctcaatgccaattctttaag

SEQ ID NO: 46263 - DNA, 145 bp, Gossypium hirsutum
  Clone ID: LIB3585-032-P1-K1-D1
agacccatgttgatatatgaactgctaacgtagatgcatggcaataactcaacattgattgcaaactgcactcgtacaaacactctggggcgtcatacaagaaaacattgcccaatgatacacccggcaaataacaagctgtgct

SEQ ID NO: 46264 - DNA, 338 bp, Gossypium hirsutum
  Clone ID: LIB3585-032-P1-K1-D10
gggactaaaaacaaaaccgcttacggttttatggagcggcctatgttgatccacgagcaatgtaattacctatccgctcagaatcgaatataaatcctactaatgaaaccgtcaattctctcaggctcgtctcatttccttccttccatgtaatgtttgaaattgctgtacttcaaaagtaaaaggggattcatatattttttcgctttcggaacttcgttgtcaaaagtttgagtttcacttatatcgcgtttgccaaataaatgtccggaacttggttaatgttcataaaattgtggaaacttgagaaatggactttaaaatcctcttatttagct

SEQ ID NO: 46265 - DNA, 482 bp, Gossypium hirsutum
  Clone ID: LIB3585-032-P1-K1-F2
agccatgcttgaagctgctctacaagatcttcaaggaaagcttaaattatctgacggtaaactcaatacatttcaggtggagtctgaaactgagacacaggaacttaaggaagagctagcttctgcaaagcaaaaacaggaaatattgatggctgaccatgaaaaactattagatttattggaagatgtcaaatccaatgaagacaaactaaaaggcactgttagagggctcgaactgaaactcaaagcttctgagtatgagaatcagcagttggcagaagaaatttccagccttaaggtccaattgcagaaaacaatggtccttcaggatgaaattttagatcttaaaaaaacaatcagtgaatccaagtttgaaaatgaaaggctggaagcttctttccaaatgttatccagagactatgaagaactcaaagttgaaagaacccttttagccgagaaagtctctaacagtcagcaagctg

SEQ ID NO: 46266 - DNA, 167 bp, Gossypium hirsutum
  Clone ID: LIB3585-032-P1-K1-F6
cccacgcgtccgattggaatcaaaatttgtttcactttgtttgtattcatttttcttttatctaatatagcgtacatttattaccccttttcactggatatgttttgtaatatgtgattgtgtatcattgtcttcattaaacatatacataaaacaaagtttccctt

SEQ ID NO: 46267 - DNA, 684 bp, Gossypium hirsutum
  Clone ID: LIB3585-032-P1-K1-G3
caaggataggattctatattttgggataggaagatcctttcatcttgaaaaaaaaagatcaattcaactagatagcagcagagtggtaggggatagagaagatattgactggaaccaagttgcttatgatgtactcacaaaagtgggtcttccgaatgatacccctgttaagattgtcaaagaagatgaagaaccaatggaatttcttatgttgctgaggacattgtagctttactgcaatctaggatatatctgcaggccgatagttcatagattatcttttgtctcttcaaatggcttatttttgctgtggaatttcaggcatcaggcataattcccacggcaaaaccaatgagatgtcattcagctacaagggaagtccatgtgaagatcagatcctgttggttgtttttagttcattttaagtagacttcagttatagagcatgaagagaatgcaagcaagatgtcagtcggcatgtgttatctaagaaactatgctttaaagaccgggggaggggaggggccgcaaaggatgtaattttgacaaattgggagtttctcgctatatatgctgaagcttagtgcatgtaagagtcaggaccttggtgacaccatagtaaatgtaatttccctggatgtcccattacagtgtcctctggctggcataattttcttggtttgg

SEQ ID NO: 46268 - DNA, 476 bp, Gossypium hirsutum
  Clone ID: LIB3585-032-P1-K1-G8
cccacgcgtccgcccacgcgtccgcccacgcgtccgagatgctagcatggacgaggttattgatgcggccaaagcctcaaatgcccacaatttcatatcccaattgcctcaaggttatgaaactcaggttggtgaaagaggggttcaaatgtctggtggacaaaagcaaaggattgctatagcaagagcaataataaaagcacctcgaatccttcttctagatgaagcaacaagtgcactagactcagaatccgaacaagttgtgcaacaagcaatagaccaagctgccgttggccgcagctccataataatcgcccaccgcctttccaccattcgcaatgctgacctcatagcagttgttcaaaaaggccaggttattgaaataggatcgcatgatcagttgatggaaaatgatatcggtcactatgcttcattagtccaccttcagcaaatagagaaagaaaagactcttgatg

SEQ ID NO: 46269 - DNA, 655 bp, Gossypium hirsutum
  Clone ID: LIB3585-032-P1-K1-H3
cccacgcgtccgcggacgcgtgggttcagtttggccaagacactgctccgctctggtgtggttgttgggttgatggggtcaactctgcctcagccattccccttcaagtgggatttaccaactgaagaacccacttttcatctcatcaccactgccgcttctctccgcctcggcaaccttctccgccatcagctccacctagggttccacctccgctcctcgttcaagaaactctgtcatctatgtaatgtgcctagattgaatcatgtatggtctgaaacaatttccaacttcatgggaattggcaattttcggtttgcaaatgatgttgtctgttcctcgtgttcatcttacttatgtttcttcaatgggggagaacaaagaaaatattttggaaatgagggtaatagtggatcatccaagatggatacttccaggagaaattcattcaacacaaggaaatggaccaacatccttttagctattaatgtcttaatttatgttgcacaactggcaacacaaggggaaagctctggttttggggagctaagattaatagtcttattgacaaaggacagatttggaggctggccacatattctcttttgcatgcaaatatagggcaccttatggtcaattggtattctttgaattc

SEQ ID NO: 46270 - DNA, 331 bp, Gossypium hirsutum
  Clone ID: LIB3585-033-P1-K1-A4
cggacgcgtgggtttctgtgtttgtgaactggaggatgttaggttgtaaattgtagtgattcggaattgaatgtttttaggtacattctttagttactagaaattgtagaggtgaagtccgttgttaagttatcattgggttttagaggattaggaagcatcgatgtcgattaagagcattatccaggacatgaagggagaatttgggagtatatcaagaagagggtttgacgtgaaatttgggtatggcatgagatcgaggtcacatagggtagttcaggatagctcagttccagttgatgtgttcaagcagagttgttgggcaaacatg

SEQ ID NO: 46271 - DNA, 496 bp, Gossypium hirsutum
  Clone ID: LIB3585-033-P1-K1-B9
cccacgcgtccgcccacgcgtccggttggtggtggaggagtttcagtagcagttactcgttttgcaactgagcaaaaacggcctgtaggaccactaattgtggttggtgtaagagatggagtcctttggctaattgataggtacatgactgcacatgccttatctctgagtcatcctggcattcggtgtcggtgtcttgctgcttatggagatgctgttagtgcagtgaaatgggcaagtcggcttggcagagaacatcatgatgatttagcacaatttatgcttggcatgggctatgccactgaagcacttcatttacctggcatatctaagaggttggagtttgatttagccatgaagagtaatgatttgaaaagagctctgcagtgtcttctgacaatgagcaacagcagggatgttggacaggataatccgggtcttggtttgaatgatatacttaatttgactgctaagaaggaaaatttggttgagggct

SEQ ID NO: 46272 - DNA, 278 bp, Gossypium hirsutum
  Clone ID: LIB3585-033-P1-K1-C1
cggacgcgtgggcggacgcgtgggcgaatttataccctgttctaggattaatgtgcttttatgttttttccggatttgagtatttacccaatgtgggtcactgtggttaattactgtgtgaagtgtgaactataagagaaagtcaactttttttgctttttgcttgataatcttctgttccttttaattttcttgttttcttgtactgttagatatcaacatcttttcgacaggtacttattgttgtttgtaaaaaagatgttgatatctaacagtcc

SEQ ID NO: 46273 - DNA, 443 bp, Gossypium hirsutum
  Clone ID: LIB3585-033-P1-K1-C12
catgtctataccgctattgtctatctcaccaagcaccctaataagccaaaaagaagacaatggccgatcagcttaccgatgatcagatctcttagtacacggatgctctaaccctattcgacaaggacagcgatggctgcatcactaccaaggagctctggactgtgatgcgaacacttgtgcagaaccctactgaggtacaactactagatatgattaatgaaggtgatgctgatggacatgggaccatttattttactgaattctttaacctgatcgcgaggaacatgaaagatactgattctgaggaggaactaaaagatgtctttatggatgatgacataggatcagaatgccatcatatcagctgctgagctgcaccatgtcatgacaaatctttgtgagaagcttacagattactaggtagattaactgatccgtga

SEQ ID NO: 46274 - DNA, 164 bp, Gossypium hirsutum
  Clone ID: LIB3585-033-P1-K1-D7
aagaaaccaccgatcccaactactacctcttctattaatggctgatcagctcaatagggcgcgggccggagccggagaaggcccgaccctgataaagcaactcgcggcgtgcgacaaggcgagccgaggcagatccgtacggacgagcatcaagggggggcgac

SEQ ID NO: 46275 - DNA, 513 bp, Gossypium hirsutum
  Clone ID: LIB3585-033-P1-K1-D8
gtgttacaccatacaatatggagaagatgtccccattagtttacgcaggagatgtagttgtccctggtgtgcctctaaacgttacaggtcaatgccttcctggttcactcgaccccaataaggtgaaagggaaaatcgtggtgtgcacgagaggggctggtctaagagtaggtaaaggcttgcaagtaaaaagagccggcggtgtgggtttcgtcttagccaacgccaaggctaatggagatgaaatagcatgtgacgctcatttgcttcctgcaactaccttgacctatgatagtgggattaagattcttgaatacatcaactctacaaagaacccgatggcagtggtcagtccaggcaggacagtattgaagtacaagcccgcacccttcatggctggattcaccagtcgtggtccaaatgtggtggatcccaatattctcaagcctgatatcacggctccaggacttaatattttggcagcatggagtgaagcatcatcttcctcaaagc

SEQ ID NO: 46276 - DNA, 636 bp, Gossypium hirsutum
  Clone ID: LIB3585-033-P1-K1-E2
gctaaagaaactctctatcgcaattcttctttctgcttctttattgtttctcttattctgtttcgtttttcaccaagcaatgatcttgggttcccaagattgcttttacaagagtgagaagaacccgatcagtacaacccggtctggaggaaaatgttctcgtgatcagagaaatggtaggttctctatgtcagctgaagttgacggtttgttaagttcagttgagggtgctaaatctttgaaggaggcatctaatggtagattcccaaatgatcatgttaggaataaggaagagaggtttactaatcgaaatgcaaaactaactcctgaaaatgacagcgaagttaacagtttcttagatcctcagagggaaatttcattgccatctttgccctcaaaatctgcgggggctgtaaatcctgatacgaaggaagcaccacaaactggtaaccttactatccggattgggaaagataaaggaagaaggctaaggaaaaggaaaggtggatttaaagaattgattggaagttttaggttttcaaagtgggaaattttaaactttaatcccttaattcccccacatttgtagcatttaatcgcacatggtcactctccccgatgtggagcaatccattg

SEQ ID NO: 46277 - DNA, 526 bp, Gossypium hirsutum
  Clone ID: LIB3585-033-P1-K1-E9
cccacgcgtccgatgattgttacctgaatgcagaagctaggattcaactggttcgagttagatcatacaaaaagcggtcaaaggagttctcagctctttacaagggacaagagatccaagcccatgaagggtcaatcttaacaatgaaatttagccctgatggtcagtatcttgcaagtgcaggtgaagatggtgttgtgcgtgtgtggcaagtgttggagtctgaactatcagggaattctgacattcatgatgtcaatccttcctgtgtctatttcacagtaaataacttttctgagttagttcctcttcacgtagacaaagagaaaaatggcaaatcaaagagggtgaagaaagtttcgggctcaacttgtgtcatcttacctcagaaagtttttcgaattttggataaacctatccatgagttccgcgggcattgtggtgaggtcctggacctctcttggtcaaagagtaagcatattctttcatcctctgttgacaagacaggtcgctttgggcaagtttg

SEQ ID NO: 46278 - DNA, 522 bp, Gossypium hirsutum
  Clone ID: LIB3585-033-P1-K1-G12
ctgctaccctagcacgactttgtctgcctctctagcatgttcttaggttttattatttcttttgttcatagtcaatttgacggcgtcagtttcaacaatctcttttctttcttcaggatagatctgattcttttattcatcatcaattgtagcagtggctgtctaccaaatttccttttattcttaaagataaccctggtttcgtctgttcatagtctatttgggcggcggccacctactaatctctcctcaatcttcagaatagtacgtctactgaggctttatagctgacctgtgatcatgaaaaaagaatttgctgagttaatgctcgatgaagaagaagcaatcttacaagtacaagatgagccgaatctggaaaagaaagggaattttttcgattggtgggttgttttttaacagccagttttattcattttctggcaataaaaagcaccatggcaaacctgtggcatccagtcagaggagttcagatccgagacttagtgattctttttgtgaggc

SEQ ID NO: 46279 - DNA, 523 bp, Gossypium hirsutum
  Clone ID: LIB3585-033-P1-K1-G2
aaaaaaaaaaggaaaaatgagatttcatttctctccaaaaacaccgctcctctcactctcttcttcctctatcacttccctttgcctccgtcctttccttccttctgcccctaaatcccatttttacccttccctcgcatgccacgtgtctaccggcggcaaccttcgcatggactcgacttcaccggatccctcctcttcctcctccgtctccgttgactccgtcgccgacggtttgaaaaaccaaagcttaagagaacatgatatcagtaataataataataatatgaacaatgaaaataagaagaataatggtaaattgagccttgaagatcttaattgggaccattcattcgttagagaactgcctggtgaccctagaaacgattcaattccacgtcaggttttccatgcatgttatacaaaagttttgccatcagctgaagtagagaatcctaagcttgttgcctggtcagattcagtggctgatttgcttgatttggatcctaaagaatttggaaga

SEQ ID NO: 46280 - DNA, 568 bp, Gossypium hirsutum
  Clone ID: LIB3585-033-P1-K1-G6
tgtacgcccgcaggtaccggactgccgggtccgcctaggcgtacgcaaaactatagatgatttctcccttggcaggccaaaaggcttgctcccatagattcagggtggcgagaggggtggttcccatgatagactagctactaagcatggggagttgaactttccatttcaaaactctgaacttgcggacaagcatgttagatcaaatttgctgtcttctagaattgaaaactctgagcaatcatggaatattaaggatgttaataaatcagctgcagttccaactgtcctcacatgtgaggatcttgaaaagtcaattctatcagaaagcactgaaaatgatccaaggttgcctcctgctattgaaggatgtaaaattcctgatgccaactgtgagaagaaagaagttattgtcgacaatcatgcatcccagcaccttctttcattgttacaaaataaaacaagtatgaaaaatatagtatcatcggccaatcttgacatcaggtcttcagaaagggtacacactattgaaacaacaagtgctgatgcggctagttgtgattcaata

SEQ ID NO: 46281 - DNA, 542 bp, Gossypium hirsutum
  Clone ID: LIB3585-034-P1-K1-A1
gatcactggttctgatgaccacactgctaaggtatgggactaccagacaaagagttgtgttcagacattggaaggccacacgcacaatgtttctgctgtttgtttccatcctgacgttcccattattatcactggttctgaggatgggacagttcgtatctggcatgctaccacttataggctagaaaatacattgaattatggtcttgagagagtttgggcaatcggatatatgaaaggttcacggaggattgtgattgggtatgacgaaggaactattatggtgaaaattggccgtgaagtacctgtagcaagtatggacaacagtgggaaaatcatatgggctaagcaaaatgaaattcaaactgtgaatattaagagtgtaggagcagattttgagggttctgatggagaaagattgcccttagctgttaaggaattggggacctgtgatctgtaccctcaaagcttaaagcataacccaaatgggagggtttgttgtgtatgtggagatggtgagtacattatatatactgctttgg

SEQ ID NO: 46282 - DNA, 528 bp, Gossypium hirsutum
  unsure (1)..(528): unsure at all n locations
  Clone ID: LIB3585-034-P1-K1-B12
gccgttaggtttatggcggatcccgaaaccgatgaggtttatgctaaaatcatgttggttcctttgagagagaacagttttggggttgaagatgatggttttgatgggaatgttggggtggagaaccctgaaaaatctgcttcctttgctaagacattgactcagtctgatgctaacaacggtggggggttctcggttccgcggtattgcgcggagactatatttcctaggttggattataatgctgaaccccctgttcagactattcttgctaaggatgttcatggtgaggtttggaaatttaggcatatatatagggggacgcctcgtcgacatcttttgacgacggngtggagtaatttcgtgaaccacaagaagcttgtggctggtgattcgattgtgtttcttagagctgataatggagatctttgtgtggggattcgtagggcgaaaagaggacttgggggtggacatgaatttccgggatggaactctgcgagtggaacctctggttcacaaattgggagt

SEQ ID NO: 46283 - DNA, 500 bp, Gossypium hirsutum
  Clone ID: LIB3585-034-P1-K1-C11
gatatgatggggacatagcttttgcaagtgcccttgaaatgtttggtggaggacataatgaccctattagtgttgcttttggtggaccagttatgaccaagtttaccatagcattgagagaaattggaacatacaaggaagttcttcggtcacaggttgaaaccgagctaaatgaaaaattaatgcagtttgtcaatagggatttacttgacgtcaaggaagcacgtaaacgctttgacaaggctagtctcgtttatgaccaggctcgtgaaaagtttctttcactcaggaaaagcacaaagagtaatattgccaatgttttggaagaggaacttcataatgcgaggtcaacatttgagcaggcttcgcttaatctagtaactgctctttcaaatgttgaagctaaaaagcgatttgagtttctggaagctgttagtgggactatggatgcacattttcgatacttcaaacagggctatgaattactggtttaaaatgga

SEQ ID NO: 46284 - DNA, 311 bp, Gossypium hirsutum
  Clone ID: LIB3585-034-P1-K1-C7
cccacgcgtacggccacagatagaaggttgcgcagtacctcaagatgttccatccttgtgtaccccatcacacaaagaagggggcgtttgattagttacttcaaattgagccgctggggatagcgctactgattaccggacggctgacttcggcctcgattgtgcaaatgaggcgggatgccagacggcaatgtggccggtcaaacgtgactgactgatcgatacactagccaatgatctaattgtccctacttttacagcgtccatggactggacattgtggcacccccatgcagtcagtgatatagccg

SEQ ID NO: 46285 - DNA, 541 bp, Gossypium hirsutum
  unsure (1)..(541): unsure at all n locations
  Clone ID: LIB3585-034-P1-K1-D10
cccacgcgtccgtaaccaccccaacgtgtgaaacaaaatggccttcgaaccccaaaagaaaaagaaaaacaaaaacccttcgatttcacctttgaaaacaacattaaagggaattgctcgtcatcttcttcggaacaaccctcttccatgttcttagcaaactctctttctttttcaccttttttgtttctctccttttgaacattagtagggtttgtaaaggaataaagcatatcagctgaagaagccccagatagcaatgaagaagaggaagaagttattgtatgatgttatcggttgctcgcaagagattgaagcatatatcaagtatatcccggcagccttgaaagttctccgccacggcgtgtggggcacttccgacgacgtcgtcgacatataaggtttgcttgctagaaaaaaaaattcagcggcgtacatgggaaagccaggcatttcttttctattggtttcttctcattttcttgttcatgctgttttatttatattataaaaatttttacgtgattatttttcttntttt

SEQ ID NO: 46286 - DNA, 390 bp, Gossypium hirsutum
  Clone ID: LIB3585-034-P1-K1-D7
tcgaacatgatgaagagtaccacgagtcatgcgattttaaagagcacgaagagcacgcttgagcacagctcgattcacacaatggggaaaagtcttaagagcacaggagacacaaggcggaatatccgaaatttcacgagtgcactgccataccccatcaccggaacgcgcgtttgacatggaagaactcacctcatggccactttatagaggccgcaatctctgagttcattaccaccgttcttttcttgtgtgacacggcgtagactgtgatcaacactaaagtccatatccgcccgtacaagaatactatggaacccaatagtggaggtggaacaatactaggtatagctcgggcttttgacggcatgatctgtatccttgagtact

SEQ ID NO: 46287 - DNA, 615 bp, Gossypium hirsutum
  unsure (1)..(615): unsure at all n locations
  Clone ID: LIB3585-034-P1-K1-E2
ggcttgcgaaactgggacccgtcggtgacaaaacccatgtgtctacacgtgtgatgggtacttatggttattgtgcgccggaatacgcaatgaccggccaacttaccctaaagtctgatgtgtatagtttcggtgtggtctttcttgagcttatcacggggcgcaaggccattgataatacacgtgctcacggagagcataatctcgttgcatgggcacggccacttttcaaagaccgtaggaagttcccaaaaatggctgacccgttactccaaggtcattatccaatgcgaggcttgtaccaagctcttgcagttgctgcaatgtgtttacaagaacaagctgctacaagacctctaataggcgatgttgtgacagcccttacgtacttggcatcacaaacctacgacccanatgctcctggcaatcaaagtaacagagttggtccatcgattccaagacccaaggaagatggattggacagcccgaaagagcacagccatagaaattcacctgattacaggaagaggaaccacgctagggaatcaagccctggagcagagttaggtaggaacgaaaccagtggtggatcaagaaggaaatgggtttagatga

SEQ ID NO: 46288 - DNA, 605 bp, Gossypium hirsutum
  Clone ID: LIB3585-034-P1-K1-E6
cccacgcgtccgaattgcttcatagctttgaaccttcaatttaattctttctccgttttcccaggtacactgctatatatttgttgttgtttttcgccgcattggtgcaatacttcattacttctggttcttctcctggttatgtccttgatgcaatgagggtcgttaatgagacaaatgtgatatgtaagaagtcatcaatggccaaaacagactgcttcaagcaaaaatggaagcttgcctgtagaagggtgtcaatcaggaagaaattttcaagggactgattctacttcttggacaaagttggtgatggacatgtatccccctggaacatccgttaggtgtgtaaaacttcattgattttttgatagatctttcagtttctttttttaaggatttatgtttatgaatcttcatgggtgccaagagccaaataagttaagctatcatggtattttctgttgtgtttcacttgttgctcttgccttttacttaccattgttgcttttatatacccaactcagttgtggacttaattttaagttaattgccttgctagtttaatttcatatcgtgaagcaagtctactaaaacatatggacatg

SEQ ID NO: 46289 - DNA, 591 bp, Gossypium hirsutum
  Clone ID: LIB3585-034-P1-K1-F2
cccacgcgtccgcggacgcgtgggtgggttttcacctgatataattgtctttgcgatgataatggttgggctagtttttgcaattgttttcgccaacgttgttgttgtctgcgatatggggattgtaatgtgtgttttggaggaagtttggggagtacaagcattggttcgagccggtgtcctaatcaaggggcagactcaggttggtctgttgatatttcttgtatctacaattggattgacatttgtggaggggttgtttaaacatagggtacagacgttgagttatggagacgggtcttctaggatctgggaggggcctttgttggtgataatgtattcgtttgtggtgcttgttcattccatgatgaatacagttttctatttcagttgcaaatcgtacacttccgatgaccatcaatcaatgttgttctgaatttatgggtgttaaatgatatcatgtacattgctacgtgtagattcggatatggttgccagttccattcttggagtactaaaggagagttgttgtggttggttcggtagaactccaacaagcagggttttcaactcatgagtgctaaagatgat

SEQ ID NO: 46290 - DNA, 242 bp, Gossypium hirsutum
  Clone ID: LIB3585-034-P1-K1-F5
tggcggtggagctagtgcaggtggatatggtggtggagcttctggatatggcggtggaggtggcgaaggaggcggagttggtggtgccggtgggtatggaggagccggtggacatggaagtggtggtggtagtggtggctgcggatctaatgcacgtggatatggtgatggcggtcctgctggttatggaggtggtggatgaggtggcattggtggtggtgaagctagtgcaggtggaggtt

SEQ ID NO: 46291 - DNA, 587 bp, Gossypium hirsutum
  unsure (1)..(587): unsure at all n locations
  Clone ID: LIB3585-034-P1-K1-F8
aggtgatacaggatttcaaacgcttagttctcagggtgaagaaccctccctttttccagttatatccctgccatggtggtctacctcatcttgtgtcactaatcagcaatctttcccacccccactacccgttgccctttctgttgtcagcaggataaaatatagtagttttggatggcttaacacagtaagcaatgctgcgaattctgcgacaggaaaggtttttgtgccatctggtgctgttgctgctgtttttcataattctatattgctcgctcctcagcatgttgtttcaagaactaattctttggaacatcttttagtttatactccatcaggtcatgtagttcaacatgagcttctcccgtcaattggggcagattcaagtgcaagtaatttaagattccagacagcttcatatacacacgtacaagaggatgacttgagggtgaaagttgaacctgttcagtggtgggatgtatgtaggaggtctgattggccagaaagagaggaaagtatttctaaggctacccttgagagacaagatttagctgaangtgttcaaagtaaatcagtttgtgaggaat

SEQ ID NO: 46292 - DNA, 580 bp, Gossypium hirsutum
  Clone ID: LIB3585-034-P1-K1-G2
gtagagtttagtgtaatgaggagcaaaaacttagaagttagaaaattatgttggcaatcaggtttcgttgggtggactcagttttttttacacctaatgatgataatcactaagtgttaattctgtctggtaatggttgttttttttcacttggaagaataaaacctatgttatttgaacttgggtgtgagtgccggatgtagatgtgtgtctgacacgggcatgctcgactttttctatgtttccccttgaattttgagaatccttgacggatcttatctccaatctcatattagacacaggtgttgggctcaggtatttccaaaaagaatgaagagtcgagcaacataattaaataccagctaatgaccaactccgttgacatagtttgaggttatttccccttttggctttgattcttctcaacttaactgacaagccattcttaacaaatcccatgtctttctattgttcatgtttgagaggatttattatttgtgatctgacttcttcatgtggttagatatgtgtaccaattcaactttacttttataatacttgtgacacaagtgtgcaaaca

SEQ ID NO: 46293 - DNA, 375 bp, Gossypium hirsutum
  unsure (1)..(375): unsure at all n locations
  Clone ID: LIB3585-025-P1-K1-A1
ctcttctttcctcctagcccaaaaaaaaaaaaccctctttcctttctctcgttctttttcccgttcaatcatgtcttgcttcattagcaaatatgccgatgagtnggctaaaaacgctgcttacatnggaaccctggaagggtatccttgctgctgatgaatccactggcaccatcggcaagcgtctttcaagcattaatgtagagaatgttgaagattacaggcgtgctctccgtgagctcctattcacaactncaggagctcttcagtacctcagtggtgttatctctttgaggaaaccccttatcaaaaaaccgctcgggcaagcccttcgttgatgttttgaaggaaggtgtgtcctccctgcatcaagtc

SEQ ID NO: 46294 - DNA, 491 bp, Gossypium hirsutum
  Clone ID: LIB3585-025-P1-K1-B10
gccggaccggccgcggcgacccgggcggacccacgcgcgcgcgattcatctgtgggctgatgatgtactggatgaaccgccaaacttgtggagccctaatcctggctacatgtctgcgcgccgagcacaacgtcggactggtgacaagcggcatatacacgaacgggggcggtgagcccttggagcaccacgaggcacttactgcgggagggatacgtgctgtctatacagccagctgaacccacgcccacatcagagtagacataggtgctcatcattgccctgtccaggagctccagaactcgttctcatcataattactagacagaccgtccagaggtgactacatggacgactacttgagaaacagactcagagaataattcaagactctatagaaggtatccgtcggaccaaagaaccctaggaaacgtagacttgccatagaggcagacagacacgtgctgcgacacagaaccgtacgggcgccc

SEQ ID NO: 46295 - DNA, 495 bp, Gossypium hirsutum
  Clone ID: LIB3585-025-P1-K1-C12
cccacgcgtccgcccacgcgtccgcccacgcgtccgaaacaaaggaaaaagatggcggaggaagagagaaagaagagggtggtggtggaatcgctaggatggctgacggaatcctccatcatgcccaagaaacaccgcgccatcgaaggcgtcggagtctcttccatccttgaactcaaagcccatctctacaaatcccaagaagaatccaagaaatccaaggaattaaccggttccgacgtcgactaccaccgtgccaagaaaaaaatctccgctcaagataccttctccttcaagaactccggcgtcgaatctcgcgccctcaaggacaagcttgagcttaaagctgttaacgatgggtcagttagctatgcggcattggagaagaaggctgaattatatgataagttagtgaagggagagttatctgatgaagaagataaggagaagtattgtgttgatttttcaggaagggtttcgagctcgaaaaatcgg

SEQ ID NO: 46296 - DNA, 253 bp, Gossypium hirsutum
  unsure (1)..(253): unsure at all n locations
  Clone ID: LIB3585-025-P1-K1-C9
ccanncnnaacgggnccnnngnnagaaaggancagcccaganncgagaccggctaccaaanggccnnggccancaaggangaagnggaggancnngagaaggccggancaacgnnanccaaanngacgaagcngcnnngagagaagggnngccncnncgaaannccgagcacgccnnnnacnngaaangggcngnccacnccnnnaggancacnaacngnggngnccaggacacnacncaganccacacccac

SEQ ID NO: 46297 - DNA, 374 bp, Gossypium hirsutum
  unsure (1)..(374): unsure at all n locations
  Clone ID: LIB3585-025-P1-K1-D3
aggacgcgngggcggcgagggagncgcagaccggaagcccaccaagaccacgcaggacactcaggcgggccagcaccgaggaacgagcncngccagccaangggaagcaagggagcgcgagaaccaaacctggagactcacacaacaaagggccaaaggaacagcaggcagacaagcagaaccgcaaggcgagatggagagccacacagacagacgcaatccaagcacactaagcttagagggaacaggggatccacatgaaggatgaagccaacatcgcgagacgcgaaccaggaaccagtcctacagcgcaggaaggcaaaaggctggaagacgctaaaaggaggagaatgatgaagacaaacactgcacac

SEQ ID NO: 46298 - DNA, 538 bp, Gossypium hirsutum
  unsure (1)..(538): unsure at all n locations
  Clone ID: LIB3585-025-P1-K1-D6
accagtcgtccgaccacgcgtccggtactatatataagtatctctttcatcgtcaccgtatgctgtggtcgagaaagccccttgtcagcgtcattggaagttcatatttccttttgtattaggagatttccagtgcaatatcctatttccgcatatttacagttcttttcgaaggaggtcaataggaggtaataaataagggctttttttccccatgctaatccccatatctgactagcaaggagttgattatggcagatttatagtaggcttctcccgattgtgagtgaaaaagaaaagagataagcactgatgggggaatactctaatgggcttagggaataatactttagtatgctntacttttagcactcctagaataggctgctttggaggaagactctatgtaatatgcccctcccctaatatgctntccttctttttgatatagcaggtggctttcctaaaaagtactttttgatactggcgtagcctctctcgaggttttagttcatttccataggttgcatccctagtc

SEQ ID NO: 46299 - DNA, 319 bp, Gossypium hirsutum
  Clone ID: LIB3585-025-P1-K1-E1
caacaaaataagttaactcaaacccttcaaaatttcaaaacaaaatcctgtaaagctcagcttccaatatttcaagtgagcgaaaaagagagagtgcatttcagtccacatcggtcaggctggtattcaagtcggaaatgcctgctgggaactttactgccttgaataaggaccctaacctgacatcatcatgataatctacttcacttggggaggatggaaggatccttgaaagacatggatcatggcatctcttaccacatagcacgccccttgtgctgtctgtgcggatcctgagcctacaagcttagaagaactg

SEQ ID NO: 46300 - DNA, 458 bp, Gossypium hirsutum
  unsure (1)..(458): unsure at all n locations
  Clone ID: LIB3585-025-P1-K1-E6
cggacgcgngggccggancaggncgagccngngggcagccgacnacgagcggcccaagaccggaacagccgggcgaggagcngancnnaacgaagcaggggnganaccagaggggggggcnncaacgcacngggagganggcaaaaaagcaaccngccagggcncnnncnaaacnagnnngacaaggaanancacggcnanaggaacacanggaaccnngcaccncacggannccgncannccngaccaagagcaggaggccgcnaaaacggcanccgcgaaacccgganncaacgaacncgnaacaggangggagccgcnnccgagcgagcanacggnnaccgncgancggccccaggaaggangcanggngagggagnnngcnaccnnnggncaaaacaaaaaaaagaagggcgcgaagccggaaangaaggggccnacgancagcaggaagacac

SEQ ID NO: 46301 - DNA, 172 bp, Gossypium hirsutum
  unsure (1)..(172): unsure at all n locations
  Clone ID: LIB3585-025-P1-K1-F4
taggccccagtctaccgatgctgccttccttctcagcacgtcgcggcntccccgcaagctctaaacggggctcccttagggtccgattagtgcttacggacctgacccaaaaacttgataggggatggtcacgtatggccatcgcctgaagacggtttcgccttgacgtgag

SEQ ID NO: 46302 - DNA, 138 bp, Gossypium hirsutum
  Clone ID: LIB3585-025-P1-K1-G2
gtgggcggcgcagtctatgagggaacctccgagcgaaaacaggactgatgactgcaaattctccctcgtacaaccccaaaagccacattctctacctctaagctatgaagaacacatgttgctatgaagactaaccat

SEQ ID NO: 46303 - DNA, 456 bp, Gossypium hirsutum
  Clone ID: LIB3585-025-P1-K1-H6
gggcaaaatttgaggttggagccattgaaccctgaagagaaagctctttggaaaagagaaatggattgtcttttatctgtctgtgattatattgtggaatttactcccaagtcacacaatttacgtaatggagcagctgttgagataatggaaagcaagcaaagatcagatatttacatcaatcttccagcactgagaaaattggatgcaatgctcattgaaatactggatagcttccaggatagagaattctggtacgcagagcaagggagtatgtcggcgaattcgacccgtatgggttcatttcgaagagttgttcaaagaaatgacgagaaatggtgggtaccgttgccgagtgttccttcgagtggacttacctagaaagcgaggaagcacttgctacataaacgagaatgtgctaatcaaattcacaaggctgctatgtctataaacaac

SEQ ID NO: 46304 - DNA, 294 bp, Gossypium hirsutum
  unsure (1)..(294): unsure at all n locations
  Clone ID: LIB3585-025-P1-K1-H7
gacgcccacgcgngcgcgagccccccaagacaaagcnncagacaagcgccgnaagggccgacaaacgaaaacgaaaaaaagcgaagaaacacaancggnnngnnaaggaagccaggacccaganncgggggagaaaaaaaacgnagggaggagcgagcagcgcgacagggacngcggcggacgagccggcggcggccggncgccgaaccccancaccnaagaaaacggcggaagcgcaggcgaaacggaaccacgagacgaacncgcccggcggggacaagcagancggagacc

SEQ ID NO: 46305 - DNA, 534 bp, Gossypium hirsutum
  Clone ID: LIB3585-028-P1-K1-A12
ggcagaagctcagaaggcactgaaagcgatgaatggcaggattgtccgtggaaggctgatatttgttgaatacgcaaatgataagtctcaaaagaccgatgcagacagttgaaaaatggcacgctaatgctcgtttcaagatctcctcatcttaccaacaccttacaggagaaaatgaagctgaagtagcttctactaccgatggagcaaaataggtagtccttcaaccaaaccaaaaaaacacaaaaaattaacaaacctctatagtctcacacaaaatcaaaccgcataagaagtctggtagagtttaacttctctcctttgcgatcaaagaggggaactgcctggatcccctgcttcagttctgagactggcaaacaagtttgaccggcaaagtcatccttctcggacatgtcatattcgtggacctcaactcgcagcaatgccaattcaggaacagtcaatggaaatgtaaattcttcatcccaaacaggtgtccagttgtcttcttttatcttcggtttcttcattatt

SEQ ID NO: 46306 - DNA, 504 bp, Gossypium hirsutum
  Clone ID: LIB3585-028-P1-K1-A3
ctgagatccaggctagggagctcgctgatgcggaaattaccataaaatcgcttgaagatgcattggttaaggcagaaaatgagttttctgcacttcaaagtgaaaagagagccactgatcaagaaatatcaactcttaattccaaactgactgtatgcatggaagagttggctggaagcagagggagctctgcaagtaaaaccatagagttgatcggtcatcttaacaatcttcaaatgcttgccgaagatcaaagtctgttgtcaacgatgaaacaatgctttgataggaacttggagcatctaaaagatgtggatcttgcccttaagaacacaagggattatttgttggacaagaagtcggagcagctgcaagattatccactcatggaggatattgctcttctggcaggatgtttcgctgatgatattgataattatgtgaacattggaatggagaatgattatgaaaatgccatcgatggtgatgatgtttcttcatgtg

SEQ ID NO: 46307 - DNA, 421 bp, Gossypium hirsutum
  Clone ID: LIB3585-028-P1-K1-A4
cccacgcgtacgcacactttgctcatcgaagaacatggcaagtaagctgaaagcaggccagctccgagacgaactcgcccagcgtgggcttgacacaatcgggaccaagcccttactggtgctgagactggaggatgctttgctcaaggagaggaagaaagaagaggaaaatggaggcaaggctaacaatgcaatcggaaataacaagagaaaaagagggagggagtcggatgtctgtagtaacgaggattcggacaaagtcaatgccgttgaggagtttcgacaaatgaatgtcaagcaattacgcgaacaagctactcttcgaggcctttccactgttggcaccaaaaaggaacttctcgagcggctttgtgaagatgccgacaagaatcctcttcctgtagtagtagaatccaagcaa

SEQ ID NO: 46308 - DNA, 515 bp, Gossypium hirsutum
  Clone ID: LIB3585-028-P1-K1-A8
gttcatttttctgatcgaccaataagcatattatctgtatgttacatattcccttcttccaccttttttcttgacttctttccatttaaaattccaggcactatattactggctccgaacatatttgcttgagcgtcgtgatgttgcaaataaatcagaactcggcagaatgaccatggctcagcaaagaatgcaacagaatagtggaggcaatttaccgcctgacaatcaagttaatcaagtaactcactctggcagtggaattgggtctcatgatggcagtaactctcatgggcaagacccagagcgatccaatgtaacggagaacagtgtgcagacagggaatgaccaacctatgcaacaaagttcttcaagcatcagtgatagtggccagtctgcaatgaggcgtaatggttcattaggtctggttgcttctgctgccagtgcttttgatgctgctaaggatataatggagaccctaagaagcaagcatgctaatttggctggtgaacttg

SEQ ID NO: 46309 - DNA, 513 bp, Gossypium hirsutum
  Clone ID: LIB3585-028-P1-K1-B3
gaacaaccattttattctttctttcttttttttaataaaataaatattcttttttcactttcactagaaaatcataacatgtaataggtggtagtagaatgaaacccttctttgaattttaatctccttgttagctttctcttcttcttgcttggtgactatggaaactagggttcttgatggtataatcaataggttgcttgaagttagaggaaaaccagggaagcaagtccaactttctgagcctgaaataagacagctttgccttgtttctaaagacatcttcttgatgcagcccattttcttagagcttgaagcacctattaagatctgtggagacatacatggccagtattcggatctgttaaggctgttcgaaaatggcggcttccctcctcgtgccaattacttattcttaggagactatgtagatcgtggcaagcaaagcctggaaaccatatgtcttctccttgcatataagatcaaataccctgaaaacttctttcttctaag

SEQ ID NO: 46310 - DNA, 454 bp, Gossypium hirsutum
  Clone ID: LIB3585-028-P1-K1-C2
aaacaactcagagtgtgtttcggataattcaaatgtcgaattctttaggatgggccagcacaacaattctctggtgcaggataaccaaactatactggtgtctggaactttgtcataattggcggatctacatcagacatcgacggctacaagcttaccttttgcctgcctatctagttccgggaataaaccaagacctcttaacttggatgtgtccttgcctacaataaaggatcttcgatggaacatttcacggttactctatttattcaacattcaacttgaagaaaaatgttgccacgattcttgtggttctccttgtagtatgcgtctcttttatagttgtcggtggtttcttgctctttaagtttaggggaaatacacattctttagaagactgtgtttgggaggcgtgggcatgcctgggttcatcatctacccatttaaaacaaag

SEQ ID NO: 46311 - DNA, 590 bp, Gossypium hirsutum
  Clone ID: LIB3585-028-P1-K1-C9
cataaccgtagtttaaaggtgaatcaacattaaatatgaaagacactgggaacaagaggagaaattcagctaatgtccaatcaaagcacccaggaagaactgataggagaaataagagacctcatcaacagaatggtggcaaaactttgaaggcgaaagaagcgtgaatccaaagctttaaaagctagatcagaccctaattctaaagtaagtgattccaatgtgggctctgagcccattgaagtttacgagaatgtgattgtacattatgtggatgatgttaacaagtctgaagaaacatctcctgatccaaatggtaataacatggtcactaaattaaaaaaggccgaaattttagatgattgctccagtgatatagagggagaaacaactcagcaaaaggaagaagaatcagactctgagactataaaagattcagcatcatctctaggagattccttgacagctgaggatgagagagaagagggtgttctgggagcttctaatggtgttcacaataacaacctcaaagatggctctttccatggttccagatgggatctgaacttgaaactaataaatcacattta

SEQ ID NO: 46312 - DNA, 522 bp, Gossypium hirsutum
  Clone ID: LIB3585-028-P1-K1-D8
cccacgcgtccgcttttaccatcgtattaatcgattgagaacgagttcgagatttatgaaattggtacctggtttagatagatgagttaggcttttaatttgttaatccagttggggggattcgtaaacaccgtcctgtcggagttttttcctttgcgggggtgttggacgccgttcagcggtaaatcagttggaattatcggattgggcaggatcggatcagcaatagcaaaaagagccgaagctttcaactgctttatcagttaccactcgagatctaagaaaccaaatacaaactacaaatactactcaaacattgttgatttggctgctgattgtcaaatccttttcgtggcatgcgctttgacggaggaaactcaccacatcattaaccggaaagttattgatgcattgggtcctaaaggtattcttatcaacatcggacgaggtgcccatgtcgatgaacctgagcttgtatctgcattactttgaaggtcgttaggcggagctggacttgatgtg

SEQ ID NO: 46313 - DNA, 471 bp, Gossypium hirsutum
  Clone ID: LIB3585-028-P1-K1-F12
tcgcccacgcgtccgcccacgcgtacgaccatgcgttcgagaacgcttggactgacgcgtgggcggtcgcgtttacgcgcgcacaagacaaacagaacaacccggaaaaaaaatatgcatgcgtttctgaatttcgtatggtgagtaatttttgcataaatggatacgatggtgactgacaacataagccttaaccagtacatttatttagtcaaattaactgaacaagccgaacgcttaaagtaaatcgtataatttatgcaaaaacttgttcttagatatactaatgaattttagatcataatttaagaacggaaaattctttatgtagattataaaaacgtaatttgatctttacgcgacaggtgtaggatcgtttcttttagtattcaaaaatattaatgtttgattaacgaagaacatgtgttgatcgttaaaaattattagatcgatagatgattacgatttttt

SEQ ID NO: 46314 - DNA, 574 bp, Gossypium hirsutum
  unsure (1)..(574): unsure at all n locations
  Clone ID: LIB3585-028-P1-K1-F3
cccacgcgtccgcccacgcgtncgcccacgcgtncgctattcatccctcctcctccttcacctccgtctccataccatttccctaatcaactgttagaggatcatcccacaggcttatttttgtttggtgttttggttctttggttttttttattaacacaatatattaaaccatgcagcttcatatctcgccaagtttgagacatgtaacagtacttccagggaaaggtgttagagaattcatcaaagtgaaggttggttccagaaaggtttcttatcggatgcttttctactcacttctcttcttcacattccttctccgctttatctttgttttgtcaactattgatagcattgatggagaccatcccaagtgttccaccattggttgcttgggaaaaagaataggaccaaggatcttgggaagaaggatagaatcaattgtcccagaggtgatataccgaatcctagaagaaccagtaagcaaagatgaagtactaggaaaaactgatgttcctcagacattacaaagagtttatgtttgaaatgaaacaaagcagatcagatgcaaaag

SEQ ID NO: 46315 - DNA, 174 bp, Gossypium hirsutum
  Clone ID: LIB3585-028-P1-K1-G2
caaaaagaaaaaaaaaaaaagaacttgttaatctctgttgtatgagataattagaccgaagtaaatgtgtccctttgtcctaatatatgtagcatccatatagtgtagtggaattaattacagtgaacggtgctggggacttggctcgagtgccttgtctatcagtattagagt

SEQ ID NO: 46316 - DNA, 226 bp, Gossypium hirsutum
  Clone ID: LIB3585-028-P1-K1-G3
acgtccaattcgtcgaccacgcgtcggcaatagaaatcaaaaaaaactcacttaactgaaactgctataagcgctcgcctgggatgggatgctatggtctcgtagcttaaaacgcactgggtatggggatttacactgattgcttattctagcagcaaaaattaagttatagacatacgcttgaaatttgtatttcgggtgtgcacgtggggtagtgaatgcttta

SEQ ID NO: 46317 - DNA, 560 bp, Gossypium hirsutum
  unsure (1)..(560): unsure at all n locations
  Clone ID: LIB3585-028-P1-K1-G9
agcatttctcgtgacgctattaacaccgaaggctttgatactttcaatccatctggaaataaaccttctgacttacccctttatacttcagttcccaaaccaagtgcacgagtaagtagctctgaaaatttaactgcagcgaggtatccttcaagcccccattctattgaggcaaatactgcacaagagctaaacacttcgaatattgatcccaagcctgcttcttctgctttggcttcaacggcaagcgatgctgatattgtatgtgttgcatcaccaccaacagttcctcctagtcctaggttatctaggaaaccctctggttttcataactatgaggattatccagttgacagacaaatggacactgttcgatcgaatttgtctggtctgcattcatcagaagatggttcaaggaatgatgacaagaaaatggtatcagatgacaaatctggtgcatatactccgcctatcattntcaagcatccaactcatcttgtgaccccatctgagatattgatggctgcaacatcttctggaactactaatgtcaatgaggg

SEQ ID NO: 46318 - DNA, 457 bp, Gossypium hirsutum
  Clone ID: LIB3585-028-P1-K1-H3
acgtccgaattcgtcgaccacgcgtcgatgggtcactctggactggttgagcggctgatgaatggaggctatgatgttggagtctaacatgaaactgataggggtgtgtcacgacgtgtaccttatgtgagaagataaattgtcgcatgcaatatgaaaaaccctctatcctgaccgttcaaggaaagatccattgtttggcatgggcccaaaaccaggacttctgtcagacagattattgggttatttgcaagaattctacatgcaaactaaaagctgttgataggatctcaaatgtactacatatactaaggcagaaatgtagtcatcgggggtgcactggtacagattcattggacatctatcgcatggatgtacacattgaaatctgagttgcttctcagcaccgagacagagctctgcaatcctggcacagggctccatattccggtgacta

SEQ ID NO: 46319 - DNA, 427 bp, Gossypium hirsutum
  Clone ID: LIB3585-028-P1-K1-H5
cgacccatcgtattaggaagaccaaggtaattctctggatttgtcgaacaccgaacattaagaatctggaaaaccaaattcttatcttgatcctccacattcgaactaaaaaacaccgttgttattaacacactgcccgagcaagactcatattcttcaagaatatcctttagcacacagattcctctatttgaagcctccccaaacaatatacagtcatcagcgaacatgagatgggttataggtggagttgatctacataccttagctcccaaaaattttccttcttgacttgcaagtctcattaacgcaaaaagcccttttccacaaaatagaaataaatagggacttaaagtatccccttagcgcaaacccctagaagacctaaaacttgacccttcctttccatttattaaaatagaatact

SEQ ID NO: 46320 - DNA, 605 bp, Gossypium hirsutum
  Clone ID: LIB3585-028-P1-K1-H6
tacggaatcggagagtcgagctagacgtacgcgtacgcgtacgcgtacgcgtacggattctggcgtttttcgtgcctgccttgtatataccgacccgattcttccgtatgctgttcaacaagttagctagggacttccataactaccctgctcttggtggactaatacaaaccgtactgagttatacctttgggggagatagctcgaactgggttggggtgatgggattacctcattataatatggatgacatgccagggctctcactaggtgtgattcaccaccttgcacacgtaaaatggaagggaaaatttgtaatgtatgaccatgggaatgcatcagccaatatgaaggcttatggatcttcggtgccaatagacctgggtgaatattattcgcttatcgatatcccaattgatttgatcgctgggcggaaggacaagataattagtgcagcaatggttacaaggcactacaagttaatgaagaatgcaagtgtagatgtatcatacaaggaatttgagtatggacacttaggacttacgaaatcgaaccaggaagacatcttagcttacgtaatgtctcgcctactgctcgtggagcct

SEQ ID NO: 46321 - DNA, 486 bp, Gossypium hirsutum
  Clone ID: LIB3582-008-P1-K1-A4
acaagtcgaaaaagaataaataaggaccaatttggaaaaaaatgtaaatattaaaaagttaaatttattattactaatatattgtcatagttaattttataatttaaccattctttatattaaatgataaatcaggtctaacatttaatcattagagcaaagaggctttttaatgaaaatgtgtcttatagggcgtgttttcaactgacgtggctcaaagcgtgccctgtaaaacgcgtatttaatgaaaacgtatcttgctggacagtatttattttctctccacaaacaacatatagtaaataaaaagaacagcgcagatccttaaatcaattctcaaaaccctaagtgttgagttatatttgattttgagctacgctttttttttttgataattctactggttattactatcttatctaataaactctcactttgtttacttttgaaaccttaataataatttggttaggtatttaatacaat

SEQ ID NO: 46322 - DNA, 302 bp, Gossypium hirsutum
  Clone ID: LIB3582-008-P1-K1-B9
gcgacacgaacgtcctcacagtcacccacgcgtgcaggggcaaccactgcgccacctgactgtagatcccctgctgagatacaaggagagcaagcaagactgccatcagcaaatacagacgcaacatccacctggccaccctaggtgcttgaaactagtaatgcatgatcacccgctatcccagaatcgatcacatgaaactaacgacattgactccagcgagaacaacagccacagtagacgcaacatcgcgtgagaggctgcgagggatagatccaggacattccatggcgggtatacag

SEQ ID NO: 46323 - DNA, 484 bp, Gossypium hirsutum
  Clone ID: LIB3582-008-P1-K1-C1
caagaacggcgcaattgaactgaaattcttagctgacgtggaagataaccaaatggacaacttatacccttacgtccacctccttcccaacggtcaccttttcatctttgccaataataaagcggtgatgtacgatcacgagggcaatagagtaattcgagattacccagcattatcggggggcccacggaattatccctcagctggatcgtcggtgatgttagcccttgaaggggatttttcaacggctgtgattgtcatctgcggtggagctcaatacggagctttcatcgagaggagtactgataccccggcgcatggtagctgtgggcgcattgtagccactgatccaaaaccgggttgggagatggaggatatgccatacggacggatcatgggagatatggtgatgctgcccacaggtgatactttgatcatcaacggagctcaagccgggacccaagggtttgagatggcttccaac

SEQ ID NO: 46324 - DNA, 402 bp, Gossypium hirsutum
  Clone ID: LIB3582-008-P1-K1-C6
gctacgcgtacggttgttgaaagcatagtgatgtccgcatgtgcacacccattgtacgagttacagctctgccatcgttagggtcttttgatgggcgaggtccaacaccatatacctcctcggtttgcccgggaccacatcattggtatgtcacaggctgtgtcagactggagctactacgatgcctatgactgcgatggtactatcagtttacttgacatgtgccttcagggcttatcacatcgacatcatccctagacaagctcatcttgctcataacctagattaagaacagaggcaacggtggtggctagcaccatgtatgcctgcttgatgtgagagcctggaggactctaaagcagaatactgttaatgctaccattgttgggatgactactgatc

SEQ ID NO: 46325 - DNA, 468 bp, Gossypium hirsutum
  Clone ID: LIB3582-008-P1-K1-C9
cttaaatttgagtattaaaagttgctttgaggattcgcgtaaaacctgtgataaaaaagcacggtcctttgctccccggttggcgcgtgatttaaaaatcatcaactataacgaaccccaaaaagcagcggagccgacgactgacactcgcggcgcgtctcgaagtgggaaccctcttgacttttgcgactacccctcgcgtactaaaatcacggttgccggcgatgtctacgaaatgctaggaaacttcatttctgctatgaacaaatgtatagctgatcgctatgcggggaaacgttcagtctccgaataccatgtttactagttcttcaagatatggagctgatctcgacaagaagctgatatccgtgtccatgaggtcttcaagtcgtcatatgtgaagaaaggcatgcacccgatcccaggtgctgaaagggcgcttcataaggtatcaagattttgtgacct

SEQ ID NO: 46326 - DNA, 480 bp, Gossypium hirsutum
  Clone ID: LIB3582-008-P1-K1-D11
ggtatgtttcctcccttctttttagtacttctattgctattttgtaagcgtgagggttctcagatctgtgaatgaattgaaaagtaacctctgggaggcacaatctttattctgaatatctttgatgattgctcctagtactgatttatccactgctgtcgattgacatttttttatgactgttttttaatctcccattattgttgctgagtttagacccattgataatactaacttgatggcttctaatcctgcccgagcttttgctactaacgaggatgagatattactatggagaatcatctttgaggcttcaaactcacctatctggtcccgaaccactaaacctgaagccgatctaaaccatctcctgtcaaaggcagcatcaaactgtactgtagtgctcgttgtcatccttggtggttgatgagtcttcactgtaataaaggtaagctttttatcgcgcactccttcaagttc

SEQ ID NO: 46327 - DNA, 483 bp, Gossypium hirsutum
  Clone ID: LIB3582-008-P1-K1-E9
gtcatggttcataaaataagtctaaatatgttcttaagcctcattcttatttttgctctggtcgtcctgagcgatgcagctcgccctcgtcatctcggaaatgaaaatggaataatgtcaaaggagaagatggctttgggaaaggaagaggaagctaaaagcaactttagggagatgaaaaacttgccaccttttccctttccttttccggacatgccatttgcaccaccagttcaatttccgccatttccatttccacttccaccacccttcgaggttccaagcgttcccagttttcctttcgctcctttcacttttcctcccatcccatacttttcacccactactcttcctcttcatccatagctacgtaattaagcttccaaaactttctagctaaaaacctacttatcccagctccttagtttatgacgttttacaatgtatctctaatatttaatcgagtgttctgctacttcagct

SEQ ID NO: 46328 - DNA, 314 bp, Gossypium hirsutum
  Clone ID: LIB3582-008-P1-K1-F3
agcaaattgctactgagataaaaagtaattcctttttttctgtttattcacattgtcaaaatacctctggttctaacacagggcgaacttctgatatacttcataaggcaaagagcaaatgaaatggataaaaagaatgcctgtggactaccaaaaccaaagtgacttctaagccaataggtgatttctaggtcaatgctcggaatcatcttaaaacagtcaggtgtaaaggaatatcataagagacaaatgctcagggcacgcatgatataccgaatggtatcacataaaaaatgggacttgtacattctcaa

SEQ ID NO: 46329 - DNA, 487 bp, Gossypium hirsutum
  unsure (1)..(487): unsure at all n locations
  Clone ID: LIB3582-008-P1-K1-G10
gaagaatcagaaaaaatggatgaagacagcaaaattattgaagaacttcgtgagagcaatgaatatcaaagagctcaaattgcacgcttggagaaagccctgaagctggcaatggcaggtcaggaggaagctaagatgacaaacaacaacgaacttcagaagtctaaggaaatcatagatgatcttaacaagaaacttgcaaactgcatgagaacaatagatgcaaaaaatgttgaactactaaatcttcaaactgctctcggtcagtactatgctgaaattgaagctaaggagcatttggagcgagatttggctctagctagagaagaatcctctagactntctggtcttctgaaagatgcagatcaacaagcagaattatcaaagaaggaaaaggaagaaattctggcaaagcttttgcaaactgaaagaatgttagcagaagggaaagcaagagtaaacaagcttgaggaagataacagtaagc

SEQ ID NO: 46330 - DNA, 487 bp, Gossypium hirsutum
  Clone ID: LIB3582-008-P1-K1-G2
ggttttaagaataaagagttccaaactataagctccaatagagattgtttgagtctctcgagagatagaaggatgaatgatatgcctcaaattggacatgaagacacgggtgttgctgcatgttttgatgggcctttctttccttcttccataaacacttcaactgtttcccccccttcttttcagtttcatgtcagttcagaagaggggatcaacctttatgttgatttaaattcaaacccatcagagtggattgagaagctgaaaagtgaggtttcaatatgccaggacatgtcccattgcaagtctaagacttctcctaaggagcttgggcgctttggggaaagtagtaaacagatggagagatcttttcagttgaatgtagatactggggaaatgaaagatgactttatacactctggattacccccaaatttgatcataaaagaaacaagttcattgcagtttgatcatcctgatggagata

SEQ ID NO: 46331 - DNA, 488 bp, Gossypium hirsutum
  Clone ID: LIB3582-008-P1-K1-G3
atttcttgtctgaaaatcacatttctttcatggcagaaaccaatgaacccttccacataccacaacaaaacagaaagaacaagcttaggttcaacattgaaaccaaccaacaccagcaacaagctttcatgcatggtccccagtgtggtagtgggttagctttatctctatcttttcaacataataatcccaacattatgagcaatctccctttgagcttaaatcaacagaatctgcagataagaagctcagttccacttggtccattcactggctatgcatctgtgttaaaaagttcaaagttcttgatcccagcacagcagattttagatcaatttgtaggtgttgattatacggtttcagatcttccattagctgatcatggtgatgatggtgttgatgatgatgatgatgataatccaataacatgcagtgataaaattcaacatcgtttgaagaattcaaggctcattctcttactagatgag

SEQ ID NO: 46332 - DNA, 486 bp, Gossypium hirsutum
  Clone ID: LIB3582-008-P1-K1-H2
gaagggttcatctttgatgcttcagctattcaaagaatggagcttttggtacttgatgcgttaaattggagaatgagaaccataacacccttttcctttattggtttcttcatatctttgtttgaattaaaagatccaccattgatacaagcattgaaagacagagctacacatataatcttccaagctggcattggtataaaacataaaaatacataaaaatcatatctttgatgtttttatgacaaatcaatttaaacccagtttttgttttgtagaaactaatctgttggagtttaaaccgccaaccattgcaacatcagctgtacttatggcttcacatgaactactaccattgcagttcgcgtcttttaaagctataattgtgtgttgtgaatatgtgaatgcagttagcaaatatgtgttttgtgtaaaaatagtacggagttccaaggcatattgaagtttttgcgagtatacagatac

SEQ ID NO: 46333 - DNA, 369 bp, Gossypium hirsutum
  Clone ID: LIB3582-010-P1-K1-A11
cggacgcgtgggttggaatatggaaaagcatgtaatggagaaggagaaggagatggagaaggagaaggagaaggagaaggagaaggagaaggaggaggaggagaagaaactaatggagtacaaaatgaagtttttaaaggaaatttaacctaaaaagggaaggagaagaattaaaagaagaccttatttgaaaaaattgaggctagatttgatttgtttgccaggaaaattaaggacccagataaaggggatattttgcaaaagggtccttatcaaaaaaatggggtccaaaatgatgtaaaaggaccagctggagatgacagtgaatttatgaatgaaaggccatccttaagttttgaagaagttaag

SEQ ID NO: 46334 - DNA, 468 bp, Gossypium hirsutum
  Clone ID: LIB3582-010-P1-K1-A5
gtttttcttttttctctttgaaaaacggtagtacacactatcatattcaataatgtcttcctcttcttcgtcttctcttattaccttaggtcaagatgcctcacctactttgcaacaacgcctccatttcatcgtccaaagtaggcctgaatggtgggtatactccattttctggcaagcttcaagggatgttgatggtcgcgttgttttgtcatggggcgatggctattttcgagggacccgagatggtacgggaaaatccatcaataggctgagcccttccaaattggggtccagtttcgagaggaaaaggtcgggaaaagatcaggtgcaagcttattttaatgaagtgatggacgtggaccgtatggtagatggcgatgtgactgattatgagtggtactataccgtatccatgacccgatcattcgctgtaggtgatgggattcttgggaaggctttcggatc

SEQ ID NO: 46335 - DNA, 203 bp, Gossypium hirsutum
  Clone ID: LIB3582-010-P1-K1-B10
accgagaaaggctgggacgtattattcaccagcgcatcacagtatgcgagatatgccactcagagacctgtgcctagagcttaaacggcactaggaagcctacgctactgcctaggctgacacagaaactgactggctttttaacataagatgtggactggacttgtgtcagactcactagtctatattggcgatgatgccaa

SEQ ID NO: 46336 - DNA, 481 bp, Gossypium hirsutum
  Clone ID: LIB3582-010-P1-K1-B2
gagccatagtccgtaacagaatagacgacattcctcatttgttccctgattaaagacccagataagccactcccaaacattctgaatactattatttagcatccaatcgaaccttaactgtttccaaacttcctccgttgtaggacactgtcgaaaaacgtagatactgtcttcttcaatttgtctacatttgggacaccaatcttcagtaaccactctcttcagcttcagattagctaatgtaggaatatagttccaagagatcttccatactgtaatttttattttcgagggcatccgtaaattccatagctttctgtagaattttttgttttcggcctgtataaagtaattgttaggaatccgtgtagaactctgtaatagtttataggcgcttctaaccgaaaaggttcctgatggttctcctccccaaacttggaaatcatcctgcactgaactagacaaagggatctgcataata

SEQ ID NO: 46337 - DNA, 476 bp, Gossypium hirsutum
  Clone ID: LIB3582-010-P1-K1-B9
aaagaaatggcctattattaccattctcctccaccaccaccatcatctccgcctccttctccaccgtatccagtgcctccaccgaccccgacgacagttccggtgtcacctccacatgcaccatcacatcattgtgctccgccaaaacctactccaagcattccctctagtcctacaactccaaccactcctccaagtaaggcaacaccaccgtctataccttcacatccaccaagccctggtaaagctccaacgccaccaacagctgctgcaccaccggttataccctccaagggatcaccacctcactcctcatccccaccaacaaaaccaccaaaatcttcatcacctccacactttcctccaccaccaaaatcaccaccaggtaaagtaccaccgccagctgctgcaccaggaccatacagtagcaaaacgccatcagcaggggcaaaaccaccaaaatcttcgtcgtcacc

SEQ ID NO: 46338 - DNA, 480 bp, Gossypium hirsutum
  Clone ID: LIB3582-010-P1-K1-C1
caacatttcaccgtctccattcccctccctctctcttttactcccgcttcatctccccttttcttaaccttcatatgtaaaactattgtttttttcccttgttgttgtaagctgttacgtgcaaacgctgctcgatccctgtttaattgaagttcaattttgtatctcgattcccaaaatcgtccgtttcgacatcaatggcgacttgtcccgagaaaacgaagaagaagaaaacccaattcccgccgaggagagggcgagtgaaggctcagatttttgagagcatagcgaagaccgttgtttctgcagcgtccaagactaaagaagaaatggggaagaacaaaagtgaaggatatgatggaaagagttgttcgtcttcgtctacaacctcgactccaccacaaagtggctatacctctgaaggaaatggccacatatcttagaaaacaaccatctcagtcaagggtaaccccccccccc

SEQ ID NO: 46339 - DNA, 474 bp, Gossypium hirsutum
  Clone ID: LIB3582-010-P1-K1-C8
ctccttttcaattctgttttccaagagccgttgccgttacttaaaacatagtctttattagggaaaataaaattcagaacccttcaaaatattgccttagttgatgattttcagcgttcttttgcgttttttttcatgggctgcgtaacttcaaaactcgaccagttgccggcggtcactttgtgcggcgaccgctgcaatttcctccaggacgctctcctgcaaagctacgccttcgccgatgcacacgtggcgtacatgcagtcgctcacgactctcgggcccgctctccaccgtttcttcgatcaatgtcttaaatcttcgtccggcgatgaaccagccgtatctgacgagaaaccgccgaagcgacgttcgccgctgtcctcgcccggtcattctttttcgagttcaaactcagattcgcacattcaattcgatactgatttggaaggcgaagagacgggcgaagatttt

SEQ ID NO: 46340 - DNA, 132 bp, Gossypium hirsutum
  Clone ID: LIB3582-010-P1-K1-E1
gttatgacgatggctgaacaccggtgacagcatattctcttttttcttttccttttttgttgatatgtaaaatgtggggtgtgatcaccttgacaatgtaagtttggattcggattccatggttgttctgtt

SEQ ID NO: 46341 - DNA, 476 bp, Gossypium hirsutum
  Clone ID: LIB3582-010-P1-K1-E2
ctcaaagatttatatgccactgattctgattttgcaagcattcatgacgcatgtgaacatggtgcatttcacaaattttataagcattatgactatctttttcgaaataatagactatgcttaccaaagtgatcaatgctagaattgttggttcgagaggctcatagtggtagtcttatgagtcattttggagtcactaagacttatgatgttttacatgagcatttttattggcctaacatgcaaaaacttgttgagaaaatttgctctacttgcattacttgtaaacaagctaaatccactgtgatgcctcatggtctatatactcctcttcctgttcctagttcaccttggactgacattttaatggattttgtaataggtttaccaaggacaaagcgtggacgagatagcatctttgcggctgtggatcaattttctaaaatagctcatttcattccatgccataagactga

SEQ ID NO: 46342 - DNA, 472 bp, Gossypium hirsutum
  Clone ID: LIB3582-010-P1-K1-E7
gtaatttacctcacgcttggcgtatgtggaagcttgatagtgttcatgagattttgaagcgtgattaccagcttcgtggtgttgctgttgagttgttcagcatggatggatgtaatgatctcctgatgtttcacaaaagagagagagatgaagtattcaaaaatctggttgcaatgaatctaccgaggaacagcttgttggatacgaccatttcaggatctacaaaacaggaaagcagtgagggtggccgtctttttaaaataatggctaaatctttctcaaagaggtggcaaaatggagaaatcagcaatttccagtacctcatgcatctcaataccttggcgggacgtggatacagtgatcttactcaatacccagtctttccatgggttcttgctgactatgagagtgaaaatctggacttgtcagatcccaaaaccttccgcaaacttgacaaaccaatgggttgtca

SEQ ID NO: 46343 - DNA, 473 bp, Gossypium hirsutum
  Clone ID: LIB3582-010-P1-K1-E9
atgaatgtgggtagtgatactcagctccgccagcttctttatggtggcatacttaacagcaaggatccaaatgtgagcctccctgatgagaaaactttcaaaattccaaatgttgataaagtgattgaagaaggcaaaaaggctcccactaagtttcgcaatattaagctatgtagcattggtgttaagctccctgctgagatttacactgccactggttggccatccgttagtggtgttgctttgaagagcttagctgggaaggtttccgctgaatatgatttcacagaggacaccggtgatggtgatattgatgattatcctgaaacaatgactgcagttgataaatctgcatatggaactgcttttgcagcttttgaggatgaggaaaaggggagggaggcatgccatgctattgcatcattatgtgaagtttgctctatcgactcccttatatccaatttcattctacc

SEQ ID NO: 46344 - DNA, 478 bp, Gossypium hirsutum
  Clone ID: LIB3582-010-P1-K1-F1
cggacgcgtgggtcaattttcagtgttccatttctctatctttgcaaatccactcgtttcattcaaagcaaaaatattagacatagaaaatggctttcttcagaaatgcaaagcaaccgcttgggatcttattgtacaacaccaggctgagtacttgtagcagacatgggtactctacttgggcaaccaaaggaacctcctttgctcaatctacagataccaaagcctcaaaaactgcttatttgtattgggtttcgagaagattcaattctcaggcagcttcttctgctgagcaaatgagccttatcaagcaactcagggaaagaacgagtgctcccataaaggatgtcaaggcttctcttgttgattgcaattgggatattgaggctgcacagaaagaattgaggaaaagaggaaaggttttggccatgaaaaagtcgtcaaggactgctactgagggtctgcttgctctggctca

SEQ ID NO: 46345 - DNA, 473 bp, Gossypium hirsutum
  Clone ID: LIB3582-010-P1-K1-F3
cccacctctactttctctttagtcacaggctgcgcttttaatctcttcttcaggtttgcttccctccgttttgatttttaattttcttgggggtgggggtttaggctatacttaattaagccttttgattttctgtcgttttttttttcctacagagaatggatgtacatggacgagaaagaaaactggctggaaataacggagaattctcatactccaaagccaacgatatttttcttagaaacccaaaccctccccacaattcatctctttccactctaaagtccccagaccacaataaactccgtaagtactggatgtcaggccactgtcacagaggtgacaagtgctggtatttgcattcttggtctcgtggggatggctttaccatgttggcaaagcttgaaggccacaagaagaccattagagggattgcccttccttcagggcatgacaagctttattctggaagc

SEQ ID NO: 46346 - DNA, 478 bp, Gossypium hirsutum
  Clone ID: LIB3582-011-P1-K1-A7
ggtatgaagtaagcattgttccaaggatttttttttttccatttcccttcctggatccaattctttgcttacgattctctgttttgtcatgcataaattgtactggacctgccatggctgtctgctttaatcccaaacctacaacctatatgcctgacagacctccaggtatcaaatcatcacgatctcttctgttcttatcaaatcatacgaatgggaaatcttggtttgatgaattttatacagttttagatccatttttagctgtcaaaaatttggggttcaagtgtttatcaagggccgactcctctgtatcatgcaaccccaccaccacctagtggagaaacctgtgtttttttcttgagggatcctatgtgctctgcagtcctttttctcctttagctttttacttttaaaaactgtaagtttgcatttaaatgtatagaatatatatacacacaaatattattttttcaag

SEQ ID NO: 46347 - DNA, 482 bp, Gossypium hirsutum
  Clone ID: LIB3582-011-P1-K1-B2
ggaaaactcgatgaagcattgcagcggagagttacgagtgaagaaagggtaacacatttagatgcggccctcaaggaatgcatgcggcaactccggtttgttcgagaagaacaggagcgaaggattcgcgatgcagtgatgagcgtttcgaaggagtttgagaaatcggggaagggtttagaggagaagttggctgagactagtaaaagggttaataaattaggtgttgagaatactaatcttagtaaggctctcttggcaaaggaaaaaatgattgatgatttaaacaagcaaagggctcgggtcgagaccgatttgaatgcactaatggcgagattacaatccatggagaaggataatgctgctttgagatacgaggttagagtgcttgagaaagaagttgagatcaggaatgaagagagggaattcaatcgtcgaacggcggaagcaacgagcaagcaacttttagaaaatgtgaagaa

SEQ ID NO: 46348 - DNA, 479 bp, Gossypium hirsutum
  Clone ID: LIB3582-011-P1-K1-B7
cccacgcgtccgtctaaagtctttacaatgagagaagaaaactcatttgagaacagagccaaagcatcaaaatttggtgatcaaaatcaactcccaaaatctctgcacaccaagactattaccaatcaatccaagcccaagtcttcatggggttcacacattgtgaagggcttcacaggcacagctgacaagaaaaccaaggttcaaaccatcactgtccaaaccaagaaacctcctatatcaaacactgatgtccccactgctaacccatctctgcattctcattctagagttaaaaggtccctcatttctgatttatcttgctctgtcagtgcaacccaagtccaccctcaagtctacccaactcaccggaggcagtcctctggttctcgagatctcttcatcgaattagaccacgttaggagccttcttcaggactctaaagaaagggagcttaagctgcaagctgagcttgccga

SEQ ID NO: 46349 - DNA, 484 bp, Gossypium hirsutum
  Clone ID: LIB3582-011-P1-K1-C1
cccacgcgtccgagacgatgtatctggtcagagtgaccaaaacggaaacgtgtcggagtgaacttgctcgggccaccatagtcgcggttgaagcgataaaaacacctttgagcgagatggccatagcggctacaaatttggcattgcactcgagaacgaaacctgcgcccactcaagccagaaaatgagcgaccatcacgcctagaacgtagagccgactcaatcaccgccacggccggagaggcttcaaccacgttagcatgcatcggcgcatcgtgcatagcttgcatctgacgagtttgaaactcgagcaacacatcaaccagttgctaaaacggaagcattttcgacgagaaagacacaagatttaatatcgcatcaatatcagatggaagaccgacaaggattacttctactttttcggcttctgaaacaacaaaaccagaggcctcaagcaaggcacaactgttctgaattttggcaa

SEQ ID NO: 46350 - DNA, 319 bp, Gossypium hirsutum
  Clone ID: LIB3582-011-P1-K1-C10
aaaaaataaaaaataaaaacaaaaaaaaaacaaaaaatataaaaaaaataaaataaacactaattataaaacaagggtcatggacaaaaatattctcaaaaatcccaaatttacaatttgatagcgtgcgcctgtttttagggatcctactttacacacccttctttgaacatataatattttttatgccgtgaccctcaattgaaataccctgcctgtttttttacatagtctgtccttgaatacctctgcgttaccctaattatacacctttgaaacacttcccctttttcccatttgcatttttttcatacactcc

SEQ ID NO: 46351 - DNA, 475 bp, Gossypium hirsutum
  Clone ID: LIB3582-011-P1-K1-C11
aaaaaatcataaatgaaactctaatcagacatggaatctagccacatgaatcgacactcttcttgtccaaggatctgaagcagcaagttctcaagaatcccggttttccagtttgatagctttgtgtgtctttccagaaactccttcgaaccacgtcattgatcatctacttgctgaaagccctaaccttcgtttgtcaaataccacatattgttctacataatcagtaactgcatttctcagcgtcaccttcaacctccaccactgaaagacccacggacaatcccaattccactgccttcatacactccacagctttggccgcaaaggaagtcgtaagctacatcacaattaatctttgtagtctgcgcatcgaagccttccactttgtatcttctatggaattggttcctgtcagtccaaattgcgcaaagtgcacatccaaaaactctgccaagctgattggaatggttgt

SEQ ID NO: 46352 - DNA, 484 bp, Gossypium hirsutum
  unsure (1)..(484): unsure at all n locations
  Clone ID: LIB3582-011-P1-K1-C2
cccacgcgtccgctttctcaccaattgaagaacatttttatcaaaggcaacatgaaacatgtgtgagttatgccagtgaagttcttgaaagtttgaaagaagatttcctgaaaagagaaatcccaggtgctttttcatctggtgcaatgttcgatccgtttatcactcatacagaagcagcaaagctgctgaacgcactcttgaagcttcgccaagcctgttgtcaccctcaagtaggaagttttgggctgcgttctctgcagcaggctccaatgactatggaggaaatattaaatgttcttattagcaagaccaagacagaaggagaggaagtgctcangatgttagttagtgctttaaatgggcttgcaggaatagctataatagaagagaaactttctcaagcagtatcattatataaggaagcactggatataactaaagagcattctgaagactttcgcctggaccctctgttgagtat

SEQ ID NO: 46353 - DNA, 469 bp, Gossypium hirsutum
  Clone ID: LIB3582-011-P1-K1-C9
ctcaaattcaatttcaaagttaaagtaattgcttctctgttttttttcaactttctcttttatatttcatcaaatctctctgggttttgctctctcatctacttcgcctctataataactgtttggtgaaaatggaaaaagaatcgatggataaagctagtgcctttggtgaacgcatcaaggttgaaggagctgagttgggcagaaagatgagcgctggcatgagctcaatgagctttatggtgaaggaactcttccaaggcccgaacccaactgataagcttcttgaggatgctacatctgaggcccttgacgagcctgactgggccttgaatcttgatatttgtgacatggtcaatcatgaaaaagtgaacagtgttgaattgatccgtggcataaagcggaggataatgttgaagagccctcgggttcaatacttatccatggtcttgcttgaaacttttgtcaa

SEQ ID NO: 46354 - DNA, 468 bp, Gossypium hirsutum
  Clone ID: LIB3582-011-P1-K1-D10
cggacgcgtgggctttaatgatagaagtggtcaaaagatagagactgattcgaattcggctatggtgtgtctatgcggttgaatttagccgtggccgagtgcttgcgttcgtataattataatatcttattttcgtagatttgttattctatttttcttaataaaaagaatacgcgccttttttttttcttttttctattttggtcaaaatacgcccccttttctcggtaaggaaatagaaagaaagtattgctgaatatgtttttttttttttggctaggcgttaaagcatggataactgtttgcatccttgtatttttattttttatttttttgagaaaaaaggaaatcaatggcagggatttttcttttagttcaggaaaaggtcctccatacctctttttttttatgatttatgtaattatttattagtttggatttaaattgatttggttttatctgattcgg

SEQ ID NO: 46355 - DNA, 481 bp, Gossypium hirsutum
  Clone ID: LIB3582-011-P1-K1-D9
ctcatcagcaaaagtggaccgttaccatcagacggatagagtttgacaatacaaggttcagctgagtctattagtgagattggatttccgtctcttaattcaataagaaaaaaccggctccagctggactagggtttccactaacagatccatcaaggaaaggtcgaactaatttcgtagatgtgggctggagagttttgttctgtcgcaaaaaaaaagaccaagaagtataataagaaagaagtctaactacccgaccttacacagtaccctagcttgggaaagattatgaacgggaaactcaggatagacagactagccttattaagttaagcaaccccagcaaactaaagaaaagaaaggtcttttcagctcaaagaaattcggaatcaagacgaattgtgactaacccccctagtctaggatttagttagtcattgctagctctttgaacgaatacgctcttgggccgcaggaagat

SEQ ID NO: 46356 - DNA, 483 bp, Gossypium hirsutum
  Clone ID: LIB3582-011-P1-K1-E1
actcatttcttgaagggtctttttcttttgtttgtttgtttgtttaatttttgttattttttattatatttgtttgacaatatggatgcaggatctttgaatcctttttcaaaattgagaggacgatccagatgcccacttcaggaatagattctccagagaataaattctaaagaaaatattcataccaaattgttcagcaacggactatgattatgctcattacatgctgactgaagggaggaagatcaaagagaaccagacagttttctcaccagccagggatgcctataggatgcaactagctgaggccttgaacatgaataagactcgaatcttggctttcaagaacaagccaccaacacttgttgaactctttccttctgaccacacaacttattctgctcacccagagaaaccttcgaagccctgaagacacattccccagagctctgagagaacattggatgctcttgaccttat

SEQ ID NO: 46357 - DNA, 482 bp, Gossypium hirsutum
  Clone ID: LIB3582-011-P1-K1-E2
caagaggtttcctgaatggtaccccgtcactttattcaatgagctctattatcttaattcagggggaacgatttggacagatgggtcatctccggtccatagtttagaaagcattggaggaaagaagttttcccttgataaatcccagttgggattgaaaagcataattggtgttccccataaaaatgatactgccattgacattttgggaaggatgacttctatactcgagcaaatacacactccaattacatcaaattcggctttaggaacaaatttgcttcaagaaggagaggaaaatattggtcaattcctttatcttgaaggaattgagtatcacatgtggaacacctatgatgtccatttttatgcatcttttgcactaatcatgttatttccaaaactacaactcagcatccaaagagactttgcagctgcagtaatgatgcatgatcctagtaagatgaaacttttacatgatg

SEQ ID NO: 46358 - DNA, 466 bp, Gossypium hirsutum
  Clone ID: LIB3582-011-P1-K1-E7
cccacgcgtccgcccacgcgtccgatggattctggtgttggaaaaggatctagatctggggttggcttcaggggaagagagtggaccatggcaaaatgatcactaaacttctgcaaaagtgttgaggtttattaccattatatccatcttcggactttgcacaacactgaggaatacatattcgttaatctgaatgcgtaatttaagtcatgggaatgagatttctatattatcacggactgagtgctgctactgtgcatgtctcgcacttgcaaatgaaataaattggctgatagacaaaatccaatacgtggctctgctggaaatatatgctatgactgctgctagacttcaactgatgatcttgcattggaaggagacaaacaaactctgactatttatgaatctcacatacattcagaccattcaagatggtggcactgggcaaagtattagagtactggac

SEQ ID NO: 46359 - DNA, 483 bp, Gossypium hirsutum
  Clone ID: LIB3582-011-P1-K1-F2
cggacgcgtgggcggacgcgtgggcggacgcgtgggagcaacttcagaatcacccgagattgaaactatgccatggccattatggatgaatgagacaacggattcattgcatgctgattgtgctgccgttgactcaaagccttcgatagatataactattaaagatgagaattctcccataacaaatgtggagttaaagaggaaggacggatccgtgaataatgagccgcagctccagaagtccggcaagaaagcttctaatcctgcaaaacaagttggcacagaaaatggacatcagaacagtcctgtactgccaagctacatgggagctactgaatctgtcaaggctaagctgagactacaaggctctcctcgctctggccaggatggagatgaaaaaagtaacctcagtcgtcgccagtctttgccatccccagccaatagtaaactcagctcacattcaccaaggacacagagactggt

SEQ ID NO: 46360 - DNA, 480 bp, Gossypium hirsutum
  Clone ID: LIB3582-011-P1-K1-F4
ggctcaggccaatggcagtgtgtaatttgcgggaatctaaatggaagcgaaggtgaatacatagcattgagcaaggaagagcttcgtaattttcctgagttgtcatcacctttggttgatttcattcaaacagggaataagaggccaagttttgttccggttactgattcaagaacttctgcaccagttgttcttgtcatagatgaatgtttagatgagcaacaccttcagtatttacagagctccctgcatgcaatcgttgattcactgccaccaacaactagaattggaatcattttgtatggtcgtgcagtatcagtctatgacttctcagaggaatccattgcatctgctgaagtgattccaggtggagcttcaccaactcaggaggctttgaaagcattgatttatgggacaggtatatccttgtccccaatgcatgcttcaaaagaggtggcacacctgatattctcctctttg

SEQ ID NO: 46361 - DNA, 454 bp, Gossypium hirsutum
  Clone ID: LIB3582-011-P1-K1-F6
ctgttctggtggtggcactgcattagttcaatcagacacatgacctttggatatgtcttttgctcgttcatgtggcccggtctggataatcgttgactggtggacctttcgatgtgttttcatgtcatcttaatgtgtctacttcgatacggaacaccatctataacctatatctgtctctatgaaactagcactgcatcctactagttgtttcagtgaagctgtcacaaggaatcttgttaatatacaacaacatatgtatcttaattacttgtatgtatggtcatatggaatctggctaccggattaaggtaaatcgcatgatacttacatacggttaccttttcaggatacgccttggacagcatacttaattattattgtattggagtttaccattattgaacatctcaggactctatgactcctattacataccaataattattgtgct

SEQ ID NO: 46362 - DNA, 364 bp, Gossypium hirsutum
  Clone ID: LIB3582-011-P1-K1-G2
cccacgcgtgcgcatacgcgtacgctgtcattacacaatgaactttttgcaaccttatattgattgaatctcttagcgcttggtgttatctgaaaagacaagtccaaagcctcctatttcatggtgtcgtaaattctttgccgctggcaactgtaaatgcaaagggacaacagttgaggttaacaaaaccattgcaacattgaatgaacctgatcttccttatggagatagtagcgccggacgttgtgagccctacattcgtaatccttacctctgttaaacctataatgcggtctaaataccaagcacctgctgacaacttatgtgctaacaacggcagctcttaaagcggagatataactac

SEQ ID NO: 46363 - DNA, 484 bp, Gossypium hirsutum
  Clone ID: LIB3582-011-P1-K1-H1
gaaaaagaaaaaaaaagaaagattcaaaattctgtttagtttatttggaagattttctctctaaccaaacagaagggaaaagaaaagagaaaggaaggagaagaaatgtcattgtctctaataattcctaattctcccattttctcaccaaaaaaggttccttcaatattctgcaaatcggacggttcttctttctcgtcttcgcctcggaccaacggttctcaacaaccaccgtcgtctccgttgtctctttcgttatcatctcctaaatcgtctctccctatttcttcgacaccgcaatttccttcttctccgttgaaatctccgttgtcaattcgtgtaccgaagaaacagctcttgttcggaacagatgtggcgccggtgaagaggaaaaggcccgggaggattgagataccgacttcgatggcggttcagcttggatttgcagcggagacgcctagaggtgaggaagaggtgcaagtgg

SEQ ID NO: 46364 - DNA, 478 bp, Gossypium hirsutum
  Clone ID: LIB3582-011-P1-K1-H10
gggagtcaaattccatttttctaaacaaagaaacaggaaggaaaacaaaaatgtctaattcgcacatcgatacaatacgtcttcattcctcgtaccaatccggcatcgacgagatcgagaatctaatcaccgccagtatccaaaccggcccaaccactgtcctcccggcccgcccaccaagtccacctcgggccttcattcctgtctcctcttcccccttcatctaatctaacatccctcctccgcctacgctctcgtccaatcagatgccgcggcctgtcccggctgctccttcctcctccacccttcggtaactctagcagcatcgtagcgaccggattcggtcccccgtcaaacaccctaacggagcccgttttggacacggtaaaaagagatctgtcgaggattgtaagtaaattgaagttggtggtgttcccgaatccgttcagagaagatccaggttaggccttgagagatg

SEQ ID NO: 46365 - DNA, 491 bp, Gossypium hirsutum
  Clone ID: LIB3582-011-P1-K1-H5
gccccacgcgtcccgccacatatattctgtattcgtgctcttgcttggtatagtcagttgtagaacacagatctcctcgctgccttttttggttccattctctttcaatttgttaaaagaaaactgcaaaagaggggagactggacgctgtgtaatccagtaagaaaagaagaaaaatttagaatggattctgataagagaggtttgactgttaaagaggataatatgtaaatgtagtacatcccaattactgaaaaattattgatctatctacatgagctgccttgttctatgtttgaatattggtgtttgcatgtataccatcttgaatattagtatctaagatggctatagaccagacatagtagaggaaggtcttatagctgatctagattgcataagattaaaatttgggttgaaaaaaataagatagtgatgtactttcccagatttattgtagcccaccgtttaaatctaagagcttacgtttt

SEQ ID NO: 46366 - DNA, 418 bp, Gossypium hirsutum
  Clone ID: LIB3582-011-P1-K1-H8
tttaaaaacaattaaacaatgtatactatgcacttgttgctcaaactaacattttgaaatttgaacaaataacccaatgtgttttggttcaaaaaaaacaaaaaaaaaaaaaaaaaaaaaaaaagaaaaaaaaaaaaaaaaaccaaaattaaataggcgaaaaaacaatcagagacaacatggacaaacggaacaaagacaaaatgtcaaaacacgtgtaaaatgcacaacaatgaagaacactaaatggacaatgacaatcctcatatgagataccattattcgcgaccgcatgtggaacatcatgaaagaaagctgcgttcacagtgcgaactaagctgccaagaacaatacgagatacaccattatcaacaatctgacaagcgaaataaggagtgtgaacaccattaacaacggc

SEQ ID NO: 46367 - DNA, 381 bp, Gossypium hirsutum
  Clone ID: LIB3582-012-P1-K1-B12
caccaccgacaacaagaagaccaaaatccaacatcattaatgcatcaaacctgaccagcacgatgtgatattcaacaaatatcaccccctccccagccaatccaccaccaataacaacatccaaatgcaattaactctccaccaaacacttccaacactccgtgaaaaacaaaccctaacaaaaacctcatcctacaagacaatcacaatcaagttccacccctacaacacaatcaacagaacaaaagcatcaaatctaagaccactataatatccccaattactaaattcatctcatataaccccgaaaacaactcaaaaacaaacgtgcctggtacaaactcatcactcacaagaattaaacacatcattttataactt

SEQ ID NO: 46368 - DNA, 466 bp, Gossypium hirsutum
  Clone ID: LIB3582-012-P1-K1-B4
gccacgcgtacgcccacgcgtccgtagagggagagatttctttttctcttcatcttcttctgcaaaagaaaacaccgacaacattagttgtgcaaagactgtaagagcaacaaaaagagggagaaaaatgtatggagattgtgaagctatttcatcaatgggagggaatctggtggtgtcttcagaaactttatttacatcaacatttcaaaaccctaatttcagttacttgcctttggagcctttacctcctatgatccctaaagaagaaaatgggtcattgttgagaggaaaagaggagatgaaaagtggttccgaaagtgaattacaagaaaccactgagcagccattgaagaagaaacgttaccaccgacacactgctcatcagatccaagaactggaagctgtttttaaagaatgtcctcatccagatgacaaacaaaggatgaaactgagtcaagaactt

SEQ ID NO: 46369 - DNA, 481 bp, Gossypium hirsutum
  unsure (1)..(481): unsure at all n locations
  Clone ID: LIB3582-012-P1-K1-D1
ggcattttggatgaaggcatcggaaacttcgaatcgatattgataatggatctaagtcacaatcaaattggagggagcatagcatccaacatacctctcaccatcagaaatctttntctttcaggtaatcagttcaatgggagcatccctgttactttgtctgccttaacacaactaacacaattgtttttggatgataaccgtttaagtgacaacataccagattcctttcaagagcttangagtttggccgatttggatctatcaggaaataatttgaccggtcagctacctccctcatttgggaatntgtcatctcttaccacattgcattttcagaataataagatttccggggtccttaatgttctacaggatcttcccctttcggatttgaatgtagagaacaacaaactttctggtcctatacctncaaagttgctgaatattccaaatttcaggaaagatggaaatccattta

SEQ ID NO: 46370 - DNA, 479 bp, Gossypium hirsutum
  Clone ID: LIB3582-012-P1-K1-D3
gccacgcgtccgatatacctagatcgcgagctgtccacctatcttgttttcaaatcatacccatgtctgatgacggcggagcatcgtcttcatacactgaataatacactctaacacttatcaaactattgacgaaaaagagcgcgtacgctacacttaatttgccaacaactacaccatggctatagattgacgtatattatataaacttcatcactaccgactcatgcatgataatctatatccttgctatactgtcacttaaatgaaatgtactgacccttctctacaacatgttgactatatatatgcgtcgcacctaacttaagctactatatatacatcaagaaacatccagaatcatagtatgcgagagtatctagagaaccaccaattgtaacagatttccatatttaaaaacaaacaacactcgccattgaccacacatataaaacattcttgtaagatgtatacacaca

SEQ ID NO: 46371 - DNA, 432 bp, Gossypium hirsutum
  Clone ID: LIB3582-012-P1-K1-F5
cccacgcgtccgatctcagagtgtatgactgcttgggacgcaaggatcccccctctgcattatgtgctagcacaccggcaggcgatctggacgactgtcggtcaaacgctgcctcaaaatggatagtgaccctttcacttatacatacctagatggtattttcagtaaagttaagatcgagctttactgtaccagattaactagagcccacaacagataattcggatctgttcagctgggcctcgaccgaagatccagacctcaactgatgtatgacacttttgaaaaatgtggcaactgtcttcctattcttggcgacacctgaggcattgagcttacatcacaagccgcttgcttctgagattgacaagggacggtatgaggttgcatgacagtctacatactgttattcagattccggatggcatgtgc

SEQ ID NO: 46372 - DNA, 453 bp, Gossypium hirsutum
  Clone ID: LIB3582-012-P1-K1-F7
cccacgcgtccgatttggctcggtttcttataaaggctgaaaaagaagattccccagtttccaatgatgatgcggcgttggttcacgttatcaagtcatgcatttcacctgggtggttagatcaagcgcatgacctcttggatgaaatgcgttttgctggagttagaactggttcttcggtatatgcctccctgttaaaagcatattgtaaagcaaaccgcctacgagaagtgacttcacttttacgagatgctcagaaggctgggatccaactagattctagttgttatgacacattgatacaatcccgagtgcttcaacaggatactcaaggagctcttgatctattcaaggagatgaaggaggctaagatacccggaggtggtaatcctgaattcgagcggttggtcgagggatgtgcaggcaatgctgaagcagggttaatggcgaagc

SEQ ID NO: 46373 - DNA, 246 bp, Gossypium hirsutum
  Clone ID: LIB3582-012-P1-K1-G4
gatacttgaggcgatctttctagctttcccttactcatatctatcacaaaatcatcaaactatacattatcggccactgagtgctctccaccataagctcacatcagaaccctaatccataactgttgcctttcactcatgagtagcccactgccatatcaacattatgccacttcaacttacgatgttctcactgttccctattgtgcatgataccatccatctaagtaagatcttcagaaaact

SEQ ID NO: 46374 - DNA, 480 bp, Gossypium hirsutum
  Clone ID: LIB3582-012-P1-K1-H1
ctcattttatctctttaagctaatggatcctttctatttgtttcgcaaaggtttcgtttagtgtttattggaactcgatggtggcagcgtatgctctgcaccagtttgctatgtagatcctttttatgtttcgatataaggaaagaatgaacttctctgagaaaggaaaccgaattagtgatgcgaaacaaaatacccctggcaaggtaacgattttgaatcctaatgcagcggagtttgttccattttctcgtagatcaccgtcgtcatcaggaagcactagtgcagttgatggaacaacaaggtttgctgctactgggaccctaaggaaaccggtgcttgataggtcaaggtcttccgtctctaataaatcgaaagaagaggctcatcagttctggcagtcccagctccctaatggcattacctcagactgtaaatttattaatgaggaggattctcaaggaatcgggtctgggaacc

SEQ ID NO: 46375 - DNA, 481 bp, Gossypium hirsutum
  Clone ID: LIB3582-012-P1-K1-H7
ggaacttataaattataaccttgaaagtataattagactgaccataaaacaatctaaactgttcaacccaaatcgagctgaacttgatttaacctgaatcaaaatgactcgaataaataatcaaaattaatccaaacccgtaatgaaactatcgaaaagttcaagcctcaaactccaaaataacctgaaaatatcctaaacctcaaataacttgatcaagattaatcattacctaaaccaattttgttgtttggtgttttaacaggtatccaacagactctgtgaagctaatgttgtcatcacaaacagggttgaccaagaaccaagtattaattcttttataatcttatttaaactttacccacaaatttatcaatttgtttaagcttcaattgatgttgttgttaatttcaggtatcgaattggtttataaatgctcgagttcggctatggaaaccaatgattgaagaaatatacaaag

SEQ ID NO: 46376 - DNA, 479 bp, Gossypium hirsutum
  Clone ID: LIB3582-012-P1-K1-H8
cccacgcgtccgtgaaacctttgtttagttatttctgaagcatttattatttgtttgggaaagaaacctatggacgtgacttggaatcttgatattgatgcaataacaagtcaacatattcagtggttcaggttatattgacaatcctccccaaatagaatcgtctttccgttgttgaactatctagcaaattagttgtttgctctctctgttatatcatgaatgattaatttaagattgcaggctcttgaaaagtctgctcctgtgcaacaacatgctgattctgatgacttctcgtcagattgtgaagggaattttttggatgatttcacagatattgatagttcttctgataccgaggaaataattaatcctggttctgatgaggagagtaaactgttgtacttgacaaaaatggggtactcagaggctgaggcttcagtagccatggagagatgcggtgagtgtttttatttttt

SEQ ID NO: 46377 - DNA, 400 bp, Gossypium hirsutum
  Clone ID: LIB3582-003-P1-K1-A3
agacaactcaaatggaagcgttgtttcgctcagcagcaggcgggattcctctctcaggctaggcaatgattctaacatgagagctcgttacggcatggaattcttgttctcagcatccttacgtgtatggggtgacggtgttcgaagctatcgacacattcatcggtcacagtgtcagttttatctctgattgctatattaggtagctgcagcgacgagccatgataacaactgctacacaagctgacactttgatgctgcgatacatgatatttacaatacctctcaccgaacagcacggatccgcgctgtgggtcatagccacgggactcttatttaagatgcggtcgtatagctaaccagcaccctttattccaacatcaaatgtcaatgcgaggca

SEQ ID NO: 46378 - DNA, 504 bp, Gossypium hirsutum
  unsure (1)..(504): unsure at all n locations
  Clone ID: LIB3582-003-P1-K1-A6
aactgaactctccaagaccaaacaaggcccgcatctgcttaggacattagatattgacagatatgctaccaaacctgatcagtggaggtcaaaacaagcatcaaaacaatcagcctataatgaattctttgttgcctttggctatagcgaatctaaatcaacaaaacgtaacaaactcctttataatgcttctatggacacatcagagcatgaagaattgaacataaagaaagatatagacgggtctctcatttccacttccgtggttgatgatacctcttcagagaagaaaggaagaaagaagagaaaaagagatgtggcctctgaggatgcagttggttctaacaaggcaatagagaaggctgtaaaaaatnttctctcatccagtacaccagataagaaacggcacaatgcttcaaaacagagactgaaaatttgaacgtttaggatacaatgcgttttgctgacggtttctgatagctgacttgagctgcatcatgttac

SEQ ID NO: 46379 - DNA, 383 bp, Gossypium hirsutum
  Clone ID: LIB3582-003-P1-K1-B1
gtaaccttctctctttctctctcagtggacagtcattttcccttgcttttaactccaaaactttcttcaacaattctctttccctggaattgcttccacttcacttttccttttagttttttcttttttggggtctaaattattatttctactttctctctcaagtttgtttagctattccaccaaaaacctaaccccaaatctccttattagtctctttcttaccactttcattcatttaataactgcaccttcgcttctctctttagggattgagttatcctttttcttctttacggttttatttgaggactagggggttttgtgattttgattctcgaaatttttgtaagagaaggtgacgtaaatggaagtagagttac

SEQ ID NO: 46380 - DNA, 487 bp, Gossypium hirsutum
  Clone ID: LIB3582-003-P1-K1-B10
gatgaattgcctttaatggggggagcctttcctgattccagtacaatagaatatatgcgcttccacttttatttttcccaataaagaaaaaaaaatcatgcattggagatggagttcccatgataaatgtcaaagtgtttctttatcgtccttggcttgttcttgttgtatttgttggaatccaagtcttagcttcagtgaaggtgaagcagtggacaagtttaaaatgagctcatgcagtgtaagacgctcatcaaagaagctggaaaacatagatgagaatggtcccccaaggtggttacaattgtcttgtcctcttccagaaactcctacagaaccaatggagtttcttgccagatcatggagtttgtcagccatggaactctccaaagctcttgccaagaataatatagctgcttccaatggcgttgatgctgacattaagtcttcatctgcttcttctgttggaaatattgaaacgcatgat

SEQ ID NO: 46381 - DNA, 504 bp, Gossypium hirsutum
  Clone ID: LIB3582-003-P1-K1-B12
gtgaggaattggtagttgataagcctgaagtactggttgcaaatgctgaggatatatgtgaggaagtcttggatcattcttcaccagtggaggctgttagtgtagaagagcatgctaatcaagctccacaggaaattgaagcagtacatgatgatctaaccatacttccgaaagctgaagagtatgccgagggcgaagtatctcaagatgttccttcagatctacctgaagatcatatggattcctcagcgaaaaagggaaatgaagcatcttatgatgatcatgagctccttggagattcagacatcgatgttgaggaatgtgatgatccactgactaatatggcggacgaagaatctgatgatgatgtccttggcgattcagacatcgatgatgaatctgtagctgatgaggatctaatgactaatgtggtgaatgaagaagcattggttgatgcaaatgtgaccgaagccagaacaatccctgtgaattcatccacaatgc

SEQ ID NO: 46382 - DNA, 169 bp, Gossypium hirsutum
  Clone ID: LIB3582-003-P1-K1-B8
ttttggattaaaaatttttgcaagttcctttgtaacggtggtaagcaaaattaaaaatggtggggttgaacctgattttcgttgatgttaaacccaaccaaaaggttttaaaaccattttaactttttcaaggattgatttcaattgccttgaccttgaagccaaacca

SEQ ID NO: 46383 - DNA, 501 bp, Gossypium hirsutum
  Clone ID: LIB3582-003-P1-K1-C4
gaaacagcacatccccaatgataccgacgtacatgaagctgactaccctagggctgtccattagtggcagtgactctaggtaatactggtcgcgactatattcattggctcgtgaatggcatcatataggctcatgatattcttattatatgtatccctagttctcaccaagattggagccaatgtctcaactgaaccgcatgattgaatctgacgccgacgatacttctgctcttaagatggagtttgatcaactgaaatctacgatccttcttattgaatcaaatgttgcggagaaaatactagaattgaaaaccaatgatgagatgattaaccataaagatataattatctaagaaaaatctgacaccatggcatcgatgcactctgaattatcatctcttcagaaaaaaggaaccccagattctgaagaacagcttggaaaagctcatgcgacagctctagaattgcagaaacatgttgattgacttaaaactgaac

SEQ ID NO: 46384 - DNA, 496 bp, Gossypium hirsutum
  Clone ID: LIB3582-003-P1-K1-C6
ctatttcaataccagagtttgcagctgtagctcggatacctacctcagcccattccacgtgaacggttcaaggcctatagacaagctatggctgctggcgtaaatgaatcagagacgaatttgaggaatactgttccgctgcccataacctggcctctactattactaatgacaaaactggaatatgaatactggagggctgcttgaaacgcatcatctgagttcatcttatcacaaggttctggagggggctgccatattaaaggcatcgtattcacctgtgtaggtattagatttcttaactccatgatctccattataatgctgaatataatagagcatatatgttgtactggttgactttctccttccattatgcactatgtttcaggctagccataatgcccaagccatgactgcagcaactctaccaaaatcatgcacttgtttctaagaacaacattaagctagtgccacacatcaggagggtatgcat

SEQ ID NO: 46385 - DNA, 426 bp, Gossypium hirsutum
  Clone ID: LIB3582-003-P1-K1-D10
cactactggatcatatctcaaacaagattgtctcaattgagcgtatgatcactagatggtccgagacaatgtccacatgtattggacttcatacttttgatgggcgggtgactagatgtattacgctggccgaagagcaacatcgctggggcacaaaaaaccatctcaaggcagaagttcttcgccgtataaaagagactggaagtgtcttatatcggatggggatacatgatattgctgagagagagctggataccacacatatcatgcaaacagaaccttactcgggcttgattactgcagcaaatgggcaaatgcttgcacaaaatgccagagagagtcctgaagttgacctcttcaaatctgctacagctgtaattgtgttaaactctatgtgcccaaattcaacctgtttttacacaaagg

SEQ ID NO: 46386 - DNA, 310 bp, Gossypium hirsutum
  Clone ID: LIB3582-003-P1-K1-D12
accacgcgtacgcttgcttgttctattccatggctgctgtgctcagatagaacttgtcactaagcattagcagtatccaccttgggggcattctcaacaccctcaggcacgtaagcaatccaaatgccaactccaaatcttggatgctctttaacctaaacacctgtttaggtcaaaagctgatgaaactgaggtctggcaccaaaatgaggatcaattccagtgcgctggggttgctgtcctacgtgatacgatacagcgcagaggacttttatcgccttcattgaccaatgctactatgctaatgtat

SEQ ID NO: 46387 - DNA, 496 bp, Gossypium hirsutum
  Clone ID: LIB3582-003-P1-K1-D4
ggaaggagaagagaatgcagagaagagaccaacaaaagcatgtactggtgaaatgtaagagatggatcacgctgatagaaattggaacgatgggtgaagatggccatccaaacgtagtgccactcatagcgctgttgtatggaaagcagtctttatgtcatagtttgaggtgattctccagagagtacggtgctagtcttatcatgacgcacatttgccaccaagggattggccatcactatatattatagctgtacgtactggaccaatactctattacttgcattaccagtgctaaacaaggataaaggagcgtggcatcatgccttcatatatgaaattgactgcagatatagtgcctcagacatcatatgacggactagctaaatggcttacttgctaagggacacaccattcgattgatccaattgaagggacatatgggcatctagcacccgtagtcttcatgcatggaacagctgatgaaaaaacatat

SEQ ID NO: 46388 - DNA, 365 bp, Gossypium hirsutum
  Clone ID: LIB3582-003-P1-K1-E2
gtaaaatgtcttacagatttttttcctgtagggcattttccaaactcagtgccgccgatcactcgttcttcttaatcattcaggggttcagggaataaaggaaatccattacaggggcggtactgcataaaagtgtttcataaaaaaaccctagcacaatcttctgtgcaggcctaaaaaccttgtttccaccccctggtttcattcattaagaaaatggacgaaccaaacattggtgattgcaaatagtgcaaaaagaacgcctcaaaatacaagtgcccaggttgctgactccgcaccttgcagctcccttgcgataatgctgacaagcaacgcactggctgcactggcaaacgcaacatcac

SEQ ID NO: 46389 - DNA, 248 bp, Gossypium hirsutum
  Clone ID: LIB3582-003-P1-K1-E7
tcggccacgcgttcggtccttgagtcttaagctcaggctcaaaattaccttcaatcaatggggtctcaacacgcaccttgattacttcaataaaacagccgagaattgtaattcgaaacgatccttgggagaaccttggtgggattttacgccaaactgggtctaaagatcttgtcattatttggcacgggttttaattcaaaaaaagaaccaatacccatggggacttttgccactacttttggaag

SEQ ID NO: 46390 - DNA, 307 bp, Gossypium hirsutum
  Clone ID: LIB3582-003-P1-K1-E8
tttcttcttggccaaaaaaaaaaaaaaaggctttttcctggctctcgggcgttttcctggtccaacatggtttggtccattagccaatatgcttattagttggcttaaaaccctggttacaatggaacccctggaaagggtattcctggttctgatgaattcacttgcaccatccgcgagcgtctttcaaggtttaatggtaagaatggtggagaccaccggccttcttttcgggagcttctaatcaccacctctggaactttttaagaccttaaggggggtattcttttttggggaaccctttatt

SEQ ID NO: 46391 - DNA, 519 bp, Gossypium hirsutum
  Clone ID: LIB3582-003-P1-K1-F1
cgctctgtcgaacctttttgtctagttctggttgagtgtgctttatgtttaggtattttgagttgaaaggaatatatatgcatatatatatacgcgcacacacataaagaaagagggaaaaggtttttcttttcctttcagagtaaaggaaaaacaaaagcaaaggattgaagatcaaaatgaaaatcagaaaaactaaaggcaatatggttggtccttcccttctattttgttttcttgcaaggaaataaattgggtttttatgggattggaactatgctgaacccttccttctctttccctcattgtattctcatctggttaaactaatgcaatgcttcagactccctttacttcaagttttttagcaaccttttcgatcatgcaaaatatgtattggtgtttttgcaagaattatcgagtcataacaggttcagttctttccaaattcttttgaaaacaaaatttaactcataacagatttgaatcatcattttcagtaatacaagtgagttttag

SEQ ID NO: 46392 - DNA, 354 bp, Gossypium hirsutum
  Clone ID: LIB3582-003-P1-K1-F8
tttgggttaggtaaaggaaaaccggaaaccggctagctgacgactattggtattaatggcctaaccggaccttcttaaaggccgtgggtctggccggtaaacccaaaaaaaaaatctggtggggtaggttggggaatggatagatagggtggcttgggtttgggaatggctaaatatttttatatttaatataagtccggtggtttgggtatgtattttggtaattggatactgatcgacttaatctactacatccaacgggtaaatcgattttacctacctaggcggcttgaccaaatcgacttgggctcatactaccgattaaattggttaaagtcttcggctcaaaagaaa

SEQ ID NO: 46393 - DNA, 260 bp, Gossypium hirsutum
  Clone ID: LIB3582-003-P1-K1-F9
ccgggttggaccaagccttcggtttgattagtggaaagggcaagggttgagggattaacgactattaaccttgaccgggttcttcagaaaggcgtgtggacaaatattggtttattaagcctaatggttgttattatagtggttcaaaatggttaaggaaaatatcgggatcttgaagagtttgggaatggaagaaaatgattggggttggtgggagtgattgggaacattttgttaggagaaaggcttattttggtaaa

SEQ ID NO: 46394 - DNA, 356 bp, Gossypium hirsutum
  Clone ID: LIB3582-003-P1-K1-G10
aaagatcaaatctaaaaaaaagaaatggggttaattagaacatttattttccttagaaaaacaagggtttaaccacaacaacaaacgaaggtcgatcgatgagttttttccccctaaatctattactttactggtgcttttggcggacaatgctgattggggttttaagatcaaacccagatctttatcttttgatctagccgaatgctttttttttttcttctaatatttgaaagctaacgaaaattagttttaaggagacaacagatatttgggttcaacaaatgaactgggttgatgctgctggtcaaagaaacacggaatatctctgctagtgaaaatggagttgcaaattt

SEQ ID NO: 46395 - DNA, 175 bp, Gossypium hirsutum
  Clone ID: LIB3582-003-P1-K1-H10
tcggattcccatacccacaccaactttggcatgtctctaggccccttccctttctttctcttcttcaactgccttttctttggcaatttttccttcactatatccaggcctggcgcccttaaaggccaatcccttcctttattcacattcccaactggaacgatccctggatttt

SEQ ID NO: 46396 - DNA, 192 bp, Gossypium hirsutum
  Clone ID: LIB3582-003-P1-K1-H9
gttaagcgttagaatttcctttggcctgttctaggctgtgcaagactctaccggaggctgatgcggggaaaatagctcggagtagtctcaagactggcacacggactgtcagaggcgcacgcaagcgcaaacccactaacactcgggagaagacaagtgttaaatgaagtgtaaggtggagcatcagggaga

SEQ ID NO: 46397 - DNA, 297 bp, Gossypium hirsutum
  Clone ID: LIB3582-004-P1-K1-A11
gagctaggacacatttggtaggcattaaccctatggagctgctccgatccaatctctctcggatgacggatccgtgaacccaccaatcggctctacagagcaagaatgctgcctcttattcgattctccgaggccagacggaggattatcagtcgatatgactacgtctgtggcgtctgggatagatcatgtgggatggactcttgtacagactggaactcctgtgtatatgcgtagtaagcctacgaaaaaggagcgttatgcagacacgcctttgaagaaacacacactgatggc

SEQ ID NO: 46398 - DNA, 490 bp, Gossypium hirsutum
  Clone ID: LIB3582-004-P1-K1-A2
cccacgcgtacgtttattttttgcccccactgtcgtgtctgtaactcttcctgtcatcaattgtcttgagagttaaataaagatccccatttgcacggctcaacctttcttcaaatttccaaccttgcaagcttgaaaaaaaattgaccttttcatggtccaaagcttacagctttctctaattatgacaaatcccccataacccatttcttcgttttcctcttgatccatcaccacaaccaccgaacaaaaaaaatgcatggtgcccaaagcaaaagggaccttgccatggaattacaagcacagctaccgatcttaagaccaagtatccacacaagaagagcaaatctaacagtgaaattccaagacctttatgggttcacagtagaatgcaatgtggacgatgttaatgtattgaatgaggttagagaaaaagtaaggcaacaagggcgtgtttggtgggcacttgaagcaagcaaaggagccaatt

SEQ ID NO: 46399 - DNA, 326 bp, Gossypium hirsutum
  Clone ID: LIB3582-004-P1-K1-A9
gaaaaagagtgacaatggctgctttctccacaaagttagcgaaaaaacacggtctccggtccgtcagcttccctgctagctcacatccgagcacacttagattggaagaggagctgaataagcgtgggtctcggcacggtgcttcatcgtccaacggtgaaacactttgcactggtttatttggtctagcagaattgtatatatgcatagaggatcttttaaatttgccactcactcaacaagctttagctcaacatcacaatgaacaatggcaaaatgcattgctagattgttcattaaagcaattggatctatgtagtaacacg

SEQ ID NO: 46400 - DNA, 417 bp, Gossypium hirsutum
  Clone ID: LIB3582-004-P1-K1-C1
gcgtcagaaaatggtcctgatctttctatttttgtaggagatttagctgcagatgctactgatagcctattgcatgaaacttttgctagtaaatatccttctgttaaagctgcaaaagttgtaattgatgctaatactggtcgatcaaagggttatggttttgtgaggtttggggatgatactgaaaggtcccaagccatgactgagatgaatggtgcatattgttcaagcatgcctatgcgtattggtgctgcaactcccaggaagtcagcagggtttcaacagccatattcttcacagggtggctatgcatcaaatggttcttcaacccaatctgatggagattcttcaaatacaacagtctttgttggagggcttgaccctaatgtgaccgatgaagaccttaagcaacctttc

SEQ ID NO: 46401 - DNA, 454 bp, Gossypium hirsutum
  Clone ID: LIB3582-004-P1-K1-C11
cggacgcgtgggcggacgcgtgggcggacgcgtgggcggacgcgtgggtcagtatttagcaagagattgaggcaatggcggaaaaaacaaagcaaaaggaaggagaaaaatgaggcttcggttcttgagaaggcaaacaaaaaggggttaagagagactcagtcggagatcggagaatatgggttgtttggaagaagatcttgtgatactgatcctagattatcagttgatgatgcgaggtattcctttgaagagccaagggcttcttgggacggttgtttgattgggaaacagaagccaaaggctaacgaggaagcaaatgttggggaagagagattgagtgctgtaaaagaggaagaaaagattagccccggtgggtcaaatcaaacgagagattgttatgccgattcattgactacaaggaggaaaagtttcgatcggtccaattcgagta

SEQ ID NO: 46402 - DNA, 504 bp, Gossypium hirsutum
  Clone ID: LIB3582-004-P1-K1-C2
gcattgacaacttcatcattatagtgaacggttcgagaatagactccgagctttcagagtaccatagaactaagtactatgagctttgttgtagtcagaactcgttcctccacgataatcttctcgagagtattagtagtaaattggcacttgaaataatcacacagattatcaacattgcagaagctattagagcctgtaaaatttctacctctcaagcagattatactctttgggacaagactctaaaaggctttgagttattaggcatgaatgtcgggtttcttcgagctaaattgaaccggttgaataccctttccttagaattacagcagggtgtgaatatggagaggtgtaaagagcaagatcacatgaaagaagagaaaaaatcacttgaacagaagcttgtgaaactcaaagatgctatgcataagctcgataccgagatagaaaccttgaaagaaaacgccgagaaatatgagcttatatttcgggaagagggta

SEQ ID NO: 46403 - DNA, 392 bp, Gossypium hirsutum
  Clone ID: LIB3582-004-P1-K1-C9
cccacgcgtccgcggacgcgtgggcaagttctcaccacgagggaaagaagactagccaaagcccgagaagcagcagcaagaagtgcaagggagacagctaaagcacggaagaggtggatagctgctaagaatgctgctaagaagcatgcaagtgaactgcaaagtcatatttcgcagaaattttcttttaaaaaatccacaaaagatcctgaggaacttaaaatattggatcgaacaaggtttgaagaagatgaagacttatatgctcctgtttatacgagtgcttcaagtgagtctctatcgtcatctgcagcatccaaggggcagatgcatgaaattgaagatgacattgagaaacatgacatatttgatgtcagcagccatgatagaaa

SEQ ID NO: 46404 - DNA, 547 bp, Gossypium hirsutum
  Clone ID: LIB3582-004-P1-K1-D2
gtgcctgacaaccaggtccagtttcaactgatgcagaaacttcagcagcaacaacagttgcttttggcacagcaatctgcacttcagcagcctggtcaacttgcccaaccccaagatcaacaaaggcagctgttagatgcgtctcagagcttctctagttctgtgacagctagccaagtgttagagatgcctcaaaacatacctaccttgctacctcaatctaatgttgccccacagcagatgcctaaaaataacagccaggcaaatgtttggttctctcagccgcctctgcagtcaaaagttcagcaacaacaaactggaatgctacctgaagttcctggtcttgtaggtcccttccaaactacagcaacaaatcagttctccacagctgttagtagtgtaatgatgtctgctgctgtagccgcaccttctgtgattactgatgataatccatcatgctccacttcgccatctacaaactgtccaagtgttcttcaaccaatgatagacagcagagtccacaggagtactgggttaggagatgaca

SEQ ID NO: 46405 - DNA, 388 bp, Gossypium hirsutum
  Clone ID: LIB3582-004-P1-K1-D4
tttctctctgaaatttcctcgttcttttctctcattttcttgccgtccaaacgagttaaagaaaaatacaatgagaaaagagcgattgtacattacgattccgagtttttttcggtgtccgatatcgttggacgtgatgaaatctccagtgagcttgtgcactggcgtaacgtacgaccgagctagcatgcaacgggggctagacagtggcaacaacacgtgctcggacacgatgcaagttcttcaaagcaaagaaatcgttccgaaccggaacttgctacgactcattcagatgtggtccgattcagtcgctcgacgttaagttgacgccgaatcggcggctcccagctcaggtgttggtccctctcaagatcacgtcaaactcttg

SEQ ID NO: 46406 - DNA, 230 bp, Gossypium hirsutum
  unsure (1)..(230): unsure at all n locations
  Clone ID: LIB3582-004-P1-K1-D5
cccacgcgtncggctaatgctaacggctgtctcgcttggcgtgtgtaccactgatctctgtggaattggactggctccattggcatatgtttgtaacgattcacggatctcacacatgaagaagtgtgagaagaaccgcattcgagattacatggatgggcgcttcgatctcatgcatgatggtcatgctaatgccctgaggcaagctaaggctgttggagatgaattgt

SEQ ID NO: 46407 - DNA, 526 bp, Gossypium hirsutum
  Clone ID: LIB3582-004-P1-K1-D7
ggtggtcctgcctctgtgagaagtagcattgatagaccatttgagatgggatggaatgcagcaagttcaatgttgaaagggggtatatttttaccgaatgcttctggggttctaccttcgagcctatctcagttacaaactgactcagctttcatcgagcgtgctgctaagttctcgagctttaatgggggaaattttagtgatatcgtgaacccttttggtattcctgaagcaatgggtgtctatgctagaggtgtgggcttgatgcaagggccgcaagatgtttacacaatcagtggggttaaatcaatatctggtgtggaatctcagagaagtaagttgatgaccactgaagcttctagagatttgcaagctgaaaatagggctacccaagaaagcccactcaagaatgagaggaacagtggaagtcttgtgagatcaaatgaagaagcaaaacaaggaaatggtggctctggtaatgagtctaatgaggccgagtctaatggcggtgctggtggtcatgatg

SEQ ID NO: 46408 - DNA, 444 bp, Gossypium hirsutum
  Clone ID: LIB3582-004-P1-K1-D8
gaaaatgttgacgcttttcttcatttccttatttcttattctcgttctctccgctcttctcttcaagtttgccatttctgatggagattttactttactatctagaaggcatgtaaagcgtgaagaaattgaagataaggttgtgtggattactggagctagccgtgggattggagaaattcttgctaaacaattggcaagtttaggggccaaacttattctttctgcacgaaatgaaactgaactggagcgagttaggaaacaacttactggtaaatatgcacctgaacaggtaaagattttgccccttgatttgacatctggagaggctacactcaaggaagctgtagacaaagcagaatccttttttcctggtgctggtgttgattatatgatccacaatgcagcttatgagcgtcctaaaataacagctttggatgtaac

SEQ ID NO: 46409 - DNA, 287 bp, Gossypium hirsutum
  Clone ID: LIB3582-004-P1-K1-E1
cgacgcgtgcgtcctttcactggttacctttaattatatcccacttgcttttgtcttcaaaatctccttgggatgactatggctaccgcagaggttgcattatttcaaactgcacttcatgactagaaaactgacgatttagatgcagatcaagaagcttcaacatgatgaaagtgttgccgaagcttcaacgaccgaaccagttgccgaagagccaaaggaagctgtacctgcgaccgtggtagtctaggaacctgaagcctacgctgaagttgaaaccaaagagg

SEQ ID NO: 46410 - DNA, 505 bp, Gossypium hirsutum
  Clone ID: LIB3582-004-P1-K1-E10
gtagaggttgatgagcttctaaagattgagaaatcagagtatcctatgagaatagtgtattgctttggcatttctcatgaacatcctggcacttttattctaacttatatacggacttcgaatccacatcacgagtatattggcttatatcctaagggattcaagttccgaaaaaggatgttcgaggacattgatcgtctggttgcttatttccagaagcatattgacgatccacagcatgagtcagctcaatcaattagatcagttgcggcaatggtaccaatgcggagccctgctgctgatggctcttctgggggatctatgggtggttggaaagggcattctcatgacaggggtcaatcttccactccaggttctagaacaggtcgtggccgagatgggtatcaaagtggtgctccacgtggtggtcgtggacgtggtaggggtggctcgtataacagcaaccgggggcgtaacaatgggcaagattcatcttatgatgata

SEQ ID NO: 46411 - DNA, 384 bp, Gossypium hirsutum
  Clone ID: LIB3582-004-P1-K1-E2
gcgctatcgtagcgagcataagcaacgagccttcataaaacactcaagctcatgtagccatgacattcaagcgttagagtggttgtcgaaacaaacatggtcaatgcaatgtcaagttcatccgatggtctaactgcggaaaatgttgccctaacgaaaagtcattcaagaggattatagtgaggaacatccaggtgcaagctgctgtcagagatgtccaccaagcctgcttctatgacacgtacactcttgcctagctgattgtgaagatgctatactgggtcatatgtgccatccattgccatgttgacaggctccggtaccgctctgacaggaggaaacgtgacccaccttactgcttcattatacgcatggatgatatgc

SEQ ID NO: 46412 - DNA, 272 bp, Gossypium hirsutum
  Clone ID: LIB3582-004-P1-K1-E3
cgcgtacgcgtaccgtagcggtacaagatcggcagccgccgtagtagaggctccaagactacctcctccatcatacgacgtggtgcttctattatggtgactacataaaattaactgactggtcgttttacaaccaacgtgactgacagaacaatgcctgtacccacctaaattaactggcttgacatacatctttctttagctggctgaatagataacaggcaggcaccgatcgatcttcctaacaaacacgcacgctgaatggatagtgg

SEQ ID NO: 46413 - DNA, 476 bp, Gossypium hirsutum
  Clone ID: LIB3582-004-P1-K1-E5
aacaacagcagcagcagcagcagaagatgggaggtgaagatgtgcatgcagtaggtggaaatgaaggaaacccttcagggtttgatgatgttgttgttgaggttgaaagagtgatgggtagtgaagaaagagagatgtggctggataggcagcaagatgatgagttgcttgatgttaatgatgcttccatcttctatggtgatttacctcctcttcctgatttcccttgcatgtcgtcgtattcgtcttcttcgtccactccggcacctgttaaggccattgcatgctcctcctcggcttgcacggcttcgtcttcttcttccgcggcttgttgggctgttttgaattctgatgccgatgaagacatggagagaaagaataatggtcatcatattcatcttcaccaccaccatcatcaaaattatattcagaatagtcaccatcaggagcaccatggtaaggttgatggaacacca

SEQ ID NO: 46414 - DNA, 422 bp, Gossypium hirsutum
  Clone ID: LIB3582-004-P1-K1-F12
cccacgcgttcgcttgaccatcagggtctgtactgtgccactctgtgaatttgaggatatgcgtgtgtgcgcccctattcattgtggtttgatctttagctatcataatgagcttgtaaaggaaaagatattttactgaacagtgagatcattaaagtaataattctccttccgatggttgctctggttacgatgggcgatatattcgctatatggaagtgatgatgaggccttgggaccaaaaaaacaaacaaggttgttgaggaatttctggatatacaaatcatagattgtggaactttttgcagatctcgatcgaaatcaagatcaatcactccatctacttgcccacggaaacgcactacaagtatgagccgaagtgtcactcgttctaattcaccatctgagaaatctgaatgatg

SEQ ID NO: 46415 - DNA, 374 bp, Gossypium hirsutum
  unsure (1)..(374): unsure at all n locations
  Clone ID: LIB3582-004-P1-K1-F8
cccacgcgtccggggtagaatgtcgacggagaactgaaactcaacgatgaaggaccaatcgtagaaacaggagggccatcaacagatcgatcaaagcgatggcagcatcgctgagccaggtgcccgatccgtccgcaaatgtgacactgagggcgtccacgattgccacggccacgaccgcgaaacgaccccctttttgcaggagagaacgaactggcgacactcgagccagtcggtgtactgacagaaactcctaacgcctaaccagactgggaagactgttggaccagatttgcttggggaagaacctncgtcacgaatgcgtgctaccggctttcacattcgagcaaaatttacataagccgatctaatgc

SEQ ID NO: 46416 - DNA, 463 bp, Gossypium hirsutum
  Clone ID: LIB3582-004-P1-K1-H11
acaaaactttcatggaattggtgccacaaaatgttcttcctgatgatttcacacgttctattaagtattctgattacagttctggaactaccaaaataaacgtagctgttgataagttgcctgatttccattgttgcaagtcaattgatggtcttcagtacactggtaccattcatatcggttctgagagcatggaggagatcgattcagcttgtcaagatgcagtcaatggattgccatcaagaaggccagtcattgaaatgacaattccatccatactggacaagacgatttctccacctggtaagcatgtcatcaacttgttcatccaatataccccttataatccatccagcggctgctgggatgatcctgtttacagggaatcatttgcacaaagatgtttcaacttgattgatgaatatgcaccgggtttcagctcgtcggtcattggctacgacat

SEQ ID NO: 46417 - DNA, 269 bp, Gossypium hirsutum
  Clone ID: LIB3582-004-P1-K1-H6
cccacgcgtccgtataacttttgggcattatatgataaagtgttcaaatcttttccataaatattttcagggataaaaaagtccaagtaaataaaaatcatcaataacttttgaaaaataatttgtatattaaaacttcaagttattttcactattgtaaatataaaatatttatttttaagatcataaaatgtgagaataaatgaaaaaaattcggcttggttgctcagtttttcttgctcagtgctattctggtctacgtgtgtgat

SEQ ID NO: 46418 - DNA, 532 bp, Gossypium hirsutum
  unsure (1)..(532): unsure at all n locations
  Clone ID: LIB3582-004-P1-K1-H7
ccacgcgtcggcatatggaagataaaacgccctaggctctccctcatcttcgcgttaaatccagattccccgccaatccgatcagaacagagtagacaggattcctacgcggatatcacagtagaccttctctttttcttttgttagcaaatgaagaagcaaaaaaataatagagaaacgcaaaaaaaaacaacataaatgggaatcaccttctcaaaactaaaaaaacttgtttgattcttttattgaattggtgatcgatgcgtgggnccccccttaaatacagaaaaatggcttttatatagccggatccaaaaaaaataatcaaaatacatccttttttctgcctctctgctatttttcgtttttgcctgctgctttgtcgtttggttgttgcagcgtcggagcatggacgtggggctcgcgggattggcgcggggcactacacgcgtgcggcgaacatgcgagaggagctgctctgtgcacctgagtctaggtcctgctgtgattttgttgggctgagattggctga

SEQ ID NO: 46419 - DNA, 517 bp, Gossypium hirsutum
  unsure (1)..(517): unsure at all n locations
  Clone ID: LIB3582-005-P1-K1-C11
ccccaagctgaagcaattcgtgaaggtttgtcgaaatcaaagctagcaactagtcataacccaaagaaatcgaagattgttgatatgtatcaagattcaacttagtttgaaattatagaggcaaatccttttgtcaattgaagaagaagacggaagaatagtgagcagaatctgaaagatccctatttttgtaatggcttcttcaatgttcctagcccaacgtcggtggttccattcccttccaagaaacctttccaatgctcggttcttctctgctttaccttctcaacaccctgtttctgtttctggacctcaaaacaatgttggccccaaatctaacaagttcgaaaaggcttcttcagctccctcttcgttgaaggaacctgaactcgccaagttctctgcaattgccgatacttggtgggattctgaaggaccatttaaaccattgcataaaatgaatcctaccaggctcgcttttttacgctcaactctttgtcgacatttncgaaaggat

SEQ ID NO: 46420 - DNA, 429 bp, Gossypium hirsutum
  unsure (1)..(429): unsure at all n locations
  Clone ID: LIB3582-005-P1-K1-C4
gaacacgagtgtcaaagaagccatggagaaggaggagaaagctaccgtcgcaacaaatgatgagcctgtaatcaactacagaggatggaaagccatgccatttattataggtcactatggaacataagctcgtttggttcagattactatttgacttagttttctgaggtgcatgattcatggcagggaatgaaacctttgagaaactgggagccattggcaccttagccaacttgttgatctacctcactaccggctgcaacttaaagagtattacagctgcacctatgagtaatgtattaaatggcactacaaattttggaacactgcgcagagcagttctctgcgatacttactttggacggtacaaaacctatggatatgctacagctgnctctatatgggaataaacatttaacatagatcacc

SEQ ID NO: 46421 - DNA, 468 bp, Gossypium hirsutum
  unsure (1)..(468): unsure at all n locations
  Clone ID: LIB3582-005-P1-K1-C8
cccacgcgtccgggaagtattcgagtccgaacttttcggattagcgatgaaacaagctttaggtaaagacgtggagtcgatttacgttgaggagatcggtacgttgtcgaggaaagagatacataaagttttggtcatggacatgatggaaggcgctatcgacatagattggcgtgatttcttcccatacttgagatggattccgaacaaaagtttcgaaatgaatatccaacgaaaacatttccgaaggatggcattaatgaatgctttaatcaaagaccaaatgaaacgaatcgatgcaggggaggaagtgaattgttaccttgattacttattatccgaagcaaagacacttacaatggaccatttagcgatgttgttgtgggagacaattatcgaaacagcggatacgactttagtcacaacagaatgggcaatatatcaacttgcanaagatacgacccgaca

SEQ ID NO: 46422 - DNA, 485 bp, Gossypium hirsutum
  Clone ID: LIB3582-005-P1-K1-C9
gagggatccaactgaaaaagcctatgtttcacgtccacgcaacttaatcatgaggcactcatgatataatcacaacgctttccctttccttttcggctctttttcgtttgtttagcttcgaagttctaaacccactttttcctgtcggttttcttttttcttgttttggcagtgtgttttctcttcattcattctctctattttaatctcttgtctctgttaacgtaccccctgcaggggcttttgactaagatcttcacaccttttcttcttcctttatgttcttaagctcaaatactataatgagaaccgcacctttccccgatctatccttgcagattagcccaccctccgtttcagattgtaaggctaaggaaatggcctacgatgtgttgtcaggaaaatcgatctatagtgatcggagctccacgactgattctggcagtagcggaagcgatttgagccatgaaaatggatatagtaat

SEQ ID NO: 46423 - DNA, 518 bp, Gossypium hirsutum
  Clone ID: LIB3582-005-P1-K1-D2
cccacgcgtccgcccacgcgtccgatggtatcttgatttgattttgcatactgttttccttttaattacttgagcaaaatttcatttcttttttctttttgtcagttttatatctgttgtttgaatatttttgtttggaattgggaaaactggttagttctttttgactgttttcagttcaaagatttcttctggtctgagttctgtaccaatcagtgctattgaatcactgattactctgattttgtatagtttcccttttaacgcaggtttctttaattacttgatccaaaatttgatttcttttttgtcagttttatgtctgttgtttggatatttttgttctgaaatggaaaaactagtttgtgcttttttactgtttttggttcaatgatttcttctgatctgaattctctaccagtgagtgctactgaatcactaatttctttgattttgtatagtttccttttaatgcaagtttatatgttgacagtttttactaacatttttaaagattt

SEQ ID NO: 46424 - DNA, 506 bp, Gossypium hirsutum
  unsure (1)..(506): unsure at all n locations
  Clone ID: LIB3582-005-P1-K1-D5
cccacgcgtccgcccacgcgtccgcccacgcgtccgatcatttttcaagctttgtgtcttctcaaaaatgaagatttaagccacgaaattttcattgcagaaaaagtaaatccaaatttaatgctcataaaactgagttgcttttgatcttcgaattttttatcaaagttgctatcttattatttttttcaaacacttttttcttcttctatttttatgctttttatactctgtaactgagctcaagttgtgttattttctgataaattctcctttttttttcgatttaatcgctctaaaattttaaaaatagcttcaatcttcaatcgtaggttgcagggttttagccagttgtgatttgtttttttcccatatatggaggacaaagagggacctacgctcggtgtcacagtgaaaggagatgaatgtctagatggcttccacgtggcctcatatgtggggcctacagctccgagcatcgttgcacctncgcctagcatggtagt

SEQ ID NO: 46425 - DNA, 446 bp, Gossypium hirsutum
  Clone ID: LIB3582-005-P1-K1-D7
cccacgcgtccggggcaccatcattggagtcaccgcaatctttagatgcatccataactgctgcaggatatgtcaggaccgtaccagatgctcagcagtctcctccgcgtccttacacagtggacaaacaccttcaactgacagttttcttttagctaggttcccaaaagtaggcaaataattgttatgtaatttccacacgtagattttcacctttgttggaagttgtagtgcctagattttcttgtaaaattttgtaattgtagcagtgtcatatgggtaaacacccatactatgtaattcatcctcaaggaggagttttaacccactcttgattgagtattcaccagacccttcataccttcgcaccactgtttctggaagccttgaaaaagttaaaaagattttgaggaccctcttaacttgatccgatccaagcagcatgc

SEQ ID NO: 46426 - DNA, 179 bp, Gossypium hirsutum
  Clone ID: LIB3582-005-P1-K1-F1
gttatagatacttagcctacgctcttgaggccctaatatttcatacaccatcgtacaagctctgcagctcgtgtataatgccacgtagctccaccaaagtgaccaactgcgtaacaagagacatgactatcaaaagcctgggatccatcaactgagagcaacagacacacaatgctcta

SEQ ID NO: 46427 - DNA, 354 bp, Gossypium hirsutum
  Clone ID: LIB3582-005-P1-K1-F12
aaaacattgtttgtttgaggctctttttatagccaaatacaatatttagttttctattattttttttgcttcctgcttctctgctttcttcttgtttttgttttgcaggcctaggggtcaacggcggtggcagaggagttggtggtgtcagaggaacggcggcagagggtggttgaagacctaaggtgaagagaggctaggtttttttgttgaggttctgggctaggatgaattgggcttattgggtttgtgaggcccgggcaggatcgggattatacaaagtggataacatattttaaaaaattggaacttcatgtattttttatatttttcaaaatagtttttttaattctt

SEQ ID NO: 46428 - DNA, 195 bp, Gossypium hirsutum
  Clone ID: LIB3582-005-P1-K1-F6
ccaacacgagcaagaggaagaccatggtgcaaacccttgggctgtgccttgttgggtgttcttggaggtgacgttgttcaggaccttgtaaatggcatcgtataggctactgattgcctcctgattttgtccctagttttgaccataattgtcaccaataccgtagctgaaccgttaattgaaccggacactgaa

SEQ ID NO: 46429 - DNA, 374 bp, Gossypium hirsutum
  Clone ID: LIB3582-005-P1-K1-F8
cccacgcgtccgggacctaaagcaagcaacaattgttctgctttctttcccgagcctctttctgtcccacctgatggtctaaaagctcaatcagactccggatcgaaaggtcatcatgtagctgttgcttttggtgctagctttggtgcggcttttttcatcatactgtttttggggttactagtttggtggagatatagacgcaaccagcagattttctttgatgttaatgaacaatatgtcctggaagtatgcttgggccatttgaaaaggtatacatttaaggagcttagggctgcaactgaccatttcaactcgaaaaatattctcgggagaggtggattcgggatagtgtacaagggtttgttgagtga

SEQ ID NO: 46430 - DNA, 496 bp, Gossypium hirsutum
  Clone ID: LIB3582-005-P1-K1-G10
cccacgcgtccgctatggcttggggttcttgatcgtatggagagatacatgaaagtcaagttccgaggaaaacgtagcgaaaaaattcatgaattagtccctgagcttctcaagaacacactgctggtgatgaaaacaacgggtattcttgtgccgagtgatgatctgggtggagagagtttttggcaactgacatggctgcatgtgaagaacattgtcccatctttgcaatccgaagtgttctcggaacaagaactggagcagttacaaggaaaacatctaaagaaaactggaattccttcgactgatggggcaatgctggttccatcaaatgaaacagcagcttgaaggagaatcccagaacataaatcttgtataagattatgtaaaaactgcaaaaccttgggagagtcgagaatttttttttatctttttttggtcatcagagaaagtcgagaattgaaggcatgaaaaaaggaaagtttgatagaatggt

SEQ ID NO: 46431 - DNA, 492 bp, Gossypium hirsutum
  Clone ID: LIB3582-005-P1-K1-G4
cccacgcgtccgcagccgtccaaccctattcctctctcaaactgtcccggtttttcttcctttctccttcactatgttgccctcattaacccttgttgtgccgcccctcttgtcctcaattgttttgcttacttgttttcttattttactaatgaattgaacaccatattcaccctctcttttctgcctttttggatcttcattgtttcccatcttttcccttggtgttgttctgaattttactctcatttttttcctctcttctttcttgttgctatcgatttgcactgctatttttccagtctttaccttatttttttaatccttaaagaagtccctaaatcgccctaaaaacttctcctttgtgctgccaatagcagccccattgttgtcgccgttagtggtgttgccgcctttagaatattgacatttttagttaaaggtgcatccgatctcactcatctgacatctcaaatctaattaacgggaagc

SEQ ID NO: 46432 - DNA, 193 bp, Gossypium hirsutum
  Clone ID: LIB3582-005-P1-K1-G5
aaagagttaggagatgagaagtttttaacgtaatatattttaacggacataatattgagcagtgggtgctaaatgaaggaatgaatgaatgacaagcttgggctggcaaatatcttttgtctatagctcttatgctaataaattgaatttcaagaatacacaagacgaaagcttccaaaacgcagaatttaaa

SEQ ID NO: 46433 - DNA, 488 bp, Gossypium hirsutum
  Clone ID: LIB3582-005-P1-K1-H10
gaagaaagaagaaactagtagttcttctgatgactcttcggattctgaggatgaacctgtgcccctgaagaaacagcctgccattgccaaaaatgggtctttacctgcaaagaaagaaaaacaagcaagcagttcagtttcttctgagtctagtagtgaggaagattcatcctcagatgaagaagtccctgccaagaataaaatacctgtagttgctaaaaagggctcggttcctgctgctaagacgaagaaagctgatagcagttctgattcttcttctgatgatggctctgttgaagaagaggagcctgctgccaaaacgaaggtagcagttgttaaaaatggctctgcacctgttaataaaggcaagtcttctagcagtttggattcttcagatgaagatagcagctcaaatgaagatgaaataaaatgtcagatgaaagaatgtatgaagttgaacaggaaatgcatatgggaagtcgagaact

SEQ ID NO: 46434 - DNA, 346 bp, Gossypium hirsutum
  Clone ID: LIB3582-005-P1-K1-H4
cctacgcgtgcgaaggatatcatggtgtgcgaagctcaaccatgcgggacagtgggttagccaagccaggcggttggccattgcggtgtcatctagagttgagcatgagatattcaacagcaacccacatgagggtgactaaacgtatcgtcagacacagaatgcatctgaataaagagcaataggcagcaatagtgacatagtctcgtgcacatggactagtgagaaagtcactagcttaaagcaggcacgcaatgaaataataatggggacctatgtcaaggaggataccattgaagtggactaaataacctgaatgatcttctgagtgcaaagcagcaacaaa

SEQ ID NO: 46435 - DNA, 566 bp, Gossypium hirsutum
  Clone ID: LIB3582-006-P1-K1-A10
cggacgcgtgggttcgtggtcctcctaggaggcaactcgtgacgatgtttatgctcagcttgtgaacgctgtttaagacaaaccgtaaagaaacattggctcactagcttatttcatttgagaaatttttttcattgtttaagcttcaaccatttggtagatgtgatgttagccttaggctacttttgatgtcctcgattgctgatattttcatcaaagtccaaacatgttccctctttaggtcttatgaaatttacaaaccgggaattgcagttccagttcaatctgggctggatcatctttatctgatattaacctatcgtcagtaactctacgcggacgtacctacattgagcctctttggtttcacggatcactgatcaggctaattggttggatccagacacattatctcttttctttttcaataaaaaattgtcagaaaaaaatgggattgacgtttctatcaagtctctaaaattttttatgatccatgttgatcttcgatgtaacaatattcattttaatgatgcagaggaagtaaccgttagcacactggggcgaat

SEQ ID NO: 46436 - DNA, 576 bp, Gossypium hirsutum
  Clone ID: LIB3582-006-P1-K1-A11
attaatttattccttgccgtttcttgaaaaagagcatgatggattttaaagttatcattgataattgtttattaactttcagtcttagaaaaaattaattttaaattgaattatttgattttagtaattaatattttgacttttagtaattagcctaaaatgatttttttttgaaattaatttttttattagaggatataacttaaaaatccaatttaaagcagaataattttattaacatcgcggctaattaaaataattgtaggaagtagtcagttttactttcatcttcattgataatgaaatttggtaaacagtctaaaatgaagtttaaaagttgcataactgtgaaatttgcaatatggtccattaatttttaatccatggaagattagattaatagagcaatcatcgtttcatttagctgttttatacatgaccattatatgatccattaatttttaatccatggaagattagattattagagcaatcatcgtttcatatagctgctttatacatgaccattaatcagattctcatggcagattttaattaatggtggttttataaata

SEQ ID NO: 46437 - DNA, 501 bp, Gossypium hirsutum
  Clone ID: LIB3582-006-P1-K1-A8
aaaaaaacgatgaatcaagagaccacctttgaagttagtttttgctttgtattcgggtatctcaatgtatttcttagtattgattgtgtgtgtgtaaaaaaaatacaaaaaccaatccccttggctttatagccgaacatatatttcccttttttacaatttgtttgtttgttctttttttctatttgctgctgtggtgtttgtccttcctgcatgtattggagaggtggaggtgtacggaggcagtatgaggcagcacatggggcgtacggaggctacttggtggctactgcggcacctagcagaaaatgaaacctagggtttctatttctgaaaattttgggccattgggcttgttttcgttactgggccactgtagtttggtctgtttgggggatttgggtgtaatggggttttgggtttcaatgtttagggcttgatatatgtctggctaagttttattattgggcttgtcagaaatggatcgatgatggacttaat

SEQ ID NO: 46438 - DNA, 579 bp, Gossypium hirsutum
  Clone ID: LIB3582-006-P1-K1-B12
cccacgcgtccggaaagacatcgagactatgccagataaaaagaagggtgagggggctctattctatgaacctcctcgattccctggtttggatgtcccgtttatcagttgcgatcttgtaacttctgctgatctgcaagaatttagtccccttggaattaggcagtggatgcggtcgaccatgaatgtcccaactcctttaagattatggggctctccaacacatgatgaaagcccagatgcactaaaaactgctgctgaaagcttcccatgcacaagttcaataatgaaaaaaagacagagaagtctattgtcccctactccagatgaaagaattgagaagaaatctgggattgcaaagggggtgacggacatctcctatatgataacggccacatgttccatgaatgcaaccaatgatgaagacattgttactgaatcagctgtgtgtgctaagcaaccttctttgaaacatctagacaagaagcttgagttctctgacattaacaaggaaaactctgatggagcatctgaacaggccaaagatgcacaaaacacacaactcgtggatgagcaaca

SEQ ID NO: 46439 - DNA, 571 bp, Gossypium hirsutum
  Clone ID: LIB3582-006-P1-K1-B6
ggaagcaaaaactggtaaagcaatcctccccctctctctctttctttatagttccctgaagaacacaccattttaaaagagccaaaaaaaggggaaaaaaaaaaaaaaaagaaatcacaaaatatctctctgtttgcgtttgcttcttcttcctctgttttttttgtttccgggaaacagagagaggaagagaggcctgctttgtttttgctgcaacgattccattttggatcttaatgctttgtgctgaatcgtttttgaggtaacaagattttccagtgaactggaatcatctgctttctgctttcttggaaacatatgaatctgtaatgtgatgaagagtggaaagtttttgtgggtttgaaagtgaaaatggagagtggtttaggaagtaaccgcaacgagaggcattggattttcaaggatgattcctggtttagccagttcaggaatggttccaatccttggatggctagatatgcctatgcattgatcttactggtttcaaatttgctggcctgggctgttcgggattatggccacaatgccttccctgaaatggaaaagctga

SEQ ID NO: 46440 - DNA, 574 bp, Gossypium hirsutum
  Clone ID: LIB3582-006-P1-K1-C12
cccacgcgtccgcccacgcgtccgaacttcttcgtaaaacgtcaagcagtgtcacggcggcggtgatggaagtggcggcgatcggaggtgggataaaagggttggttgcggcctacgtactggtcaaagccagcgtggacgtggtggtttacgagaaagaagagcaattaggcggtcatgcgaagactgttaactacgacgccgacgacttagaccttggcttcttgtatcttaatgctgcaagatatgcaacactgttggatataatcgacagccttggtgttgatgtagaaacatccgatgtttcattctctataagccatgacaaacgcaacaatggctatgaatggtgcagacaatatggattttccaattactttgcacaaaagaagaaactgttgaaccctttcaattggcaaaaccttagagagatcatcagattcagcaacgatgtcgaaagttaccttggatcacttgagaacaacccacacattgatcgtactgagacctggtgacagggtataaaatcaaagggctactctgaaaattataaaacacttacctggctctatat

SEQ ID NO: 46441 - DNA, 393 bp, Gossypium hirsutum
  Clone ID: LIB3582-006-P1-K1-C5
ctagttctgtacgcgtgcggccgacattgtaggtatacttggtgcgttgagaaaactatgagactgtgatttccgcattctgacctagggctaccattcactgacgctgatctaagagttgtagatatcaaaaagctgcatcaaactgggtgggctcccgtaaaatgaccaatctttgttcggatctaacggccgtagagataacccataagggacaaaaaaatacaaagatctactcctttgtacctatgctgaataccgcagaaaactgtctaaacacaagaaagatatcttgttatgcagaacagtatcttggacacgttacattagtggaaacgtctcttatatatgatattaactagagaagggatgtacttacaggaaattggcata

SEQ ID NO: 46442 - DNA, 330 bp, Gossypium hirsutum
  Clone ID: LIB3582-006-P1-K1-C9
cccacgcgtccgatttgcagctactttttcatctatgagctccaccaaaatctgtttatcaaagaaaaagggaaaaataaaaaaaaaaaaaaaaaaaaaaaaaaaaaaaaaaaggagcaaaaaaataaaaaaaagaaggggaggaagacaagaataactaagaaatatctataaaaagagagagagcaaaaaaaaaaatcagggggggcggttgtaaagagtcaaagattagaaaaccactggggcactcaaaatttattttaaagggacacaaaaataaaattgcgggggggactaataacaaagaggaatcgggaaaacccctggttg

SEQ ID NO: 46443 - DNA, 562 bp, Gossypium hirsutum
  Clone ID: LIB3582-006-P1-K1-D1
cccacgcgtccgcggattttataagtttacatccccactcggccaacgctgttcggtcgttggacaggtcgaggattgcggtttgcttggttggtggagccaggaggttcgagctgacgggaccttccatcctggagaaggttcttaaacggtaccccaattcagaccttttttttgcattgtcccatggacaaaaatgccttcaaactatcgcttctaagaactgcccccaggctcgcctctgttcgaattttcgagcagaaactagtgccggagacgggggagcaagtccgtgtcctcacggcggccaactcccctaatggcatccagggtcttctgcagtatttcaatttggtggagggatgcatcacgatgatcgagtcacaccaaaagcaacacggcttcacctatgactggatcgttcggaccagagtagacggttactggagtgcgccgttacatccccgaaatttcgtggcgggtcgatataccgtcccatatgggtcagtttacggtggccttaatgaccgcctcggcatcggcgatttcttcacttccaaga

SEQ ID NO: 46444 - DNA, 575 bp, Gossypium hirsutum
  unsure (1)..(575): unsure at all n locations
  Clone ID: LIB3582-006-P1-K1-D11
nctaaatcctctgcttacttgagacagaaaacgcgcttcaaacagaaatggccactctgcacaaattcaagcttctcgcaactcagtgtgccgtcaccggaagcccaggtcgcagtcccaccaccagccccgtcgttcacctccgccgtcgcaaaacgctccgcatgcttcttaaccgctcttctgccaccgaccgtcgacgttttcatcgccgccagactgataacttggatcctcctccttcacctacgccacagccaaacacctccaacgccgacagcaagaagaactccaatggtaaaaaaagccggcgaaaattgaaggaactcttcgtggcatcgccgccgtttgaagaaagagagagtgatgataaaatctgcgaagaagtaacggaagatttattgccggttaccagtagttccagtgaaaggttttcagatcggagatctggtactttgacgccagtaacgacgtcggttcggtacaggttattaaagagagcttggcgaccgatgctgcttactatttcagagtaaaatagttgtcatatatttcaattttgataattatgaatt

SEQ ID NO: 46445 - DNA, 443 bp, Gossypium hirsutum
  unsure (1)..(443): unsure at all n locations
  Clone ID: LIB3582-006-P1-K1-E3
cccacgcgttcgggncgcgtgggggatgatgatgagagagatgctggtagtgatcttacatctagtgatggaagaggagtgtggagtgatatctacacactaacatatcgagaggctgagagccaagctgatcgatcatcaccagggggatcacgttctgctacagcatctaaatctggtaaatctggttcatccaattccagctctgatccccaacctcgtagaatgtctctattagatagcatattgcaaggggaactctcttgtgatctagacagatccaatcctacttatactatattggcactgttgcgtgtgttacagggtcagaaacaatctgcgccacaagatgaagttctcattgacattgatgatactgccatggcattatgtaccacaagatacaagatgtgcctgtatagagcagaggttaacaaggagag

SEQ ID NO: 46446 - DNA, 507 bp, Gossypium hirsutum
  Clone ID: LIB3582-006-P1-K1-E6
gctcaacataggtagacgctctataacaaggttccccctaacgggctggtagctctacagtgtgacaatcgatactgtaggtggcacggtacagcttgttacaatagactttacaccttacggacctatatatgcatataagtgcctatgtgatctcatgatacatactgcaactttgtatgagcacttaaagactgatgacacgtatatatttatagtcatgaatctgaatggcacggtgtccgttacgaaaagtgcaaacacaaacgatgttctttataagttcactgttgatctaccatagaagcatgccatagggagacagtcagccattcgatgtgctcgttagagattggagaatcggcacatctatgcgagagaaactgcaaagctggccacccagttgtttattaatgctgcgaccagtcagtacaatgttgcgtgactgatactggctggttcagctgacttcaggactgaattgagtcaggctgacatgtttgatcc

SEQ ID NO: 46447 - DNA, 534 bp, Gossypium hirsutum
  Clone ID: LIB3582-006-P1-K1-E7
acccgcgttcgaaaactgcgcgcaacaaagcacgctttagtcacggcccttctattcagggcttgactcagttctcgatagcgtcactctcatctacactttctctcaagaatttccacccttaatatcaccaataatatgggtaacgtctagggatacgattgagtaaacgatagcggcaacgataccgtcgacgctctgatcgacgcgctctgtgaagtagactggtcatcaccgtcgcgacctttctcccgattcaccatccgttggaccatccctagatgattcagccaatggaacagccgtatttactgctatcgctactactatcgcactaagaatgtcatcatgatcggtgtgagactcgggatgagacccttggcgagaccagttgctattttagctgctattatgacggctcttatcattgattgccttaatgatagctttactaggactgttacagagactgtgacgagaactgttacgcatttctctgcacatatagcagctaacatgacgcctgcctttaca

SEQ ID NO: 46448 - DNA, 579 bp, Gossypium hirsutum
  Clone ID: LIB3582-006-P1-K1-E9
cccacgcgtccgcccacgcgtccgcttctgtagcatatctttgatatcttttgtttttccttttatttttgtttttctcctctgtctaatatacctaaaagttattctgtttgatttttatcactttttttatgctcaatttgtttttaagtaaatcaagacagaactttatgctatttgttatttatgcttccagattaagaacaatttgttgataagttatgatggttgagactttcatttgacatccttttaaagcggaagctttttagttttcagttattgttttataccctttgttaatcgtattaactctttcttttcatttatttgttgttaatgaaattaaaaagggttcttatttccattgcagattcagcttttaccataactctggtagaggatgggagatcatttggtgttgctggtggacccgctgctaactgaatccacccttgaagctgctaaaaaccaatcacaacaaggcattacgccagaaagcaaaagtgatataatcaaattttcggctcataggatggaagggaatgttggttcatctccaagtaaatcggtggagtg

SEQ ID NO: 46449 - DNA, 588 bp, Gossypium hirsutum
  Clone ID: LIB3582-006-P1-K1-F12
ggatatcggagttggaggacattatacgcagaaagagcacgacaatcactagattgaagaaggacatggtggttctagaacaaaaggtaagtcgttcttagcacagctttagctttaaatttaggaaataaatgcaagaaacaactaatctaaaccttgcatgatatccaggaacctactttatccatttgtttcttttacctatggcaattctttttttttctatcaagttctatagaaatcaactataatatctaattgggttaaatcactttttggggcttaaacttggcatttattctcaaattggggcctgaatttttttaatccaaattaggccctgaacttgacaattgttctcacattgaggtctgaacttttttttttttgtcaaagttaggcattgaacttcgcaattgttcccgcattgaggtctgaacttctttttgtccaagttaagccttgaacttggcaattgttccgacattgaggtctgaacttttttttggtctaagttagtcattgatattttcttgaaaaccctaaaattcaagttctaatgtaagaacagttgtcaagtgtatgccc

SEQ ID NO: 46450 - DNA, 421 bp, Gossypium hirsutum
  Clone ID: LIB3582-006-P1-K1-F3
cccacgcgtccgcccacacgttcgcccgcgcgtgcgatgtgactggctaaagccaggaaaacagggatcgcgctcaacagcagatctggcagcaagaccacctggaacactggcgtaactacatcaaggacgagagaggtggcgaatgcatcgacaatatattccaccggctcattgactaatgttcgcaacgcctatagaaaagggatacacattgcacgtgtcaacgtctgcaacatgcgcctatacaacagatgcgccaactgctgcaacagatcgtgcgcaaacagacgcaagatatcatgcacaagggtgccatgaatataatgtcgggatgcgcgacagaccctaggatgtgtgacacacaatctgttagcaagattaaaacaaaagttggtctcaagaacaaatgtaatgtatc

SEQ ID NO: 46451 - DNA, 545 bp, Gossypium hirsutum
  Clone ID: LIB3582-006-P1-K1-F4
gtttgttgatggttggaatgggcttagatttgactacgggaatttttatgcttcaaagacattttttgacccttcaaagaataggaggattttatggggttggaccaatgaatcggatactgctcaagatgatgttcagaaaggatgggctggtcttcaggcaattccaaggaaggtgtggcttgatcctagtgggaagcagttgctgcaatggcctattgaagaaatagagactcttagaggccaaaatgttcaattgagcaatcaagaactcaagtcgggagaacatattgaagtcaaagcaattactgctgctcaggctgatgttgacattaccttctccatacctaacttggacaaagctgaaccgtttgatcctagctggaccaatgctcaggatctctgtggccttaagggttcaactgttcaaggtggcgttggaccgtttgggctcctaacattagcttcagaaaagttagaagaatatacccctgtttttttcagggtatttacaggtctatacaagcattgttgtctcttatgct

SEQ ID NO: 46452 - DNA, 420 bp, Gossypium hirsutum
  Clone ID: LIB3582-006-P1-K1-F6
gtccttgatcgctagcgtcggagataaatccatcgcgcacacatgcgcgtacatgccacgtcaaggatgctccataggtgcacttaaatgcattttattgttacgggcatcacaacgtggtgattgtatataccagaacggaacccaactagttgcgtttgtacacacaatggtgatgctgcagatgctgacattgcgacgagcggaggacgaaccgcacctccctatgacacgtgaagactgaaaggcctatgatatactccctgtagctgcacattaagtccaaccggtatgaactgtatactcggctaaaccagtcaactagggagcgctaatgctagcactgctatatcgatctgctcataaccacgcacaacgttaggaatctttaccagctgggagctaacgccgtgactcata

SEQ ID NO: 46453 - DNA, 550 bp, Gossypium hirsutum
  Clone ID: LIB3582-006-P1-K1-F9
gtgttttcttcttctcattcttcattttaggttttgcgatgaaccggctactgccagattcattgaatcgagtctgtcagtgagggcgttgcagatggatcatgaagccagtcagtcgaaacaggatcgctcaagaacaaggtggactgcgtccctcgataggatatttgcagacttggtagtgaagcaaattcaattgggaaacaagccaaacaatgtttctgacaagaaaacgtggaatatcatacgtgatgaattcaacgagcaaacagatcttaacttcaataacaatcagttgagaaagcacctgtatgttctgagaatacgtatctataacctcaagtcagcttatgatcaaaatgactttgcatccatggaggactctagttgcattgggtttgacctgtgggaaggcattggggcacaacctaagcctgagccaatcaaaatcaacgacttgcccatttatgagccactatgcacaatatttactgattcatctgctgatgggaagtatgcccaatcaagtcaccttgagggactaggaaag

SEQ ID NO: 46454 - DNA, 351 bp, Gossypium hirsutum
  Clone ID: LIB3582-006-P1-K1-G4
agcaaacctgcctaaactcgctcatattactacaagcttttgtggtttcgtttgttcagtagcgctttgttatgttggttgatagttctaatttgtgagggtttgtgacatgaatacagcgttgtcagagatgttacaatgttcggacttgactgtgctcgagaggcaaatggctctcttgaaatggctagaggaacattttcagcaacatctacaacagctgagctatatcagtgagttaagttgtggggagtgttatagccaaactaactatgtacaaatctttcatggtgttttcatgaccggtgccactggtgactccttgttatctgacatggttatcgatcgtca

SEQ ID NO: 46455 - DNA, 302 bp, Gossypium hirsutum
  Clone ID: LIB3582-006-P1-K1-G8
gtaagcctacctcacgtagggcaacgaatactacgagcatcgctaaccgactaggctcgactgaaggaagcacccacccatctcacgagccctacaaaggtctgctgacactcatcagctactacatgagcatcacaccaattgcgcatcgccactataacagcaaaccaccacaccatcattctcccacgccaccgagacgcgccgaagataaacgacgatactaacctaagacgaacaagcccccggcggacacatgacaacatagagctatacaacgtaagccctggaggtgaaaccga

SEQ ID NO: 46456 - DNA, 437 bp, Gossypium hirsutum
  Clone ID: LIB3582-006-P1-K1-H2
accacgcgtccgaccacgcgttcgagaaggtctagctgcaagggtggtggatagacaacaagtacataggactatctccaacgaggagatgttacatctgttcgaatttggcgaggaagacaacttttatactttgatggaacttagtgaagagaacggaaaccagaatatggctagcgaagttagaaagtcactgaacccgaagattcctctctcccatggaagctgatcctctgacatagtaatggaaagtttacttagtaaacatgatccaacgtacggtcaatatgattatgtctattgatctcagctcttattagcaaggaataagtattatacatgagctgttgcagttatgtacattttcgtataataaaaaaaaaaaattataagcatctttatctgattctacttgtagagtgccatgttatacaaca

SEQ ID NO: 46457 - DNA, 555 bp, Gossypium hirsutum
  Clone ID: LIB3582-006-P1-K1-H5
cccacgcgtccgaaaacaacaaatgaggcaacacggtgcaaagaaaagggagagagcaatggcatactctgtttcaagatcatatggcaatggcagcccaaatttcagagctaacaagcagcagccgctatctcgtatgcatcaccaaaggctacatatggatagcccagattgggattggctagatcgttggatgtcaaccaaaccctgtgaaaccaggaccattgaagagcctgactccacagtttctcggaaaagtgaagataacattgtcagcttccactccacctcttccgagcaacgtggctctcttaaactgaaaacgaagaaccccaaaaccagtattcttacaaggcctgctaatcaaacttcgtgttcatcgtctgccccgagttccgaatcagtcaacgacaagagctcgacgtcgacttcatccgcatccgtgtctccgactacattgtccagcaacactatcgttgtggtcacattaaacgatagtaatcatactcaaaagccaagctacatgaatcctaccgagtctatcaaagctaaaca

SEQ ID NO: 46458 - DNA, 383 bp, Gossypium hirsutum
  Clone ID: LIB3582-006-P1-K1-H6
cagacgcgtgggttagcaacagatgaagccacagggtcgccgatacatgggagagagcaacgggcttctgtgacttaagatcatgtgggaggggaagtccacattggagagctgacaagcggggctggtatgaatcaacgcgttagcgaaaggtacataagggtagccttaagggagattgagctaatggcagcatgtccaccgatccatgtgcatccagctacaatggtagagcgcgactggacagcatgattacctagtgaagcatggcactgacagatgacgatctagctatgagtagactcatgtctctacaaagcggtgctcgaagaagcatgcaacctgtatacttacagggtctggtaatcaaactatgtgtgcat

SEQ ID NO: 46459 - DNA, 227 bp, Gossypium hirsutum
  unsure (1)..(227): unsure at all n locations
  Clone ID: LIB3582-006-P1-K1-H9
cccacgcgtccgaaggancgggcgcnnggncgcgagaggggcgcnccaaagcgaagacgnngagcnaggggcngagaaaganccnaacaccaccacngannacaggaccaanangnncaaggacgacagngngcacggacaanggaagcaccacgagcnnaaagngaaggacncaaagacncnnacaccnggngaaaagccngacacagganccggcaacaaaaacc

SEQ ID NO: 46460 - DNA, 527 bp, Gossypium hirsutum
  Clone ID: LIB3582-007-P1-K1-B10
cccacgcgtccgacttcccctcaaatccagctttttcattatatgtttttcttttaagtttgtggaatatgtttgtcttcagtgaatttgtaaaaaattcggttaattaatattttgtcttgcaattgactagttgaacgttttcattcttcagtgaatttgtaaaatatcggttaattaatatttcatcttttaagttggtgtctcttatttgagatagtgtatagatattttgaaagtgtaaaaagggttaaaaaccaaacaactcgtgagctgaatgaatatacattgtaaatgttcaaagattgagacaaagatagggtttggacttagtgagcatcatgtaagagcagacgacagaatcatcccaacaaacgacacatgacaatgttttttttaggatgaatgcatggattacaaccccccaaataaataaagcatgccaaaacaaagaaagggttgaaatttggtttgggttttgattccagaaaccctatgctaacatcatttgttttgtccattatctt

SEQ ID NO: 46461 - DNA, 584 bp, Gossypium hirsutum
  Clone ID: LIB3582-007-P1-K1-B9
cccacgcgtccgctttaaagaatgatctaaagttatcctgcgctattgtacctaaaaaatatattttccttatagtaattttgactatcctaaagcatgataatataaggtttaatcgaataaatttttattttggttttttggtcttgctttatttattggtttcttgttcaaatattgctttacgtgatggaatatcaggtgatactagtattgccccagatggaatatcgaatggatatgattcgtcattttcagctatgcataacttttttcaagtattattttatttagtttagaacttgaaaaatgaattatgattgtaatatttcacttcttttcattttgacttgtataatgattttaattatttttcaaagggacaatatttgaatggggagcatcatttatctgattttgtagaggtaaatagcctttagtattattattatttgttattggtaacattttattaaatatattattgaaattacttgtttaaatgtacttataggatgactggaatgaaggaaatgagaactttggcacttaaaattttccaagcatgagaaatgaggagaatt

SEQ ID NO: 46462 - DNA, 581 bp, Gossypium hirsutum
  Clone ID: LIB3582-007-P1-K1-C1
acacctacacggccgttttataatataaaaatcaatataatattaatatacaaaattattattaaaatattatatataatataacatgtatcttagctttaggctacccgcaagttggggctcctcacataattcaaattagattacgtcatagctactatttgagctaaaagtttatataaagtgtaaacgaggttgctgtatgattgaaatctaggtagtttatttttattttattttataagtttcttaaaaagttgttatatattttattttttaatattttattatatctttataaaacatttttaattttttaattttatttatggaatctaaaaatttaactgatagtatactaaatttttctctaaatttaattatttataaatttattttggattaaaattatttttatataagaagataaaaaaattcctaataataattaatttatgttttaaataaaataatttttttgtcaatagtatttaattgtctcatgatactatcttaattagtaatttaaatataatatagattaaataaaaaaattatttaacttttataatatatataaa

SEQ ID NO: 46463 - DNA, 575 bp, Gossypium hirsutum
  Clone ID: LIB3582-007-P1-K1-C3
accgaaccggaaccgcggtcaaaaccatcacatcgattgcactgaaacatttcaactgttgattcgaaaaaaaaaacactttcccagtaaaattcgtaaacacaacatttccggtgaaataaaaaaacctttcctcaaatctgaaattcaatgcaagaagaataagaaaagaatacgttaaatcctcaaattgggccaaccttttaaaggttgttcgtcggataaatttttttcaaaatatttacatatgggccaacttttataaaaatgtttaaagatttttcattacttcagtccaatttaagtaaaaataaagtgaattaatacatgatttataatatttgaattaattattacttaaaaataaaagaaaacaataaaaacataatttgagatttgatatacaatatttaagaacttatttgagtactttaaaaaaaaagtttgactcttatatgaccactttaaaaaagttttgacctttatttgaactcattaaaatgtatgactttcattttatcacttttttaaaggataatttgaaagggttgatctttatttgaacaattcttaaa

SEQ ID NO: 46464 - DNA, 578 bp, Gossypium hirsutum
  Clone ID: LIB3582-007-P1-K1-C8
cccacgcgtccgcacctcctttggatgattgctttctgagttacctggattttcctttactctttaagtatttgcatttggctggagaaaatgcaaattcgcgctgtcattgtcaagttaagcttcaactattgagtgagccgaatccaagttttttaaaattttgattcgagttgcttgggggcttaatcaaattttttttttttaattagttcccaaaattttaatttgaacttaagcttggatttggcataaaaatcgagtttgaagttgagcacttaaaattgaacctatttttactaattaacgagcttaattaaagctgatcgagcaagcacaagcagttttaattttatctcaaatgagttcgggctttaaaattacaactcgatcaagttcgaactgtgtttcaaatcttgaatttcaagtggagcttgagcttcttatagcttgaacttggctcaactctattacacccctaaatgtatgatcctccaaaaaatttagaaaaggttgagcatataccttattctaaactctcccttgggtccaagtaacataggttgctatcaatgcat

SEQ ID NO: 46465 - DNA, 598 bp, Gossypium hirsutum
  Clone ID: LIB3582-007-P1-K1-D2
gtccgcaccttctgtccaacaaaaagctcaattctcttccctttatttcatgcactaaaccatagatttttcatcctcattttgacccaaagatgaagaatgctcgaattcttacagtagaggttcctcgaggtaggagtaatgaaaaaatcaaggcagtatgggacaggaacttaacgatgatattctgtgatctttgcataaaggaaaaagatcataattgtaggcgaggaacttattttaaaaaggaagggtggtcgaggttggttgcgaattttaacaaagaaactggtaaagaatatgaaaagtcgcagctgaagaatcgatgggatctactgaaaaaagaatggaagctatggaaacagctcaaagggaatgatacctgtttgggttgggatcctaataagaacaatattgatacttcagaggcatggtgggaaaagaagttaaagctaatgcctgaggctacaaagttcaaaaatggtggtattgatccagaattagaaaacaaattagattggatgtttcagggtatcaatgatgacgtaactttcacacccacatttggtctaccgtcaattgatggaactgatgatga

SEQ ID NO: 46466 - DNA, 555 bp, Gossypium hirsutum
  Clone ID: LIB3582-007-P1-K1-E1
cttttccctgtcaaattcaaaagtattagtttaggaaattttggtaatctagggttaagagtaaaacagaaaaaagaaagatggagtcttctgtgggttcgaactcgcatgggaacctggacgaacagatatcgcagctgatgcagtgcaagcctttatcggagcaggaggttagggcattatgtgacaaggctaaggagatactgatggacgaaagcaatgttcagcctgtcaaaagccctgttacaatatgcggtgatattcatgggcagtttcatgatcttgcagagctttttcgaattggagggaaggtaatttttctgattgaagctgctttttttgtgtttcaaatgtgatgccaactgttgtgaactatttgcaatgaatgtagtctttgttcttatttgttcttcgactatcatttataaatcaatagcacaattcacagctatcaaccacagccaatgatatttcaactctatagattttttttttcattaattttgtggatgttggtagttggaacttggaacactgatgcctgtatgtaacata

SEQ ID NO: 46467 - DNA, 521 bp, Gossypium hirsutum
  Clone ID: LIB3582-007-P1-K1-E11
cccatccgtttctgccgatagcacttcccaagaaagataagaaatcaattgctatctattttgaacttactttcttcatcgtctccatcgtccctccgaggcattctcttagtctctccaatcttctcccctcagtcccccataatgttgacccactgcatgcccatcgagatgccaagatttaaagcttcaaggcatgcgaatgcctctgctgcaaatggtgtcgacacattgttgtgaagagtcgatttggataccagtagttctcccctcgagctcggagccaccagacccgacgctgactgaaaacttgtattgtcgaatgctgcatcgaactggatctataatctcggtatgtcttcttgatccctctatgtcctattagtgtatgatgagcttgtactgttatgtcttcttgattccactggttcctgttaacgtttggtggagcttttactgcttgcacaccttcatattcttcaatttgtttcttcactctttttgcgagatctaatcctgtt

SEQ ID NO: 46468 - DNA, 593 bp, Gossypium hirsutum
  Clone ID: LIB3582-007-P1-K1-E3
cgcgtccgattcttctatatatgacagggcatgggggagatgagtttttaaagtttcaagactcggaggaactacagagtcatgatttagctgatgctgtgaaacagatgaaagaaaagcacagatttaaggaattgctgataatggtggacacttgtcaagcagccactctcttcaatcagcttcagtcccctggcgttttggctattggaagtagcatgaagggagagaactcgtattcacatcacttggattctgatgttggtgtatcagttgtggaccgtttcacctattatacccttgctttttttgagaggctaaatatatatgacaatgcctcattgagcagtctgttcagttcttacaatccaagtttgttgatgtctaccgcatattaccgcaaagatctatacaagcgacgtttggaggaagtacctgttacaaacttctttggctcagtcatggaaacgatacatactgatgcagcctacaaagccctttcaaggagaaattctggcaggtttgaagacgaaatgtctttggatcagtcagtgcaccacatcaagagaagaatgttgattaaagtaaatgat

SEQ ID NO: 46469 - DNA, 576 bp, Gossypium hirsutum
  Clone ID: LIB3582-007-P1-K1-E9
atttctctttggaaaatttatgttcactggaaactatttgcaaatttgtcccctgttcctgcttgccacaaacaagcacttgagccaactactttggctctcttttttgatctttgtaaccattatttgctcagcatctcatgaatcaaaattggttgtgcagtcagtttcattgccgttcatctcaatggacccgcttcttttttcacttacagtcggatgataatattttgattactaatgatattcttttgtcatgtctaatctggagccagctgcattagcaacaatatagggtaagttctaatatcaagctcaggcctgcctagggagggtatgacctagttggtaaggcaatgggaaattatgttagtcagacccggtataagtgctagatacatgtatgttttttcatatatttggagggtcatatccctacacccatattgtgatgttaagctcaagtagttaaaagaaaaagagtcaatagtaattgtggaactaatgcatttcaatccttatttatttttagttaagaaagtaaaagcaaaaatcccagcagtgttgtttgatgtg

SEQ ID NO: 46470 - DNA, 570 bp, Gossypium hirsutum
  unsure (1)..(570): unsure at all n locations
  Clone ID: LIB3582-007-P1-K1-F8
cccacgcgtccgcccacgcgtccgattttatcatctattcattagtggaaatacatatgcttggttactaattgatgtcaagaaagacatgcggtaaagagcctaagactgcagtaatatgagatagtagcctatgtctacggcttaaggctttgacgtccataaagcttgcgatacatcatagtactgcacaaccctaactatatgaatgaacgtcttgtaagttagttaacaatggcaagtatattaagtggacctaattgttgtttggtctggtatgaatacacgcacatgtgcataatgcatgttcaagcgacgcacatcacctcttgctcggtagtagtactcgataaatgctcaaaattggctttctgttgtgaaaacctcaaacttgaaattttgactcagtaatattgagcgagaatcccaataagttataacaaagggcgatcggcttagagatcgtacttatgcccttaattgcactcttgtcaaatggtagcctaagttttagtacaacatcttctaaagtgatgttgcactctccacattgcanatgaaatgtgcgag

SEQ ID NO: 46471 - DNA, 589 bp, Gossypium hirsutum
  Clone ID: LIB3582-007-P1-K1-F9
tggaaaagcttggtgaagatgctccaataaatgaattagtggacttcattaccgctgctcaaatagcagaaaaacttgaggaatcagtagattcacttagctgtgaggaagaaaacgatcagaatgctactaatgaaacactgtttgggactatggagaagacactttccttgcttgagatgggtttctcagagaacgaggtttcaatagcaattgagaagttcggttccgatgttccaatcacagagcttgcagatgcaatgttcactggtcatctttctcgtagctatattgaaagtaaaaagttaaaatcagcagcttcaggcagtgggttgatacataatgtgaatgagagagaagatattgaaacagaggattgcagtacaactcctgttcctcagtcaggaaatatcaacctcggggaatcttcttccaaagggaaacgaccaaaagaagagagtcttgatggcatccctatttctaatcctcagatgaagcaatctcttaatgagaaaaaacgcgaagggaaaaggccaaagcaagaccatgtaggtaatgcaagttctttcattgatccaccatggcttga

SEQ ID NO: 46472 - DNA, 591 bp, Gossypium hirsutum
  Clone ID: LIB3582-007-P1-K1-G9
cgcaaaaatcaacaccaatttgttcacttcctgttcttcgtcttcacggcaatactttccctctcccaagatgttttccgatatgtcagatttacgggagacctggttatcgccgacaactcttttcctcttcctcgacatcatggtcggtacgatcttctttatctcccgtataactcctcacagaacaccgtacgtcgcggacgacggcaactcatcatcatcgtcctcgccgtcactcgaccgatctctgtcgttcttcggccgcgtcacgtctttcaacttctcgacgtacagttttcctatttcgagccaagacgtcaaccatcatttcctccaaaccgatgacgggtcagcagcccaccaggtggagcgagccccgtcgattctcgaacgagtcaagtccaatttctacaaatattctcctcaaagtccagaaacggattgtattgaaccggctcaacaatcactaatcagccgagcaccgtcgctcttagagcgagtcaagtcgttttataaaccggacaccgttaaaccaaacgaaaccgaacccactgtaactgattcgaacggttccgaaacgggtttaat

SEQ ID NO: 46473 - DNA, 619 bp, Gossypium hirsutum
  unsure (1)..(619): unsure at all n locations
  Clone ID: LIB3582-007-P1-K1-H1
cgtccgctcaatgagcgactgacggtgataatggtggtgctttgtccagttttgtgctgtgtttgttttgtatcgcacccatattagatgtccatgattcatagctaatgattatttaaacaataaggatttcttagaaaataactaattaaaattggtctagcttctgttaatttagcatcactgcttgtcggaaatatgttttgaagctcatggaatgattaataatgaaacaatgacttttattgatgcagtgcaattttagcttgtaaaactttatattgctttattaattagtaaggaaacaatgacttttattgatgctgttcaatttgagcaaaacatagtgtatttattcattcactttggcatacaggatgagcaaaatcttgttatgtacttattgttttaacttgggactgtaatatttttgttgacatttctactcggttgatacatcatgtatctatcttcagccatattagttcagctgtcactttgttctagttaatttatgtcagttctgcttgatccttccattatagcctagattntgtctctctctcttgaatgtagcttttgtgtgagcttgacatcattagtgaaggccttaaatgga

SEQ ID NO: 46474 - DNA, 565 bp, Gossypium hirsutum
  unsure (1)..(565): unsure at all n locations
  Clone ID: LIB3582-007-P1-K1-H11
attctctgattgttttcctggaaaatcatgggttttcacaaacccaaatcgcaaatctcatcaaaagacagcctactttgcttctttctgatactgagaaaacccttttgcccaaattggagtttctttactctataggtttttcaaggcctgagcttgccaaactcttgagtagctaccctcttctactgaaatctagtttaaagaaacaaattatcccttcatttaatttactcaggaacttgtttcaatctcatgataagactgtcaaggctataaaacgatatactggtattcttgtctatgattccgagtcgtatttgtgtccgaatatgaataaaagaggaattggagtccccgaatcaaatatccttatgctgcttaactgtcagcctagagcgcttttgtttaatccggttcggcttaaggagattgtggaggaaatcaaaagaatggggattgattcttcgacgaagaagcttctcattgcggttcgtgctttgagatcaatgaccaaatccacattagagaagaagatngatgtttataggcgatggggttggtc

SEQ ID NO: 46475 - DNA, 573 bp, Gossypium hirsutum
  unsure (1)..(573): unsure at all n locations
  Clone ID: LIB3582-007-P1-K1-H9
ctgaaacagataacaaaatccaacaagttgaagggcaatgttgagggttcatctacacgaaatagtgttgcaatgaaagcgaagctggcttggtctattttacattctcttcttcattcggatagaatcctttaccgccaaaatggatttatctggttaggagatctgcttattgctgaaataagtgactcgaggaatgggagtatatggtctaatgtcaggagcttgcagaataaaattgcttatgcgggtgttcatgattcctctgatccttctgatattcctttgtctatctggctgatgtgtggtcttctaaagtcgaagaacaattctatcaggtggggcttcctagttgttctagagaggcttctcatgcgatgcaagtttttgttagatgagagtgaaatgcaacagccaagcaacagtgatgttagccctgacaatagggatactcgactggagaaagcaattacagtgatagacatcatgagcagtgctttgtccttggtggctcaaataaatgaaacagaccgtataaatattntaaagatgtgtgatattctattctctcaa

SEQ ID NO: 46476 - DNA, 415 bp, Gossypium hirsutum
  Clone ID: LIB3582-009-P1-K1-A1
cggacgcgtggggcctgaagaaaatgccttctggactttggtgggcattattgatgactattttgacggttattactcagaggaaatgattgcgtctcaggttgaccaacttgtttttgaggagttgatgcgcgaaagatttcccaaactggtcaatcacctagattatctgggagtgcaagtggcatgggttactggaccatggttcctttccatttttatgaacatgcttccatgggaaagtgtgcttcgagtttgggatgtgctcctgtatgaaggaaatcgtgtcatgctttttaggactgcacttgctttaatggagttatatggccctgcactagttacaagcaaggatgcgggagatgcagttactttactacagtcattggcttgttcaacattcgacagcagtcaa

SEQ ID NO: 46477 - DNA, 276 bp, Gossypium hirsutum
  unsure (1)..(276): unsure at all n locations
  Clone ID: LIB3582-009-P1-K1-A11
gattataggacctcgatggaattaagagttaatgttagaagtggacatgctaaacgtgttacatcatcgaaagacattgaaagctctgggggactataatagacgcaactattcacaacacctactgggttatcagcgtgcaccacatgaaagctcagaatcatggttccatggtatgctgaccgtctaaatacgagcacctgcgcagctctatagtagatgaatcctgtcagctgcagtcaattgtgatactttatgctgactntactctgtttt

SEQ ID NO: 46478 - DNA, 217 bp, Gossypium hirsutum
  unsure (1)..(217): unsure at all n locations
  Clone ID: LIB3582-009-P1-K1-B12
ccacgcgtccgcttagtctcatccatggaactagtttattgttgaaaccatgtcaagttatcaacataactgcgcgccagagatgtattcataggcaattcttacattacatatcncatcatgtttgaacctacgtgcctatataaatttgatgttttacaatcatgacattattttagaagtgacaaacccccaatcaataattcatttttttttt

SEQ ID NO: 46479 - DNA, 237 bp, Gossypium hirsutum
  Clone ID: LIB3582-009-P1-K1-B3
gccacgcgtccgcccacgcgtccgggataagtcataacattttttactgccatatgcacatgcagtgttacttcaggagatgaagtttgagaataactgtttgtaccttttcttccgttttgttggtagatcacaagcctcgagttctcaattcatgggaaaagaatttgaagtctgtagtggcagctgttgtttctgttctgtgcctgattctggtaatcttaggcattctatggc

SEQ ID NO: 46480 - DNA, 262 bp, Gossypium hirsutum
  unsure (1)..(262): unsure at all n locations
  Clone ID: LIB3582-009-P1-K1-B6
cccacgcgtccggttagttgttcgactattgaaatttggattgtttttattattgggtttggtgtaatgaaacatttggacttttgacttgttttggtttcatttatttttgttgttttggtttatgacggcccgggcacattaggctttctacaatctataaatggccagttttttagatgattaatatatagagaggtaattgagtttgacaacttaaatncttaccttctggacaggaaaatcttgagtcatatttaca

SEQ ID NO: 46481 - DNA, 307 bp, Gossypium hirsutum
  Clone ID: LIB3582-009-P1-K1-B7
ggcatttaaacctcctgcaaatacagctgtgcctctcaatggttctcagaaaagaactgctcctggtccagttgttggttggcctccaattcgttctataaggaaaaatcttgccaacagcagttcttcaaaactagcttctgaatcaccaactcacaaggctgctaatgaaaaaccagcagctgaacctaatggcaaaggcctgtttgtgaaaatcaacatggatggagttcccatcggtaggaaagtggatctcaaagcctatgatagctacgaaaaattgtcaactgctgtcgatgaactcttc

SEQ ID NO: 46482 - DNA, 201 bp, Gossypium hirsutum
  Clone ID: LIB3582-009-P1-K1-C12
gatctatactcactctctccgaccatgacgtttatctccgcaacataccatgaggtattaaagcctcgcgccgtacacgtagctgcccgtgaggttttgaaaaacaaactcaatataccgtctctgatcaagccttctaaaacggtcaacatgacactgatttctgcttcatgacgaaccgagaatgaatgaacatggaat

SEQ ID NO: 46483 - DNA, 156 bp, Gossypium hirsutum
  Clone ID: LIB3582-009-P1-K1-C4
atggcgactaacccttctttgctctctctttaccttgtttctgtctcaaatggctgcctagctcgtcagacctctgcttcacagcagctgctaaatgagtgtcatatcaataggctccgcgcctatgcaccacataccggtattcgctccgaagcc

SEQ ID NO: 46484 - DNA, 382 bp, Gossypium hirsutum
  Clone ID: LIB3582-009-P1-K1-C5
atcagcttgtacaggttacgtctagctctgtaaggcttgtgagttcaacatctagagagctacgcaatgaatggcatgctccatctgggtattcggtcaatgttgccactgccaatgctacccaggttttactagcaacaggagggggccatttggtttatttggaaattggtgatggcacattaacagaagtcaaacatgctcagttggagtatgaaatctcatgtcttgacattaatccaattggtgagaactctaactacagtcatctggctgctgttggaatgtggacggatataagtgtgaggatattttcgctcccttgacttgatctcatcacaaaagagcaattgggaggagagattatcctaaatctgtcttc

SEQ ID NO: 46485 - DNA, 320 bp, Gossypium hirsutum
  Clone ID: LIB3582-009-P1-K1-C7
gaagaggtcaagactgtggaggctataaggatggaacatgagaagcgggtggcccaattgaggaagctggagttgaagagagctgactatgtcaagactgaaaagactaagaaagaggctgaaaaattagaatcccaaatgatggtttcttcacaggccattgagaccatatcagcggaaatcatcaaactgagagagttagagctttatcctcaactcctggaccttgtaaacgggttgatgtggatgtggagaaacatgtacgaaattcaccaagttcacacacacatagttcaacagcttaagtaccttaactttat

SEQ ID NO: 46486 - DNA, 407 bp, Gossypium hirsutum
  unsure (1)..(407): unsure at all n locations
  Clone ID: LIB3582-009-P1-K1-D1
ggaagtattgaaggcagcacaagagggtacaaagcataataggggtgcccttattgtagggtacaatgcccttcataaaggacatggttggaacaatgttgatgaattgaagacccattttttgcccatcggagatggtttgctggtgatcagaaaagctccgacgaggaaaggtgccggtgatgggtttaatagtagaaaaagaagccggtgggttgttaaaatagataaatggaccggtgaggaacatgtttttaggatcacttcaccatgtttttagtttctaataatattaaaagttcatcaagttgtacataaattatataatatattgaccaacttgtaatgtaattacccccatctggctctgngttttttttttttttggaacaagttggatggtatgt

SEQ ID NO: 46487 - DNA, 403 bp, Gossypium hirsutum
  Clone ID: LIB3582-009-P1-K1-D11
tttacgaacatttccacaaattttcctcccttcttttttccaccatatcaccgcaaaaacctgctaaaaacatggagttccaaacccaaaatggccaaactttagttccccaccatgagccccaagttttccctgaatgctatgaaagcaccagctccacaccctatgccagtgctccttcaagccctggacgggcgcctggacctggaccagggttcatcaatagtgggttcttttacagtgcaccagctagccccatgcacttcgcaatgacatcatcagttgttgcttcttcaagggtgtcatcatcaacacaaccctcttcttctgattttcgagtctctgcagggtcggacctacagggtcggtcaaacaggatccatgagcctagctgatgagcttt

SEQ ID NO: 46488 - DNA, 435 bp, Gossypium hirsutum
  Clone ID: LIB3582-009-P1-K1-E1
cggacgcgtgggtcctcagctacctttctttccatagcttcaaattttaggagttttcctattttggcttagcaaattgttgaagaaagaaaacaaaaatgggttcagattcaaagatacacacttttgaagaggttgcaaagcacaacaagaacgaagattgctggctaattatttcagggaaggtgtatgatgtaacaccatttatgtctgatcatcccggaggcggtgaagtattgctgtcggcaactgggaaggatggcacaaatgattttgaagatatagggcacagtgaggatgcaagaaaaatgatggaaaagtactacattggggagattgatgaagaaactggtccgcaaaagcgcacctacattcccccacaccaaatgtccaacgatactggctctgaattcttcattaagctcctacaatttc

SEQ ID NO: 46489 - DNA, 412 bp, Gossypium hirsutum
  unsure (1)..(412): unsure at all n locations
  Clone ID: LIB3582-009-P1-K1-E11
gggcaactgaactctcgtcgtagaagtagattataaatttatataattcataagtggctgcggtggccaccgcttcgtatgagtttgaaattctgccaaacccaaactaaagccgtatttatttcttcttttaaactccgacgtactgtttcttatgcgatttttgtttctctgcagttttttcaatctcccaaaacatgccacaagacctccctgggttctactatgatgcggagaagaacaggtacttccccaataaacctcggatacctggctcttcttccttctncaatgcttcgccatcccaaaacaaccctctttctagctccctccaggcgaccaagttatgtccaaaaaccagggttcccgcatctaagctgcttcatcttagagagttgaacggcaatgcttt

SEQ ID NO: 46490 - DNA, 521 bp, Gossypium hirsutum
  Clone ID: LIB3582-009-P1-K1-E2
cccacgcgtccggcagtttaccatatttattggtttagtgttaaataaactttataaggatgtgaaagtccttaatcctgttttgccacatttttttttgagttatttggccatactactgctgtaaaagcttttagtctttgacttttagaactggtaaacctgtcttttatgttcatcatctcttgataatatcagatttagatcatcctagcagtgtcattgaacaccgcaaaaatccctaagcctgttatgccacattattcatgtgctattaggtcatcctaccagtgtcattgaacacttgaaaagcttttagtcttcgacttttagtttagaactggtagacctaccttttatattcattatctcatgataatatcatatttagatcatcctaccagtgacattgaacgcttaaaatccctgatcttggtatgccacattattcacgcgctattaggtcatcctaccagtgtcattgagcactgtaaaagcttttaacctttgacttttaaaaa

SEQ ID NO: 46491 - DNA, 270 bp, Gossypium hirsutum
  Clone ID: LIB3582-009-P1-K1-F11
cctcttttcagcaacaatgggtggctctcacagtcgcgaggagctaatttccgactccgatgaagaagaatacgaagaagaagaagaaaactaccaagattccaaagacgatacgccggagagatcttcttccggtcgaagacccaaaacgccgtcgtctctcgacgaagtagcggctaaattggaagctttaaaactcaaatacccaacatccaacaccccaaacccatctctcaaaaatgccgtgaagctttaccttcacatcggggg

SEQ ID NO: 46492 - DNA, 330 bp, Gossypium hirsutum
  unsure (1)..(330): unsure at all n locations
  Clone ID: LIB3582-009-P1-K1-F2
cccacgcgtccgaaggttttgataaaccactgttgtaatgttggccagttggataaggctcatgaacttttggaagagatgacacagacacactggcagaggcatatctcaggctaccgcaagatcatagaaggtttcaacaaagacttcataatgtctcttgggctcttagatgaggttcgcaaaagtgaatctctgccagttattcctctttatagaatgcttagtaatagttttatgaaggctgngagactagatgcggctttacagcttcatcaggagctagcatcattttcacaagtttctacagcatactatagtacgtgtaat

SEQ ID NO: 46493 - DNA, 317 bp, Gossypium hirsutum
  Clone ID: LIB3582-009-P1-K1-F5
cccacgcgtccgcggacgcgtggggtccagccgttccacttcaagtggaaaccacaaatgactcagggtcaatgacgaggcttgtcactcctcggatgggcttggatgctaatcttgctggtgaaaatgatggagttgaagctgatgatgtttcaaaccataacgttcattctcgtcatgtgtttcggatgagcagtacatctccatcttcagaatctcctcttagaaggcctacctacattcaacataatgtggtttcccacccttctcgaacaagcatgggggtcacaggtagtccttcacgttttgctcctact

SEQ ID NO: 46494 - DNA, 330 bp, Gossypium hirsutum
  Clone ID: LIB3582-009-P1-K1-G1
aaaacaaagtaaaagcaaaaataaacttgaaaacctaaatcctctcttcaatcatagtctcatttcctcttctttgcattctgtaagtgttggtggagtaaactgattttgcattttctttgctgcaaagatcttcaattgaagctttttaccagtaatctccttctactgagttttttcagagatcgtttaagtataggcgtatttgtgttgtatccccagattcagtaaaaaatgtccccttcaatcaattttatcttcttctctggtcattggcgatgatgtactcaatctcctgtggcaccttttctaataatagtataagttttc

SEQ ID NO: 46495 - DNA, 154 bp, Gossypium hirsutum
  Clone ID: LIB3582-009-P1-K1-G2
ctgctacagaagctactgatgagcgactgaaaatggtcacattcgttgagcatattgaacctggtgatcatacacgccatactggagataggtatgtcactcgcgtcgcttatacagctgatcatctagaacatgctactagactagctgttgg

SEQ ID NO: 46496 - DNA, 321 bp, Gossypium hirsutum
  unsure (1)..(321): unsure at all n locations
  Clone ID: LIB3582-009-P1-K1-H11
ggaactctgattgcattggctgccctctcgaaggatcagttattgaacatgttgagatcagctgctttactttgcccaattgcttatatgggtcagatgacttctccacttgcaaaaaatgctgctgacaacttcattgctgaggcagtctactggttaggcctcagtgaatttgatccacgaggggatgcagtagttaaccttctcaaagacatctgcagcaaaccaggcattgactgcactaagttactgacaagttntacaggtaaaaactgttgcttgaactctttcattagtaacatatttctagatcatgaaccc

SEQ ID NO: 46497 - DNA, 225 bp, Gossypium hirsutum
  Clone ID: LIB3584-016-P1-K1-A1
aaaaaatgctggtattatacttttttttttggctatagttttgtttttggggtctattgttttaggtggttttggttggtcctcctttagtcaccctttactagaagttaaaaacacaaaactctatcaaattgtcttcctcaatggatttggttggtgctggtgttattattcattatagtatatacacatataatatgattctgatttttacctggttagtgt

SEQ ID NO: 46498 - DNA, 494 bp, Gossypium hirsutum
  Clone ID: LIB3584-016-P1-K1-A5
ggaagtaatgagatcttgggtattgaaagaagcgttgaggaatgggatgcgaaaagggtattggtaggtgcgggggggggtgcactgttttacccgaccttgttttacaatgttgttaggaacaagattcagcctgagttccggtggtgggatagagttgatgagtttatactgttaggtgctgttccatttcctactgatgttccaaggctaaaggagaatggtgttcgtggagtaatcacactaaacgagccttacgaaactctggttcctacatctctttatcataattatggcattaaccatttggtgatccctacaagagactactactttgcaccatctttgacatcaatatgccaagcaattgatttcattcatagaaatgtgtcacttgggcaagctacatatgtccactgtaaaactggtcgttggccgaacacaaccattgtattgtgttacctggtatactataaggcagatgacacctgttt

SEQ ID NO: 46499 - DNA, 597 bp, Gossypium hirsutum
  Clone ID: LIB3584-016-P1-K1-D3
actggataggcccctatcaaatcactttcaaatgatcatagatgtcaatctgacttgagattaatcatattaaatatgtgccaagagttttaggtgtgtatcatcaatttcatggagggctctttctgtggatattttttgttttctgcaatccttaaaatgttggtttttctttatgtgcttgttgttgacatcctttgttggttgaatagaagtgtttgcattgcttcctaaccataacatgaaacatttgtaaaatttggcgaaggtcctgctaggctggcatttttatcacctgcattttcccgtggttttatgatctgattcttctaactaatttctttgcttgcagttcttatcaatgagactagcaacagtgaacccaagaattgatttcaacctcgatagtttattcacaccagaagtaagtatcaggcacctttgttttgaatgtctaatataaagttggaaattgaaagccttctggtgattcttcccgctcacataacaagtagctctgccaaagttttatactaagctactgatatgttccttccgaggacttatatggcaaaagtttcatgaaaaaatcttttt

SEQ ID NO: 46500 - DNA, 509 bp, Gossypium hirsutum
  Clone ID: LIB3584-016-P1-K1-D4
cgaccacgcgtccgggagttggcaaaccaaggcaatcagttgccttctcacttgctcctacatcttaagaattttaagagatcagaatcttgtgttagagtcataaagtgcaatgttgaagaggttgagggaatagaaccacaagctgttaagatatgttcagtagcgcgtaagatgtggagaatgtatcaagctgacgtaaacagcattatgttaaaggttccttcaagccagagatatgtatatttttccgggagtgagaatgataggaaatcagtacatgccctcaagaaatccatcatcaagtcaagagagctctcttcatcaagttctgcacttgaagaaactaaatttgttagacacagtgtaaactttatgaagatctggagcagcgagagagaattgaaaggtcgatgttcgttatgcagaaaaaaggcatcagatgatggtggattgtgtaacatttggaggcccatttgtccagacgggtatgtctctgttggtgacat

SEQ ID NO: 46501 - DNA, 545 bp, Gossypium hirsutum
  Clone ID: LIB3584-016-P1-K1-D8
cccacgcgtccgcccacgcgtccgcccacgcgtccgcccacgcgtccgcccacgcgtccggaatttatgagtctttttcattttctcccctttggttccatggaatttggagattaaaacttggaatcttttttaaaaaaattgggtcttttttttggcagggattttctttttttcttgtttgggaaatcaaatgggagtgaaggtgttgttgcactgatgtcactgttttgggttatgattcctcaactagctgaaattcaagaacaaatggcttcctccaagaaagtgattatgagggaagagtgggaaaagagattgaatcatattagaataaggaaagaagacatgaataaattggtgatgaactttcttgttactgagggatatgccgaagcttgggcaaaattccggatggaaacgggaaccgaacctgatatggatgttgcaatgatcatggatcgtatggctgttaaagaggcagtacaatgtggaaacgttgaggatgcgattgagaaagttaatgatctaaattccgagatatt

SEQ ID NO: 46502 - DNA, 169 bp, Gossypium hirsutum
  Clone ID: LIB3584-016-P1-K1-E7
ggcggcaacaaagcctgttgaagtaggtcttttaccctatctttattctgatatggagagtgcggggaagttcctccaattcttttctggctaatacttggacatgcgtatttatgacaatttttggtgtaactttgtggttcctgtttattttatgatcattatgaac

SEQ ID NO: 46503 - DNA, 363 bp, Gossypium hirsutum
  Clone ID: LIB3584-016-P1-K1-F11
ggaagttaaggccagagaaggagtaaagattgagcatgagaaaaagttatcggcattgcaaagtcaagagtacaagggagaggatgaaaccaagatagacaagacgaaagcatcgatcacaaggttgcagtcgctaattatcgtcacatctcaggctgtcactaccacctctactgccattgtggggcttagagacagtgatcttgttcctcagcttgttcaaatttgtcgtgccttcaggtctatgtgggcgtcaatgcatcaataccatgaagttcagaacaatattgtacatcaagtaccgggccttataaacagatcagggaagggtggttcaacatttgaactgcacttgccagcaac

SEQ ID NO: 46504 - DNA, 430 bp, Gossypium hirsutum
  Clone ID: LIB3584-016-P1-K1-F12
cccacgcgtccgcaattgcccagttggtgttgccagtcagcgagaagaacttcgtgcaagatttgctggcgtgcctggtgaccttgtcaatttctttttatatgttgcagaggaggtgcgtggcatgttagcacaactgggttatgaaaagttggatgatataattggacgaacagatttgctaaaaccacgagatatctcactagtgaaaacgcagcatcttgatctgaattatatcttgtcgaatgttggattaccaaaatggagcagtactgccatcaggactcaagaagttcactcaaatggttctgttctggatgctattttactttctgatcctgaggtatctcatgcaattgaaaatgagaaagaagtacataagactttaaagatatacaatgtggaccgagcctgttgtggtcgtatagca

SEQ ID NO: 46505 - DNA, 233 bp, Gossypium hirsutum
  Clone ID: LIB3584-016-P1-K1-G4
gccacgcgatggacaacgcgttcgaaaacctagacttatctcaagtgctgcaatcagatggctctagaatgctcgtaggcttccgaacaaacacggatgatcattctcactagcaagagaccatggtacactgactcggtgactcaaccaagcgtgcgcggagcaagcgaccacactctggcaataaccatgccagcaccgaggaagaagaccttggtctatgccacgagatg

SEQ ID NO: 46506 - DNA, 198 bp, Gossypium hirsutum
  Clone ID: LIB3584-016-P1-K1-H11
ataaaaaaatgtgctttttaattttatattaggaaagaaaagtgcgtgggagaaattgagattgatattaaaagaacaaaaaaaaggccaaatggggccttcaatgaatgaatgttgtttgtattaagtttgctactaagtttttcacctataagtttgctactcttaatggcaatggcaagggctgttttttttttt

SEQ ID NO: 46507 - DNA, 454 bp, Gossypium hirsutum
  Clone ID: LIB3584-020-P1-K1-A5
ggccaaagtttgaagatcaatggagtaaagggaattggtccggcgggtgtgaacggaggactgaactggaatgccaaaggggtaaaccggatgggtttaaacgaatgaagtgtatgaagttacccgatttttcgaacttggtacctgtaaagagcagagatgattgtagacaaagttgcttaggaaattgttcatgtactgcatatgcatatgtttatggtattaaatgtatgatatggattggagatttagttgatgttcaacatattgatcaaagtggaaacctagagttcttttaccgcctcaatcattccgatttagatgacaagaagaagatatctaatggtgtgatagttataatttctgtggtgggagcgtgtttcttggtggcatttctatggctattatggagatacaagaagaaacttaaagtttcattaatggtgtgttgcaa

SEQ ID NO: 46508 - DNA, 385 bp, Gossypium hirsutum
  Clone ID: LIB3584-020-P1-K1-A7
gtggcgaatcccccgttgctgaattcccggacattgtcgagggagctattgtcttctctattcgatcgattgtctcttcttatttccgagccagactttagggagaggattgtggacgctgtgaatgacaggcatgcaccggttgctgttaccacgcgtgttcaggaagagatactcttggagattggtgttgagcctagctctcgtcttgcatgcctggggaatgtcattatgacttgcgagaatgatcatgattggctgattcgttattctagatttgttgccaatgaggcagttgcctgtgatgcagctgggcttggacctgagggctttgctgtacagctgcatggctatcttcagcttcctgagcagctgctggagatgc

SEQ ID NO: 46509 - DNA, 466 bp, Gossypium hirsutum
  Clone ID: LIB3584-020-P1-K1-B1
gaagattggaagaggaggaaaatcggaaccgaaataatggtgttcggtatgtaggaaaagatatggatgatgttgatgatgatgacaatgacgagcttgatgatgaggaagatggggatgaggatgattacgatgaaaacggtgataaacagaaaggttatgatggaaagaacgatgatgttgacatggagaggcaccccaagaagaggaaattgaagagtttgttgtcgagttatgagtttgctcctcgagttccagcaccagcagtttcagctccttcagtgccaaagccctcattcggtgggagaaattctcttacggattggactgagcgtgagacatttgttttgctagatgcatggggtgacctttttcttcgacgtgggagaaagagtcttcggtctgaggaatggcaagaagttgcagagaaggtttcggaggtttcaaagattgaaaggaccgacac

SEQ ID NO: 46510 - DNA, 366 bp, Gossypium hirsutum
  Clone ID: LIB3584-020-P1-K1-B10
cggacgcgtgggtgggattcaaaaaatatcaggctcccgaatctgctcagaagagctcaacttgatgtctgaaagcgactttaccgttcaaaggccagtagtctgaatctggtgcttttcatcaaaggtgttggaagttcctttttatacatgctgtcatcggtcagcgaactagtatgttataaatcaaggaagtttgtttctttgtggctggaaaactattatgtttctggaaaactattatgtttctttgtggctggaaaactattatgtttctttgtggctgaaaaattattatgtttctttgtggctggaaaactatgtttcttttgtttttagtctatcttcagagtgactgttgcaatt

SEQ ID NO: 46511 - DNA, 357 bp, Gossypium hirsutum
  unsure (1)..(357): unsure at all n locations
  Clone ID: LIB3584-020-P1-K1-B12
cccacgcgtccgnttcagcttgccgtnnggnacgntgntgtgctnngcnntttncttggngatgtcncggtggccntcggtggtgtgntgcccnncnntcccnntctcctccttcctttgnnggctggnccttcctcnnnggcntctggnggtgntgnngnttngnttttgtcncccgtttngcctcntnnnnccctnnggggttcccctnntttttctccctctgtttccgtgnttcttngnttggggccntcntgggttttngctttgcttgttgtttcncttngttctttttttgttncgtttgtcgttttttgctggtgctttgttggtnggtngcttttggggtttttggtt

SEQ ID NO: 46512 - DNA, 431 bp, Gossypium hirsutum
  Clone ID: LIB3584-020-P1-K1-B8
ggtgccatacaggatgacttatacaggagtctacatcgggattcctctcctgtggcggtgctcctgtacataattcttcctaacctcggttaaggtttactgtcctcttttgcttcctttctaattgcctcttctttttgcacaacctattgaaatagtggaatactatcaagtataatttaagctgacatggatttcatgatcatatactctaaagtgttttgatgaaatttctcagctgtctgcagcagtgcttctgctagatgcattgaggatcctgcttttggatgagtgaatcctgctgtttacttgtaacatcgggcactgattgtcctaagtgttagatatttcctcacattaatgtcttttaatttctaaatgttgcttaatgggcatgatagtggataaaatgcaatgaaacatatggagtt

SEQ ID NO: 46513 - DNA, 487 bp, Gossypium hirsutum
  Clone ID: LIB3584-020-P1-K1-C12
aatcgagccaatgcaaaggcatagagatatcatctgggattgggttgtgttccatcatcagttgatcttattttcttttgtctttatgttataaagcttgagcagacttatttgtatggctagcttaattgccagagcatttggctccttattatcggtcatcgcttactgtatctatggctaccgaggcaagaagaaaagcgtcagcaccaacatcaattactgcaacttcaacatgcccaagggtcgaccaccactttctttgcagactgtggacctcaaagttaggatgtgctgcactggttgcgagagaatagtgaagaacgccatttacaagcttagagggattgattcggtggaagtggacctagaaatggaaaaagtgacggtgatcgggtacgttgatcggaacaaggtgctgaaacgagtgaggagggctggaaagagggctgaattctggccctacccggatcctcctttgtacttc

SEQ ID NO: 46514 - DNA, 471 bp, Gossypium hirsutum
  unsure (1)..(471): unsure at all n locations
  Clone ID: LIB3584-020-P1-K1-C9
cccacgcgtccgctactgatgaaaagaggaggtcaggtgatttactctggaccattaggccggaattctcacaagatcattgaatattttgagtcaattcctggaatccccaaaattaaagaaaagtacaatccagctacatggatgctagaagtgagctccgtagctgctgaagttaggctcggaatggactntgccgaacactataaatcgtcatccttgtatcagagaaacaaggccttagtaaatgagttgagcacaccacccncaggagcaaaagacctctattttgccactcaatactcacaatccgcatggggtcaattcaaatcatgcctttggaagcaatggtggacttattggagaagtccagattataaccttgtccgatacttctttactttggtctctgccctcatggtcggtactattttctggcaggtcggcactaaaaaggacaccacaactgat

SEQ ID NO: 46515 - DNA, 540 bp, Gossypium hirsutum
  unsure (1)..(540): unsure at all n locations
  Clone ID: LIB3584-020-P1-K1-E3
cggacgcgtgggtgatcctggaaaaagcgatgctttcagctcaacaaatgatctacaaatgccttctcagtcaactgtgaccactgagccattcaagatctctcagtctgaagttcttgatgctcagaagagttctggtaggcattcttccacaagtgctgaaataaatgaaaacacaaggcccagagatgtctcggttaaccaatacaaagttggttccaacatgcaacctcctgcatcacctgttacaacttggggcatggataccatagatactgcttggagatctggtccagaaactacaagcaccaattgtggaccagttcatggaaacaaaaattttagttggagaggactaggtgaaggaaatacgaatgttagtaggggaacaggtcaaggaacgtttcaggaaaacagcagcatcaatgcaggcacttctggagagaatctggcctattggggaagtcaacagaggtatgttagtccaaggcaccgtgattttcaaggaagagattcaagttctgcggngggcagtgattt

SEQ ID NO: 46516 - DNA, 355 bp, Gossypium hirsutum
  Clone ID: LIB3584-020-P1-K1-F2
gccacgcgtacgatgacccgtgggttcattctcactctttttgcactgaactgtggctaaacggtctcggagtggtctgtctttcatgaatcgcacatgaaccattacgcgagctttttcctgtagctcgccgacaacatgtacttgctctggtacccatgattgctagggaagtcatgttggatgctgtccagcccgtgagccttcacatgcgcgatatcctacctgctgcggaggctatgaatggtgccaaaatggaggcgggggatgctgaattgcctctttgaagggtagttgtgctacagctcatgctgttgatgcatgcacgtgggtcgaatgagctgtcattgttggt

SEQ ID NO: 46517 - DNA, 509 bp, Gossypium hirsutum
  Clone ID: LIB3584-020-P1-K1-G1
gcaaaacacgaaccgccccatggattctgagctgatccgcttgggatggagtggatttttttgtctgaaaagtggatgcggggcagggtggattttttttttggatagtgggtatggagcggttttgatctagaacccggacaagagcctttgagttggaataatcgtataaagatagctgttggtgctgcacgaggaattgaatatctacattgcaaggccaatccacctgtcatttatcgtgacttgaaatctgcaaatattttgctggataatgatttcaaccctaaactctcagattttggcttggcaaaattgggacctgtgggtgacaatactcatgtttcaacccgggtgatgggaacatatggatattgtgccccagagtatgccatgagtggcaaattaactcttaaatctgacatatattcttttggtgtggtgctattggagttgataactggacggaaggcaatagatactagtaagaagaatggagaggagaattt

SEQ ID NO: 46518 - DNA, 449 bp, Gossypium hirsutum
  unsure (1)..(449): unsure at all n locations
  Clone ID: LIB3584-020-P1-K1-G8
ngctngtagataacaactgctagaaaagctgtcactttgttgctgtcatacatgatatttacaaaaccttgagccgaacagcacggatccgggctgttgctcatagccatgggaatcttattaaagatgttgccggatagtaaaccagcaccctggattccaacatcaaatgtaaatgcgaggcatcatcgggaaacctcttctgaagaagtggaaagtgtagaacttgaagatgaagagaaaaagcccctcgtttgaaagctttaaaaaaggtgcaattattctgcaattttctttatgatttccttactgaaaccccactgcattatagacctgctacttctgtagggtgtaggatatctgtaaacagatagtaaattacctggttttttgttgaataaagttatccattactgtaaaaaaaaaaaaaaaaaanantnaaaaattta

SEQ ID NO: 46519 - DNA, 481 bp, Gossypium hirsutum
  unsure (1)..(481): unsure at all n locations
  Clone ID: LIB3584-020-P1-K1-G9
gcctnncccttcactttttcttttgttccttgtcatttcaactttaagaagaaattagttattagatttgggtttcatttcttgtttaattctctctgaaactctcaggtcaggtaattttctttttccttttagagaattgaaaaaaaaagaaaaaaaaagaagatatcagatatggcagaagaacatagatgtcaagcaccaccacaatgtgcaaacaattgtggattcttcggaaacccagcaacccaaaatctttgttctcaatgttaccgccatctccagcaccttaaagaacaaggatcttcctctgctgccaaacaggcttttaatcaagcccccctcccttccttttcttcttcatcatcggcgntttcggtttccttggcggtgaagcatgaaccgttggcggaaaccaaggaagaggtggtccaagcggaggttcaggtccacgttcaagttccgcctaacagatgcatga

SEQ ID NO: 46520 - DNA, 307 bp, Gossypium hirsutum
  unsure (1)..(307): unsure at all n locations
  Clone ID: LIB3584-020-P1-K1-H9
cggacgcgngggcggacgcgngggggatgggngcaancttacggancncgacgngncaagccaccaancagggacggngangagagccgccccaagccaacgacccgcnncnggncancgaccgcacaaagcangacngcacgcccaangaagggaaggcnnacggggccngnnaccanccngaacngggcccccgncagaaaggancagccccggnnggagacnngcnaccaganggccnnggccagcaaggacgaagnggaggancnggagaaggccggnancaagggganccaaanngacgagg

SEQ ID NO: 46521 - DNA, 264 bp, Gossypium hirsutum
  unsure (1)..(264): unsure at all n locations
  Clone ID: LIB3584-021-P1-K1-B1
ctgatgtgggcgatgagaatggngagactatcattgatgagcgtaaaatcagaataaagccagtgcccaagaaggccaacccaaagccttgtgaagctgcagatgaactgcctgttagtgatgtaggcttggtacgaaggaattcaagttacctggatacatatttggatcctgctgtcatgtccttgatcaaagatccagatcagagcggcaggaacagcgggaataaacttatcaagcacaaaggggatgcaattgtgctaa

SEQ ID NO: 46522 - DNA, 386 bp, Gossypium hirsutum
  unsure (1)..(386): unsure at all n locations
  Clone ID: LIB3584-021-P1-K1-B3
cccacgcgtccgcccacgcgtccgatttaaagaaccgccccgngatataaaagaacctcctgcatctagttctgaaacactagaaaacggtgcactcgaggaaggtaaacaaccgttgctgattacttcagaagagaaacaagaagatgatgaagatccagaaggtgacggaagtgaagaagctcctgaggaatctcgtcagcctgctcatcaattgtgtcagcttatagactacttacaccgtcagtaaaggttcagttgttgatatatttcatgctcaaatacgcaatggaaattttactctcagaatctagcgtcatcacgacttactactttacctggtctacaagcacagtttctatctttcttgcatgtcttggcttaac

SEQ ID NO: 46523 - DNA, 446 bp, Gossypium hirsutum
  unsure (1)..(446): unsure at all n locations
  Clone ID: LIB3584-021-P1-K1-B6
cccacgcgtccgattttctatgattttggttctgaacacatcgatatgaaatcattatagtgctttattttggttattcgtccaactcaatcattgaactctntgtttgtacttgccctaggatattgacttaaccgttatagaatatagaggcgaccttagtcataaaatatgccacaaccagcatgctggttcagtttttgtacttggccaaggatgttggctggttagaggtctctttttacactaaaaagaacacttatagatcaatgactcatgaagtaagatagctgccattacagttgcgaacacagaacatggatgtgcaggggcaacctcctttcaatctgttgctgttaattctctccctcgcacatgcatcatcatattacactatagtattctaaaatgttggaggtcatctatgttgttcaagtgtcaaaatc

SEQ ID NO: 46524 - DNA, 181 bp, Gossypium hirsutum
  Clone ID: LIB3584-021-P1-K1-C1
cgcgtacggcctcacacgttggtgcattcatggacctgttggttggagcacgctttggctagatcaaaacacgctagctggcgttggtctatgcgccctatatacactttcttcaacatcgaacaattatggagtgtttacaatgacatacatgctccaagcactattgctgctggagcgg

SEQ ID NO: 46525 - DNA, 471 bp, Gossypium hirsutum
  Clone ID: LIB3584-021-P1-K1-C8
atgggaggaggatctgttgattctactctcagtttcgttagaaaacttgttcattggagtaaagaaaatgaagagacttgcacgccctttgttctttgctctgatccagtgttgaatagggagcttttatccctggagaggaattcttctactctctgcagtagaaatgcacgttcgcaatttgatcatagcccgattgtcgaaatttactaagtaaaagagttttccttgagaaatcaggagctcagtgcattgtagtgccttgtcatatttcacactcatggcatgatgaagtgtttaacggatgttctattccttcccttcacatggctgagtgtgtttccagggagcttaaggaagccaagttgaagcccctagaagctgggagccctttgcggataggggttcttgccaccgatgtgactttaaaagcagggttttaccaagagaaactggagaatgagggatttg

SEQ ID NO: 46526 - DNA, 150 bp, Gossypium hirsutum
  Clone ID: LIB3584-021-P1-K1-E6
cggacgcgtgggcggacgcgtgggctggccagctcctttcttctagcatttcccgagattttcaagggtatgatgggtctttcaggaggcctgctctataccaaggccattttgcatatgggaataattccaatgctggaatgcactatc

SEQ ID NO: 46527 - DNA, 456 bp, Gossypium hirsutum
  Clone ID: LIB3584-021-P1-K1-F10
tgcaaatggaaatgcttttgatttcacttcgaagctgctacacttagcatggcatccaaccgagaactctattgcctgtgctgcatccaacagtctttacatgtattatgcatgaagaggatccaacgaagcttgcaattatttttgctgggcagagcttttggagagattgctttgcgttcataccttatttaatgatacagaaaaagctgcacccatttgtcgaactcttggcgattcttcgaagtccaatcatgtcgaccaccaccaaagttcaatgccgctgttgttgattttgttgatgaagtacattgactttatgctttgatggccactgatattaatattcttttgtagggatagacacacagtgctatccctattcttgtttgattaggttgaagaaaatacaatagcacaactccatctaactactcaaccccaaccacccccccc

SEQ ID NO: 46528 - DNA, 442 bp, Gossypium hirsutum
  unsure (1)..(442): unsure at all n locations
  Clone ID: LIB3584-021-P1-K1-F11
cccacgcgnccgcaaaaaagangacgatgtatggatccgacggaacagctggcattgcaggatgaaccaaccagctggaagacatggaacatttcggagatgtgggctccttggatgataatgcggaatctcttctctcacatgacgatggacatggagggaatatggatggcaccctcaaacggcacccatcagagcacacactgagactccaaagagttttggcttcaatgaagttgggtcaatacgtaaaagcaatggcaaagtcacctgctgccatttctcttcagatggaaagctattagccagtgctgggcatgacaagaaggctgctctttgaaacatggaaattctgaagactgattgcacgactgaggaacacactcatattataactgatattcgcttcagaacaaattccaatcaactagcaacatcttct

SEQ ID NO: 46529 - DNA, 290 bp, Gossypium hirsutum
  unsure (1)..(290): unsure at all n locations
  Clone ID: LIB3584-021-P1-K1-F3
nggacgcgtggtcggacgcgtgaatttcctgaggatatttgcgaagcatttcaagagatgagagatagaaaggtgttcgatgttgaagacatgtacactatagcggatgcttggggttggacatgggagcgagaacttaaaaataaacctcctcgacgatggtcgcaggaatgggaagttgtgttggcaattcaagtaatgcataaggtatagaattaggtggaacacccaccattggggattgtgcaatgatattgcgagcaaccattaatgctcctgttccatcagcc

SEQ ID NO: 46530 - DNA, 305 bp, Gossypium hirsutum
  Clone ID: LIB3584-021-P1-K1-F9
tcttcttctcttcctcataatttgttcctgttcccatagcaaaacaaaagccatgtctaaggactgtgtgctcaggttgcatgtcatgccaaggatgtttggaccgtgaagagattctgggaaaatggaaggtgggaatcatatgaagagattcgagcatcataaaggactgcgaagggcccgtgcagctgatgctggctgacacagtgtaaagaccggaaagaagactgcttttggacgcaatactctggccgaaccaggtgaagccaccaaaccgaggtgaacctgggatactgaagcaaacc

SEQ ID NO: 46531 - DNA, 323 bp, Gossypium hirsutum
  unsure (1)..(323): unsure at all n locations
  Clone ID: LIB3584-021-P1-K1-G10
cccacgcgnccggcagaccgagaagccgngagagccaaagaagccanacagaaannaagcccggancaccacgngancgcngaaannncaagcaccaganccccngaagagcaccaggcngngaggagagccnancaggcncganacaagcangccccggaagaagaagnggcngcncagaccaagggagacacncgaaagccgnggnagccnaagggagcgacacnagacacganggggaagaagaaaacacgagagcagcaaacccngaagccaaaanncnccaagaagcnagcaaagacaaggaagncaaccangaagaa

SEQ ID NO: 46532 - DNA, 431 bp, Gossypium hirsutum
  Clone ID: LIB3584-021-P1-K1-G11
gcgtacgaccacgcgtccgcccacgcgtacgcccacgcgttcgaccacgcgtccggccacgcgtggggatgtacaaggctcccatattttcccacaatgtgccatcaactgacttcctattggttaggtcaccaaagggaaagctttccatacgacgtattgataggattgctgttgtaggacaacaggagcctctcatggaggtatttgtcctggatcaaagaatattcagacatatcttatgaacagaatgctggtttatgtgtatcgggagttttccgcgtctgccaaacgtggtttgatcccattcatgggtacagatgagttgtttactcattttcctaacctttcagatgcaattgtccggaaaaagctgaaggaatgtgcttatttgcggagggataaaaatggacgacagatttggtccatga

SEQ ID NO: 46533 - DNA, 492 bp, Gossypium hirsutum
  Clone ID: LIB3584-021-P1-K1-G2
caatttgacctcgagaaggcatctgatgttattgttgggaaagtagaggaatttatggataagctcggtaatgccaggcttgttttagtggacttgactgagagatcaaagattttgtctttggttagggctaaagctgcagaaaagaaaatcgactccaaaaggttctttacatttataggagatatatgtcaactttatacaaagggaggtttgtgctgcaatgtaatagctaatgctgccaactggcgtctgaagcctggaggtggaggtgtaaatgctgcaattttcaatgctggtggtcctgccctagaggctgcaaccaaggagcaggctagatctcttcttcccgggaatgcccttgttgttcctctgccatcaacttctcctttgtattctaaggaaggggtgacccatgtgatacatgttcttgggccaaatatgaacccacgtagaccaaattgtctagacaatgactatgttaaaggttgc

SEQ ID NO: 46534 - DNA, 404 bp, Gossypium hirsutum
  unsure (1)..(404): unsure at all n locations
  Clone ID: LIB3584-021-P1-K1-G5
ctcagagagtgggcatcgagttctgattttagccaatggacatcaatgcttgatatcttagaggggactttagatgttattggagttacatataaacggtttgatggaagcactcaggtgactgataggcagactatagttgatgatttcaataatgacacttcaatatttgtgtgcttgttgtccacgagagctggagggcgggtttgaacttgacaggagctgatactgtaattatccatgacatggattttaatncacagattgaccggcaggctgaagatcgttgccatcgaattggccaaataggcccagtactatatacaggctggttactaaaagtactgttgatgagaatgtttatgagattgcaaaaaggaagttgactctggatgcttcaatgc

SEQ ID NO: 46535 - DNA, 285 bp, Gossypium hirsutum
  unsure (1)..(285): unsure at all n locations
  Clone ID: LIB3584-021-P1-K1-G9
gacccacgcgccggnngagnggggaaaaaaagaagccgaaaggaccnagaacnnggacaaagcaaggagccaggagcngccgnaaaggcagccaaaacganagngnnccngggaccaaacgaacagacaggaancccggncncgngccaaagcgcanncgcngnaacacgncaacgaanggaagaaaggcnaacanacncnaacacagaacaggaanggnnnngnngcaccaagaagnggaagnagaaaacccnganagcaaacagaccgagcgccanaccgcga

SEQ ID NO: 46536 - DNA, 156 bp, Gossypium hirsutum
  unsure (1)..(156): unsure at all n locations
  Clone ID: LIB3584-021-P1-K1-H9
cncagcnancagagcngaagagaagaagcaggaacagggangccggaggaaacaagncaaggggagcncgaaagcgnaggcaaagggaagaannancnaaagaaccataaaacagaannncccnnncaaccncngnncaaacaaaacangaaacgc

SEQ ID NO: 46537 - DNA, 426 bp, Gossypium hirsutum
  Clone ID: LIB3585-058-P1-K1-A3
cccaacatcccacctttgatttttccccatttcttccttttttttttctgaatctaattattggtttggttttgttttgtttcatcaataagatttcaatattgctcccctcccttgataacaaggaaagaatctacattaaacaaatcaaaccaacaattaaaatttgaatgaaataacagctattgtctttcccaatgtcttcctcctggtcctccattcttaccaattacccgcttatttctgcttttattgccttcgttattgcccaaaccatcaagttcttcacctcctggtacaaggaaaaacaatgggatctcaagcaactagtgggatctggagggatgccttcatcccattcttctacagtcaccgctcttgctacagctattgggttccaagaaagttttggaggagcattatttg

SEQ ID NO: 46538 - DNA, 402 bp, Gossypium hirsutum
  Clone ID: LIB3585-058-P1-K1-A4
ggagacggaaccgttgaccatagttgaggcttttcagagtcctgcttggacaaaagctgctcaggaggagtatcgggccttactagcgaaccatacgtgggatctcatgccattaccagatagtcgtaaagcagtaggctgcaagtgggttttcaagctcaaacgacatgcagatgggtctattgcaaggcataaaggtagacttgtggttaaggggtacttgcaagaagctggaatagatttccacgaaacgttcagccctgtggtgaagcctactaccataagagtggtccttgcgttggcagtctctttcaactggtcacttcgacaagttgacataaataatgcgttcttgaatggaaaccttcgagaggagatctacatgtaacagcctccggggtt

SEQ ID NO: 46539 - DNA, 516 bp, Gossypium hirsutum
  unsure (1)..(516): unsure at all n locations
  Clone ID: LIB3585-058-P1-K1-B10
cccacgcgtccgcttttatggttccataaataaatgaaagaaacctccattatctccctcttcatctctttgcctttgtccctactcgccgacccttaaaccccccatttgtgtctgcaaaatctcacttattgttttgcttacatatacaaatcgtttgttagatccattgacagatagagaaaaaagggtttaaaaatggataaaagctgtcaatcttctggtgaatcctccattactagcaatagctccactgctaacaatagagatcattaccttaaacaccttaacaagctttcccataagatatctaaaccccttttttncaccacccgncgccgccgtcggtggcttccgccgttggtccgttcataaggaagcttcttttggaccggcccaaaatcttacacaagcttaactttcggtttcggcttcggcaacggcggcttcgaattctagccaaaggggtcttcaagcttaacaacaccagccacctggttattacatcaacaaaaa

SEQ ID NO: 46540 - DNA, 355 bp, Gossypium hirsutum
  Clone ID: LIB3585-058-P1-K1-B4
cccacgcgtccgggaagtcaatcccatcagcaaaaaggagataaagtggtctgattataagaaggtgcctatacttaaagttgacggtgaacagatggttgattcttctgatataatcgataagctttttcataggatcaaccccgatagctccattcgtgatggtgaagagaagaaatggcgtgagtgggtggataatcacttggtgcatgttttatcaccaaatatatatcgaagtacttctgaggcacttgaatcatttgattatatcaccactcatggcaatttcagtttcacagagaggttggtagcgaagtatgctggggcagcagctatgtattttgtctcaaagaaa

SEQ ID NO: 46541 - DNA, 501 bp, Gossypium hirsutum
  Clone ID: LIB3585-058-P1-K1-B5
catgaatcttctctgtctgttattacttcccatgtggcaatgtttcttatctttgttatcacttgtaattcttgctagaaccacacctgtctccactgtttcttccttttcttcacaaatggaagctgtttccccaggaatggcagtgattaaagtagtgcaccatcaagatttgaacaagagaatccttgttactctaattgttgcttccactctcctttgtgggatattgctctttttgttatatttctggatttgtagacacaaaatcatgaagaattccaatggggaagccaaacggaatctggaacctacaaaaacactttcgttgagtccaattgtggatcagtttaattcattaccaatggctagcaaaaagggttcagtagctgttattgagtatcggttattggaagctgcgacgaacaatttccgggaaagtaatgttttgggtcaaggcggtcgtggacgtgtttataaagcatgttttgatgggaaatt

SEQ ID NO: 46542 - DNA, 479 bp, Gossypium hirsutum
  Clone ID: LIB3585-058-P1-K1-C1
acgcccacgcgtccgcggacgcgtgggtagcaaatcccaaatcagcagatagggaaaagatggcaggattgttcgaccagcaagcagatatttacttagacgcaaggccaacgtatcccctccagtggtattctatgctcgccgctcgcactctccaccgctctctggcttgggatgtgggcacaggcaatggtcaagctgctattggtgttgctgagcattacgagcaggtgatcggcactgatgtgagtgaagcccaattacaacacgcaataccgcacccaaaggtaaagtgtctctacactccgttgtcaatctccgacgaggaattgctatcttcaatcggaggtgaaaactcagtcgatttaatcacggtggctcaagcagtccactggttcgatctaccaaagttctactctctggtaaccagacttctaccgaagcccggcggtatcgtcgccgtctggtgctacaacaac

SEQ ID NO: 46543 - DNA, 423 bp, Gossypium hirsutum
  unsure (1)..(423): unsure at all n locations
  Clone ID: LIB3585-058-P1-K1-C10
cccacgcgtccgtagggaacataatggaacaagtgtttatggagcttgtatagctgcttgaatggtcactgcacataatttgttgcagcacaagtgtttcgataaaagtaccatggaggaggtatattgcattttgccttttctactcaaaaaatgaaaattggaccttctaaattggaaaaaagagcaaagtaatcctttttataaagaaaaaaattattcatttctgtcatcaaaaactgtcatgactaatgaaatacctagatagttacacgtgctgtgtcacttgtgtctcatgctaaactataaggatcaattntctctttgatctaatatatagggattaatttgttcattttctttagtagatgggaaaaaatacaatccggctcataatacaagggccttacacgtgcacttggt

SEQ ID NO: 46544 - DNA, 449 bp, Gossypium hirsutum
  Clone ID: LIB3585-058-P1-K1-D8
cccacgcgtccgcggacgcgtgggtttgcatcgaagactgttatattagcactggtgatgatctaattgccattaaaagtgggtgggatgagtatggcatttcatttgctcgccccagcacaaatattataatccgccggcttattggacacaatcgaaatggctctgggatagcaattggaagtgaaatgtcaggaggtgtttcagaagtttatgcagaaaacctgtattttttttattcaagcacggctatcactataaagactgctcgtggaaggggtggatatgtgagaaatatctatatattaaatggtaccttggttggggtagacacagctataagggtcgataggactttcttttcggattccgatgacttttacgatccaaatgctcttcctgtgatagaaagggttacaattaaagatgtcattggaaataacataaaa

SEQ ID NO: 46545 - DNA, 419 bp, Gossypium hirsutum
  Clone ID: LIB3585-058-P1-K1-D9
tcgtccacgcgtccgcccacgcgtccgcccacgcgtccgcccacgcgtccgaaactatttactggttcggcatggacagttttatctcgtccgtttgtagagttctgtgtttggggttgggataatctaccaagaacacttctcatgtattacacaaacttcgtctcctcccctgaaggctacttccagacagtcgtatgcaacgttcccgaatttgccaagacggttgtcaaccatgatttgcactatatttcgtgggataatcccccgaaacaacacccacacatgcttaacattaatggcccaaattagattgttccgagccacccagcatttggcccgaaatttaaacaccatgatcccgtcttggacaagattgatgcaaatttgcttggcagggcaaaggggaggttcacttc

SEQ ID NO: 46546 - DNA, 519 bp, Gossypium hirsutum
  Clone ID: LIB3585-058-P1-K1-E8
gtgaaaactgaaaaacttgtttctcaatgtcgattcccgttaccgtcctgggattgtcgcctcttgctgcggtttgccagttcccacttcaatccctaatataaccgtaaatcagcatgaatttcctgattgaagctttcaagccggcgtgttctatctccataaaattttccgatggaaaaactcgcaagcgggtcccaattaaaagggaaaatggccaaacgcttttggcgccgcttttccgaaatcaagaaaatattgctgggaagattaccatagaaccacatcaagggaagagaattgaacataatggtgtgaaagttgagctccttggccaaatagagatgtatcttgacagaggcaacttttatgactttacctctcttggtgagtattttctgattttgcttttgcttttgctctctccgcctggaaactgtttagatgttcgttaagtgggtgcggggttgggatgaatttaagatcttaaagagtcaattcgtctttcatacgtttaga

SEQ ID NO: 46547 - DNA, 567 bp, Gossypium hirsutum
  unsure (1)..(567): unsure at all n locations
  Clone ID: LIB3585-058-P1-K1-F1
ctcgagactttgattcttgacttcaatgaactgactgggactataccttctggtttaagcaactgtaccaagttgaattgggtctcgttgtcgaacaaccgattgacgggcgagattccggcttggtttggcaagttttcgagtcttgcgattctcaagctcagcaataactctttctatggaagaatcccaccagaactcggagattgtaaaagtttgatatggttggaccttaataccaataacttgaatgggactatccctaatgtgcttttcaaacaatctggtaagattgctgttaatttcatttctgggaagaggtatatgtatatcaagaatgatggaagcagagagtgccatgggtctggaaatttacttgaatttgctggaattcgatcggaagatttgaatcgaatttcggataggaacccctgcaactttacaagagtttacggcggtcacacacagcctacctttaacaacaatggctccatgattntccttgatctttcgtacaatnntgtgtctgggactattccanangaggtcggctcgatgtctaatctg

SEQ ID NO: 46548 - DNA, 537 bp, Gossypium hirsutum
  Clone ID: LIB3585-058-P1-K1-F3
cttgttggcttatttagtaactgtggacaagtaagttaaagatctctaattgagtgccttagtttgtgttggcgctcagctgaagccatggtaccaaacaacctctgattccatggcaactttaagtgaggtgctagtgttgggcatgggtactcctgattcctgatttaatagccatacattaatgttattagcattattttttgcttgctgatgcctgttattcaagattgaatgagtggctaatcaataatagcctgtgaagatgaaaaacccctatgttccttctgtgttcatgcaattgtacttatctctttccattttggaattaaacactatttgtagttgttaatgtagttgtgaaatcacgtagcaatggtttaagggactaattgttacaatctaaatgtttttctctaagatctagacaactatatctgcttttgggaagtaagctagtaattttcattgatgctattctactagagaacagtacttatttttcttagggaacaatgtaatctacaacgtataatc

SEQ ID NO: 46549 - DNA, 532 bp, Gossypium hirsutum
  Clone ID: LIB3585-058-P1-K1-F5
gttgaactgttgaagaatgacttgccaagagaagattcggctgcttcaagtcaatttcttgataaacatggaggaaataaatccaagataaatgccagaagtgagtcaattcaggcacagcttgaggtcccaactacctcagttgtacaaagggaccagaacagaattgtggaggaaacgggtccagatgatgaagctcagagtttgatagcctgtgctggttctataaagaaatgtgagaacaagcttatggaaaggaacagtgagaatggtgagatttctcctgctggaaaatggtctaaattctggcttggtgcggatggtgaagtgtatttggaaaatactgccactgctaccaagggttgcaacccagtttctgaacaacagagtgatgaaccaacttccgggtatgggttgataaatggtaactcaacaaggtcacactctgctcaacgatgtgctggaagatacaatcaaggattggaggacataactggtccaaaattttctataaacggaggggctttttcag

SEQ ID NO: 46550 - DNA, 209 bp, Gossypium hirsutum
  unsure (1)..(209): unsure at all n locations
  Clone ID: LIB3585-058-P1-K1-F8
ctgtcagacctcaacttcccgcctccatccggtctggggggtcttcttacctaaatcaatcattcctcgtttacaacctangactggaaaaccctgagtacccactaatgacttgaaacatcacctttgcagagtctaatacgaaaggcctaccgacgccttccacattgccatacaaatggcaatgaaccccattaacgacattaaca

SEQ ID NO: 46551 - DNA, 544 bp, Gossypium hirsutum
  unsure (1)..(544): unsure at all n locations
  Clone ID: LIB3585-058-P1-K1-G1
gcggtggacatggcaaggcgctgttggcataaactgaaaacgacatgtcgtttccaactgtctcgtcacctttcttcttcaacctctctcccgccacctcctctttcctctccccgaggggggtcgtcaccgggcttgggctggtgactccactcgggtgcggagtaggaacaacttggaagcatttgatagaaggcaagtgtggaataagggcagtaaccacagaggatttgaagatgaatgcttttgataaagagacactgacgcttaccttcgatcagttaacttctaaagttgctgcaattgtgccttgtgggactgcccctggtgaattcaatgaggacctttggtttaatgctaaggatcatcgatcaattgcgagatttataagctatgcattatgtgctgctgatgaagctntaaaagatgcanaatgggcacccgcagatcaggaacaagaggaaagaacgggagtctctataggtggtgggactggaagtattagtgatatcttagatgcagcgcanatgatctgtgagaagcg

SEQ ID NO: 46552 - DNA, 481 bp, Gossypium hirsutum
  Clone ID: LIB3585-058-P1-K1-G9
agaccccctgaacttaacagctatggcatgtccagctttcccactttgcccattggcaataacagaagctgagcgaggcatacctgacatcctcaagcgtgtcagatccgtctttgagaaggtcggtctgaagtacaatgattctgtggtgatcagaataactggctgccctaatggttgtgctagaccgtacatggctgagcttggactggttggtgatggtcccaacagctatcagatttggcttggcggaacaccaaatcaaacccaattagcaagaagttttatggacaaagtcaaagttcaggatcttgaaaatgtttttgaaccttttgtctactactgggaacaaaaaaggcaacccaaagaatcatttggtgacttcacaagccggattggatttgaaaaacttaaaaaacttgtggacaagtgggaaagggtaatgcaaaccccaccagcaaggtattacctaaagcttttt

SEQ ID NO: 46553 - DNA, 537 bp, Gossypium hirsutum
  Clone ID: LIB3585-058-P1-K1-H1
cgacccacgcgtacgcccacgcgtacgcccacgcgtacgcccacgcgtacgcgataccagactcaatttgaagcaacattacctgatataatggagagctttaatgatctgtaccgcagtgtaacaggaaggatcactgctgaagccctaaaggaaagggttctgaaagtgttgcaagtatggtcagattggtttcttttctcagatgcatacgtgaatggactacgagccacttttcttcgatcaggaaactctggagtggccccattccattctatttgtggtgatgcaccagaaattgaaaagaagactagctcaaaagatgcagttgatgggattaaagctaaccaagatactgcgttggccatgggcaaaagtgctgctatgaaagaagtaatggatcttccacttgccgagttggaaaggcgctgtaggcataaaggattatctcttggtggtggtagagaaataatggttgcacgactattaagtcttaaagatgccgaaaagcaaaggggttatgaactagatgatgag

SEQ ID NO: 46554 - DNA, 189 bp, Gossypium hirsutum
  Clone ID: LIB3585-058-P1-K1-H10
tttttacactctctttgtgctcccgccgtatttcacttcccctctcttctctcttcttttccttccgtgcttccttccttctgtcaacaccactctctaatggcttcccttgctggtcattaaattttattccaccctggcagaaccttgcttccaaccagggttctggggtggaaatgggttcatttg

SEQ ID NO: 46555 - DNA, 397 bp, Gossypium hirsutum
  Clone ID: LIB3585-058-P1-K1-H12
cccacgcgtccgcgatgacaatggcttccaggttaacccttctcaggcgaatctctaaacttctcttatctccttcgctttcgccttccccacccctccgctcttctcgtcttctttttcttcttcgaaatgcttccaggatcaacgtttctccttggccattcgcctcttctagaagcttctgctccgaccctcttaatctcccccaggattctcagggacctgctcccattgattatcgttcggttttgccggaagatgaatttcatagaatagctaattctacaatccatgaccttcaagaaaaattagaggaatatggtgatattgttgacatggatggtttcgatgtagattatgggaattgagtattgacactaaaacttggggctctggg

SEQ ID NO: 46556 - DNA, 352 bp, Gossypium hirsutum
  Clone ID: LIB3585-058-P1-K1-H4
gtcagatctaatctaaccaaacttatctctctatctattttctctgattagattcttccatcaaaagggatttttacagtcttcttttatatttctccatcgatcaaccagctccagctttaccctaacttcattaagctttgcctttgtttacctaaaaaaacaccacccactaaaacagagaatatcgtccaagggatttccccttaaaccctagtctttccagagctagggtttcagatacttaactctaactgattggatctgtgggctggtctctgtttcaagagctattgattcctactagatcttcgttgcattctttttttgttggacttcatctcatcatggc

SEQ ID NO: 46557 - DNA, 445 bp, Gossypium hirsutum
  unsure (1)..(445): unsure at all n locations
  Clone ID: LIB3585-059-P1-K1-A1
gcctccccctccttcactcccaccacccgtttattctccccctccccctccaccaccagtttattcacctcccccaccacctctctcgcctcctcctccttcgcctccgccaccaccaccgcctatttactctccacctcctccaccaccatcacctccaccgccctcaccaccacctccttcacccccacccccaccccctacatatccatcacctccacctccttcacccccaccccctacatatccatcacctccaccgccttcacccccgccacctacttatccgttaccaccgcccccttcaccctcaccacctgcgccaatatattgtgtgaggtccccacctccaccaccaaattcaccacctncaccccctctattgttctccccgccgccaccagttccctactactataacttctcttcaccaccacatcattca

SEQ ID NO: 46558 - DNA, 535 bp, Gossypium hirsutum
  unsure (1)..(535): unsure at all n locations
  Clone ID: LIB3585-059-P1-K1-A10
cccacgcgtccgggattgctgttttttgttcaatcacttcacattggacgttattcggctcacattgcaaatggaacgctaggaattgttggcattagaagaacgcatcggagatgtgagcactggactgaacgaggaaaccattctgaagctgctgaaacagcagaagtactcattcaccacaacggaatccacacaagaattggaaccctgctgtatctgtcaggtatgatgctcaatgacagataagctgctttaaataacttcattcatctcacctgttaccttgtccgaactttaacgatggcaggaggaatatgcagatggtgatgagactgggacactagattgtggacatgacttccacacaaactgcatcaaacaggggttaatgctaaaaaacctgtgtcccatttgtaaaacaacaggcttgctcaagtgagagcaaaggctgttgtgagatccaataatagggttgggacttnnggattatatataaaatattatatatcttgattcaaacttggcttttttt

SEQ ID NO: 46559 - DNA, 225 bp, Gossypium hirsutum
  unsure (1)..(225): unsure at all n locations
  Clone ID: LIB3585-059-P1-K1-A2
agcggccaaggaaacaggggacnggncaaagggaaagaacngaaacagggagcaaaaacgaggcnaggaggaccgaccggggggaaggcnncagggaagagcaccgncncaaccaagggcaagcacaaccaganncccgncgacgaggcagacancagcgcncgggaagccnngaagaagaacccnggcggcgacaaaaaagnggnggcggcgnncggaccggac

SEQ ID NO: 46560 - DNA, 560 bp, Gossypium hirsutum
  Clone ID: LIB3585-059-P1-K1-A4
gagatttggatctactgcatttgattcttttttcttgtttccacactttctggtacagttttataaatggttcacggatcttgaatcagccctgaggtctgagactgaggagaagtatcagcactatgttgatactctagtagaccgcattcagacttgtgatgatatacttcgacaagtggatgagaccttggacctattgaatgaactacaactgcaacaccaagctgtagaaacaaaaactaaaactcttcatgatgcatgcaatcgattggtaatggagaagcaaaggctgattgagtttgctgaagcacttcgcagtaagcttgagtattttgatgagttggagaatgtaagattacttccaacttttattctccaaacatgaatgttggaaatgcaaactttctcccacttcttaaacggctcgatgagtgcatattgtatgttgagaataatccacaatacgcagaatccagtgtttatttgctaaaattccgtcaactccagtctcgggctcttggtatgatccgctctcatgtagtatctgttctcaaaag

SEQ ID NO: 46561 - DNA, 297 bp, Gossypium hirsutum
  unsure (1)..(297): unsure at all n locations
  Clone ID: LIB3585-059-P1-K1-B12
cccactcatgcgggatgaacaaaaacaattttacaagatatccatgctcanaaactngggtcctttgtataacatatactggatcttaacaaaaaacaatataaccaatttcaacttttaatgcagaaacataacaattatgaaactgcaaaacgactacaatatgaaattcaatccataaaggctcaaaaggttcactattaacatatgaataaacatgattcaatacaatatcgtctttgtaaagcctctctatataattaactttttcttttactgaaataaacctcttataaa

SEQ ID NO: 46562 - DNA, 470 bp, Gossypium hirsutum
  Clone ID: LIB3585-059-P1-K1-C2
attcaatgaattggtcttaacaaacattatattctttactacatctgcccaatgcgcgcgcttgttaaattttcaatttatccacctcttccaattttcaacaagtataatgaaaagccatcggtgatttctgttaaatttcttacatactatctcttagttatatttattttggaaattcctggatttattaaaataatttgcagtccattgtctttccttttaaggtacacagatcctgcaaaacctgatctttctcgattgcatgaatggcaatttatatcctatctttaccgatatatatggataatctgaataatatatgcttattatcatcccaatgtctataaatggatagaaaagttgaaggaatgttaacccaagataaaattcttaatcaaaacaagctttatctatctatttctctattaattcagatattcttaggtattaaatatattctataaatc

SEQ ID NO: 46563 - DNA, 436 bp, Gossypium hirsutum
  Clone ID: LIB3585-059-P1-K1-C7
cttgaatgagacggtgctttctaacttagctattaagtacaagaaaagggcatggttttctgtggcaaaggatttctctgatgaggccaaggtattgtatgacatggaaaaggttcctgctttggtagctattcatccgaattataagcaacaaagcattttttatggcctttttgaaggtgaatttttggaggattttataaaacagaattttctccctccagtggtgcccttgaaccctgagacattgaagctattgaaagatgaaaagagaaaaattgtcttaaccatcactgcggatgagaatgaagaccaaacacagaacttgatcaagttattgaaggctgctgcatctacaaatcgtgatttagtgtttggttattttaggcttaagcaatgggaagacttcgctgataaatttggagccaatgagaag

SEQ ID NO: 46564 - DNA, 542 bp, Gossypium hirsutum
  Clone ID: LIB3585-059-P1-K1-C8
cgctgagaagttcattaaagcacttctaagcattccattcgctttccttcgagctgaagccatgcttttccgagaaacttttgaagatgaagtaattcatcttaaaaactcattttctatgctggaggaagcctgcaaggagctaagatcaagcaggctcttcttgaagttacttgaagcagtgctaaaaacaggcaatagaatgaatgttggaacaattagaggaggtgctacagcattcaagcttgataccctccttaagcttgcagatgttaaaggaactgatgggaagactactttgctccatttcgtagtccaagagattattcgatccgaaggaataagagtatctgatactgataccattacgggaaagatgaatgaaagcaacaaaagccaaacagcagaagaaaaagaagaagattacaaaagaaggggactggatcttgtttctggtttaagtactgaactctaccatgtgaagaaaacagctacaattgaccttgatgttcttgcaacttctgtctcaaacttatcaaatg

SEQ ID NO: 46565 - DNA, 561 bp, Gossypium hirsutum
  Clone ID: LIB3585-059-P1-K1-D10
cggacgcgtgggcggacgcgtgggttttttttttaatcaatacaagtacaaactatagctacaaaaataaattggtctcttctctatacatagtacatgcaataagcagatgaagtgcattgaaaaaaaaccttggaaactagtctgtatttgagagctttatctttaccactggacatgtctcgctttcaatcttctttcttccgaacttcataatcagactcagggctttcagcagggctttcttcttcaccttcatcatcgtcatcatcatcatagatgtctttgcgaggtttattgtcatcatgcgtgcttagccttcggataagcatcagaattgcaaccaaaaacacaattataaacacagctgcaatgccgattacgttcatatagtccataaacgatggtcctttaatcatcttcttttccattcttccttccctatatccttccaggaagcgtgagatttgagaactttgatcttcttcttcatcaaggctttcataaccaataactggtaagtactgctcatcaccattccagattatcaaattttggaaa

SEQ ID NO: 46566 - DNA, 413 bp, Gossypium hirsutum
  Clone ID: LIB3585-059-P1-K1-D4
ctttactaaccaccctaaagaccaaagcattgatttctaaatcagctagttcccaagaggctatagagaaggcttttgttacctcaatgatcaaaatgagtagcctgagccgtggacaagagatcatgctagactgcaaagtgttcaggtgattttgaagccatttgaattggattctatatatctttttaaagctatcatcaaaaaagaaaaaataagtttgcatgcattcaacaaggacagctaggagggatatgtttttgtttatcatgtgacttaatgattaaaaagaaagcactgttgtgttacgttctttgcgttttatgaatccatggccgaatcattgttcttcagtgtgaaagctgatctaaaagtcggagacaaagatgtaactgctcggttcttacactggt

SEQ ID NO: 46567 - DNA, 566 bp, Gossypium hirsutum
  Clone ID: LIB3585-059-P1-K1-D5
cccacgcgtccgcccacgcgtccgcccacgcgtccgcccacgcgtccgctagagcaagaaacacaatcccaataacccctttatttcaccatttttgatgattctatcctctaagaaggtggtaaagtgtttgtgtatatgtgtgtgagaaaggtagcagtatagcacttgttctttgtttttaaggaaaaatgggagatagtgaagaaggtaatactgatttgatgcaaaggattcaatcatcatttggaacatcatcttcttcgattcctaaacaagttttatcaatgaatcatcttgaaatacctccactgaaccctaatcaaatcagggctgttaggcatttctctcattttggacaaaactttaacggcggcggcggtggaggtggcggcggtggtgatggtaataaaagagttggtattcctccttcacaccctaaccagatcccacccatttcgccttattcacagatccctgtgtctcgtccatcgagccatcaaatgggttcttctcagggttttagtcccggaccgactcattctcggtctttgtcacaaccttcg

SEQ ID NO: 46568 - DNA, 422 bp, Gossypium hirsutum
  unsure (1)..(422): unsure at all n locations
  Clone ID: LIB3585-059-P1-K1-E2
cgccacgcgtccggcttcatttntaatgtagggaatcactcaaaaaaattttaaattctcgcaggctacactgaccnggagagttgttatattttagcaatgtctacncaccaacaccttccgattccgttttactcttcactagaactggtctactgcaaatgatcttaactggaataagctcatcttcggctcgatcaattgaagtccaagtttttccaagtctttgttcatcctcccgatgtcttcgttcgatctacatggagagtgaacttaattggagagctcattcactatgaaggatactcaatgttgcctatagcaatcaggcaggacacaattgttgcaatccgaaagcacaaagaacgtgaggcttaaaagcttctaaaaattacttaatgtcaatgataagttttcttacc

SEQ ID NO: 46569 - DNA, 119 bp, Gossypium hirsutum
  unsure (1)..(119): unsure at all n locations
  Clone ID: LIB3585-059-P1-K1-F10
actaaatatggaccgactagcgtcgttngtccttatccagaatggaaagtctaactaccgcgtgtgggtgcttttcctaggnaagatggtcttacaactcaaagtatttttatgtaaac

SEQ ID NO: 46570 - DNA, 552 bp, Gossypium hirsutum
  Clone ID: LIB3585-059-P1-K1-F11
cccacgcgtccgcccacgcgtccgcccacgcgtccgcccacgcgtccgaaattacatggagatccatcttccccagctgttccaagggcgtagtgaaaccagaaaccaagcctaagaaggaagttacaaaacaaagttcatttaacaggcttgcgatgttagagttgagttatcccagcacaatgcttactgaagatctgtcaacttcgcttgctggttcaaatcttcatgttttcacgcttggggagctaaaggtgataacccagagcttttcatcttctaacttgcttggtgaaggtgggtttggaccggttcataagggtttcattgatgacaagcttaggcctggattgaaagctcagcctgtggctgttaaactcctggatttagaaggcttgcaaggacatagggaatggctgaccgaagtgatctttcttgcagaattgaggcatccacatcttgtgaagttgattggatattgttgcgaggaagaacataggttactggtgtatgaatacatgcctcgaggcagcttggagaatcagctattta

SEQ ID NO: 46571 - DNA, 556 bp, Gossypium hirsutum
  Clone ID: LIB3585-059-P1-K1-G10
gaacgttcaccggcaaatactggtggctcacagtaggttttttgctgtgaggttatcggatcgatggacaaagcagcagaggaatggatcaactgggccgtacattgtggaaatatcagactgtgatgacgttgaggtttatatagagaccttgaggttgatgtattgcaaaaatttgaggaagaagctaatgagagaagacgtttctaaggttcttggaattttgaaggtttcagcggcaattggatttgatgctggggttttgtcttgtttggagtatttggaagccgctccttgggctgaggatgaagaggagaaagtggcttctttattggcggagctccaccttgaaaacgttggagccggggaggttttgaagagggtttccgttgaagttgctaatggaactgatgagggtggtgataatgaagaagtgcttctcaagcttttgcatgtggttcttgaaggcaaagatgagaaagcaaggcgtgaaatgaaaggattggtctttaagatgcttcgcgagaattaatctacaacgatctccggaaagagt

SEQ ID NO: 46572 - DNA, 168 bp, Gossypium hirsutum
  Clone ID: LIB3585-059-P1-K1-H11
tgcctgtctcttgtggtgtgatatggcaggtcttgtggtggttgatctgttgattcaatcaaatgagcttctgcagattaggtgcacaaacatctaatcctgcagagctggattaaaaagaacattgctatatatgtcatgtcatgcatagttttgtcggtgttgctt

SEQ ID NO: 46573 - DNA, 435 bp, Gossypium hirsutum
  Clone ID: LIB3584-017-P1-K1-A9
cccacgcgtccgattttttgctactttaagaatctttaatttttcattttttacttaaaactgtacttgtccaatattagctagtgtctgctcaccttatagtttcccttaatcaacttagtaagatttatatcattttaacttaattcccactatgaagattatagtatgctatcaaaatgatagagagcttatgttaccacagctttaacaaattgacacgtttcaatggtgatataaatggataattgcaagatgtggtggggcattttacgcctataaaagctctattgcacattgacttgagtagcctacatttgggctgaagtggtgaagtcctctgaaatgtttgcaacccttgctttgagaatagggaaagagcatgaatcagtgtatttcattgtgtccaaacaaggacaatgtgaacttactaca

SEQ ID NO: 46574 - DNA, 463 bp, Gossypium hirsutum
  unsure (1)..(463): unsure at all n locations
  Clone ID: LIB3584-017-P1-K1-B8
attaactgcaatcaacttggagaacaatgatttgtcggggataatccctaattctttgggctgactacgagactctggaatcattgcgcttaaggaacacaagtttgtacggtgaaataccacagtccctagaaaattgtactgcattgaaacttcaggatttgggagacaacaaattgactggaatcattccaccatggataggagaaagacttaatgggttgaatgttcttcgtctaagatcaaatgaatttcatggaaacataccttcaactctatgtcgccaacagcttcttcaagtattggatctttctctcaacaacatatcaggagacattccttcgtgcctcaataatttgacagccatggctcacttgggaagttctatggcacttatccctttagcggggataacgtataccgtcgattntattggtgctatagggatcaactttcatgagca

SEQ ID NO: 46575 - DNA, 425 bp, Gossypium hirsutum
  Clone ID: LIB3584-017-P1-K1-C10
cggacgcgtgggcttttatttttaggggcaaatcatctttgaaaaagaacaatgaataggggacttgaagtcctttcaccagcttcttatttacagacatcaaattggttgttccaagagagtaaaggtactaaatggacaccacaagagaacaagtgttttgaaaatgctttagctttgtatgataaagacacacctgatagatggtttaaggtagctgccatgattcctggtaaaacagttggtgatgttatcaaacaatacagggaattagaagaagatgttagtgatatagaagctggtttgatcccaatccctggttatagtagtgattcttttacgttggaatgggttaatgatggtcaagtgtttgatgggtttagaaactatcattatacacctggtggtaaaagagggactgggac

SEQ ID NO: 46576 - DNA, 492 bp, Gossypium hirsutum
  Clone ID: LIB3584-017-P1-K1-C7
atttcgtatgaatgtctaatatgaatgtcgcgttaaaaggagattgttgcttacaccgtctctccattgctagttgttttattttctctttcttgatcaatgtcatattgatgtaaaacaaatccttaatctaaacgtgatagattttcttgcctcatgttgtttctctctcaataaaacttcacaagatattgattaaaatttttaaacctcattttaatggtaaaatatcatggtgtcatggagttgcaaatgctggtcctaatccattgttcaaagttcataaagttacagaatgactgagagtagtccacaaagcagagagagcatatctgcattgttgattcataatcagaaaactctgctttgtattgatatatttattattaattcattgttctatcaaagaatattcattcatgctaaagagaagagaaacaaaaggttgcctgacgttttcatatatgtgttaactagctaaggcataaccaa

SEQ ID NO: 46577 - DNA, 377 bp, Gossypium hirsutum
  Clone ID: LIB3584-017-P1-K1-C9
gtcgcccacgctcgccacctcgcacgcgtcggtttggaaggaattggaggaaaggacgttttccatgaactttttgaaccaaggcctggaggggaaggaccttaatttctattggtccgggataaggatatttataagtcaccacaaagaaagcttcaaggtctacaggactgatgtggagcaattacaggaagcttattctggaagggaaatcacaaaatctgatcatataatttatggggcaccaagatgatgaacaagcaagtttttagctgcctaactatgcgactacagagagtcggagcaaataagtttggagcgacagatggataacgtaaaggaaaatactcatttagttgatcctaatcactcatgtg

SEQ ID NO: 46578 - DNA, 443 bp, Gossypium hirsutum
  Clone ID: LIB3584-017-P1-K1-D3
gcgtccggtaatgggatcgatgcgtttaggaaaatagttaaaacggatggcccaaaggggctgtatagaggctgtgggatatcgattttaacctatgctccatcgaatgcagtgtggtgggcatcttattcggttgctcagaggctcgtttggggaggcattgcatgctacatccggaagaaagacgatgagagcaatgacaatggaaatattatcagtagtagtaacaataataatacgattaggccagattcgaggacggtaatggcggttcagggagtgagtgcagccatggctggaggggtataagctttgattacaatgccactggatacgattaagaccaggctgcaagttttggatggggaagagaatgggagccgtggaccaacgattgggcaaactgttcggaatttgattaaagaaggtgggtggttggcttg

SEQ ID NO: 46579 - DNA, 373 bp, Gossypium hirsutum
  Clone ID: LIB3584-017-P1-K1-D4
gcacttgctataaggagcctgtcagccatctctggtggtcataaatcaattttttctaagaaagaaaatgcccaggcagctttgcttgttgcaagccagaaaactctacctgtaatggtggctgttgtgcagcagcttggtagtgcattcggtgaatctggtttgctggttctaccctgtgttgctgcacatttaattcagattgtcttggattccttcctggctaacttctggcttcgaaaagagctctcatcaaatactgccaaagtagcctgagtggtaacacccttctcgatccttggtagacacaattttattatgctgtcaaacagattaaccgttgacaaataatttaatcatcttgaataatttt

SEQ ID NO: 46580 - DNA, 509 bp, Gossypium hirsutum
  Clone ID: LIB3584-017-P1-K1-D5
taagatcggaaactccatgaactatgatacattagaggaaactataatgaacgtacaaaataatgtcgtgaaacgcgaatcgtattcctttttccattgttgtgatttccgatagagaatggcttcttggagatccatctagagcagacaagcaatctgcatactcacttcttcttgcggagaatatctgcaataaacttggagtgacagtgcaaaatctggttgcagagatagtcgactcgaaattaggcaaacaaattacgagaatcaagccatccctgacttatattgccgcggaggaagtgatgagtctcgtaacagctcaagtggccaagcatagtgaactaaatgaggtctggaaagacattttgaatgctgaaagtgatgaaatatatgtgaaggatattggcctttacatgaaagaaggtgagaacccttcgttctctgagctaaccgagagagcatgctggcgtcaaagagttgcaatcggatatgtgaaagacaatcat

SEQ ID NO: 46581 - DNA, 504 bp, Gossypium hirsutum
  Clone ID: LIB3584-017-P1-K1-D6
cccacgcgtccgggcagtatgccaagtgtttcaagtggttcagctgatgaaaaacctgcttctgggatgatccttaatgttgaacccggtgtagcagctgctgcctttgcagcagttaaccaaaacaatgaatctggaaacatgattgatcctgagtttctcgttaaaattctcagcaatcccagattgattgagaaattagttactgattatggagtggcttcaggtgctcaaaacttacctgaatcaacatcccctctggcaacttctcccaatccacccccacctgtaaatctctccaacccatttcctgcccacatcaatagaacagaaaatggtactgcatccttatcagctacttctagtggagcattttttgctcagcctaatggggttggagttggaccgtcaaataaacaaggtcttacacccaatccccatccaatatctgtttcaccagcttgtgggcttccccagaaaaaggatgtaaactattacaagaac

SEQ ID NO: 46582 - DNA, 493 bp, Gossypium hirsutum
  Clone ID: LIB3584-017-P1-K1-E1
gggagggcgagtgcttcgtgttcgacaagcgagttgctgtcgagcatggttttatacaaggaaatttcaagctgtgctatgggtgtaagcagcctgttagtgatgcagacatggaagcaccagagtgggagtatggggtttcatgtccctactgttactcaacgaagtctgaagaagagaaagaaagggcaagggcacgacagagacagttccgaggcctggggaattatcggcggtcctgataagggtcggagaccagcagccaaggcagatagtataaagagtgaccaaatccaaaccaatgattcagcttcagcttagacttagctggtcgaaaagaattaactataagaggatgaactacttccttgatttattcgttagtttgtggttgattggaagattatgtcccgcatttttgtatgaaatgaatgcacataagttttggaggggttgtaaggttgaattcatcttcaatttaatttttatcttt

SEQ ID NO: 46583 - DNA, 439 bp, Gossypium hirsutum
  Clone ID: LIB3584-017-P1-K1-E8
caaggagatgaccagggagtcttgttagtatagttcttaaacctggactagccatagtgatggactgctgttctgaagtccctatctggaaggggtctatacctggtcaaagtttttgataaagatctattgcaaaccagtagactcctttgctaaattgcgtcaagtgaagtcacatgagtgctttggtcggaattcaacctatgtgtattattgggccataagtaccggaaagtctctgatggccatagagaaaatggttgatggtcgtctgcgtaaatactttgaagaggttggttttatggagcaaaaatatttcttaaatgattctttaaatatcaaaacaattttggataatgtatcaaaagaagggggctcaacaatgaaaattggcaactttttcaaaatggaagttggagaaagaattcaaagccaaaaa

SEQ ID NO: 46584 - DNA, 507 bp, Gossypium hirsutum
  Clone ID: LIB3584-017-P1-K1-F11
gtctgaggttaagaaacataactctgctgattccgcttggatcgtcgtccacggccatatcggggactgcactcggttccttaaggatcatcctggtggcgctgacagtattttgatcaatgctggaaccgattgtactgaagaatttgatgctatccactctgataaagccaagaaactgcttgaagattatcgaatcggtgagttgaccacttcgggttatgcgtccgactcgtcgacctcatcccctaattcttccgtgcatggggcatccaacgtaatgagctttttagctcctattaaggaagctgtgcctacaaaacctgtagctctggttccacgtgagaaaatcccatgcaaactcatccaaaaaacatccatctcccatgacgtccgtgtgttcagatttgcgttgccatccgaagatcaagtgctgggattacccgttggaaagcacatatttttatgtgccaccattgatgataagctttgcatgaaaacctacac

SEQ ID NO: 46585 - DNA, 396 bp, Gossypium hirsutum
  Clone ID: LIB3584-017-P1-K1-F2
gcgtccgggaagcataggaaagtggctacggtgcaatcatggattaccttataacaatgatgtcccaaccagctggggcggagcatgcaaacctcagcgccaaaggctatcgctatttaatatacagtggcgaccatgacatggtggtgccgcacttggcaactcaagcatggataagatttctgaactatcaaattatagatgatcgccgaccatggatggtgcaaagccaagttgcaggatatacaaggacctattctaacaggatgaccattgctacagtcaaaggaggagggcatacggctccggagtacaagcctgcagaatgttttgcaatggttacaaagtggatatctggacagcctttgggattgtgaacaccatcatcatcataat

SEQ ID NO: 46586 - DNA, 503 bp, Gossypium hirsutum
  Clone ID: LIB3584-017-P1-K1-G12
cagatatttcagttggcacatgcaatataatagcagaagcatctcatgaagaggtggtggagaattcgcaaaatcagtatgaggctgtatcaagtgggcttgaactaatggatgaatgcagtcgcatgaatttcaacaaaaaatctttttccatggggaaatttagaaaccaggtggccactgatttagtacaagaatcatggaaaaaacttcgtaacagtcatgctgatctaaaacagtatgttgactcagagccaaaagatgctctgaatatcttaaagcttacttctagaatgagtgacctaatttcacaagctgaccaattactttccaagtgccagatgcaagattctttggagatgttaatgatcccttccgagaattcagatgcatttgtctggcgtgacaagcagctgcagatggcaaacacaatttcacaacatggattttgcttgtatgctaaagaaattgatactttaagattgaaaatgggttttgagcat

SEQ ID NO: 46587 - DNA, 549 bp, Gossypium hirsutum
  unsure (1)..(549): unsure at all n locations
  Clone ID: LIB3584-017-P1-K1-H12
ctaaaggaatctgtgtcttcgtttctcagcttccttcccttcctcccctcgctctgaaagatagccaagagaaaagatggaaatgggtaagaataaatctgagaaattctcaatggattttgtgatggctggaatggctgctataatgtcaaagagcgcagcagcccccattgaaagagtgaagctattgttgcaaaatcaaggggagatgataaaaaggggaagccttcagaaaccttataatggtgttggtgattgctttaaaagggttttgaaggatgaaggtcttttctctttctggaggggtaaccaagccaatgtcatcagatattttcctactcaggctttcaactntgcatttaaaggttacttcaaaagcatttttgggcgctcgaaagagaaggatggttatgtgatgtggtttgctggaaatgtggcttcagggagtgctgctggagcaaccacatccttgtttttgtatcaattggattatgcgcgtactagactnggtactgatagtcaacgccagttcaaagggctactagatgt

SEQ ID NO: 46588 - DNA, 146 bp, Gossypium hirsutum
  Clone ID: LIB3584-017-P1-K1-H4
tcgacaaaatctaaagatcaaagactcaaagacatataaagcagtcaaggtccacgaaagagagcggcgggtgtacttggctaggcttccaacacaagctataaaatacgatgagaaaagtgaagccaagacaagtggagctaagt

SEQ ID NO: 46589 - DNA, 529 bp, Gossypium hirsutum
  Clone ID: LIB3584-017-P1-K1-H5
cccacgcgtccgcccacgcgtccgatgattttcatttttgttttctcttcaataatgattgattgctaatgtaacaatgttttttttttaccaggatgctgtctaacaattgcataaccaagccatgtttttaagattgattgcaaatgactgatattgtgaaataacacttacataagataaattagtaactctggctttggtatgcaggatgaactgctttggttggaattgcttgataattaatgttgctcatttttataaattggaaaataatttcaaaccgttggtatttaaaataaaggctatatttttataaaagtgacaagtctctttttattagaatttctgaaataatacgatgagatggattcacatttttcttccaggaatagacacgaacataatattactggttcatttggtccctcttctacgaacccccctccccaatgaactcaagattcactgtgttatgtccttgcttctgattccatcttttggatattttctggaaaatgtggttttg

SEQ ID NO: 46590 - DNA, 477 bp, Gossypium hirsutum
  Clone ID: LIB3584-017-P1-K1-H7
cccacgcgtccgcccacgcgtccgcccacgcgtccgatcaagattcctgttgtgaagatcaatgaaaaccaacatcttgaaaacaaagtgctctctgatatcccatttcagaaaagtgtcagctcgagttgcttaaggtcaatggagtggtcgcaaggagctgtaatcaagcctaactttctggattttcctggaatggattttggttctgtttatggaatgaggagagcttttagtgaaggagatatacagactcttggcaatgggaatgggagcgtcatctgttctcctcttgagcgaccaataatgatcagctgctgttctactgaagatcgaaaggaaaagctttccagatacaggaaatagaagaccaaaaagaactttggaaggaaaaataagtacgcttgcaggaaggctcttgctgacagtcaaccaaagatccgtggaaggtttgcaaagactgaagaatctgacaac

SEQ ID NO: 46591 - DNA, 402 bp, Gossypium hirsutum
  Clone ID: LIB3584-017-P1-K1-H8
cgcccacgctgccgttggaggtttcctttctcgtttttctattttgccaaacaggatgcagatcttcgttaagactctaaccggcaagacgatcactctcgaggtcgagaagctccatccgaccgacaacgtggaaggccaaaatcaaagatagggaaggaatccttcagaccagcagcgtctgatctttgtcaggaaacagatagaagacgcgcggaccttgctcgatacaaacatcagaagagtaactctcaactcgtcttcgttgcgcgtggatgcaattcggaaacctgctgcagaatacttgagtgaagtcgccacgcacgtaacagacagcagagatcccaaagacgtatttgcgaacatgaacgcgacttgcgctcacatcaaggcacttcactg

SEQ ID NO: 46592 - DNA, 528 bp, Gossypium hirsutum
  Clone ID: LIB3584-018-P1-K1-A4
aataacccggcccgacccacgcgtccgcccacgcgtccgcttttacctgtgaaaaatggaagagcaaatggaattttgtcagtcttttccgttttccttggtatataagtttttttttatacgttgaattctatgggtgagtttggggggagggttcggatttttattttaattgaatagctttgaataggatattcccaattgcaagttcatgaatttgtataagaattaagaaggaaacaaaacgagtttcaatgttttcatgattggtttatgttaaaaatctctgctttgtgatttttgattgatctgttctgccaatggagcaaatcgctttattgttaactagataccgacataccgtatactcgttatgtttactgtttgtaatgttcaacattattccccatattgtctggccctatgtttgatcaaagtaagttgtcttttgtgtgaacaattatttttacatctttccctctctggaccaagaacgggttataattgggctttaggcgttttaaaaat

SEQ ID NO: 46593 - DNA, 105 bp, Gossypium hirsutum
  Clone ID: LIB3584-018-P1-K1-A9
aatttgtgggcagacgagcagtgggaagtcaacagctgctaaatgtctagctgaagctctgaatgaatcatagtgttaacagactgataggatcatagatgagac

SEQ ID NO: 46594 - DNA, 490 bp, Gossypium hirsutum
  Clone ID: LIB3584-018-P1-K1-B12
cccacgcgtccgcccacgcgtccgggttcaacaagcagtgcaatggcagagaaggtggcttggtactgcgcattgttcatggcagtgatgctggtgatgagctgctgccaagaaccgaatgaaaggggtgaggagggaatgatgcgggtggtgcaccagtccaagaagccatgcgatgaaatatacgtggttcgggaaggggagactttgcacaccatcagtgaaaaatgtggggatcctttcattgttgaacacaatcctcacatacatgacccggatgatgttttccctggccttgtcatcaagattactcctttcctttccacaacaggtagaccgtagtagactgcttctttcttaccactttcaatcctgctttgctcatttcccttgtttaatttacatcccgcttcaaagtaaaatatatgccgggggaaatgtgttgtattgagagggcaagtgattggtataattagtaacacttcctttt

SEQ ID NO: 46595 - DNA, 446 bp, Gossypium hirsutum
  Clone ID: LIB3584-018-P1-K1-B9
cccacgcgtccgcgagcgtccggctgattactagccgtatagacagatcacctcgaatgtgaatgatagatttccggatgcaacccctgaagaactctctgcaagtgatgcaacatgtattatatgtcgagaagagatgaccttaacaaagaagttaatgtgtggacatctttttcacgttcactgccttctatcatggctggagaggcagcatacctgtccaacctgcagagcactctgtgtaccacctgaaaacggagcaggttcatctggagggcaacatggaacttggtcagacgctcctcgacaagggttcagcacgagttcagctacacaaggtcctggtgttgggatggccactgataatttgacccctcatcaggcgaggctgcaagctgctgctgctgcagcatcaatatatgagaaatcctacgtctatacttctg

SEQ ID NO: 46596 - DNA, 192 bp, Gossypium hirsutum
  Clone ID: LIB3584-018-P1-K1-C8
gcttaaccttcaattgaagaacttcgtttgtctcatatctactctagttttcactgactggtgttcaaacatagaagcattttatccacaacactgcatttgatgcctatgtgtcttggaatgctatcagctggtttagatctattacaaactttccagacttcctcaagggagtactaactcataatgatg

SEQ ID NO: 46597 - DNA, 508 bp, Gossypium hirsutum
  Clone ID: LIB3584-018-P1-K1-D5
cccacgcgtccgcccacgcgtccgcaaagaagttgcatggataactccaaaggcacgcctggtcggatgatttcttcttctgtgttgtctgcgaacactagaagccctattgaaaatgagtctaaatacaagagtatagtgggtgcattatagtaaattgtgatcactagtctcgagattacgtttgcaataaacatggtctgccagtttatgcacaagccccttgatcatcatttcaaagctactgaatgtattttacgctttttacaagccaaagttgatcatggaatttgtttcactgctgcccctagactttctcttaagggttactcagatgccagctagggtgatgatcctaatgataggcgatccacatcaggtttttgtatttttcttagagggaacccggtctcatggggttctaagaaacaacaaggagccttgctcatgctacagtcgaggtcacctggttggaatcattattgggagaattacaaagtcacgttgc

SEQ ID NO: 46598 - DNA, 502 bp, Gossypium hirsutum
  Clone ID: LIB3584-018-P1-K1-D8
atcatattcatctttctcttatcaaagcaaagcaaaaaaaacacccaaaaaccttggtccgatggcaattgaatcccaacacatgaatcaaaatttgcctcctcaattaatcatgaatagatatttcatgaaaacaaatgaaggaatgtacaaagataatttgatggattcttgtgttcctttgcaacaagcttcatttgcaaagctttttgatccaattttagcctcaaattcaattgatgatatgggaatgaggagaagacccaaagattcattcatcaataatgcctttggttcatcaatggatcacatccaactacatcaacttgatggattcattgctcaacatgctgaaaaagtgagatttgaagttgaagaacaaagggagaatcaatggagaacattgatcacattaatccaagaaagggttttaaagcaattaaaggcaaaagatgaagagattcaaagaatggggaaaataaattgggttcttcaacaaagg

SEQ ID NO: 46599 - DNA, 514 bp, Gossypium hirsutum
  Clone ID: LIB3584-018-P1-K1-F6
gtggagtccctgccgtgatcggagtccttgcttccattaggcttccttatccttcaagagcttgcgacatggcccattgctctcgttgcctcatcccttgggacaactatgatggaatatatttaattgaagtagataggatcctacgtcctggtgggtattggattctatcagggccaccaatcaactgggaaaatcattggaaaggttggaatagaacggctgatgatttgaaagcagaacagtctcgaatcgagactgtggctaaatccctgtgctggaaaaaaattgtacaaaagggtgatattgccatttggcaaaaacccaccaatcatatccattgcaaagcaaccaggaaggttttcaagcggccaaggttttgccaaactcagaaccctgacatggcctggtatacaaaattggagaaatgtttaacaccattgcctcaagtatccgaaataaaggaaattgcaggtgggcaattaccaaaatggccacagaggctgaatgcaat

SEQ ID NO: 46600 - DNA, 196 bp, Gossypium hirsutum
  Clone ID: LIB3584-018-P1-K1-G4
tttttttcacacaaattagaccttcccatacagaatgaacacacgaacctgggagccaatatgactcaattgaatttcaaacacctgaaagaaaacaaagaggtaaaagatatgttggatattgaagataataaatattataaaaagaaaaaggaaaatctacgtatacataactatgttcccctaagtaggccat

SEQ ID NO: 46601 - DNA, 519 bp, Gossypium hirsutum
  unsure (1)..(519): unsure at all n locations
  Clone ID: LIB3584-018-P1-K1-H7
ctgacattcgttccctgaaaatggatgattttaaatatgcacatgagcagatagctggaggtcaccgaagcagcagttacactcatcagactatcacatggaatgggagcaattatgcaaattatactactcagcaattatactaccattgttgcaggagtttttgggctgcacaggggcttggttgcacaatagacctacgatgctacaaccaacctcgagagtatgtcgtgacagaggagggctgtgtcatgacatcgaggccagtttcactccagaacttgtttttggcttctatcttcgatgttgagacattagtgtcttggtgttacgatgtaggcatcagttttggcccgaataagcatctttagctccagatttgacctacaagaccatgtaaccttatttagatatataaaatgtaattaaaaaaactactagaaagcatatatttctactttaagtatgaaaaccttaatatattctaagatgctntcatttaactatcaaacaagctaa

SEQ ID NO: 46602 - DNA, 382 bp, Gossypium hirsutum
  Clone ID: LIB3584-019-P1-K1-B3
gatcggtgcacatgtggcatggagatgaagataagatagtgccggttatactgcaacgctgcggggctcaacaactcccatggattcactaccacgaactaccaggtgctggacatatgtttccacacgctccagggatgtcggataatatagtgaaggttttggtcggagagtagtagtctgcatttataggtggaatttccctttattccaaccaacattgatactgcaaacctctctatatggattgaattcgacaattatacaagagaaatgcgaaggggttgtttagttttaaggtaatgtttgtttgacagaatattttgtagagaaaaatttcagtattttaccgtgtttggttcaggaaaatattttactcctc

SEQ ID NO: 46603 - DNA, 469 bp, Gossypium hirsutum
  Clone ID: LIB3584-019-P1-K1-B5
cccacgcgtccgcagatcggaaatgctcaagttaacaccttatctcttgactgaactcatctggaggctataggggtaccctatatgcgtagctcgaatgccactacgatgaacccacaatttgataggcctctcatggaggagcatgtgcaagcaggcaattgcctgttgggctcaaaattaaggaacaatgatcaatttgacctcataagctcttgaaggacatcatgtggagttcgatactaaagtgaaggtgacattatgggcaatgatgatgctgctgatctaatcctaagcagaggagaaactgcactttgactccatattgcaagtgattgcaaaaatcgcaagatattcatgatgctgcacaagcaccacagttgatcacaacaacactcgctcctgcaatacccaaagccataaaaaatgcttgcttgaattcttctaacgttgattactacgaaatcaa

SEQ ID NO: 46604 - DNA, 505 bp, Gossypium hirsutum
  Clone ID: LIB3584-019-P1-K1-C3
ctcacgcgtgcgctcaggactggttgattgattggttgctttttatcaggacttgattcaagtgatgttacattatcatagtcaggatcacacccttttgatccatgcacattccttgaaacattgacgacccttgaactcaggacttgttcttggattgaatgcttattttaattaagattgacttcaagttatgctacattattctatctactgtcctgtttactcaattgagatgaccatttttgttccatgtcactttcctcataacaatagacattttctcaacttaggatctgtccttggataggttgcttacaatatgaaatacattattctatttacggttaggtgtactttactctgcatatcacttgaactctactggcttttctgaagatttctctcaaaatctaacgtgacgtctaattgaattggataattcttatttgaactattacgagtatcatagcttcttagatagcttcttaacttaatttatgca

SEQ ID NO: 46605 - DNA, 431 bp, Gossypium hirsutum
  Clone ID: LIB3584-019-P1-K1-C5
ctcacgcgtattgaaaacgttagaccacccaacgaagtagcagagccacaaacgactctggcgagatacgaaacacgaaatggctgtcacattcaacgacctgagatctgctgctggctagaagaacctggatgagtatttaattactcgcaggtacatgtgtggataccaagcttcaaaggatgatattaccgtatactcacttgtatatggtgcaccatcggatatctatgtcaaagattttagatggtgcaaacacattgatgcccttgtgagaatcttatgtgttactaaagaatgctgtgatgcgactgctgacggatttgctcacagctgaggctgatgccactactaacaatgctagatacaaggctagcaatagctgaagatgacagacaaccatgatgcagatctggtctcagaagagactg

SEQ ID NO: 46606 - DNA, 408 bp, Gossypium hirsutum
  Clone ID: LIB3584-019-P1-K1-D10
cggacacatgggtcgcccactctttctttcattcatgcttacacacgtacgcaaggggagtgcattaaaaattaatatttaacctaaattcaactcattgtacattatcaaatatctcatgttaccctaataccccttttttacttatataaatttaaattgattcatttcgattatactttatcactctaatagaaaataaacgatttactatagctatatttatatcatttatattcatatatatatttatatatgcattctgaataacaattacattctatattagataatcataatcgatgtacaaatttatcacttatcaatattttatatttttttccatttttactataaattatttatttacctctttaatatgctttacttttacaaatttaaaactag

SEQ ID NO: 46607 - DNA, 520 bp, Gossypium hirsutum
  Clone ID: LIB3584-019-P1-K1-D6
cggacgcgtggggcaaattgtcacatgctacctgatagtaatatttgtgctatagaggtggcagtagctgatatgatttgaacaatcaaaatctgacttaccaagaagttagaccagttgtttcaaacccaggattcccaagttgccataacgaaacacaaagaactgtttaccttctgcaatatgtcctttcacatatgtggccttggaactttttcccctctcttctgctttccttttccttcccttccctttcccttcttttcttactgatccatgcttcaaattctgaaaaaaatacggctaggaatagacttggaccacctggtaattcatgttggcaagtcgtgtttcgtgttgcgtctttctccatccttgtaggatcctatttttggcttcagaaaaatatttattttgaattattattcttgaacttaatatggatactgactaggggtgcttttgctctaatagtgttcgatttcaaccaaggctataatgtgggaagttgtgaggtttt

SEQ ID NO: 46608 - DNA, 481 bp, Gossypium hirsutum
  Clone ID: LIB3584-019-P1-K1-E4
cgctcacaacattacacatagggaataaacaagtactcctgcctgttccatatggctaacacgtcgaacgtgcgtgagagcgatatatgctgcataaacatctctgtatcacaaaggcgtggatagattagagacgctgctagagaggcagtgctgcacacaggactcatgcaacaactttcagaatctgttcgtttggacatagattgggtctatatgcgctcctatagttcttatatgggaacataacatgaatctgtctaatacactcaccacacaaggaagaaactgtatgtcaataacgactaccatatgaacatcggattcttgcgacgctctaatctgaggatgtcttacaaagaatggcgaataggcttagatacaaacgatccacttgaacataaaacctctattgccaaaatgtttaactgtgtataactgaaatgaaactgtcattatacccatcatctatatcattgac

SEQ ID NO: 46609 - DNA, 335 bp, Gossypium hirsutum
  Clone ID: LIB3584-019-P1-K1-E7
cggacgcgtggggaagcaggcaacaccatgcctggtgagaatgcccccagaacatggagagcagctcaggatgcttctaacatcagggaagtaaatggtgaacgtaagtcccaagacgccctgaaatctgataagggagattctaggctaatcaaagacgaggaaagggaaaccggtaaagtcagcttgcatgtgtataaaatgtactgcactgaaggttttggttggtggggtgtagcagctgcgttattattatctctgttatggcaagcttctcttatggccagtgattattggctgtcatatgaaacttcagctgaacgtgctcttccgtt

SEQ ID NO: 46610 - DNA, 521 bp, Gossypium hirsutum
  unsure (1)..(521): unsure at all n locations
  Clone ID: LIB3584-019-P1-K1-F2
cgatggttacattgctactgctctganctaatgaggattatataccataaagctgtggggatgccagcgttgacattcaagttcaacaacatggatccactttccggacaagaaatggatgatgccgcgcagtatctcgtctgtttgtggcgcggcggtcttctaccctagagctgcaaattcaaccgggaatatcaaaattctggagatggtttagtttggcctactttcttggatcatcatccatggtgagcaagaacacaaacaaaatcatgccggcacaaaaactttgatcaaataatacaggtatcagacattggagagtataaaaagagtatagcatttgagcaaaaaacaaaaacatttttggctgtagatgataacagatgcaattaacatgaagattgagaatgacttaatcaaatatgtgtagataaaactcaaaaaggaaaacaaaaagacagcaaatgaatccctttgtatattttgaatgcttaatatagttatagtcattttttagc

SEQ ID NO: 46611 - DNA, 461 bp, Gossypium hirsutum
  Clone ID: LIB3584-019-P1-K1-F4
cccacgcgtccgcccacgcgtccgcccacgctttctttagaacctgtagtgccatattgtgtatgaggatcagtcacatttcaactaaaaaaatggatacttcgaagtttacacattgccctgagcacgattcgaactctctaaaaatatacttaagcaccatgatccccttatcagaaacctcaccaaatacaatacaatcatcttcaaacatatggtggatgatgggatgggaagatctacaaaccttagcccctagaattctcttatctcgactcgctaatcttatcaatgcagaaaagccctctccatagaacaaaaacaaataaagacttacatgatccccttgccttagccctctcgaaggattaaagctcgaaccttcttcaccattatttaaaatggaatattgaacccttcaccattatttaaaatgcaatattgaaccgacctaatacatc

SEQ ID NO: 46612 - DNA, 479 bp, Gossypium hirsutum
  Clone ID: LIB3584-019-P1-K1-F8
aacacacttctgtttctatatcgatggcgagctcactaatttctgtaaaaatggagctgtgggagcctgacagattaatccgattcaagcacataaactaagccaagttagctttacaagacaaacgctacaagatgatatatcaattaatgcaaaagctcttaatttactctactcctgccttccatctcactatttaaaaacagaactctatgtattaagctaataaaaacaaaaaacggatctctacgtgtagaggtataagatcttactcttgcatccatcagaaagaataaggtcttgtataacgaggaacatgttgagctcattaaggagtatagatcaaaggttgaatttgaaaagcccgatgtttgcgctagtatatcgactttgatggactcgaatctgatcccatctgctgattagagagaatgcaacgacttatatttgtagatgaaaggtgattatcatcaatattt

SEQ ID NO: 46613 - DNA, 485 bp, Gossypium hirsutum
  Clone ID: LIB3584-019-P1-K1-G8
aaccaatttaagcattcttatgtcccggttttgttgaatgtgtcaaacatgattttatcgagggcaacattattagtccctaaatcatagatgttctacataattgagccctaaattagatggttggataagggattttgatatatgaaatggcataaaattcatattttatgaactcaaaacatctttttcgtttttctgatatggaaccatgcaggaacatccctggaattgcaacaaagaatgatagactaatatcacggatgatgatctttcttgctgtctcaacaagcacagtggcagtgactagtgacatttatagcattttttatgttgatgaaggaattacatcataacaagatgattttacaggtctatacttatccggtttctgctgtgcattgacatagtcggtaactcaacctaacgaacggaaacaatccgagtttctttcattcagtttatcctcgaaaactgacatgatg

SEQ ID NO: 46614 - DNA, 400 bp, Gossypium hirsutum
  Clone ID: LIB3584-019-P1-K1-H3
cagattcagaataagcgagccctccggagactgcacaaagtgcggtgaagcaggtaacgttccatccaaaaaatttgttaactcgtatccttcgatgatcaaccgaacatgctgctgccattaaacaaaagtaccttcatccaacttgacagtctcatggcgaggaaatgattagacgagcctagcaccagtgaatgtcggacgtccatgtttgacggaggcagaatcagcggaagctgtggtggtcatgcaagcagactaagaacaggtctccagcacctcaggcgactgataccatgttaacacctacggtgagttgctaatgtattgagtaatgaaagaattctttgtattaagtcttgtatatcaagttcgtacattataacaatggtatttatag

SEQ ID NO: 46615 - DNA, 292 bp, Gossypium hirsutum
  Clone ID: LIB3584-019-P1-K1-H4
ccgacgcgtgcgtgcatgtgcaagttaaggagcttctgctaagggcaaaggagatccgagacgagcacataagagctctatggcggcgatatgatcacctgagctatcattgtaacttatcaaaccatgcttactgcttaggaatggaactcgagacgagacaggctctagactgactcttcgtgccatgaagaccagtgcttgaacatgcataagaaaacaggcttgcaagaactgcttaatcaggatatctactcgtgcttgagagagatcatctagcgaactgagagga

SEQ ID NO: 46616 - DNA, 473 bp, Gossypium hirsutum
  Clone ID: LIB3584-019-P1-K1-H5
cggacgcgtgggtgcttatgaagtctttggttcggtaacttatctgaagcgttaaggattactgcatataaagctctatcacatctgtgagaaggcgtcaactattatagtaggtcaacaaaacaagaatactgcttaagaaatgtattcaaaactcaactcactaggcaaagtgtctccctgcagagaagtggtgttacttaagatcatagaggaagtctcttgcaagaatcttcgatacgagagatccacgcatgcttcagatagatcagctagtgagctaaaaggcctcagccaagaccagaggggcccagcaccatacatggggcattggaaaagctcatacaccatacatgaatggcgtgactactagatgctatagagctgagtttaattgcagacgcagaaaaggttcaagtcagctgtgactactagtacagatttcgaaatgctgtacataaaatgcttatgac

SEQ ID NO: 46617 - DNA, 260 bp, Gossypium hirsutum
  unsure (1)..(260): unsure at all n locations
  Clone ID: LIB3584-019-P1-K1-H7
ccaaaccttgcccgggaacaagtaccacattgtgtaaactatgagtaggcgtagtggaaagatattttattacgagtaggcgcaacccactaagaccagagncaaacaagaagtggctggccagaggtcaaaatgcaaaagctgcagcatggacaanggatatgaatgcagaaggacgccatcgaaaacaaagttacatgagcaaaatatgacatggcacctacaagagcaaccaaaacaggatccccaccaagaaaagc

SEQ ID NO: 46618 - DNA, 504 bp, Gossypium hirsutum
  Clone ID: LIB3584-019-P1-K1-H8
gtgagttcattgagcagcttaaatcattctcactagagttgtatgaaatggaagccaaagctgattttgaaacccaaagtaagcaacctgaattgagatctgtctcagcttttgagaagcaaatgtccatgatctatacagatacagtgttcaagaaatttcaggctgagattttgggaattgtgtcttgtcacttacagaaggaaagcgaagatgaggacaatgttgtctttcgagttgatgattttgaagaacgtcaaaatttccttgtagcttggagcaaaagagaatttgatatatgttgtttatgccgttcatttgaatacaaaggattcctttgtaagcactccctccttgttctccaaatgtctggtgtttctgacattccatgccactatatattaaagcgttggacacaagaggtgaagattaggcaaactctaggtgaaaaatcaaacaggcttcattatcgtgtgcaacgtttcaatgatctgtgcaagcgag

SEQ ID NO: 46619 - DNA, 385 bp, Gossypium hirsutum
  unsure (1)..(385): unsure at all n locations
  Clone ID: LIB3584-022-P1-K1-B2
cccacgcgtccgataaaatattatcttctttatgcagactatttttgtttttcttttcatggttcttttagatatcttgatttctatcaagtctacttgatttttgcaacattttctaaatatattgagtttactatctttgggccacaatcacattgaggtttagattctctacagttctgatttatcggaggcttctatattatgggatagtttntggcattgccctatgataattcctctgctgaggtgatataggaagccatgaaagtcggatcctttttgggttgtcaggtcttgtcacttgtggaaatcaaaacttatttttttggctttttattttggtccctgttggggaaaaagaagtatttcaagttgcatggtg

SEQ ID NO: 46620 - DNA, 175 bp, Gossypium hirsutum
  Clone ID: LIB3584-022-P1-K1-B5
cgaaaaggaaggcaagccaacccgaatcctggcgtgaaaagagtttgttgggactatcttatggtggggtaaaaggtagccagaagaagaagaaattgcccttctgtgcatgcgtgcatcccccaactaacggagatggaggcaattgctcatcatcagcacatttacattttca

SEQ ID NO: 46621 - DNA, 337 bp, Gossypium hirsutum
  Clone ID: LIB3584-022-P1-K1-C10
cccacgcgtccgggcggctttgggggaagcaacgtatgacattgatgtcacgacacctggtttttagctacttttccggtaatcaccactcgaacagttaattttgtgccgtatttgattccggacattgactttggagcagtgattgtgggtcttatgttgttgaatttagtgtctaaatatgccggagagaatgcctctaagcttagttcagtagggaaaagaacacccgtgaggttgtaaaatgcgtggggattgcttcctcctactaaaactctgccatcacgaaacaatgcggctggggaatggtacaaacgtggaacggttgtcggatttt

SEQ ID NO: 46622 - DNA, 195 bp, Gossypium hirsutum
  Clone ID: LIB3584-022-P1-K1-D10
cccacgcgtccgctgaaagttgtaaaagaagtgcctatttgcaaccaaaaaaagaacgacggggatggccatattggcagattggagaggaacaacctatacccggtgatgatgtttattttctataggctatagtcaacgggtggttagaggttgagatgggtgtattcttcaattatgcaatgcttcattgat

SEQ ID NO: 46623 - DNA, 253 bp, Gossypium hirsutum
  Clone ID: LIB3584-022-P1-K1-D9
cccacgcgtccggttttaaatggaggcttataccaacaaaggaaaagtatgaagaaataagagaacatattcttgaaaatccttttgtttgtgaaacagctcgtgaatggaggcctgatatttcatgtgatgatccaacggatatctctcaagatggcagccgactttgggcaattgacaaaccaaacattgctcaaccttctccaggctggcaaaggcttttacgaataaaaagtgaaggaaggtccaaatt

SEQ ID NO: 46624 - DNA, 418 bp, Gossypium hirsutum
  Clone ID: LIB3584-022-P1-K1-F12
cccacgcgtccgatcatcctgatgtcaacaaagaggcaaatgcacaagagaaatttatgagggggaagcatgcatataatacattactaaactctgaatctcggagaagatacaaccctggaaaccgaacatctgatttttcatactcaggaactcaacaaagccaaagcccgaatacccaagaggaagaattctatggatttgaggacttctttagagaccttcaagaagaatttcagaattgggaagcaagtgcatcttcgcaagataagccgaaaagcttgtgggaggaattagcggctattggagaggaatttgttgaatctctggagaaagagctcaacatatctgatgatgaaattctaagaaaacatcagaaactgactttattaattccgagaaaacaggaagcattttt

SEQ ID NO: 46625 - DNA, 297 bp, Gossypium hirsutum
  Clone ID: LIB3584-022-P1-K1-H5
cccacgcgtccgcaatttctttgagtactgtcattttatcattatttagctatgcatcatgttccaagttaattgtttctttggcaggttgcaactagtgaaatatcttgcgtttctgatgtgaggccagatacttcagatttcatgcagttagtgtcacttttccaccgaaggaaggatgagtggtcctaacttttggtttcgtactagcaaaccagaaaacgctgcaagaactttagctagttcaacaaatgacataactacccaatgtttaggtcccaagaaatggcaggaaaa

SEQ ID NO: 46626 - DNA, 477 bp, Gossypium hirsutum
  Clone ID: LIB3584-024-P1-K1-A10
cccacgcgtccgcactgccatggcagtagttgagaatggttcgaatcaagatgcggctgcaacagcagtggcatcaaacgatcaggatcagtcaaagcaaaaccatgttgggtcaagaattgatccgagcttacaccagaacgatcaggggttatacgacaagatcggtgccccccatcatcgatccaacggtggggatttacagatgagcaatggtggtactggggatgacgttggggatagcttcaagagagacatgagagagttgcaagaactgttctctaagcttaaccccatggctgaagagttcgtgccccattcaattgctaaccacgaacttaatggagggtttttcattaacaactcttttctgcaaaacaacactaacatctcgaggaatggtcatgctaatggaaatggtgctggtaggcggaagaaaattttcaatcaaggtaaaaggagattaaacaataggac

SEQ ID NO: 46627 - DNA, 323 bp, Gossypium hirsutum
  unsure (1)..(323): unsure at all n locations
  Clone ID: LIB3584-024-P1-K1-A3
gccatgctaacccatatgggtgtgtcagcatgtantgggaacaagacacacccaaacacagcgtgtggtttatgccataggtgggctgactggggaaacactgacacagctaggctgtaaggtacggattgcgccattagactgcatatgaatagctataatgcaatcaatggagggatcttgaagagtacttcaagacatgagcagccgctcatgcacgctggtagacttagaccctgtcaacggcatgaagagtctgctaaagattaactctatgtgcccaaacgggaaaagcctaaatagcgcgagatacacgaaactga

SEQ ID NO: 46628 - DNA, 500 bp, Gossypium hirsutum
  Clone ID: LIB3584-024-P1-K1-A4
gaaaattattagatagtacctggatttgcattaacatccacatcttacttccatttgaacaatcttcgagcaatgttttaatcctttgtaaaactatgtacatttcttcaaagcacaaaagggttgaaggagaaaagaaaacagaagctgggttttttatcagctcgtcgaataatatcgagagaagcttggatttgttaatggcggaaaccgagttccgttttagaagacattgaaatggtttaaaagaagatatttcttgcgacaaagaaagaagggactttaccaagttgatatcggctagtttgggcgatacaaaagctccggccgaaggccgccgctttctcggcggaaaagcatgaggagaaacagccattgcaactttccagaagaaggtggtatagtagttgattacgaaaagaaaatgattttgggttttgcttaaaatttaatataaaacgataatcatggtgcaattagtgattaatttatatgatttt

SEQ ID NO: 46629 - DNA, 199 bp, Gossypium hirsutum
  Clone ID: LIB3584-024-P1-K1-A5
ggccgcccttttttttttttttttttaaaaccacataaatttacggcatgcatattgatatatgatgtcaccactctccatattgagaatttactacaggtaaaattcctaaccaatcaaacggaatcctcctattaatagaactccacaccccatctttatctgacaaatcgcaaatcctctctacttcttcttgttc

SEQ ID NO: 46630 - DNA, 377 bp, Gossypium hirsutum
  unsure (1)..(377): unsure at all n locations
  Clone ID: LIB3584-024-P1-K1-A8
gggacgcgcgggaggactaagatttactgnttatgaagagcactcttttgcaaaagagcattggctggaattatggcgagcagtgctttgaacaatattagcatcgattttctactattctagtgcctgagcgtgtaggaaagaatgcgctgcctcatatccagtctagtatgactggcggaacccaatgctggtgttgcgaagcctaggcaccgtactgctgtcacccttgctacaccacttgaagagtgtgataatgaaccaccaggcttgccaagcgggaggcataaagcgcgctggagacgagaagctgcatatacttaatgaccccgtgcctgagactgcctgagatgggggcagggcacatacacgtggag

SEQ ID NO: 46631 - DNA, 511 bp, Gossypium hirsutum
  Clone ID: LIB3584-024-P1-K1-C12
gaaccctaggtgttgtttattacctcagactgagagatgttttgggaagaaaccattttgttcgtttgttttcttttctggagcttatttacgtgctctaacacactggctgatggacacattcaaggctaaatgcaaagctctcttcagtagcagaggttgttttgggtgcttcattgcggtggatgatccatctaagcgtctaaagattcaaggccggaaagcaaagagatctagctgttctgaggatttctggaatagcagtgggtgcgagatggaacatagtggagtccagtcccagggaagcatttcatcaaccaacgcatctaatctcgatccttctggcagcacaagtcatccttctgaatttgaaaatcatggccttcttctttggaaccaaacaaggcaacaatggcttggaaataataagtccgacaaatgggtgcaacctcggcaacccacgataagttggaatacaatctacgagagtttacatgggaactttaagcca

SEQ ID NO: 46632 - DNA, 370 bp, Gossypium hirsutum
  Clone ID: LIB3584-024-P1-K1-C2
aaagaagaggtgaggcagttgccatgttcccacatgtttcacctcaagtgtgtggatcaatggctcaggattatatcttgctgtccactttgcaaacaagaactggagagatagaaacaaagaaagcaaataccagagctgaaaaagctcttctcttcttcattatatttttcccttccgttcactatggtgtgatttattttatttgtatacggtacattcacaaaggttacttagagtgagtttattgttttgtacagtggatgctcaccagtaaccaactttttttcctttttggctgaaatttttatactgtttctgggaatatgtatagcagaaagaatcaagaatgaagattttaattttggtt

SEQ ID NO: 46633 - DNA, 513 bp, Gossypium hirsutum
  Clone ID: LIB3584-024-P1-K1-C5
aaaagttttaatgggaattttcactttttgtttgaatcagtgatgaatatgacatgatcaaaataagaagaaaaagttcactaaaatgtcaaattttcagtcttattataagcttccaagccaatcgattagaattagattgtttatagatatataaataattttacgcaagttgatagaaactgacaaaattttataaattattcattgaagagaataattggagtttttccttttcttttttcattttccttttctgctcattatttcttaagtatttggatccttcctaagcacatggtgccaattcatagcatgtgaaagtgttgcgattcacgtaaataattccagttcctcacttaaactttatacaaccagcctggacatgttttattttttccccaaaagaaattattatttatagaattttgtaggaatttcattgcatgtaaattcatgaataaaactaagaggtatggtgtggtggttgttcaacttatcctttaatcatga

SEQ ID NO: 46634 - DNA, 510 bp, Gossypium hirsutum
  Clone ID: LIB3584-024-P1-K1-D8
cccacgcgtccgcccacgcgtccgtgcaaatggtagtgaactcattcgatctggtgatggggtttggggcagcagtgccatataccgcccttgctcagaaggcgatgtcaaggcatttcaggtgtttgaaagacgcgatatcagcacaactgaaacacagctgtgagatgctgggggagaaagatggagcagggagctcaggcataacgaaaggagagacgccgaggctgaggatgttagagcaaagcttaagacagcaaagagcgttcaaccaaatgggtatgatggagcaggaagcttggagaccccaaaggggcctgcctgaacgttcagtcaacattttgagagcctggcttttcgaacattttctccatccgtacccaagcgatgcagataagcatctgttggctcgacagactggtttatcgagaaatcaggtttcaaattggttcataaatgccagggttcggttgtggaaacccatggtggaagagatgtcccaaccaggaa

SEQ ID NO: 46635 - DNA, 381 bp, Gossypium hirsutum
  Clone ID: LIB3584-024-P1-K1-E12
cccacgcgtccgcccacgcgtccgcccacgcgtccgcccacgcgtccgaaaaaaaaaaaaaaaaaaaaaaaaaaaaaaaaaaaaaaaaaaaaaaaaaataataaaaaaaaaaaaaaaataataaaaaaaaaaaaaataagggggacttttttattagaaaaaaaaattatgtccgggggtttggaattttaaaggtttaattttagttcagtgtaaatgcaattcattgttttttgtttaacaaggttaaaattgggaaaaccctggtttaatcaaacttattggaattgcaatacatcccgttttcaaaaattggtgcattaaaaaaaagtttcgttttagtcgcttttacaaaaaggtaatgaccctgattggtttttt

SEQ ID NO: 46636 - DNA, 535 bp, Gossypium hirsutum
  Clone ID: LIB3584-024-P1-K1-E5
atcatatattgggagaagtccctaaccactctttaaagccgagggaaagaggtagcaatttgatttttttttcaatactaaggctccttttgtttggtggaaaatgttttccaacaaacattttccagattttccagcgtttgtttggtgaaaaatgaattcctaaaaggaaaacattttacaaacacgggtaaaatcacttccttggttctggaaaacgtcttaccgatttggaatcagtaagacattttccattcccttctctatactctcatcgtctcagcttcaaaaatttcttcgcagactttttttaaaaagaaagctatttgcaaggagcctcaagagtcaaagaattggtaagggcaacaaagacgggacctccaagcaattcaggtggacaaaatcgatggaacatgtttttcttgaaattctagcagaggaggcccagaaaggaaataagccttctaatactttcagagcagtttttattaatcgagttgtcgaagctatttctgaaagattccaagtccaatgc

SEQ ID NO: 46637 - DNA, 528 bp, Gossypium hirsutum
  Clone ID: LIB3584-024-P1-K1-E6
cccacgcgtccgcgatgatgatgatgattttgcttttgattttagtgaggccttggagaaaacatctctgtcagctgaagaactctttgatggagagaaaatcaagcccttgaagcctccacctcggttacaggtcgatgagtataaccagaaaagcccgctcttatcgtcccctcgctcgccaacatcaccgttatcccaaggcagaaagtttttccgggaagctttttcaccgaggaagaagaaggacagagaccctttcgcaaccgccattgaaaccagtcggaatcaaactgatgaccacagaagaggaagagaaagagttcaagaccacttatccaagaattcaagccgcagagcaacaagatcgctttctccttacagagtctccgagtatccatgggaagaacaagaacaagaaaacaaacaacagcgaaatggaagcaccaatgacaagccaccatcattggattcaaaaccttcgctttcatcaaacaagggttcttccagaaaatggagattaagaga

SEQ ID NO: 46638 - DNA, 516 bp, Gossypium hirsutum
  Clone ID: LIB3584-024-P1-K1-F1
cccacgcgtccggttctttaatcttgaaaaaatatatggaatttaggaaattggctaaattgtcttctgaaatcaattctcaaaataagaatttgttaactgttggagcacctgaaggacctaacccaagagagattgagttgtatttagaagaaatattgtcattgatgcaacttggtgaagattacacccaatacatggtttcaaagatcaaggggatgacaacagttgatccggatttagtcccacgggctacaaaagcttttaggacaggaagttttagcaaagttgctcaagatattactggcttttatgtgattttagaggggttctttatggtggaaaacgtgaggaaagccatagggatcgatgagcttgtacctgatagccttactacttcaatggtggacgatgtgttttatgttttgcaaagttgcttgagaagggctatttctacttcgaatattagctctgtagttgcagtactgagtggtgccagtagtttgctgaataatg

SEQ ID NO: 46639 - DNA, 432 bp, Gossypium hirsutum
  Clone ID: LIB3584-024-P1-K1-F10
acaagcattcgtgtacgcttatatggatccatacatagctggtggcaaatcagtaggggtttacacagatattgtggggaacttagctctcttgccaggagcagatcatgccttgcgtatcatgcacaacattaaagaagcaatacctgagatatggtatggctaagaggagcaaatggaacaagtttttcaagcagttgctgttgaaaccagggtccttgcttagatttcagttcaagtggaaaaatacagaggctgatcttgttatattattatagacatgggaagcgtacatgttaagcttattgaatatatgactaaagctcgctaatatatctatatgtacttagaatataaacaaactgatctgatatatatagtatctaagactgatatgctaaagatgctgttattcgtacatttgatgttaag

SEQ ID NO: 46640 - DNA, 542 bp, Gossypium hirsutum
  Clone ID: LIB3584-024-P1-K1-G1
gagttaatgaggctatgttgacctgcgaaactgagattgttaatgaatacaatgaactacttcgcacccagcttgagaaccaaaaagtgtattttgagactttgcttcaacaagaaaatgaagaaactgagagggcaattgctgatgcttttaacaagactgttatgcaaaagcggcagaaaacgcaggccaagctggaaagatgtgtgaaggaaaagaaatttctcgaggatctcaacgagaatcttttgaaaaaccaggagatatggaaagcaaagctgttggaagttgaaaagagggaaaagaaggttttgaggatgaagggtaataaaattcaggccttggaggatcaggtaaggtattatttggatattcaaacggatttagtgcactgttgttaattgttatagtcaagtttgcttgtttatttagaatttggcaatttgtctgttgcagttgcttttcttttctgtatctgtgttatgagcattaccaggtctacttaatttacttatttatcaatattctgggggctatttttt

SEQ ID NO: 46641 - DNA, 532 bp, Gossypium hirsutum
  Clone ID: LIB3584-024-P1-K1-H11
ccttgctcgaatcccggattatctttgggttgctgaagatgggatgaagatgcagagttttggaagccaacagtgggataccggtttcgccattcaagctttgcttgctagtaacctcaccgatgaaatcggacccgtactcaagagaggacatgacttcatcaagaaatctcaggtcaaggacaacccttccggtgactttaagcaaatgttccgtcatatttcaaagggatcttggactttctctgatcaagatcatggatggcaagtttctgattgcactgcagaaggcttgaagtgttgcctactcatgtccatgttgccaccagaaattgttggtgagaaaatggaacctcagcagttatatgatgcagtcaatgttatactctctctgcagagtcaaaatggaggattagctgcctgggagcctgcaggagctcaagagtggctggaaatgcttaatcccaccgaattttttgccgacatagtcatcgagcatgaatacattgagtgtactgcatcttcaatccat

SEQ ID NO: 46642 - DNA, 520 bp, Gossypium hirsutum
  Clone ID: LIB3584-024-P1-K1-H3
atcaagatgacattcttgagagtgaattctttgatactagacaggcatttttgagtctttgtcaagggaaccattatcaatatgataccctgagacgggctaaacattcctcgatgatggtactctaccatcttcacaatccaactgctcctgcatttgtcactccctgttgcatatgtcatctggatattgaaactggtcaaggttggcgatgtgaagtttgccctgattatgatgtgtgcaatgcctgttataaaaaggatgggggcattgatcatcctcataagttaacaaatcatccatccatggcagaacgtgatgcacagaacaaagaggctaggcaactacgtgttctgcagctgaggaaaatgcttgaccttttggtgcatgcatcacaatgtcgttctgcacattgccaatacccaaattgtcggaaagtgaaggggcttttccgccatggaattcaatgcaaaacacgtgcttctggtggctgtttactatgcaagaaaatgtggtattt

SEQ ID NO: 46643 - DNA, 450 bp, Gossypium hirsutum
  Clone ID: LIB3584-024-P1-K1-H5
gtttcggcccacgcgtacgcgtacgcgttcgtccacgcgtccgtccacgcgtccgaattattccatttccgtaccttttttgtctttttggcttaagctcatcggatactatagcaaaaagatctactgcaaaagtcaaaataacttgctccatgaattttactgctatctcaaactttccacgttcatcatttgttcaagtctatggaactttttttgcttctttttcacatcctgatagctacattgctatatatttgctcttcttgtttatgacttcgcaaggtgaagatataaaagctaaaagaaaaaggttaaattctgcaattagtccctgtactttgagaaagttgtggatttaatccatgtactttaatttgattatttctagtccttgtacttttcaaattttaaattttcagttagaatcaaacaataacggttaagttc

SEQ ID NO: 46644 - DNA, 513 bp, Gossypium hirsutum
  Clone ID: LIB3584-024-P1-K1-H9
gaagaaggcagttgccttccggtttaaggcaacgagtacgccatttcgaaacccaaacatgggataccatgggaggtgaagaagagatgaaatggatcgaagagcttcccgatgggcttcggagagacattaaacgctatctttgcctcgacttgataaaaaaggtaccacttttcgatagcttagatgatctaatcctcgacaacatatgcgatcgtgtgaagcctctcgtttactcaaaagatgaaaagataatacgagaaggagatccggtgctacgaatggtgtttgtcgttagcgggcgagttaaacgtagccaaggcctcagcaaaggcaaaatagccacgagtatactcgaaccaggtggatttttgggtgacgaactcctttcgtggtgccttcgtcgcccgtttatagaccgtcttccagcctcgtcggcaacattcacttgcattgaatacacggaagcattcggactcaacgagaatgatctccggtacattacccaacact

SEQ ID NO: 46645 - DNA, 341 bp, Gossypium hirsutum
  Clone ID: LIB3585-041-P1-K1-B8
ctttggttctccttatttcttttttatattttcatttgattttatttttccatgtagcagttgaaaaaaacggtgagtgaaaatggagggttcaaattcaattcctaagcctcaaagcaacttaaatatacccttttccaatgcctcacaaatggcttctcctcctccttctccttcttcttctccttctccttctccttcttatatgcgtttgagtcctgagaacaacaattctaaaagacctgcgatacctccttcacaccccaacaaccctactgcttcattgccttattcccaacagatcatgggttctcgtcccaatgctcaacatggagcaccca

SEQ ID NO: 46646 - DNA, 459 bp, Gossypium hirsutum
  unsure (1)..(459): unsure at all n locations
  Clone ID: LIB3585-041-P1-K1-C6
cgggttcggacccacgcccgtccgagttcaggaaaaaaggtantttctcattnnntgacagagtgggtgttggaccccccactgtttcttcaagtaacccaaatatacacnnaaacattcaaggcatgtggagtcaggnntctgtacttgagtggttataanncgtatgcattttnntgcgtatggacccaaactggnnatcgggcaagacatttataccatgagcgggtantgacttgaacanctaaggagacatggggcgtgaactttcgagctatatgtgacttatttcaaatatcaaaaacaagagaagatgtcatagaatacaaagttggggtccaaatgattgaaatatacaatgaacaagtgagagatttgctagttattgatggctctactaaaagattagatatatatgacgaaacacaattgattggccttactgttcctgttgcaagt

SEQ ID NO: 46647 - DNA, 323 bp, Gossypium hirsutum
  unsure (1)..(323): unsure at all n locations
  Clone ID: LIB3585-041-P1-K1-C9
cccacgcgccacgcgcgggaatcaatagcatctnctctgaaggcacttaaccaaatttcatttttttatgcaagctctaaagtcagcagtggtatggtattacatgacaatcttgtcagagacctcttcactgtttatgcaaatcagcttcccatgctacttaaaaaaatcttttacacaattctttccaatgttgtaaactcaggatattaagtccaccccaaataaatacaacggataaattagactttcgttaatacaaacaattaccataccttaacttatctaattatcaacacttttccaacaaatctagttcaaac

SEQ ID NO: 46648 - DNA, 455 bp, Gossypium hirsutum
  Clone ID: LIB3585-041-P1-K1-D4
cccacgcgtccgagtggatccaatataaacttcttgtttgtcttccgtcctttccgaatatagattatggatctacatttgagcgtgtttataaaatcgtttgtagatttcagcgattatagatctaaatggcatatatatgcctcacaatttatcttgtatttgttcgaaaatcttttgaataatttattcgtctttatattgcttttccttattgtattaatttagaactgttgacctgtcatatgcaaatagttcgaattgtctcttattttttggtcaacagttcgaattatattttcacagttcaaaactgattcgaaacgtcatgtatatttctcataaatcttgggtaaatgttaagatccatcgccaaaattaggcaggcctgtcatgggataccctgacccttttattcccttaaaagaaaaaataaaattgttttggttttattt

SEQ ID NO: 46649 - DNA, 311 bp, Gossypium hirsutum
  Clone ID: LIB3585-041-P1-K1-D5
gggtaactctttaataatttcatgagaaatgtatatagtttgtcattcaacggtgcctgattgtaatccggcaagggcgcgtgaaagccggcctgattttcgacttgatgattcccacttcatttaccaatgacaatgggatttgttctgatatttgtggctcggtgaaaagatagtcgacggacttatcgttttatgcagatttaatgtttctacttttatttgctctaaaaaaaaaaaaaaaataaaaaaaaaaaaaaaaaaaaaaaaaaaaaaaaaaataaaaaaaaaataaaaaaaatttaataatt

SEQ ID NO: 46650 - DNA, 546 bp, Gossypium hirsutum
  unsure (1)..(546): unsure at all n locations
  Clone ID: LIB3585-041-P1-K1-D9
gtttagtactctcattggcatttcgntcgaacacttttattaccaaaagtttcattttcctcgtcgatcaaaagaccagaggaaaaacattaaaatccagatatatggaaagtttgaatagtgtttaaagacacaatactccacgcgctatacatcggattttcaaacacgaaccaaccatcagatccactaagtacgccaatttaataaaataaagcgcgtggatatccatcgcgcccccttggatgtttgttattatttttttaatttcccccctaatcggctgcgatggagagctacctctcttatcgtgaagcgccaatgaccttcctctgataacttccataaatcaaccatgtcttccttcttcttgatctctcactcgactcagatcacgaatcgcttgactcgttttagagtgtttacatctatagaaataatcccccgtgtcttgactcagtaactcggaattaaaagatggagcccatggatatcgtgggtaagtcgaatgaggacgctttgctttccaaagcaactatgaccaaa

SEQ ID NO: 46651 - DNA, 552 bp, Gossypium hirsutum
  Clone ID: LIB3585-041-P1-K1-E5
cccacgcgtccgctggagtcaattcaaaaatatctctggccaagattatgcaaacttgatcaatatacattgtatgggctagattatcaaatgattacattcggaaaggtgttctgcacaaagagtaaaccaaattgcaatgcatgtccaatgagaggggaatgcaggcactttgcaagtgcttttgcaagtgccaggttcgcactaccaggacctgaagagaggagtataacaagttcaactgctccaatgatctctgagacaaaccctaccagggctgtgaatcaaattccattacctccgccagtgcataacttgcttaaagtagggcctaatgttggcaacaacgaacctatcattgaggagccgggaacaccagaaccagagcatgcagaaggatcagagagtgatattgaagatgcatgctatgatgatcctgatgaaattcccacaataaaactcaacattgaagagttcacagcaaacctacagcattacatgcagggcaatatggaaccccaagaaagggacttgtcaaaggctttagtagct

SEQ ID NO: 46652 - DNA, 320 bp, Gossypium hirsutum
  Clone ID: LIB3585-041-P1-K1-E8
accactcgtacgaccgcctgtcggtataatccctccaaaaggctttctataagctgtcataaatcttagcagggaaggttatgcataaatgattgatgacgagatacataacaccctactatgtgcaggaaaaaaggcagattgcgatcgggaatgtgatccaccagatgtaccaacactactaaacgctcatgagagatgacctcattcctgaaattacactgattgtgccaaacatgttaaccgttatcttctgcctggacaacattgaagtacttttggaaggaatcctttggccagtatgatggacattgcctcac

SEQ ID NO: 46653 - DNA, 452 bp, Gossypium hirsutum
  unsure (1)..(452): unsure at all n locations
  Clone ID: LIB3585-041-P1-K1-F11
cactcgcagaaggaagatgtatgatagcaaaggagcacaggaacaagcacttaaaattcttattggttctggtggatggaaagagcaataaggtaccttatgttaaagaaattctaagttttttgtctcagcatgcaaaattgtcagagtctgtactttggactcctgcaactacacgtgtgggctcgctatattcagcagcagatgtttatgtcatgaactcccagggactaggagaaacatttgggagagtgacagttgaagcaatggcatttggtcttccggttttaggaactgatggtggaggcacanaagagataatagagcaaaatgtgacagggcttttgcaccctatggggcattcaggaacgcgagttcttgcttagaatatccggttttactaaaaaacccaaatgctaggaaacaaatggggttggaaggaaggaaaatgt

SEQ ID NO: 46654 - DNA, 538 bp, Gossypium hirsutum
  Clone ID: LIB3585-041-P1-K1-F7
cccacgcgtccgccggaaaacatgagcatatctgtaaatggacaatcccaagtccctcccggtttccgatttgcgatgcgaccgaagaggagctcttgcaatactatctcagaaagaaggtttcatatgagaaaatagatttagacgtaattcgggatgttgatcttaataagctcgagccctgggatatccaagagagctgcaaaattggaaccactcctcagaacgattggtactttttcagccacaaagacaaaaagtatccaaccgggactcgcacgaaccgtgccacggctgctggcttttggaaagcgaccggccgagacaaggtgatatatagcaactgccggcggatcggaatgaggaagactttggtgttctacaaagggagagcccctcatggccaaaaatctgattggatcatgcacgaatacaggctagacgataacattgttgaaacgactgtgtccaatgctatgggggaggggacacaagaagaaggatgggtggtatgtcgtttcttcaagataaaaaatca

SEQ ID NO: 46655 - DNA, 544 bp, Gossypium hirsutum
  Clone ID: LIB3585-041-P1-K1-G1
cccacgcgtccggaaactccacgcgctcagcaaggactctctttgagcctttcttcccaacaacaacaacatcatcatgggtgacggatcacatgcacaagcggtttcaggtgaggatatgagggtttccggtgggtcgggttcgtcgggttcaggtgtgactaatggagtttcgggtgtacaaagtatgctgttgagctctaaattcttgaaggctgctcaagagcttctcgatgaggttgttaatgttaacaataccgggattaccaagaacgaattggctaaaaagggtagaggaggaggagacaatagcaatagcagtaaggttgtcggagaatccgcggcggcagccggagatgcaaatgggaagcaaggacccgaactgactacggcggagagacaggaaattcagatgaagaaggcaaagctaattagcatgcttgatgaggtggatcaaaggtacaggcaataccatcaccagatgcagatagtgatatcatcatttgaacaagcagctggaatcggctctgcttaaacatacaca

SEQ ID NO: 46656 - DNA, 541 bp, Gossypium hirsutum
  unsure (1)..(541): unsure at all n locations
  Clone ID: LIB3585-041-P1-K1-G11
gaaaaaaaaattcctacgcttaaaaaaataacttttttcttcctttccccgatctgacctgacctccctcctgttctgacttgttgttttccgattggcatttactttgtgagttaatggtggtgagaatttggagatagaattgttaaattgacgagatttggacggggggttttgtggggaatggcgttggctgaggtattgcctagttcgcggaaacaagagcatttagaagctgggaagcgccggcttgaagaatttcgtaagaaaaaggctgctgaaagagccaagaaggcagcttctaccactcaatcttacaatactgatgttagcttaaatgataaacatcaattagaaactgaacangtgagagccattaactcagatggtgccggtacatctgagggacctaatccttctttcttaaaaacaatttacaacaacaacaaaacaactgaagttttccgtgaaaatcagcaagtttactcgaacaatgcctttgaaggtccatcttttttaggcggngattataattcatcta

SEQ ID NO: 46657 - DNA, 295 bp, Gossypium hirsutum
  Clone ID: LIB3585-042-P1-K1-A12
accaaaaacggatctcaattcggtaattgtaacaaggaatacccagtctgttgtaatccattaaccatgtgggcaggttgcatcttaaattttacctctactttcgttcacaatatttactaccattgtacacgttaatgtaactgagaaaatgttgcattaccagaatccatttggtaaggttcaacgaccatttttgatactgctgatactgaaattgaacaatactacatattttcatgttgtattaaaattatttaataataacgatacttttatatgatcctattctttt

SEQ ID NO: 46658 - DNA, 311 bp, Gossypium hirsutum
  Clone ID: LIB3585-042-P1-K1-A3
actgcttatggtttggatttggttcgtggaacacaaaccactgatttggtcaagaaggacttccctaaaggcagagtaccgctttgctggagttgttgacggaaggaacatttgggccaatgatcttgcttcttcccttagcaccttgcaggcgcttgaggctgttgtcggcaaagacaagctcgtggtgtccaccttatgctcgcttctccacactgctgtcgatttagtaaatgaaactaagctcgatgatgaaatcaaatcctggcttgcatttgtcgcgcagaaagttgttgaagttaatgcccttg

SEQ ID NO: 46659 - DNA, 312 bp, Gossypium hirsutum
  Clone ID: LIB3585-042-P1-K1-B1
cccacgcgtccgatttagggttttcattctacttctcaaataaaaaggaaaaacaaaacagggctacttttgtgctggtgagttaagtatcacattcgagttgactcgagtcgagttggggccaagatgggagtatatgcagttgcaatctgcctcttcttctccctctcggttgtgttgtgtctccgcatccctaatctctcttcagacattgaaaaagacacaatcttatcatcagtatgccaccccggaaatcagcccaatcctcgcactctcagacctgatcagttaactgttctcatcaatggctat

SEQ ID NO: 46660 - DNA, 470 bp, Gossypium hirsutum
  Clone ID: LIB3585-042-P1-K1-B6
caagaaccatgatttcttttacccccaacccgctgacttatcctcgagttcagctgctgctgctgcttgtggcagcgactgacgccatggggttcccctcttattgggggacctcctttcacaggaggagcagctctgtgagcgatattgtgggagctgaggacccggcttcagggtttgggtggagaccctgcttgtattttgctagggggtactgtaaaaatgggaataattgtagatttatccattgtgggcttggggagtctggttcagtagttggaggagcagatggtgcaaccatggtgggttcacctaacaagatcgagatggaccagtgccatgagttacttaaatctaaaatccgctcagcaacaaaggttggctgctgcttcacagctcatgggtttctgtttcttttacttactccccaaaaggcattgaattcgttccttcaacagcaacaaaatgat

SEQ ID NO: 46661 - DNA, 284 bp, Gossypium hirsutum
  Clone ID: LIB3585-042-P1-K1-C1
agtcattccttttcttgttttctgagaggaaggtaccaaataggggtcaagagattttggggattcttgtttatgggactgtgtttcccctactagtttcttgtttgcctaattggggtgagagattaatgtttgtggttgccagtcttgctgtaactggtatccaacatgttcatttctgtttgaaccatttctctttaagtgtttatgttgcaccaccttatggaaacaatcggtttgagaagcaaactgttgggacacttcatctactttgttcatcattg

SEQ ID NO: 46662 - DNA, 403 bp, Gossypium hirsutum
  Clone ID: LIB3585-042-P1-K1-C5
aacaagcttacgaagcaagtgaaaatatcctggttaataatcatgtaacatatgatagatcatttaataaagaggggaggagggacacctataatgacaaaactgaacaataatctaaacattcttttatcaattctgatttatactgtgtttaatgacatcataatccaaatgatgtccaaaatttacaccaatatacacagatctctactatgtacactattgaccaaatgattgctgcagtgcatactgcaaatcctaatagaaatccaattaaaagcttaattgtgagctttgatctatgtaatgatctatgtgacacaccatatcatacactgttcaataccttgttcaccactttccacaactattttccatgattcataaccttaatcataatttt

SEQ ID NO: 46663 - DNA, 512 bp, Gossypium hirsutum
  Clone ID: LIB3585-042-P1-K1-C6
gggaaacagggagggtgctaactcgagcgcagctcgcaccattgcagctgtaaaagtcatggcgactgctatgaacaccggggggaaagagaggatcgcgactgggatttggaatgtgagcgaaaacccattgacggctgaggaaattctagcgttttcgctgcaaaagattgagggaatggcagttgaagccttgaaagtacaagcagaaatggcagaagaagaaccacctttcgatgtttcagctttcagtggaaaggcaataacacaagatcaaccacttgattctgctattccacttgagaattggactaaggactacggcttgacttcttccgaagatcagctaggcgacccggaaacactcacgctagcattggtcgtgcaactacgtgatcccttaaggcgatacgaggcagttggaggccctgtattagcacttgttcatgcgttaaggggtgacatcgaaccaaagaagaatgaccaaaaaaagagggttaaagggatgagtt

SEQ ID NO: 46664 - DNA, 178 bp, Gossypium hirsutum
  Clone ID: LIB3585-042-P1-K1-D12
gcgatcgcgtcttaccatcatggattcattcttcaacaaaggcttcaaagctgctaaatgcaaaactttggtgaggttaacgattacgcggataaagttattaacgaataggagagagattcagattaagcatatgcgccgcgacattgccaaacttttttgagactggccaagaaac

SEQ ID NO: 46665 - DNA, 426 bp, Gossypium hirsutum
  Clone ID: LIB3585-042-P1-K1-D4
gccaggcgtccggttatttgaacaatggtggtctcgatttgcttgttcgcacgatcctttaaagcttgagcctgggcgagttcagctcgtgcttgttgtctaatcctcttcgccctatcgaactctttttcggccaattcaacttgcctcttcgcttgttttctcgcctcttcggcataagctagctccggcatcgccatcttcaattgctggagcgccgataccttgctcgtatcagtcgttacagtctattccattttttcgtcggatgagccgatcgagaggtgcaatcgagtggaatactgagtattgttatggttttatctatggtgaacatagggctctggagggtttagaggatgtgggtaagagtttgaagctcctgatagcggtggtcttcgacggttgtagagtagggattatatt

SEQ ID NO: 46666 - DNA, 347 bp, Gossypium hirsutum
  Clone ID: LIB3585-042-P1-K1-D5
ctttatctgtcggtctcggcggaggtgaagatggggaaagggaccaaggtggggttacccatcattctccgacgcgagggcttagaaatttcaacgagcttcgtttccttcgaattgaattgcccggcggcgagttaggaatcgatgacggagttctgcttaaatggagagccgatttcgggtcaacccttgatagctgcgtaatcctcggagctgcttccgtttttaataatgtgcatttccaagtaccagaccatgggaacgatgggttttgcattaacaacggttctatatgtttggcaacggtgatgataatgggagtatcccttaggtcgttttgataccag

SEQ ID NO: 46667 - DNA, 391 bp, Gossypium hirsutum
  Clone ID: LIB3585-042-P1-K1-E1
tttggcagattatggcagataaaaatttagaggactatgatattgaaccagccccaaagctgattgaagtagtgtttaggaactgtagaggacaggtggatcactgggttgagccatatttgagaattacacttgatcgattgaatcgaacggagaaaccacggttgaaatgtcttcttgtacaagtgattgccaatgcagtctattacaacgcagccttgacactcagcatattaaacaagttttctgttacaacagaagtgttcaacctttggttccagttgttgcaacaagttagaaagagtggtttgcggtctaattttaagcggaaacatgataggaaagtgtgctgctttggccttacattacttcttgcactttcccgtgacca

SEQ ID NO: 46668 - DNA, 465 bp, Gossypium hirsutum
  Clone ID: LIB3585-042-P1-K1-E11
cccacgcgtccgtgagttgtttaactttagatcacaaaccagtactatttttttttctttttttaaatgggcattgcattttcattttcccataattattttagaatgttttttagataatcctagattctaatgaagttcttagctcaagaatatcttaaaaaaaaaactctccaaagaagataaatagagaaaaaaaagtatcattaaacaccttcaccaacaagaacaaaaaaaaaaaaaaaaacaggtgaaatcccctttccttatggtcttaaaacaattcaaatgggaaagattgttggttctagggtttggtttctcattgattttagggagaaaattataaaaaacaattatgggaagaggtagggttgaacctaagaggattgataacaagatcaacagggcaagtcatttttgcataagaagaaatggtcttttgaataaagtttatgagctttc

SEQ ID NO: 46669 - DNA, 373 bp, Gossypium hirsutum
  Clone ID: LIB3585-042-P1-K1-E12
gttgcattttaggaatcgagctctatagagggagcagatttcaagaaacttgctagcttgcattcgggccgtgatgatttagaaacgaggatggaaaagagaacaaatggggagactgatctggatgatctatgccatgcaggctttgaaactgtgaaagagcttgaccaaccattacaagagagtgagattttgactgaagtcatgagttcatgtggtgcaatctggggcaaaatatgcaccatgtttatgtatccgattccgtacatgaacatccactatcccagatatagagagctcgaacggtttcttggtgatgatacttaaaaagaatggctgaggcagttataatatctttttatgaggttttgaa

SEQ ID NO: 46670 - DNA, 287 bp, Gossypium hirsutum
  unsure (1)..(287): unsure at all n locations
  Clone ID: LIB3585-042-P1-K1-E2
cacacttgttagtattcctacttggagtgcggcttctatcacttcccacatttggaacatttatttcacaaatgggtcggaagcgcaatattcgattacaaaagcctgccaaggtgatctctccacaatctgccctgacctctctatcattcaaaccactacaaccagacgaggcttcctttctatcacatgtttttgtcacgctaaaactcatgacgtntctccttatactgctcatgtatgatcctctggagaacgatcatctgccatattatacggtcatttat

SEQ ID NO: 46671 - DNA, 483 bp, Gossypium hirsutum
  Clone ID: LIB3585-042-P1-K1-E7
gttccaagtactggtttttatgctgggaaggtaagttctgtacatcgttcgttgatgtcaaagaactcatcttggactactagcagtaatgcaaattctgatcaaggtacaagtgctgtgcttgatattgaaggaagtgaccatcaacatgatgacatggcaagtgaatctggaaagggaccttatggcaatgttctagaagaggtttttgccttcgataagatggatgtaataaaccaagatgctagttatgaaagacgcaatgactcgcttaatagtcttattgaagatactgatagagactctgcgatccaatgtgaccctgaccactctgaggagttaggtcaccgtagtcttgaagtggaaatgagttcaaattctgatgctctatgtgacaggggtgatctttcagaagttgatggttgtgaaaacacaaaaatttgttctaaatgtggtcggaggtttcgtgttattgaaccagtt

SEQ ID NO: 46672 - DNA, 440 bp, Gossypium hirsutum
  Clone ID: LIB3585-042-P1-K1-E9
cccacgcgtccgcccacgcgtccgcccacgcgtccgcccacgcgtccgagttacgctactgagttcgcgagttggtaaatcaagctgctgagctttctaaatcgaagcatcccctgcttggttttttaaggactaaaaatgaagcctagatggaaaggaaaaggctcagaagccaaagctagtgctgatcccatgtctaaaattgtctcacaactccactcctctttgatccgatccgtggctcgcggtttactcttaagtcgcaatgtgctcatcgaagcggatgctgaattatcctatcttttcaatcgtgctcgttttggtcgatcgagaattacatgttaagaagagaaacagtggttccagttggatatggaggaagcctttaatttatgcttttcactctaatgcctcaaaggtttcgtctaagatggatccat

SEQ ID NO: 46673 - DNA, 262 bp, Gossypium hirsutum
  Clone ID: LIB3585-042-P1-K1-F1
ggttctcctcgtactgtcaaacaacggtctggtctttcttctttaggcgtcgcgggttaaaatagttagtgaaccagtccgtgaagtcataccccagttttactttaaaaatggtcgtccacctccaaacgaattgaaagagctgtgcttgtttgcgattgataagcacttttatggtcataagggatagcagattcatgagtttaaggcggtttcttaagatatttgtaagttcacatcttttttttacaccttttttttt

SEQ ID NO: 46674 - DNA, 350 bp, Gossypium hirsutum
  Clone ID: LIB3585-042-P1-K1-F10
cccacgcgtccggagaaaaagatgccttgtcctcgtcaagttcagattcagactctgattattcttcgagggacgtaaacagtaaaaatggacaattggaaagcgaatttcagaaaatagctgacggcattaaacaagaacttgaggaagcaaatctggaaattgctgacctgaaaaggaagctgacagctacaagtgaagaaaaagatgctttgaattcagattatctagcctctttaagcaaggttcaagaagcataggaaaccatataaaattttgaagcttgaatctgaaagatcagatagtgaaaaatcaaaacttttgatttaataaggaagaggtgggggcat

SEQ ID NO: 46675 - DNA, 493 bp, Gossypium hirsutum
  Clone ID: LIB3585-042-P1-K1-F11
caaagttttcatggtttccttcatgtttaccactattctgttgtctgttttgtacctccccactaaacggagggggcccattacaaggttcaatcctatggcaaccttaaacattgtacacccatccaacaggacatacccagttacgtttgcctacttaatctcagcatccaaaggggatataatcaagctaaaacgtaccctacatgctctgtatcaccctggaaatcagtatctgatccatctggattacgaggcgcctgccttggagcacaagcaaattgcagagtttgtatccaatcacccagtctttaacttggttggtaaatgtttatattgttgggaaactcaacttggttacttatataggtccaactatgcttgcttactactttttatgctatgtcaatgcttttgaaatctgcaaagtggattggttattaaccttattgcttccatttattctttattaactcaagatgtatctgattaa

SEQ ID NO: 46676 - DNA, 475 bp, Gossypium hirsutum
  Clone ID: LIB3585-042-P1-K1-F2
cccacgcgtccgcccacgcgtccgaggttttctttacatgataaggtacttgagatgttcaatgcaattcagccgattgtgggtgaaaaaccttcactgaaagctattagtacttgtcttaatctcctgattgaatcgaaccaggttgatttggctcgagattttctgttgaactccaagaaatctctcaggttgagacccaatacctgcatttttaacatcttggttaaacatcattgtaataatggagaccttgaatctgcgtttgaagttgtaaaccagatgaaaaaatttaaggtttcttatcccagtcttgttacttactcaacccttgataggcgggcgttgtgaaagttcactactttaggaagccatcgaattgtttgaggtaaaggtttgtaaggatcaaattttgtcttgtgctttaacctataattgtgtaatttagggctttctgagtagatagaaaaattta

SEQ ID NO: 46677 - DNA, 213 bp, Gossypium hirsutum
  Clone ID: LIB3585-042-P1-K1-F4
gtggtctgtcgtcattaaccacaatctgtagccaaagtaacacgccatgcctcgatacttagctaaacctaactggggccgttattgtatgagccctgatctgcttcaatatcaaaaccgtcgactcaaaagatcattatccgcggacgatgctcctttctaagtaactgaactcacataatcattcacagcagagacactttgacaaaattc

SEQ ID NO: 46678 - DNA, 253 bp, Gossypium hirsutum
  Clone ID: LIB3585-042-P1-K1-G4
ggaactgaccccggtatggctacattgcttatctcgaagatcatagaggaatacctcgataggatgatgcttacgaggtgggtgttaccgtactcaaatgttacatctacgattgtcgagccatacaatgctactgtttcagaacatcaactcgacgacaatgctgatgagagcatgatactagatatagaggctctatacacaatctgattcaggactcttaaatagactactactactctctgactgattt

SEQ ID NO: 46679 - DNA, 536 bp, Gossypium hirsutum
  unsure (1)..(536): unsure at all n locations
  Clone ID: LIB3585-042-P1-K1-G6
acgcgtcacgattcaaaataaatctaagtatgatggnttcacgggacaagaataacatggctatctaaagtcagaagactcaccacttacatgagttgacacatnaaaaacgattctagagatacttgagtaagctaagaaatggagttctcatagaagcagatatttagttaacttgttcttattattgttacttgaattttttggttatggtttccatgttaatgttgttgcaatgtgaaacaacactggtattaaaatgaaattgcatccatcacatgataaaaaatgtggacttggtcttgtgtggagtgggaaatctgagcagctaagaaatgaaagaaattcacatgcataattgaatggaataggttttgggtttctagcaacatttcactaaaattctcttatttgtaatgaaaaaccaatcccattaatattcgagtagagtatttatactaagacttttactaatagttctattaaccctttagtaaaatatttaaaccgttacattaaatttttaataaattaag

SEQ ID NO: 46680 - DNA, 521 bp, Gossypium hirsutum
  Clone ID: LIB3585-042-P1-K1-G7
cgtttattggccatcaacaccttctcactctctttgagaaaacagccgatgttacttgccatctttgttgtgtggactgccataacttcatccttcgatgtgtgctatgtgacattaacatccatttccagtgtcatccttcagcacttgaaacaataaagcacaaatctcatctccatcctttaactcttacaaaatctccttttgaatttgagttgaactcggatgaagaagaggaggaattttattgtgatgtttgcgagcaaaaaagaaaccaaaaagagttgatttactattgtgcggagtgcaaatttatcgctgaagtcaaatgcgtgtttgctacggttagtatatcttttatcattcaatttaaacatttaattgaattatttttaattagttgtttatcttttaaaatatttgcatacaaaagcttacattgaaagtgctaacgaagagttagctacttgttcgtttgagcttttggcacatatatttttgattgttcacacacacatata

SEQ ID NO: 46681 - DNA, 519 bp, Gossypium hirsutum
  Clone ID: LIB3585-042-P1-K1-H10
catcacctttgaggaaaacctttgcacaacctggaaaaccaccacctctcaatgttcttccagctgcagctccagagaataaatctgtgatcaaagctgtcgatggatcaccaaactacatgaagtctaccagcagttccaaggccaaaaaggagagttctccggtaagttctctagctggttcagatagcaagaatctacgtagaagatgttcaaccggttctatcagctctgattcttgtaataaggcagctggtgctagaactctaacaaggacatctaatttgaagctggtgaggactttgacaaaatctcctactttcaagccggctagagcttcggccaaaaaatgttccagggtcgctttatgtgcagatatgaatgtacagagggctacctgttcttcaactttaaaggattcaaagtttcccttatatcttatggctgaatcatgggactgtgtctgagggaacttttattatcaaggtttgcccatatacttattgatccctttaatgg

SEQ ID NO: 46682 - DNA, 273 bp, Gossypium hirsutum
  Clone ID: LIB3585-042-P1-K1-H4
ctaggcgtacggtttaattcagaattttcatatttcaactaatgagcatgttttgtatctagatgctctaacaggtctggttgtatttatatagatattactttccttcaattatcaaatatttgatgatacactcaattacaaatgaaaaattacatttgtaagataacatccatctttcatttgattgtatgatcgaataaagattcataccaaacattgttaacaactattgatcaaaattaatggagactgttacacgccaattatggg

SEQ ID NO: 46683 - DNA, 331 bp, Gossypium hirsutum
  Clone ID: LIB3585-042-P1-K1-H9
ctcgtaaaaatccctagttttttttttcttttaattcaagacctttgcttcaatggctgatgcaggcggttcaggcgtctctaataggatgtggtgctcggttcccgaaagactccagctgcatatggccatgttggcctcgcacttcggctatgcagggttccatgtggtttatcgagctgcccttaacatgggcgttagcaaactcgggttcccagtctatagaaacagtgatgctctgcttctcctcctgccattagcatagtccctagaaaagaaggaccgaccagccattacactaaattttatattacagttcatccttttagct

SEQ ID NO: 46684 - DNA, 460 bp, Gossypium hirsutum
  Clone ID: LIB3585-043-P1-K1-A1
cggacgcgtgggggcggatctatcttcaatgcagcccgtgcctacctcggaccaaggtggtgcgcagccaggagatctggtatccccaaatgtgggtcctcttccatatgcttcctctgaagcacaagcaagatgcatgtcaaacaatgaaatgcgaaatgcttctcagttagctgaaacttcaccatttaatggcaccattgatgcaacctgcaatatgtccaatcctgacaccacaggtgtggagcttagagagcaaatgcagcagctgagatcctctgaatcaacttccaacctctctcatcccgatctaccttctgttactgcagttgaacatcaatcaaacaatgaaggccaaactgtcaaccagagttctcaggctccaacgcaaccagtggcaaaccagattgagctcttcaatcaaaatgtcttggcagctctgcattcacccattgatggt

SEQ ID NO: 46685 - DNA, 507 bp, Gossypium hirsutum
  Clone ID: LIB3585-043-P1-K1-A11
cccacgcgtccgctccactcttatgtgcattggaaagtcgtagaataaagggaaattttttagattatgacgatctgctgaaatccatttgatccatctcttctcgaaagaaagtttaaagaacatggtgcgatgaagcagtgggagaaagagataggagatggctagagaaggcagaggagccaaatggggtggtcatggtttaggttcaggttcaggttcaggttcgggtcagtgctcctataaaaggatcactgtaattgtttgctccgttaacatcgttattgctctctatgttcttcattctctctattcttctctctacatttattccaacaaagatcatgatgttgcaatgcatacatcagatcatattaaacaaatggaagaatcagttaggattcgaagagccagtgaacctatagagcttgttaaattggtaaaacgattgaagcatggattttcgagtgaagaatcaatggctgaagctgaactgccccaagcagg

SEQ ID NO: 46686 - DNA, 452 bp, Gossypium hirsutum
  Clone ID: LIB3585-043-P1-K1-A6
gagacaatccggaagccttgaagcgcgtttcagagtgaaagtcacgacatctgtacatgggcggctgatcaacaaggtggagaacaacatacacccgtctaccctccatgtatgtgatatgaaccgcgcagatgcaggtatagacagtctaacaggcaggacctgggagcaggctgagccagaacaagacggtaggactgacatggcagagtgatggagcacgggaaagaggcagcgatcgctgctgataactacgacactgcatccactgacagtcatcaccacatggatcggacagctctagatttgagtctataggtgatgatgccactgatccacagttggacgcaggctatcatagacaccatcgtgcaagtctaggtggttcaatatattactgacacaagagcgagaggacgagatatacaaatgtaatgggcacactcaacatg

SEQ ID NO: 46687 - DNA, 513 bp, Gossypium hirsutum
  Clone ID: LIB3585-043-P1-K1-B10
tggagttacttttacacataatggtccagataatttttgttcggcacttgagtgtaatggagtcattgctatggagaatgctttagagaacttggatcattacaaccctcctgttgactcaccttgctggagaggagctccatcttctcataattccccatttggatcttcagaggctgtttctgtgcagcttgaaaagaaacttgaagcatgtggtgatggtcaagaacttaaatttatgcctatgaatactgctaacatggtcaggcttccttctgaaaaaccaggtgaaagcagtatgaatgttgagaatgggagtgtggaagatagttcagtctctttcttgaaattgccttctgtctctatcatgtcatctagagatcatctacctgacgtcgttgggaaagcaggaccctataacagagtaacaagttctgcacgtaagataaatttttctgatgatgcaagtgaacaaaagaacagtaatgtcttattcaacaaatcaacggatga

SEQ ID NO: 46688 - DNA, 513 bp, Gossypium hirsutum
  Clone ID: LIB3585-043-P1-K1-B11
ggcttttcggtgatgaattgaactacacgttttatggcatccaagggaacgtgatttcttgaggcttcatttctgtcccttctccttcgaggaccataatgtaaatgaatcttctttcgatgttgcggcaaatggtctgaaactcttagcacaggttaatgttgtcggtgagattgcacacaagaatttgtacctccagagttctgggagcaatttcagctcgttctctttggttaaagagtatattttacccatcaattcgaattcacttgtgattgagttcaccccgacaaaaggatcatttggtttcattaatgccatagagatgatccctatgactgataaacttttcgctgattctgtcagtaaagtgggtggaaatgatgtgaacctgaatctaagtggaaggggaattgaaactatgtataggttgaatgttgggggtccggagattaaccccaatgaggattccgattattggagagcatgggatgtggattctggatatatgat

SEQ ID NO: 46689 - DNA, 491 bp, Gossypium hirsutum
  Clone ID: LIB3585-043-P1-K1-B3
cagaagataattgttactgtttccgaggcggtaaagcaatgcctgaagaagaagggaatgcgtattcctcggtggcgaaaggccgagtatatcaaggccaaatggctttctccttataatcgaatcacgccttcaccttcaccttcaccttcaccttcacctactccaacatcaacatctataaccggaacgctcaaagcatttgagcttgatcccaaagctaaagaacaatgccaacctttgtttgaattgaatcctgagggtaaaaactccgtggacgatgctgatttgggggaacccatatttgctttgtcggagagttctgaagaagaacggaatgaaaaaaatgtgaagaaagaagaaaggaagccacctcagataaatcccaggagctcacagattggggttaagatcgtggctggtttggcttcagcagttgaagatgaacaataaattttggactatttttttcttttcttttttctctttta

SEQ ID NO: 46690 - DNA, 488 bp, Gossypium hirsutum
  unsure (1)..(488): unsure at all n locations
  Clone ID: LIB3585-043-P1-K1-B5
cggacgcgtgggtggatttggagttgtggtgatggcttcaaatatttgtcctaggcttggagtggcaatggtaatggtgggattcgtttgtgcgaatttagtgttagcaatgtgtggtaacattagtgaagtgtttgagtacaactgggctcctaatcacattatctctcaaggagaccagatcgagctaactctggacaatgtttctggttgtggatttgagtctaagaagaagtatttgtttgggcaagcaagtgtgcagatcaaactaattgaaggagactcagctggaaccgtcaccgccttttatatggcatcggaagggcctgttcatgacgaactggactttgagtttcttgggaatgtatcgcgagagccatacctagtccaaactaatatttacgtcaatggcaccggcaatcgagagcaaaggcatactctntggttcgatcccacacttgatttccacacatactcttttttctgga

SEQ ID NO: 46691 - DNA, 489 bp, Gossypium hirsutum
  Clone ID: LIB3585-043-P1-K1-B7
aaaatgcttactatcaatatatatgttgttactcagggtgaccgctcaaagaaggttggcgtggttgatagcgagtacattgttcataagggtatacagagtttagggggcagcggccatcccacaatgaggacaaccatgaaggttcttgctttgcctgcttcccttctcgtactttctgtatttttctccttaatgtgtcaaagcctgtctttggctttcaagttttgtctgaatttttgtttcttttagttgttggaagcctttattattgcattacaattatagttgtccctgcaccgagtcattttgttatcttttcatcaagctaaaactacgataagtaattcactcggtttcttaatcgattttcccgctgatgtgcagagacacggtgcttcaagctttgatctaagaaccgaggtgagatttgtaattgtgaatagtggcatagcccttacaggaagaaacttatgcgataaacagata

SEQ ID NO: 46692 - DNA, 513 bp, Gossypium hirsutum
  Clone ID: LIB3585-043-P1-K1-D10
cccacgcgtccgcccacgcgtccgctagttctagatcgcgagcggccgccggtttttttggtttttttttagcctgcaaatcagatcctctctaattttcctctgattctttctcattggtagggtttaattttctttttgatttcctccctcctccccccaaaaaaaccgtaaataaaaaataaatctatgtcgaagaagaggaaatccgatgctacgcgcctggacgaggtggatcggagcatgtacaccaccttctgcgccgctgctaactcgctttcgcagctttattcacaggccatgaaccaccagcgtctctctttccaggccggtgaacgtcacgccttggagaaactttttcaatggattttgaggcagcaagaagaaggatcaagggtgacaacagctgacatagttgcttatttgcagaatgaacttgaatatggagtagaggagtcttcgatgtcccccaggctatcatttcagcagcagcaacagcaacacccttaaact

SEQ ID NO: 46693 - DNA, 519 bp, Gossypium hirsutum
  unsure (1)..(519): unsure at all n locations
  Clone ID: LIB3585-043-P1-K1-D5
atcccggtcgaccacgcgtccggatgggggtggccctatttgcctgtggttgtgcatgttaaaaccaaaaggttaaggcgttgttaggatgattgttgcattcaatctaggaaccctatatgaaacctcttgaaggtctaaaagctttgtatggtgatgactactacatatgcagatttcaggagcctggagtcatagaggctgagttcagggagatgggatatgagagagttctaaagggattcttgacataccgtgatccatgtcctcttcttataccaaaaggcaaatattttggacaaccagacactccaataagctggccgtcatggttttcagaggaagattgcaagtattacctcagccaatatgagaagaaaggcttcaccgggggattgaactattaccgaaatataaacttaaactggcaacttactgcaccgtggactggaagtaaaataaaagtgccggntaagttcattgtcngcgaccaggatctaacctataatgcttcgggaa

SEQ ID NO: 46694 - DNA, 277 bp, Gossypium hirsutum
  Clone ID: LIB3585-043-P1-K1-E10
cccacgcgtccgataaaacgtgcgcttatcctaaatttttcacacctaggggtattagggagaactctactaatgcaactgcattactaaccagtacatatattaccaaggccaatgatagacatggacattaatcattgttatggcatgacactatgaaagattgaatgaatacgttaaaaaagttaatgatacaagctgagttgaactgtattatgtagcttgtgagcttcagaatgaagggatgaagattatcaatacaaaaggtgccctttct

SEQ ID NO: 46695 - DNA, 414 bp, Gossypium hirsutum
  Clone ID: LIB3585-043-P1-K1-E4
cctaatctttaccttggcttttatagaagcttcagaagactgatgcaataaaggcccattggggcgctaaggggcatagctactagacactctataccataaaactatcaaactttgaactgtgaaaaatcgattgatccaacactaaatgatgcacctataatggctacagacttcctcactcaatatattactgcaacacttgtcgctaggtattatactgaaggtgcttctctcagacatgtttctgacgaaagtgcttcaagggacaacaagagagctttatcatcatcatctccaccacgaccatcaggttcatctaacaagataaatgatcgaacagccccacctactgctattgccctgaaaaccatgaaaggtttgacgttgacctagctcactaaccaccaccca

SEQ ID NO: 46696 - DNA, 504 bp, Gossypium hirsutum
  Clone ID: LIB3585-043-P1-K1-E7
cccacgcgtccgcccacgcgtccgcccacgcgtccggccggagctgatggaaacgtccagtgagaattgattcttaggaaagacatgagtacatttacgttcaagcaaggttgggctttccctaggaaaatatacttcaatggcgatgaatgcgccatgccaggtccagaggaatatccttatctaccaaactctgcaaattcaaagctgatttcagtatcgacaatggcttcctttttgcttttggttttcgctaatcttttggggatgatttgaagtgactgagtgaatgaaagcagggaaaagatgaaagaaaccaaacctttaagaaagtaagccattgacaggcagccatgtggatgaagttgaagcagtagggggtagatgaaaaaaagtgtgacatgaatgattttgcagagaaagccaataatgaatctgggtttttccaaggtcttatcattagtggctcgggccgggtttcagtctggatttttagttaagctg

SEQ ID NO: 46697 - DNA, 494 bp, Gossypium hirsutum
  Clone ID: LIB3585-043-P1-K1-F11
acggtcgcggctgccgccactgcacattccaagaagctcatgaagcttacgctctctctcttcggcaatggcttcaactcctccaaatgcaaaacggctgccaaaatggcggttgcaaggataaagctactcaggaacaagagacaagtagtgctgaaacaaatgaggcgtgacatcgccttgcttcttcagtctggtcaagatgccaccgcccgcattcgagttgaacatgtcatgagagaacaaaatgttttagctgcaaatgagttcattgagctcttttgtgagttagtggtagccaggctttccatcatcaagaagcgtagggaatgccctgctgatctgaaagaaggaattgctagtttgatatttgcggccccaagatgtgctgagattccagagctaatagaaattagaaacatttttgagaagaaatacggaagagattttgtagctgctgccactgatctgcggcccaactgcggtgttaatcg

SEQ ID NO: 46698 - DNA, 142 bp, Gossypium hirsutum
  Clone ID: LIB3585-043-P1-K1-G10
tctaaatcataactatatcatactatcacccaaattcaatacactttctgacaattcacaacatcgttactttaatatccctgacatttcttaacttattcgatttgtaacacataccattattgacagctatcttaataac

SEQ ID NO: 46699 - DNA, 493 bp, Gossypium hirsutum
  Clone ID: LIB3585-043-P1-K1-G12
cggacgcgtggggcaaggtgttttgccatcaaatcctaaagcaagcggaccagattcaaatcacagctgcaaaaacactgacaatgaaaatggtggtgcaggtaaaaaagcaaaaagcaagcaacaagagcctaaaggtcaagctcgaccggcaagtccttctcgcagtaggctggaggtaccagtttcaaagcctgaggttgttgttgcacctaacaccaaggaaactacggtgccggcgaaaagcacaaccgtaaaacgctcttcaagtaaacacgaaaatatgaactcgaattgttcagcaaacaacaaagaaaagaatagtttgccagaaacaggttcatggaactctctgcctgctagtctcttgaagccaggaaagggaatgcttagaagaagaaatttagcttctttggttgcagcagaagctcaaagtgaggcatctatggcagcaaatcttgtcaaatgtcttagcatgttttctgatctatgc

SEQ ID NO: 46700 - DNA, 490 bp, Gossypium hirsutum
  Clone ID: LIB3585-043-P1-K1-G6
aaaaaaagcttcttcatatcattaataatagtaaaagcaagcgcacatacgggattctaaattacaaatacaacaataaccatatgaacaaatggaacaaaatctagaatgtggtaacaaaccaacataatgcttacagtgcagaaagcattcaggctccaattccacggtcaaggaagcaacaagatcagatcttattcaatcaaattggagagctgagggcagccccatgtccggcaaagcaccattttgcccaaataccctgcaaaaaattgaaagaatgttgtcctagtttctaccatggcaaaactcatctcatcttacctcagatcactcctttcactgagatctcttcctcaagtgctgggatacagggtatccctcaaagaaatccaagacagccgtttccaagtcttcgactgaatatttgatgtaattctctgggtgccttccactctctatatggctcctgaaacgcccaaaaaatgac

SEQ ID NO: 46701 - DNA, 489 bp, Gossypium hirsutum
  Clone ID: LIB3585-043-P1-K1-H3
gcgacacatctgaaggaaattcaactgatctcttaaatgacagccttcatggaaagagtcaatgggagagggagatgactcctgagaagaaaacagatcaaggaaattctatttgctcgattgttaatccaattatcgccaatctcataagaactgaagaattttctaacttctacattcacccgtatacacagaagcaattgctgcagatgcccaatgggttgctttgcaagaatagagtgggtgagtgtgaaggcagaaaggacacattaaatgagttctatggtacaaaggagggagatctctctcgtctggtggcatcttctaatgctagtgtttgctgcagtcacgaaagtgaacattcaatgtgcaatgaaaagagttgtctagttgatgatttagagctgtcagttaaggctaggaaattgagagctctccaattttctccagaggatgaagtggaaggggaaattatattttatcagcata

SEQ ID NO: 46702 - DNA, 496 bp, Gossypium hirsutum
  Clone ID: LIB3585-043-P1-K1-H7
cccacgcgtccgcttgcccagttcgttaccatggaatgttatgaggagaagtgggaatgtgtcatcaaaagaatttggcccagaactaagtaccttgatgttatcgtaactggagccatggctcaatatatccccacccttgaatattacagtggtggcttgccaatggcttgcacgatgtatgcttcgtcagagtgttatttcggtctcaatctcaacccgatgtgcaaaccatccgaagtcacatacactatcatgccaaacatggcgtactttgagttcttgcctcatggatcatccacttcttgcctagttgatctcgccgatgtcgaagtcggcaaagaatatgagctcatcctcaccacttatgcaggattgtgccgctacagagtcggcgatatccttcgagtcaccggttttcacaacgcggccccacagtttcgtttcattaggagaaagaacgttttgttgagcatcgagtcagataaaacggatg

SEQ ID NO: 46703 - DNA, 241 bp, Gossypium hirsutum
  Clone ID: LIB3585-044-P1-K1-A10
cccacgcgtccgatcaaacataccactatcacattaaatatcgacagcgaaacaatggcggcttcatttatcataaacacgcttgacgccaatatcaactttaaggctacatactaagcatctatcatcacaatgtttctccacaacactctaccatgtgcaccatacgtttattacacaagattcaagtgtgctatttacatgaaacttaatggcctaaactccaaaccattgtccattg

SEQ ID NO: 46704 - DNA, 306 bp, Gossypium hirsutum
  Clone ID: LIB3585-044-P1-K1-A5
cccacgcgtccactttctagaggttcatgctactcctgatcatacaatgagttgtgtaagcgatgtgacggcagataaacctcatcaacctcagccaatgatgtctctcacaggatatgctctgctgataagccgatgtgatatgacagatattcaggatggacgttatcatcaactcaacataacatggcattcacagatttttacattacttgaaagcagacatttctatatccagctcatgactacgaacgattcttagcaaccactgcgagagacgaaatgctttataatccacactcgact

SEQ ID NO: 46705 - DNA, 102 bp, Gossypium hirsutum
  Clone ID: LIB3585-044-P1-K1-A6
caacgactcatttccatcggaaaacatttccaaaatggtcggaccttgaacacttacaagatcgagaacgattccacatctctatcttcatacttcgtttac

SEQ ID NO: 46706 - DNA, 382 bp, Gossypium hirsutum
  unsure (1)..(382): unsure at all n locations
  Clone ID: LIB3585-044-P1-K1-B2
caaccatcgggtgaaggcggtcagagaaagagagggagaagcccagcggataaagaaagcgggcggtgtaaagaggttgttgaggaacagagtatcancgcaacaagcaagggaaaggaaaaaggcgtacttgaatgaactggaaaccagagttagagacttggagaagaagaactctgaactagaagagaggctatccacgttgcacaatgagaatcagatgctttgacaaatagtttagaacacaactgttatcacgagaggtagaaatgcttttacaaatacatctgtaataaccctttaaagagttgtgcattggtataaaaaaaatttttaatttattttttttattaaaaaaaattattaaatttttattgctttt

SEQ ID NO: 46707 - DNA, 464 bp, Gossypium hirsutum
  Clone ID: LIB3585-044-P1-K1-B6
attttctagttgtaattgtagtaggcaattttggatctactatgtatgtctagggttttggatggatatttgcaaagatctgctttttctttttctttttctttttctaccagctctcgaattttccttgggttttggaaagttcacttttttgagattcctcaacttaatcttgtgtgaaaaagggtaccgaatccattttaatgtttttatgatttgatatttcgttgctaatttaaaacagccatacttctctgcatttttctaatttggtttttctctctctttgaacaatttcattcaaagagggagaaaagcatagttttcttctttctttttttgcatacggtcatatcttcttttgcagtttaccttaaccagtttcatatgaattgtgtgcctttgaaatttctcttctacatgccttttatttactactcttcccaaattgtttcttttcatcg

SEQ ID NO: 46708 - DNA, 445 bp, Gossypium hirsutum
  Clone ID: LIB3585-044-P1-K1-C11
cccacgcgtccgacgatttacttctgggatctattgccgcgttttatgtgttcagggtggcgctacactaaagttgaagaaagcttcaacattcaggctatgcatgatattctttatcatcgacatcacttagataattatgatcatttggagtttcctggtgttgttcctcgcacttttatcggggctttccttgcgtcaattttctcatctccaattgtattagcagtgcaactgctgcatttgccaaagatttatagtcttataattggtcagaaacaagtttggacatcaagttgaagcattctttgtaatattcactgcaattcagtttcacttgctgttctattgctcttgtgctcttccaaatattctagctatgggttaaatctggcgtatggtcaattggttgaaaagtaattttttataccgttttaaaactttc

SEQ ID NO: 46709 - DNA, 154 bp, Gossypium hirsutum
  Clone ID: LIB3585-044-P1-K1-C7
cggacgcgtgggaaaaattttcagggcatctcttcacatgcacagcaagaagaaacatagagagagcaagaaacgcacattgaaggcccatgttcttttaaaagagaatttattggataaggattgttttccctctgatctagggtcatctaca

SEQ ID NO: 46710 - DNA, 361 bp, Gossypium hirsutum
  Clone ID: LIB3585-044-P1-K1-D12
gtacggtcaaggtggcagtctttctccgcctgattcttgctgcgatggatcagggggctggattgataatgaagatgaattctacggaacacccatggttgaagtagtagaagacactgaacaccgccccaacagttccatgatgaaaagtagcagctatctgctttctccggatgatagaatcagcaactcacaagaaatttttggtgttccggccaaagcattggagccggaacagtaccacaaacaagtgatggctacatgaagtttacagcaaggaagacattgatgcctcttctgaatcctcaccacaagaggtgagactcaatctctgcctaccttaatctcatagaagactttt

SEQ ID NO: 46711 - DNA, 213 bp, Gossypium hirsutum
  Clone ID: LIB3585-044-P1-K1-E6
ggaatttccatgaatttatagtaaactcaagacaacataattcctaactaattgtctgacgcgtggactcaaagatagactcaatagaccactttttttttcctgttcttggaagcaaagttacagaatgactgatagcttgccacaaagcatagagagcttatctgcattgttgactcataatcaaaaaaccctgctctgtattgatatatt

SEQ ID NO: 46712 - DNA, 309 bp, Gossypium hirsutum
  Clone ID: LIB3585-044-P1-K1-F10
gtctctctcatcttttttaacttcaaatgctaattacattatcattaccactaggtctcgtctatctggggttttcatcgcgagaagaaaaaatgaaaaaaattcaagtataaccagtttgctattaataagaaaaactgggaaacattcttaaaaatatcatttgatatgatggaatagttaaccattctccttgtttgaagaaacctaccaactaacctttatgtacatatcatttgcataagatagacattatgaagaatccttgcaactaaccctaataacattatgcccttatttcattttcat

SEQ ID NO: 46713 - DNA, 250 bp, Gossypium hirsutum
  Clone ID: LIB3585-044-P1-K1-F11
caaatagccttgttcttgagatgattaaatcacttaaggatgttattttctgaaggccgggcattgcatccatacacattggatcggtttatttgaagtttggactttcgaagatctaacttgccccagattaatgcttcagtgacagttataccaaatccttcaaagtgttatgtaggtattagtttgccaaaaataatctgtggtagatttaccatatagttttgtcctctttttggtacattatttt

SEQ ID NO: 46714 - DNA, 179 bp, Gossypium hirsutum
  Clone ID: LIB3585-044-P1-K1-F12
aggaaaacccggcccgacccacgcgtccgcttacttctctcatagattctcatgttatcctttcattccaagacctaccatgcagaggggattaattatatttattagatctcacaccccatcaaacgtttacaaattcaaaattccttcttcaccaaatctaaatatattctcatatt

SEQ ID NO: 46715 - DNA, 306 bp, Gossypium hirsutum
  Clone ID: LIB3585-044-P1-K1-F4
gcagtcaacagtacttatgacaaaacaccaatcactcttgctaatcaatctgtcacccgtgtgggcacaaccctaatgatattcggttgacagcattcaaaaagaacactcttaaatgatctacatatactaaacctatatatctataacctgctatgaaattgatgctgaaggatctcaccacatcaccactaactcatcattcttatgttatacatactacgcgttacttttctaaatctttgtatatgaatacatactacttatttcaataattcttatctttttaaatttttaatctatttt

SEQ ID NO: 46716 - DNA, 347 bp, Gossypium hirsutum
  Clone ID: LIB3585-044-P1-K1-F5
aataaaataaagggttttgcaaaatggcttggatatagtctgacagtttgtagggtcacggattctggcaacaccaatggacatactaatagaagaaagaggaataactttagccaagggaagagaaggttgaatggtaggaccaatatggcacagcaagaggatgtaattaggaagaccgtttatgtatctgatattgacctacaggttaccgaggagcttcttgctggtctctttctgagctgtggaccggttgttgattgccgcatttgtggtgatcctaactctgttctacgctttgacttagttgagttctataatgaagaggatgctatggctgcttttaa

SEQ ID NO: 46717 - DNA, 241 bp, Gossypium hirsutum
  Clone ID: LIB3585-044-P1-K1-F9
cccacgcgtccgcccacgcgtccgcatggatttcgattttccattatattgatataattggtgatatttattacgttcacaatcaccataaatgaaatatccaccttatgtttatatatatatatatataaaccctatacctacatgcttaagctgtacatgctagttattttgcaaacatgttgagatgataaacttctaacagacacgttctttatccaatcacttttcatgatagctt

SEQ ID NO: 46718 - DNA, 223 bp, Gossypium hirsutum
  Clone ID: LIB3585-044-P1-K1-G12
cccggcccgacccacgcgtccgatcttcccccacctcagaagatgcatgtaagaaggtactcgtgtgcatcttgcggttcggatggcattaattaagtgtcttctctgactcataagtctaaagcattccctatgcttggtccaattctaaatacacaattctcttcttattcttttataacttttttcattaactttcaattttgcttttcaacatacttat

SEQ ID NO: 46719 - DNA, 101 bp, Gossypium hirsutum
  Clone ID: LIB3585-044-P1-K1-G2
tctctgtcattcacaatgtataaacaatcattttcattaatacaacatgcaagcagaggggttcaggtgacaatcaaacttgcccataatttaaattgtaa

SEQ ID NO: 46720 - DNA, 297 bp, Gossypium hirsutum
  Clone ID: LIB3585-044-P1-K1-G3
tttttcttctgcatctgtttttttttttatgatgcctggtgtcaatcaagaccaatccggcaggggttccgaaccctttgtcgagatcgatccgaccggccgttacggtcgttacagtgaacttctggggtccggagctgtcaaaaaagtataccgagcatttgatcaacaagaaggcattgaagttgcatggaaccaagtcaaactaagaaacttttccaacgatccctcgatgatcgacaggctttattcggaggttcgttttttatagaccgttaaccaacaagaacttaacta

SEQ ID NO: 46721 - DNA, 373 bp, Gossypium hirsutum
  Clone ID: LIB3585-044-P1-K1-G4
cgaccacgcgtccgcccacgcgtccgcccacgcgtccgctgacgcgttggctgacgctgtcttaataaacgcctgcgaggtactttcggtttccatttacttctttatttctacgtttttaaatttttagtaagccaaaatgaaacagcgcataacattccacataatcatcgcctgcatcctaatcttcattatcaatcttctaactacacttcttttcatatggaccatactccgttccactaatcccatgttcatccttcaagacactcacttttcttctttaacaccttctacctctaaccatctcaccttcaattttcaagacactttattcttttcaaaccccaactacagaattgttatttactac

SEQ ID NO: 46722 - DNA, 195 bp, Gossypium hirsutum
  Clone ID: LIB3585-044-P1-K1-G7
caggatccacaggatgctgaaactcgtattgagcattgacaaggatgcacgtggagctagagctaatactaatatgcccccattgcaagatgcatatgccgaaggcaacaagatgaatgtagttgattaagcctaacatgattttatatgaactctaatcagtaaatatatcatactttttaagcatctattaac

SEQ ID NO: 46723 - DNA, 275 bp, Gossypium hirsutum
  Clone ID: LIB3585-044-P1-K1-G8
tcttaaaaattgaaatcataaacaaaaacacttgcagttttctgaatggggacgagggttgaaactactgttgtcactgtttttctttgtcttctgtttcctattgtcttttccacatccaatgacggatttttcagaattggtctgaacaagagaaattttgatcgcaacaatctgataactgcccaacttgattccaaattatgagactttttgagaggttcttttagaaagtatctttatgtctacttacataattcaattgatatttttat

SEQ ID NO: 46724 - DNA, 343 bp, Gossypium hirsutum
  unsure (1)..(343): unsure at all n locations
  Clone ID: LIB3585-044-P1-K1-H4
cgacccacgcggaagcccacgcctccncngactcattgccaataatttaacaatttccgagtcttacatcttccagacgtcgttataaacttcaaaaagctaaacaccctccctttgacacaacaaacaacgcaccttccccttcttcttcctcctcttctagcattcctgtctatcacttaaaaaaaccatatctttgttgttggttttgtttttttttttattatctaaaaacaaaaaaattcattcaaaaacttattcaaaaggtactattatctattcttcatgaccttcaatgttccctttaattccttttatactattttcataacccttctaacct

SEQ ID NO: 46725 - DNA, 184 bp, Gossypium hirsutum
  Clone ID: LIB3585-044-P1-K1-H5
cccacgcctccgccaaaacacaacctatcaatttcatctttaaaattcctgtaaaccattgttgctggtggaatttgcattcctattaataagtcttgttgctcaagtttattgtatgacaattataaaaccatcttaaacagataaactaacatctagataagatcataaaatttatgaaaac

SEQ ID NO: 46726 - DNA, 119 bp, Gossypium hirsutum
  Clone ID: LIB3585-044-P1-K1-H7
ggcacacgtctgcacaatataaattttatagtcatagacctatccttataccctgggcgtgggaattatcctaataccccacaatgtctaaccatttacattgttccatatctaactac

SEQ ID NO: 46727 - DNA, 319 bp, Gossypium hirsutum
  Clone ID: LIB3585-049-P1-K1-A12
gctacgcatacgtccactcttgcgcccactctttccataattcattaccatctcatcacatattaccaaacacgttggcgtttattatacgaataattttcttgtaaaataatatgtttatcaaactagcaaaatctgacaattatattgtccatatggacatatttgccataccaaaatcttaatctaactttcacaattgctattaattcaatctataatgatacatagccaaataaaaagctgaaaccaaaacaaccactactttttataaacttatctataattataaacatattattcatggttatactgctag

SEQ ID NO: 46728 - DNA, 538 bp, Gossypium hirsutum
  unsure (1)..(538): unsure at all n locations
  Clone ID: LIB3585-049-P1-K1-A3
cgcgtacgcaagaaattaaaaggcgaacacttttccccttatttttctcttcnngttttctcggaccttcacttttcgtttttcttgcttcagtgtnnggcgtgaaatttngggttctggttaaaagaaaaaacccaacttgttttggtannggttttgccgtaacctggtnnttttggatttaaccttannaagaattaaaccgttgattggggtcgtagcgttttccaaanaagaaacaaccaaaaccatttcttcattttttaatcaaaaccagagaaagggcttgaatattcaaccaaaaaattttccaactaccccaacaaagactaggttgaatcccagatttgtatttaaatttcaattttttaaaatttaagttttcttttctcttccgttgtctgtttcctttaaatttagccttattcaagcattttttttttcatttatttaacgaaatcgcgataatctctctcttcctctatcccccattgttcttctcttttgtcttcttcaacttgccctctgttttcccctg

SEQ ID NO: 46729 - DNA, 477 bp, Gossypium hirsutum
  unsure (1)..(477): unsure at all n locations
  Clone ID: LIB3585-049-P1-K1-A7
gaatgctataatataagtttgacgaatggatgaagaacatatgttgcttcccagttggatggacaagaatccagctgaggtggcagccgattcacgattcttcattttatcttgtgttatcgctggcctagttggtattttgactatagtttatacagctttccagtggagaagaaacattaacttaagttggatgaaagctgtagctaggtctaagaaaatccccaagaccaagcataaggttcctgtggctcctcatacttgggagctggaatctgtatcccgtgctaagaatttaaattgctgtgcttgtttaaagccaatgtcaccctctcaaaccctagggcctatgatatcttcggatagtttcattcaccgttgtagcatctgtggnncantaactcacttgagctgctctactagtgcacacaaggattgcaagtgtgtatctatgatcggctttgatcatgtgatgca

SEQ ID NO: 46730 - DNA, 495 bp, Gossypium hirsutum
  Clone ID: LIB3585-049-P1-K1-B2
atgtttgcgtaaatatgcggtcatgatcccaactaaactgcgtcctgttcgttttcatttattctctcaggtctaaagcgtatgagagcttggaaatcatgaatttcagaaaagggaacttggtggaggtattaagaggagaagatgatccatgcggctcctggtttactgctaatattgtttcggcggacgtcgaaaactgtgttgttagatacaaactgctgatggaccatgaaggaaaacaagtggtggagaagcttcaaaggaaggatgttagacccttacctccaagtgtaaattggaagagttgggtagtcggcgatgtagctgaggtgtttgataaccggtgttggagggttggaaagatcacaaaggtgttaaagaacaaccaccgatttgtcattaagttctttgggtcaatccaacttatggaatttcatgggtcgagtttaaggattagacaggcttgggatggcaagaagtggatggtgaggg

SEQ ID NO: 46731 - DNA, 498 bp, Gossypium hirsutum
  Clone ID: LIB3585-049-P1-K1-B4
atatgtttggaaagcgaattggcttcctcaaattcaaagctgatattatcgataaaggaacgggaaataaggttccaggtatagtatttgcacgaggaccagctgtaactgtgctaattcttttggagtccgagggcacaacatatgctgttctcaccgaacaggttagggtccccactgggagggttgttctcgaattgcctgctggaatgttggatgatgacaagggtgattttgttggcactgcagttcgtgaggttgaggaggagattggtattcgattgaaactagaagacatggttgacctcactgcgttccttgatccatctactggattcaaagtttttccttctccaggaagctgtgatgaagaacttgggctatttctgtacagagggtgtgttgataaaaacattatcacacagcttgaaggaaaagaaacgggttgtgtcaaacacggtgagctgatcaaggttcgtgtagttccatatgagaaac

SEQ ID NO: 46732 - DNA, 491 bp, Gossypium hirsutum
  Clone ID: LIB3585-049-P1-K1-C5
aaactatggttaccccaaacgaaacggggccctgcgacttctgcaatcaccgaattgcccttctctactgccgagctggctgggccaagctctgtttgttgtgcgaccaccacgtccattctgccaacctcctctcccgcaagcaccttcgctctcagatctgccataactgcagcgcccaaccggtttccgttcggcgtgctactcataatttgatgctttgtcaagactgtgattgggacacccacggtacttgctctgtctccgccgctcacgatcgcacccctgtcgaaggtttttctggttgtccctccgctctggatctggctgcggctttcggcttgcatctgcatgacaccaaaccgtctgatcagagctggaacagctgtcaccaacacttgatgatgcccatcgccgaaccatgcttctacggtatgagcgtccaagacttaatggaaccttacgacagtttatgcaacgggaagacgttt

SEQ ID NO: 46733 - DNA, 488 bp, Gossypium hirsutum
  Clone ID: LIB3585-049-P1-K1-C9
attggtttgtttcatggagccctttttactcaacttgcagtccattaggtattacagccatgcaagcatactgaggggcgtgcccttgaagaagatggcccaccgccaccaacatctcacagctgaatatgtagctaacacagtgaatagaggcagctactttaggtccctatgactccgagccttttacttctctttccccctcttcttgtggatctttggaccccttcctatgtacttttcttgcattgcccttgttttcttgctgtatttacttgacattacttttaaattcgtatgggcggttggagctgtggatgacaatggccacaactgtcacaacggcgatgaagaattatgagtttcaagtactcgatcctgatcccgtttaataattcgtgcaatcaaagttgaatcgaattgccttttttactcctagggaaaataagggtactgattcttttatgtttatacgttaattatcatgt

SEQ ID NO: 46734 - DNA, 493 bp, Gossypium hirsutum
  Clone ID: LIB3585-049-P1-K1-D11
cccacgcgtccgccggtgccatttgaccaaaagaaaaaagctatgtacgacatggctgcctactatcctccaccgcagcccttctccctcctcactacccttactaccaaacccctccacctgctgtgacgccgccgcctccacctcctcctcctcctggtgctgctgcccctcccctccattaccactcctacatcccccaccaacaacctacgctgcccccaccaccccctttcccctcatattcctttcctcacgtcgctgcttattcttctcatgactccgttcggaccctcttcatcgccggccttcccgaagacattaagccccgcgagatttacaatctgttccgcgaatttcccggttatgaatcatcccatcttcggagccccaatacctgccaaaattctcagccgttcgcttttgctgtcttatccgaccaacaatctgcgctcgccgtgatgcaagcgcttaatggaatggtgtttgatct

SEQ ID NO: 46735 - DNA, 313 bp, Gossypium hirsutum
  Clone ID: LIB3585-049-P1-K1-D12
cgtccgaaacctttcaaaagctcctgctctttaaagactctgatcattcttctcactaatattattgctcagtcggtcctatatataaaactgccttccaatcctccccaccacaaccattgatctttccctcaaaccttttgcttaagatagttcgatttaattcaatctaacaatatctcttagattatacattaaacccattaaagggaaattaataattttttgaccttcaatatatctttacatttaatcttttttcatgcaaatcctgaataaaaactatatatttattacttttataattactatt

SEQ ID NO: 46736 - DNA, 491 bp, Gossypium hirsutum
  Clone ID: LIB3585-049-P1-K1-D7
aaacggtgacatttcaagctcccgtgctttgtcaagcttgtggtggagaaggagttcctcctggcgtgaaacctgaaggatgccggcactgtggaggctcaggcatgttatctatcaacaagggctttatgagtattcgttctacttgtcctcattgtggtggaagtggtcagtttgtatcgaagctttgcaagtcatgcaatggagctaggttagtgaaaggaccaaaaacagtcaaattggacataatgccaggagtggataacaatgaaacattgaaggtttatggaagtggcggagctgatcctgatagaactcatcccggggatctttacgtaacgataaaggtccggcaagacccagtttttcgtagagaaggtgccaacattcacgtggacgctgttttgagtgttgttcaggcaatcttgggaggaaccatccaggtcccaactcttaccggtgatgttgtgctcaaggtccgtcctggcact

SEQ ID NO: 46737 - DNA, 493 bp, Gossypium hirsutum
  Clone ID: LIB3585-049-P1-K1-D8
gctttcctcagttttaaagatgacgaaagaggtggtatacatgcaaaactggggtgcagtggcaccatccccgcgcaggaatcccagaaaatcttccacatatccaaggctagagaccattcatgaagaagggtgtgaaaatcattcagttttttcaaagaaattcttgctggttctcccccttgtcttgtctacgggtgtctatttcttggtaaacaaggatttgactctatgtgcatgagcccttccaatgcttttttttgcttcaaagggatctgggaaaactgtggctttctccccccccccctttctttgcttgagagatgagaagcctggaaaatggagaatgtgaagaaattcaatgccagggagagaagaatgttcaataagtctatagcagtgtaatgagtgagaatatgaaatagatggtgggcaaatctgctttgatgttcataatttgtaaatcctgttttatcatcatatcgatccaacg

SEQ ID NO: 46738 - DNA, 493 bp, Gossypium hirsutum
  Clone ID: LIB3585-049-P1-K1-D9
agaagaaaaaggaagacttcggctcgtctttaattaggcatttaaccccgacacacggcagaacattccaatagctgtggccaatcacaacccctttaaagattagattaaagtgtccgaagtcaaacccacctttgacccctcttccccgcttctctggattggagagcttatcttggaatccgataatgtcaaaaaccattaatctaataaaagccaacgcttctaaccctaaggtttggattgtggcgggaattacagtggccggaatcctacttctggctgacaccactagaaggaggaggaggaggaaagctattatcatccaaagacaagattttggcgctttcttggaacgcttcgacttaatccctttcccccagccgccaactcctcccgccaaacttccattacaagatttgatgtaaaaggttatgtaacggggtttgggaatcccgattggcgtagaacacatgagccgtctgataagatg

SEQ ID NO: 46739 - DNA, 564 bp, Gossypium hirsutum
  unsure (1)..(564): unsure at all n locations
  Clone ID: LIB3585-049-P1-K1-E5
aaattccgggttccgacccacgccgtccgaaaaaaagtcgcgaatataaaaaatgcaagaaaactctgcaaaagaaaagcagctttcggcttggatgggcgggtcccangaaaacagcgccagagatcaaccacttggaagagccatcacccatgtcanccattagacccccaccccttgaagaaatgtnnagagccgtaagaagacccgagctcttggctttctccatggtttcccttcgagaaattcctcaagtacccgccgtcacaggnctcatcaaaatggagcccttcagtaacgaagcacagtcagagccgttgattaacagtgatgatggggatgataaggaagaaagcgtgttggatggtctgatcaaaattgggctctctcagaatactactgagcttaattcccaaaaggcttttgcttctctcaagtctgtttttcccacctgggaagatgtatatgctgctgaaaccaaaagtctagaaaatgcaataagatgtggcggcttagcaccaaggaaagcttcttgtattaagaatgtgttgagttgtctgcatg

SEQ ID NO: 46740 - DNA, 502 bp, Gossypium hirsutum
  Clone ID: LIB3585-049-P1-K1-F2
cgcgagttatgtagaagaaatgagctcttatctatggggttgaagcagctgatcaaggaaataagtctccgaaacaggtgggtgcggaatcatatttgtggaaagctattgtaagtattaagtttgatgctaaagagttaaaaatttctacaaattgtgactgtttgattttatttattgactggttattgttccttacatcctaatatacagcatctggtttaccttaaaaaaaaaaaaaaaaaaaaaaaaaaaaaaaaaaaaaacaaaacccaaaaaaaaaaaaaatataaaaaaaaaaaagaaataaaaaattaaaaaaaaaaggggccgccccttttaaagaatcaaagtttaggtccgcgttattgcaacgaaatattttttttataggtgcccctaaattaatttcattggccgcttttaaaaaactctttaactggaaaacccttggttttcccaaatttaatccctttgaaaaaaatccccttttcgcaagttg

SEQ ID NO: 46741 - DNA, 501 bp, Gossypium hirsutum
  Clone ID: LIB3585-049-P1-K1-G6
atcctgtatgactccaatcggctatagtcgctgcagggcgattgagaaggtgttggaatctgtcaaagtgacatgccgaaacgacaaagtacgggtgcaaagaagcattcagttatagcatgaagcagaaacatggaaaggcatgccttttcgcgccatgttcatgcccccttcctgattgcgactttgagggttcatcagaggagttaagtgcacactttggcaatgtacacaagtattctgcaacacgtttcctttatgatcgtctagcacccattaccttaggagtttctgagaaattccttattcttcgagaggagacagatggttctttgttcattcttcacaacaaggttgagaatttggggaatgtagttactttgagccggattgggccctcaacggagagaggtttcttctatgaactaactgtgaaagctccatctgatgtaagtaatcttagattacagtccttcacaaagagcactccaaaacgagttg

SEQ ID NO: 46742 - DNA, 334 bp, Gossypium hirsutum
  Clone ID: LIB3585-049-P1-K1-G7
caagctcgttaatttcatgcatattatcaaatatttataataaaacccatctgcaaaaccctcataaaattgagtgcgggcctttttatttaattcgtaccctgaatctttttggagaggagttaactcataaaagctaaagccactgatatagcttttgcatgcatctaaccaaaatatacagatgctagagcacagagcctgaaccatgaattgaaacaccacactcgcaccaagcgctgtatgtgtaaaccaacagacatatcaatacatgagatgccttatcatcacgattatgactaccaaacgccaggcatagattaacgctacatat

SEQ ID NO: 46743 - DNA, 496 bp, Gossypium hirsutum
  Clone ID: LIB3585-049-P1-K1-H6
gtgattttcatcttgcccttctaattatcaaactcgattggtaatttcctaatgtcgtggtttatgaagttttaaagcgttggtcattaaagaaaaagaaatggcagtttccttttctagttttccgtggaggttttggagtattggaagtaaagataaacagcttgtttcaaatgggtcttctttgaattcttcatcttctgaaactgtaatattccaaacaaaaataaccccatcaaagggaaagggaaagtggcaaggtggtgaaaagacaagagtggttcaatcagatggtgtgtgtttatctggatatgaatctgatggtccagaatggtccattggatgggaagaaccccatggtcctggttttcaaagtgataatgaagatgatggtggatttgttgtgttggttccctgttacaaacctggttgcaaacaacttgtagagggccctaatagccagcttttgagtgcaatcaagaacctctctaatggc

SEQ ID NO: 46744 - DNA, 493 bp, Gossypium hirsutum
  Clone ID: LIB3585-049-P1-K1-H9
cccacgcgtccggcagcaccttcttctctataccaataaagcgaaccatgcccgacccgacccattctgctaagggagcctccaagcgttccaagcctccgtctactactctctacatccctcccggccaggtggccttccgtctcctttgtcacgtgtcgcgtgtcgggggcatcatcggcaagtcgggcagcgtcatcaagcaactgcaacaggctacgggtaccaagatccgaatcgaggatgccccggccgaatgccccgaccgggttattaccatcataggtcctaatgctgttaataccaaggttgtgcttgaccttggcggcgacggtgagggtggtagtagagttgatgaaatcgaggtgtccaaggcgcaggaggcgctggtgaaggtattcgagaggattctggaggtggcggctgagagcaatggggcagccttggggatggtttcttgtcggttgttggcagaggttaagcaagctggggg

SEQ ID NO: 46745 - DNA, 514 bp, Gossypium hirsutum
  Clone ID: LIB3585-051-P1-K1-A12
acaattgatttgcgtacaagacagcagcgtatagctgagatcacagagatgatccaggtggcgaagcctccttcatgacgatgtcttggatgatgcagacacaagacgtggtgttggttcactaaatgctgtaatgggcaacaagttggctgttttagcaggagatttcctgctttctcgagcttgtctgacccttgcttctttaaaaaatacagaggttgtcaccttaattgcaacagttgttgagaatcttgttactggtgaaaccatgcaactaacaactgcttctaataaacgttttagcatggaatattacatgcagaagacatacaacaagactgcatccttaatgtcaaacagctgcaagtcagttgcccttcttgctgggcacacagcaaaaatcgcaatgttagcctttgagtacggaaaaaatctgggattagcatttcaattgatagatgatgttcttgatttcacaggcacatcaacatcccttggaaaagggttctttatt

SEQ ID NO: 46746 - DNA, 514 bp, Gossypium hirsutum
  Clone ID: LIB3585-051-P1-K1-A3
aattttctcaaatttaagctttatatatatataatattacgatcaaagtttcttttatatgttctgggggaagatttgccatcgccaaaactaagattttaatgcttagggaagctaagcgaccagttgagcgaccgataagcaaaatcgctggtgccgatagggaaactatcgaaaagtcgagaaagtcatcgtcaaacagtaacagcagcaacgatataaaagattcgtggtgctgggttccacatccaaagagcgggatatattttcctgaaggccatgaatgggtaatgaaagatgttccggacggagcagcatcgttgaatcagacatattggctccggaacgttgagggggtcgataaaccagaaccgtctgagcatgaatatttttcaagtgatcatcactattcacatgcaaatatgtgagtactaaactttaagaattaggtattggaaggatgctgaataaacattttggccatggctcgaataatacataatatatacatatg

SEQ ID NO: 46747 - DNA, 518 bp, Gossypium hirsutum
  Clone ID: LIB3585-051-P1-K1-A9
gccacgcgtcgccacgcgtcgcagcatatgatgatgaatgtgcaatatgtcgggaacctatggccaagctaaaagcttcactgtatacctttttcatcttgcatgcttgagatcctggttggccaaggctaaatgaagttactcatgtcccacttgtgaaaaccacttttcttggagaagtgaaaatgaggaaatttccactgcaaactttaagtgatgagcagtgcccgtcagataaattctggactaaatcggcaaatatgcctggtatccctacctgcgagtattcaaatcaaatgcagaagcagtagaaggcacccttggaggagtggaggactggattctgaatggttgcattcttggccaaaccagaatgttgatggagccggtccttctactgataccagatcagttggacttgggagagttcatatgatgatgaagcaccttgcatctgttggagaaacttatgcccaaactgctctagaagatactgcttggagcctttgcccatgaac

SEQ ID NO: 46748 - DNA, 565 bp, Gossypium hirsutum
  Clone ID: LIB3585-051-P1-K1-B11
ggaaatataaggacagaaatcctgcctgctttacctggtcctgtttcccctcagcgtcccggccatgctcctgtttcacctcatcatagtggtagggataaagggaagcagattgtagaacctaggcctaattacaaaggaaaggaacctatgtcacctcatgttgcttccaagggaaaaggccctgagagagcatctgttgccttgcgtattaaagatccagctcctgagcctggtattattcctaacaataggttctctgctactcaggcactaattatacccaaggaagagccctttactgatgacatgccacaggatgtggttcctcttgcagttattcagccagattcattaagcggaagagatttgccaataggggatttttcaactgaaaaatcaaattggctggaacctccagaatccttgcatgcagctgaaattgcaggtgctggtgcttcagcttcaggaactgagagacataccagctgcgagcatgctactgttcctgatggaatccctttattctagagatgcctcatcacaattgggagaggaaggaatg

SEQ ID NO: 46749 - DNA, 482 bp, Gossypium hirsutum
  Clone ID: LIB3585-051-P1-K1-B4
aacactcgtactgctacgcttccattccaagccagctgcttaattcgcataaatttcatggggatggaaccttcttataaaatacctaccatcatctcataactcgactcaaccaatgataacactgtcgaatatctctggatcactattgtatcatctatgaatttgcaacatcaaatatctcagcttacgctgatttctacaactcaaattatgttcttcctaacaacatcataccaaccaaacctgcaacatactgtgaacaaaaaaccaagttcgtaactgattatcaagagaaaccactgaggagcccatcgttgaagactctaacacagacactctattcaccacatcatccatcaagatctgattcaccattagcctgaccgatctaaccaaagatactacagaagatctgagcttattaactactctcccaacctagaggagtctgatcgatcatacgcatacacagctttaca

SEQ ID NO: 46750 - DNA, 505 bp, Gossypium hirsutum
  Clone ID: LIB3585-051-P1-K1-B5
cccacgcgtccgataattttcaatctttttcagatctctcgatctcatttctcttctttggcctgatttcgcatcaattaggttgagaagcaggtgttctctttgtttctgggctgtgattttgtttatgaatataagggataaattgcaactacaatttattggatcaccatgggccaaagaaatatgctatgccctagccaaatgattgatttagaaatggatcagcaaggccatggctatctccgtcacgagccttgcacctttttgggcaatatcacgaactacccgccacctgatatcccgatgacagtgatagctcctggaaacacaactagtctcgatgctcatcccttgcctcagcattatgaaaatggtatgttctatgggatgccccagtaccctgttcctggtgttcaacattgtcatcatcctccaaaccttgatcttggtatcggaaatgcttccaacttttatattccctatgtggctaccccttcgtctg

SEQ ID NO: 46751 - DNA, 502 bp, Gossypium hirsutum
  Clone ID: LIB3585-051-P1-K1-B7
atattgtgttcttaatatggtatcacagccataatttttttttggttatggcgacagatggagtatctgatggtgatcgtcagtctattcatacggccacgccgattgcagcgacttcttctctagatcttggacacgcttctttgcgcaaacttcatcagtttcccaaacatgatacggtgaaacttactgctagtaactttctcttatggaaacaacaaatcttgttaattcttgaaggctatggtttgcatggttttgttctcggaaccgttcaggttccttcacagtctattcttgctagcgatgggtctcctgttgctaatcctgacttcgttgttcatacacaacaagataagctcttggcttcttggttgaccaccatttctgatagtatactggttcaccttactggaaccgggactagttttgatgtgtggagtaaggttctcaaaaggtttgctgcaaaatcttctataacaatgttaactctcaaacatgc

SEQ ID NO: 46752 - DNA, 476 bp, Gossypium hirsutum
  Clone ID: LIB3585-051-P1-K1-C7
cttattcgtgctgaaacgcatgcatttgtaaattcagtgcaatctcttctttatagaggggcatcacactatatattacacagggatcaattcttgcaactaaaattacacccatccaactctcacttaagataaacaacttattctctattcaaatctcaaccacatcaatcttgatcattctactaatatacagccattaaactttactatctgaacaacatactcaaagctgatccaattgctttcttgttcaaccaagtaagtgcttccaatctagccaccaccaaccctgatgcacccgaaatgctgacccttatcttacgtctacttactaactacacatttcatacttacattttgcgtactctctctgatgacacactttataaactctatcatctatgccctagttgtatattcttgaccaaaaacgaagatacagtcactctctgcggccttagtcttatgaatca

SEQ ID NO: 46753 - DNA, 562 bp, Gossypium hirsutum
  Clone ID: LIB3585-051-P1-K1-D11
gctttctccaattacagttgttttctttcttcttgttctttagtgaaatttgtttggctggagaaccaattttcctatctgggtttctattcctgttttgctgaagttgtgttcttttttttcttccggaatttgacactgcattactctgatctttgcattctttttcatttgaaactcagggttcgagagaattgcagtggacttcaggttttgcagttgcagggcatagtatatgttcagggtggtcgatcatgtctctctattcatggaaaatgaatgcactgcattgtaaagcctatttggggtacatgtccaactgaaggatttcaagttgaggaagttagggtttctatttgagtgtaaaatatggctggaaatgcagcatcaatcttttggttggaagaatacagtgggaagtcacttactcctgtcggttcgaaaagaaaggccaaatcgaagaaactggagtttaatggctggggatctaaaccactcattgaatttcttgaatctattggtaaagacaccaccgagaagatctctcagcatgatgttagtg

SEQ ID NO: 46754 - DNA, 262 bp, Gossypium hirsutum
  Clone ID: LIB3585-051-P1-K1-D5
ctcacgcttgggctgcgaaagcttataacattcaggattcaaagaacactcttaccacaggagggacataaaacaatataaatatttccttcaaaatgctgatatatttcaagcacgagtttgactctttacaacgctataaaaactactatgtaacccacccctcccaaaaactattttctacctttaataatcatcttttaattgtacttttgacgctaattcgatcagtaaaaaccattaatcaatcgctgttacgctt

SEQ ID NO: 46755 - DNA, 562 bp, Gossypium hirsutum
  Clone ID: LIB3585-051-P1-K1-E12
cccacgcgtccgaaaaagtcttcttttgtttttccactgctttttcccttagctaggactgaaatatgtctgataaaggagatttcacttctttgaatcggattcctgatctttccctgcacattagccctcccaacagtgctccttcctctatttgtgctgctggggattcttcctttgatatttggcgcaaggacgatggtgtaaacccaaaatcacacagtgatagttccataaaacctgcctcccaagctgacacccagctttccttagcaaatccaaccaccagtgccttagaagctgaaagtgaaagcccttgggagaagaaaagctttgccccacttgcaagaaccgatgatgataatatataccatgggatttcattacttgatgtttcaggactgaagcccatcaaagggattccagtatatagtaactatgcctggtcttattcatcgtataattgttcatcttcctcggctttgcactcaccacctaggtttaatgggatttcattggtgacactgagaccccatttttatccctcatcagtgggagttca

SEQ ID NO: 46756 - DNA, 582 bp, Gossypium hirsutum
  Clone ID: LIB3585-051-P1-K1-E5
accacgcgtccgcccacgcgtccgcccacgcgtccgctctatttgaaagagagagatgggggataggcaagggggggggtattggtgttacatgtgttcccgagtggtgaatccaacgacagagcctgaaatccaatgccctctctgtgattctgggtttctggaagaagttggcagcataagatcccattccaacatcaatcacgccgccatcgatacagaatctcccaacagtctttcactttgggctccaatcgtgcttggtttgatgggttcatcatcacagctgcgtattgcaagcagggaccaagtaacacaggatgatgaactggggagagaagtggagtccttgataagaaggagaacctcatcttcagccctgccccttaggatgcttcaaggtatgcgtacagtagcagcagcttctgaatcagaaaatggtggaaatggaagtggtagaatgatcttgtttgatccaatcaatgatgaagccttggttgtccaaggttcatttgatgttactaaaccgggttcaaactcataacccgagtcataggtcttgccggacccttggtgattaca

SEQ ID NO: 46757 - DNA, 499 bp, Gossypium hirsutum
  Clone ID: LIB3585-051-P1-K1-F4
cttgacatcgttaactttcgaagctttcattactatacaatatggagaagactttatatgcgtggaaggacagctagaaccgatatccggccgaactatctctagaccagtgaagaaaagggagaagatgacattcgccatagggaagagtgaagagaaatgtgatgtattcaaagggaggtgggtaaggaacgagttgactcgaacgctgtatgaagaatcggaatgtccgtacatacaaccacagatgacgtgtcaggaacatcgctgacctgatactgagtatcataaatggagatggcacccccatggctgagatcttactagattcaatgcgacattgatgatggagaccctaagaggaaagagaatgaggtttgatgcagactcatcgaaccgaggtcaatgtgtctcaatgatttgccttcttcacacgctcatgcctgagcatgctaaagccatgaaatcatacgatgatgatgccctcacagagttccga

SEQ ID NO: 46758 - DNA, 556 bp, Gossypium hirsutum
  unsure (1)..(556): unsure at all n locations
  Clone ID: LIB3585-051-P1-K1-G12
cttgttcttgagattttggggtttcgcattttgattctaaaaatctattaaagtgatcacacaaatggatgtagagttacccatatctaataatctagccaccacgttcgacgaggtctctttggagcgtagcaaaagcttcgtcatagccttgcaggagctgaagaatttgaggcctcagctttattcagctgcagagtactgtgaaaagtcatacatacatagtgaacagaagcagatggtactcgacaacctgaaagactatgctgtacaggctcttgttaatgctgttgatcaccttggtactgtggcttacaagttaactgatcttctcgagcagcaaatattggaagtgtcagccatggagctacaagcatcttgtttgcatcagcaacttcatacgtgccaagtatacaccggtaaagaaggtctccggcagcaccaggtgtttgcatttatccccaaacaccacangcactacattntaccaaattccgtaaacaagaaagtcattttagtcctctcgtgcgtacagattctagacaaaaatatttcg

SEQ ID NO: 46759 - DNA, 488 bp, Gossypium hirsutum
  Clone ID: LIB3585-051-P1-K1-G8
aaaagaatgcaatggtcgattgtttcattgataattggctgaaccttctttttctggtcagtttttttatgtcatccttccattacttcttttagaacatttatcatccagtgaaagttatatttgaactcaaagctcaatttagttcattcatgcagtcgactgcaaaatatggcatttagcattttttttaatttgaattttagtacttaatcttttattttccatgaaaatgaaagaaccaagaaattaaccccaaaaagaacccttttcttttcaagtttattcattttcaataatttaattttaaataattacacattggcatttatttcaattagtgttaaatttagagaaagttgtcgttttctgtatatttagtgtttctggagttctctttttggcttcataatttctaattcgttctaagttttgtattattacatcatttgatgtaaatttttttttaataatatgaatctgtatta

SEQ ID NO: 46760 - DNA, 612 bp, Gossypium hirsutum
  unsure (1)..(612): unsure at all n locations
  Clone ID: LIB3585-051-P1-K1-G9
ccggnccggacagcccgggccgacgccacgcgtagcgatcactcagttcccttactccagctcaaagaaaagaaaacaaaagactaagtgatcggatgataggcaaaagcgcaagataacagcagatgaacaggctgccgagattaaacacttgaaagaggaaaatgaacagttaaatgctgagaatagaaggttaaaacagaaaatactgctctcccatgggcaacttgagcatcaatgtttttcagcccaggatcaccatggatctagacctgaagcttcagacaggctcagcagtttacaaatgaatgaaataaaaaatctgcagcagatgaattctgaagctggaacatgcagtaatgatgatacatccatttccgaccttcttatgaagatcgatgctgatgaggagagcaaagtgaagttcacggacttcactggcttagatgggaagcacgtcacagtaggcaaatattgtttcccactgtccctactttcgactctaaaactcatcattaatgtttacggtgatgttgctgcaacaagtaagatgagcccgagtataaccgagaggatctatgtaatgttctgcgcttcaatcaaagagatgca

SEQ ID NO: 46761 - DNA, 562 bp, Gossypium hirsutum
  Clone ID: LIB3585-051-P1-K1-H5
gtaccgaatcggaaggcccgggtgcgaccgcacgcgtacgaaccctaagtgattatagtaagagtagtccggttgcatatgttccgattgtgtcgtgtgcggccattggttgcggtgcaaaatgtatggagaagataaatgttgggaataatgtgggttctcgagtcataccgatggatcacaaattgaaggttactgtttctttgacattgccggagtcagagtacaacagatatcttgggatgttccaggtcagggtagatttcttgtctgttaatggtgaaactcttgccagctcaagccgtcattgcatgttgaaattcagaagtgagcctatccggtttctactgacagtcttcaagattgttcctctaatcactggctacagttcagaaacccagattttgaatctgaagattacaggtttgcacgaaggaaccgtgcctactgcttgcttaagggtagtacttgaacaacgagcggagttcagatcaggtgctggtattcctgaactatacgatgcattccttattcttgactcagaactttctttttttcaaag

SEQ ID NO: 46762 - DNA, 530 bp, Gossypium hirsutum
  unsure (1)..(530): unsure at all n locations
  Clone ID: LIB3585-053-P1-K1-A1
agatgggttttaaaggagatagtctccgctcagacagtggtaagcaaagtaatagtctccgctcagacagcggtaagcaaagtaatagtctccgctcagacagtgcgaaacgtatcacattgctggtccaaggctctcatgattcatgatattaatatataaaaaaccgaatcagaaagcaaagcaaatgcaaagattcagcattcacatgatggggttcttatactgtggaggacatgcataaaatgtgcacaaagaagtgaacaaaaacaggttctttacttcttttctattgcaaagctcttcatatgtttttttgcccatttacaatgacaatttctgacaagtcaaagcctgttcaaaaaagattgtcagccccgacatatgaacagcaatatatatgatgtccccctcagcctacacattataaaatatcggtttcagggtcatcacactaaaaactttgacagatgacctatngtaaaatagcttncattttgtgaagtaattcatttcaatctttttcatgt

SEQ ID NO: 46763 - DNA, 506 bp, Gossypium hirsutum
  unsure (1)..(506): unsure at all n locations
  Clone ID: LIB3585-053-P1-K1-A10
gtcctttaatcgcagcaaagattttgaattgttgcttgcctatgataatgaaggtcttttacctcctgggctggccggccctgtgtttgctcagtttgctgtttctggtttaacagatgcagccaataagtactcatctcggaatttgtcttctcccatcaaagcaaatttgcatttctctcttactagaagtggaattctttctctggatctagcagaggctgcttttcaagtaacagaatggatagaagttcctaaaaggaatttgaccgtggagaattcaaccattgcttcttccaatgtatctgttgatcttgatgctgaaaacacttttgaacaaaatagcagtagcttggagtcagatggagggatcagtaatgcatctaacagtaccactgaaccaaatacagtggatcttggtacagaaaaaaaactganaaaaatgacctttagaatcccactcaagataatgttaaaaacaatttggacccggtataccttttttc

SEQ ID NO: 46764 - DNA, 534 bp, Gossypium hirsutum
  Clone ID: LIB3585-053-P1-K1-A11
cccacgcgtccgcccacgcgtccgctcggatcttgatgactttcagccatgttcatcaagtcctggtacatcgagtcatcttcgaacatttttatcctgtttcatagctggagcattagtcctgcttgtatcattaggatgttacatgtttattaaggtaaggaagagtaaccttgatcatccattgaagcagggttcttggaacatgaaatcttatcgcatgctaagtttcactgaaaaggatatcattgatgcgatcaaatcggagaatttgataggtaaagggggatcaggaaatgtctataaagttgaactggaagatggaaaagaactggctgtgaagcatatttggacctcagattctggcaaccgtaaaaactaccatagcagtacagctatgctaacacaaaggaactcaaggaactctgggtcactagaatatgacgcagaggtggcggcattgagtgccattcggcatgtgaatgtggtgaagctgtactgtagtattacaagtgaggattgcaatctactggt

SEQ ID NO: 46765 - DNA, 502 bp, Gossypium hirsutum
  Clone ID: LIB3585-053-P1-K1-A7
ctatttacctagaagccaagctccagagaagaagcgccccagcagaatatctgaactggaggtacggaattcacaggttcaagaagaattaaaggtggtgaaggagcagttaaattcttccgaatcatgcgagaaccaggctcagcgagatgccaaggagttcaagaagcaactgttgtccatgtctgcaaagcccgaaacgtgtcgaaaacagcttcttgagtctgcctctgagggaactcgtgttgttgaactcgagctgatatcacaaggacggcatcaagccttgcagccggagcttgaagctacccgaaagcagcagtctcttgactcggctgtgaatgagattcaacgacttaaggatcatcttgaaatggtggctgaatctgaggctaaacagaccaagcaagcggaatcaacgattttggattttaaggacttgaacggaaacctgatcgaaactctttctcttgtatcaaacatgaaaaaccggctaaaggat

SEQ ID NO: 46766 - DNA, 532 bp, Gossypium hirsutum
  Clone ID: LIB3585-053-P1-K1-B11
cccacgcgtccgcccacgcgtccggcagttcgtgccataggtcgctgtgctatcaagttggacagagcagctgagcgatgcatcagtgttctgcttgagttgatcaagattaaagtaaactatgttgttcaagaggctattatagttatcaaagatatctttagaagataccctaacatgtatgaatccatcatcgcaaccctatgcgagagcttggacactttagatgagccagaagctaaggcatcaatgatatggataattggagaatatgcggaaagaattgacaatgctgatgagctccttgaaagcttcttggagagtttccctgaagagcctccccaagttcaactgcaactgctaactgcaacagtgaaactttttcttaagaagccaactgaaggaccccagcagatgattcaggttgtcttgaataatgctactgtggaaactgacaatcctgatttacgtgaccgtgcatacatttattggcgtcttctatcaactgatcctgaggctgctaaggatgttg

SEQ ID NO: 46767 - DNA, 535 bp, Gossypium hirsutum
  Clone ID: LIB3585-053-P1-K1-B2
ggaagatctcttatctaaaccagaacagattagatcaaagattgttgaaggacggatacagaagagaattgacgagttgggtttacttgagcaaccctacattaagaatgacaagatggtggtgaaagattgggtaaagcagactattgcaaccattggagagaacataaaagtgaaaagatttgtgaggttcaatcttggagaggggctggagaagaaaagtcaggattttgctgctgaagtggctgcccaaactgctgcaaaacccatttcttccgctggaaaagagcaatcgacttcagtggaagtcaaggaaactgatgagaaaccaaaagcagctgtctccgccgcacttgttaaacaactacgtgaagaaacaggagccgggatgatggactgcaagaaagctctgtctgaaaccggaggtgatcttgagaaggctcaggaataccttagaaagaagggcctatcaactgctgacaagaaatccagccggctcgctgctgaaggcagtattggttcctacattcatgac

SEQ ID NO: 46768 - DNA, 531 bp, Gossypium hirsutum
  Clone ID: LIB3585-053-P1-K1-B3
gggacgcgtgggcgctacttaaaatgccttagccatacaaagttccagcagccgaataatcattgaacatagatgggagccgtacatcttattgttttgcatcttcttgttccttctctttcgtcgtcgctcctccgcccacagcctccctctgggccctatcaactttcctatatttggctccctccatcgcctaggttctcaccctaaccaatccctctaccagctagctaaaacttatggccctctcatgactctccgcataggttatgttaccaccgtcatcgtctcatccgctgaattcgctaaacaagtcttccaaacacaagagcagtccttctccgaccgcactgtccctgattgcgtggcctcccagcctaaccccgagtcgaccctcgcatgggcgccgggcgatggtaggtggcgcaacccccggagactatgcagcacccagttgttcaccgtgcaaagactcaactcacttcaacaccttcgacaccaaaaagcccagctacttatccagcacatcaa

SEQ ID NO: 46769 - DNA, 489 bp, Gossypium hirsutum
  Clone ID: LIB3585-053-P1-K1-B7
cccacgcgtccgggcattgcttgggcttttggtggcatgatctttgctcttgtctactgcactgctggcattgcagggggtcacattaacccagcagtgactttcgggctgttgctagcaaggaagttgtcgctgactagaacagtcttttacatgataatgcaatgtcttggagccatatgtggcgctgctgtcgtcaagagcttccaaaagactcagtatgaaaggctaggcggtggtgcaaacactattagctcaggctatagcaagactagtggacttggagctgagattgtcggcacctttgtccttgtttatactgtcttctctgccactgatgctaagcgtaatgcacgggactcccacgttcctatattggcacctttgcctattgggttcgcagtcttcgtggtacacttggcaaccattcccattacaggaacaggcattaatcctgctagaagccttggagcagctcttatttacaac

SEQ ID NO: 46770 - DNA, 517 bp, Gossypium hirsutum
  Clone ID: LIB3585-053-P1-K1-B9
cgcttaacccagaaatcctcctaaagcttctccaatccatgaattcgccgacgcgcgtcactggtgaccaccgctcggctctcctccaagtaattggtattgtccctgctctcgctggctccgacctatggcccaaccatggcttctacgttcaactctccgattccctcaactccacctacgtctctctctctgagcgcgacacggatttgatcctctcaaaccggctccagctaggtcagttcgtttacgttgaccgcttccattttgactctcccgtgccacgtgtctccggcatccgtcccattgcaggtcgccaccctttcgttggttctcctgaccctctcattgcccgcatttcatcttccaaaagggaattcgttatacaacccgtttccgaatccgagtactccgtggatccgattgcggtttacttgtctaataagaagttggatcaacagcagatttcaaccgagaataaggatacgaaaactgagaagtccagagcaaggcagcc

SEQ ID NO: 46771 - DNA, 532 bp, Gossypium hirsutum
  Clone ID: LIB3585-053-P1-K1-C2
cccacgcgtccgcccacgcgtccgctctgggctggcctgttggagggtttcccggcccacagggtccatactactgcggaggaggggctgacaaatcctttggtagggacattgtggacgcccattataaagcttgtctctatgctggcataaacataagtggtatcaacggtgaggttatgcctgctcagtgggagttccaagttggtcctgccactggaatatcagcaggggatcaattatgggttgctagatacatactcgagcgaatcacggaaatcgccggcgttgttctttccttcgatccgaaaccaattccaggggactggaatggtgctggggctcatactaactatagcaccaagtcgatgagaaatgatggcggcattgatgtgattaggaaggcaatcgagaagctgggtttgcgccacgagcagcacattgctgcctatggagagggtaatgacagacgcctcactggtcgccatgaaactgcagatatcaattcattttcttggggcgttgaaacaga

SEQ ID NO: 46772 - DNA, 499 bp, Gossypium hirsutum
  Clone ID: LIB3585-053-P1-K1-C5
gcgggtggcagatgaggatgtcacttggaaagattttgctgcaggagcctgatttattgcttttggatgagcctacgagagtgaccttgaccttgatacaattgagtggcttgaaggatatctgaaaaagcaagatgtgccaatggtcattatatctcatgatagagcttttttagatcagttgtgtacgaagattgtggagaccgatatgggtgtttccaggacatttgagggtaattattctcagtatgttgaagcgaaggcagcatggattgaaactcagtatgctgcgtgggagaagcagcagaaggagattgagcagacaagagacttgataagccgattaggtgctggggcaaattctggccgagcttcttctgccgaaaagaagctggagaggcttcaggaagagggtcaaatagagaagccatttcaacgaaaacaaatgaagatcaagttccctgagcgtggaagaagtggtagatctgttgttactatt

SEQ ID NO: 46773 - DNA, 301 bp, Gossypium hirsutum
  Clone ID: LIB3585-053-P1-K1-E12
aacagaagaaggcacgaggggagagttcgcgctagatacgagggggatggtggttcgatacactaatgcagtggggcggtctatatcgattttaatgcaagcacattaatgatatgcccagaaggacgaaaaacttcgccaaaatgaaactaaaaatttccatcacattaaaagcgcaaaggtttggttatagactatgtaagaactactaacatgtcacattggacaaaaacttcccatcatctttagaattcgaaatctctaaatgtacgcaactgtctttgtggccacaaaataccaa

SEQ ID NO: 46774 - DNA, 642 bp, Gossypium hirsutum
  unsure (1)..(642): unsure at all n locations
  Clone ID: LIB3585-053-P1-K1-E3
aaanttcaatgacctccgatactctgctaatgactcgtncaatagtatctctgttanttgtctgctaactctgctattaagagtgcaggtgctgactctgaaaactgcggtctgcgactcgctaanntttaaatctctctggtctatacttnnttctatgagatctatgagtatctctagnnnttgaattggggtttagctagagggactnnngaaattgtcttgtctctagtnnggaattatnnntagactgattggnnatatgttnnntagggnnntaggcttatgnnaaatttctcattcctcttcatntnnttcggtggctttagaggggtttnnttaaactgnntaatttnntaatatgtnntagctaaattatttnaattttgatnntattatgtgaggggttaggctaactaaggggtgaataatttatnggggttnnctcaaatcanntttgtattattgttcctctcgaaaagggaaaaaaatgaaaggttctctttttattatccatttgagaagctaagagcttgaatggttttaaattttttttaattttgggcttgactattagtttgtggtgggtcgtatggggactaaaatgctcaccaatgaagccggtgaagttaccaggttttt

SEQ ID NO: 46775 - DNA, 536 bp, Gossypium hirsutum
  Clone ID: LIB3585-053-P1-K1-F1
ctcaaaacgtatccaaatctctgtttttcttactggattaatttcaaaaataatttagtgaaacatacacaaatattgtctgtttatcgaaggtattttctttagaaaaaaacagttaaaaggattgttttagtgagggtgctcttccatgatcacaagaatggatagattttagggtgatcttgtgaataaccgtatttcgttctattttatagcagagatatataaataaataaataactatcagatttatagataaataaaaaaaaacctgataacgaagtcttgttttattttgcattgcaaactcctttagtcttacctaaagctatatgatctttttatttcttagaaattgtttcattaaaaatctgaacaaaagcatgggcaattccgggtttatagcaacataattattaccgacattcctttgagataatctatatgatggattcgttgatggactaggtgagaattggagcacaatggcaactcataaattgtctttagatacagtgggttagatgatgaaagac

SEQ ID NO: 46776 - DNA, 531 bp, Gossypium hirsutum
  Clone ID: LIB3585-053-P1-K1-F3
cccacgcgtccgcggacgcgtgggtaaaaagcgaaaaaaagaatttaattcccttctcaactctcaagataaacagggttgggagcacctaagctttagaggagacaagctaacttttgtcgttcccctttatttccttttatttctctctctttctccttttcctcttccctctgatactattgtttatattttgtagtagcagggaaggaaacaagaaggtaaactaaagagctcctccattgtgtaatgggaaaaagataattaaagagcaaagcaaagggaaaacaaatgacttggtgcaatgactgtagtgatgtacaaactattgagagaagctctcctccatcttctcataaaactgttattgctcaaaggcacaaagattgcctacttagagcatgtccttcttgcggtcatcagatcaaataccgtgatcagggtggaattcatgatttgcctggattacctgctggagtgaagtttgatccaacagatcaagagcttcttgaacatttggaagggaaggtg

SEQ ID NO: 46777 - DNA, 531 bp, Gossypium hirsutum
  Clone ID: LIB3585-053-P1-K1-F6
cccacgcgtccgcaccacctccggaagagtcgcagttacatgagaagacgatcgtactggcgcttccgccgccgcagcagaccaagaacagcggcggtggaggcgggagagaagactgctggagcgaagacgcgacaggggttttgatcgacgcgtggggagagaggtatttggagctgagccgtgggaacttaaagcaaaagcactggaaagaagtggcggatattgtgagtagcagagaggactataggaagaccccgaaaacggatattcagtgcaagaaccggatcgacactgttaagaagaagtataagttagagaaagctaagattgcagctggaggtgggccgagtaagtgggtctttttcgataagttggatcaacttattggtcccacggcgaagactgctgttaatgttgcgacggccgctgatggtggcagtggtggaagcactgggttgttgtctaaagtgcctatggggattcctgttgggatccggtccagtttgaacccgcttcgagtttcccagc

SEQ ID NO: 46778 - DNA, 531 bp, Gossypium hirsutum
  Clone ID: LIB3585-053-P1-K1-F7
cccacgcgtccgggcgcagaacagctgaggctatattttctcgagaaaattaaataaaagtccagaaaaaagagagtgggttttcaagagcattatcagttatttgattgaggctttttcgatttttcatatacgatcagattattcaaaatctcagcttttatgtaaagtgggaatacaggcagcgctaggtgatttagcctacttggcacagatttataagtttggggaaggaaagcagtatatatccagaaagtcaacaagtgacctatgctttcgtactttctaatttggtcgacggacttagatggacagttcttttctagaagaatgcaatcagcaaactgaccatttccctttgttaatggaacgagttgaaagccatagtgatcgagaccacattattaacatcacaaggcatgacgatgatacttcatcaagctcgtcccgggatgagcgaccttctggagtgaacttaacagagagtgaagatagaccttcaggcagcacacaagctgccactaatctgac

SEQ ID NO: 46779 - DNA, 531 bp, Gossypium hirsutum
  Clone ID: LIB3585-053-P1-K1-G11
gcaaaagatagagagagagagctagagaaataacatatatccatgcatatttgcatcaattcttggagactcgaggtgagattctattctgcttttaaatcatctaaacaatcatccaatcccatatccatccctatctctattttttcttacctttgtaaccatctcttcaatcttcaaagcattttctaaagaataccattctcaccttcattcaccattaaagctaccatctactcttcttcttcctctaccaccattgccaacactaaaggcatcaatataactataaatatcactaaacctattaatagacagaataccgggacaagtacccttacaagaaaggttaaggtaattgttgaagagaataacctttataattgcatccataatttgattaattcattaccgaatgaagattacactaatgatttcaagatattaggaggcgattgacgatgctataactcgtactctaaacacataattatcaaaattgctgttaaaaatggtgttggaaaaatattt

SEQ ID NO: 46780 - DNA, 509 bp, Gossypium hirsutum
  unsure (1)..(509): unsure at all n locations
  Clone ID: LIB3585-053-P1-K1-H4
cgcgtgtcaccatctncactgctcttcttcttcttcttcttcttcttctttttaacgtaaaaagaaatggcttcttcgagagagccatgtttactggaaaatggaaacttgaagggttacaacaaggaaattcgccatgggaggactgcacataacatgtcatcttcttcgttacgtaaaaagtcgcatttgaccctggtttctaaggttccatgtaggaaacttagacagttcttggctaatctacaggaggtcattttagggactaaactctctgttcttttccctgctattcctttggccatacttgctgattgctatggtttcgcaaggccctgggtttttgcattgagtttactttgactcactccactggctgaactagttagctttctcacttgaccaattgcttattacactggttcaacagttggagggctgttgaatgcaacctttggccattctactgagcttatcatagcaatatttgcattaagccaacttaaaat

SEQ ID NO: 46781 - DNA, 390 bp, Gossypium hirsutum
  Clone ID: LIB3585-053-P1-K1-H5
gtcaaatgttatgtcgcacacttatatgcctaacccatgcctctactactgatgtcgagctccactcctgactgcgtgaggtcaaaaatcgatgtcatcattacaaactgaatgaattctgtacgcctaaactcgtcacgaatgaagacttgtatggcatacttacaacaatgatctggactgtattatgccagtatgcacttattaacttatgacagtacccattccgaggatacatgccaaaccgttccactctcatgactaaacttataccttatgaaaccaatcctgtctttgataaaatcatgcagaaccctcatcgcatatttctatcctcattgccgccacaggtggacacagctaagatcatgtacgtacatgacactttat

SEQ ID NO: 46782 - DNA, 527 bp, Gossypium hirsutum
  Clone ID: LIB3585-053-P1-K1-H8
cggacgcgtgggcggacgcgtgggcgctctgtgatgcgatcaatggtgttttccggtgagagagggatggcgatgggacccgagagatcaaaacctcttcacaatttcaaccttccttgtttgaagtggggcaatcggagatatctcaggtgtatgaaacttgacgatgcttccaccgccaccgactcttccaccgccctccctgctgatcacaaccagcattgtcgtcgccgtgtccttcaaagacgccgatctcccccctctaagtttgacagtttgatggttggtggaatgcggcggcgcgaatcggagtcatctcccagcagcaagaacaccgattacgctagggagcagcagttgaggatatctaagggggaggcggcggcggggatcgaggcagttagggagaagatcattaaggatcttaaaacggcggcggatgagatcaaagatgcaatttttagagactaagtgtccgacgacgatgacgtggatgacgatgaggaggaatttgaagagcctaaaca

SEQ ID NO: 46783 - DNA, 519 bp, Gossypium hirsutum
  Clone ID: LIB3585-054-P1-K1-A12
cccacgcgtccggaaagaaggtaaagttggcacacctgaaagaccactatctgatctagggctgttgagctagagggggtactggacaagggttcttttagacatcttgaaaaagcataagagaattatttccatcaaagtatcactacctgaagctgtattgaaaattctatttggttgcagatcctgaactaaattctctagaagacatcaatttttgagtatttcattttcctgaaaacattttccctcttttacggtgtttgattaactaaaggaattgcttttccggaaaagcaacttcaaaacacgggaaaatcgaacccttctttgcgtaaaatgtcttacagatttttttccgtaagacatttttcggaaaacacagcttcaacctctcatttcctctccgtccatcaacggtagcctctccttcctatcggtgtgctttttcttcttgggttattaacagaattattgaaagtttcatagccaagcatgttcatagacgtggggtttgtt

SEQ ID NO: 46784 - DNA, 573 bp, Gossypium hirsutum
  unsure (1)..(573): unsure at all n locations
  Clone ID: LIB3585-054-P1-K1-A9
ccgtccggtagcannatgctgatnnatcctttnnattctcttnnaggaaaanntatttagagnngtgttggcttaaanngggaaaacccatcagatgcggtttgagccannagctgacccagaccttgcnntcctgatagtgcanntgtttgctgatanttagatganntgatggannaatgttgtctcaagagnngtggcaatnncagcacccaacttaatacccaaaggaacccgacgtnnaatcaagatnncattcctnnggcgagaannagttcctgnnttgatggnncattgtcactngnnatggtcaaaagctttatgtgaatgnnagagtatgatcacnaggggaaggcaccaacctannttgctaaaaagcctggtgacaaagggttattggtggaacctatgaatgaagaatggatgtttactggtcaaggctactcatgttgggtcagagaccgcgctttcccaaattgttcagcttgtttgagctgctcagctcgccagagcacctattcagaaaattgctgaccggatttctcggttttttgttcctgcaattgttctcac

SEQ ID NO: 46785 - DNA, 528 bp, Gossypium hirsutum
  Clone ID: LIB3585-054-P1-K1-B10
cggacgcgtgggtttgagactgtaagaagagtgtagtcaactactgaggcaatatcccatgttttgcttcccgttcagattgatggctttgattaatgttttcacagtctgactcttaagattgcattttgccatcttttcgcagctataagattggaggaacctagccttaaaagcaagagcttcagccactagtgctgacgaagcgaacaccagttcattgattccgtcaacaatttctctgttgctgttcctagtgatagcagcaataccactcatttcagattggtttaagaatgcagcatcgcagtttgactttgacaacctgtggaagtggatcataccattctggaggagtcagaggcctttgattgaagcctgctccttgagtgaagtcctgatacccaaagaacaccacattccacaccacggctcaacttttctttttttcgaatgtccacctattgcatgcctttttaaattccccaactttctgtagcatttcatttgtttaaactgtcaagcttg

SEQ ID NO: 46786 - DNA, 532 bp, Gossypium hirsutum
  Clone ID: LIB3585-054-P1-K1-B11
gttttgaggaggttcgggttgaacatgatacgaatgaacctcttaccaatagttcaattactacggccgggactggtgaagatgggagatctgagctttgtggtactgatctaagtttccttggaccaccttatggtaatatgtccactgccaaaatggtgtgttcacctatatggaatacctttgttttgaggtaccatcagagggaagataatgtaatgacaatcatattatcggcggtctacacgacaggatgggttgggatcggtttttcgaggaacgggatgatgcttggatctagtgccatggtgggatggtttaatagaaaaggtcatgcaaggatcaagcagtattacttgcaaggtgcccatgtatcacaagtcataccagataaaggtgaattgccccttaacggtattccaccggttgttgcccttcatggggccatgatttacttggcatttcaagccaagttcgaacatcgtcttggccgacaaccaattctattagcttttggaacaagggtccctac

SEQ ID NO: 46787 - DNA, 405 bp, Gossypium hirsutum
  Clone ID: LIB3585-054-P1-K1-B2
cccacgcgtccgcttttcctttgtagtttgggatatttataaggttgcgactgatataggggatgaaagagcagtcgtccgagtgtgaatctctcaaggattcttcttcttggtgttcctctaagcaagcaaggcgtcttcttaatgcagttaactccgagggtttcaaggctgccaacatcgataggttgaaacaggccgaagagtctctcaggactgtcatgtacttgagttgctggggtcttaactaaccagaatctttaccctcaagttgtaaaaattgttacatgtacatagcttgtttataaggaaatataaatatatgcaatgtttgaggattttcagagccctactgtcaatcttgctcccctgacaagtaatgtaatcagatcatgatttctatca

SEQ ID NO: 46788 - DNA, 528 bp, Gossypium hirsutum
  Clone ID: LIB3585-054-P1-K1-B4
cccacgcgtccgatttgtgtatgcaggaaggaaaagtaaaatgagagggaaagaagccaggaagaacctgctgagaggatgcaactcaaaagggaaatttgagaatgttgttttcattgatgttgatggtgatagatttgagaatgtcgtcatcatcgatgctcctgagtctgtggaggaaaatttacaaggttctagtggatcaaagggaggcaagcatttcttttctcccagtgtaatcagcatcgatgatgatgaaactgataaaatagatgatcccgaaatttgtgttgaacctgctggtgacttggacagtgatgcctcttcaagaaaaagttgtcctgcacctaacttcatgaagaaatctacaggattagacgatgacgatgactgctcgttcatcagggaaaagaaacctgcattcaaactatcaaagtgcaagaaaacatatgctgggaagactccttgtggaaaacgttttggtttaagtcctgactcttgagatagcttattttgaagtgattgttc

SEQ ID NO: 46789 - DNA, 513 bp, Gossypium hirsutum
  Clone ID: LIB3585-054-P1-K1-E2
cccaggtatcaaatgagttatcagatctgacaggatacttgacaagctcattacaaagttcaacacgcactgcggcgggggcgtgtgttccgttcgataggacaattaataagcaaactctcaaacgaccaatgacaagacatatgtctagctataaaagaagctgtcatataaacgttcctaggaatgatgaaactgttgataaccatggatgacatcaaggttcataaaaatgctccatacaattctagatctgaagcaagtactgatcatggatctaccgatcatgagctcgaggacgatcatctgcacactgatgtttacactgtttcaaacatgaagagacatatggacatacatatgctcattctgcaggttataattcacatgttcaaaacaaatctccaattattgttacatttcaacatcaacatcattgtcaacataatgtcttacattgcatcctatgctgaagaactgaactatgaaactacctctcggactacaatacag

SEQ ID NO: 46790 - DNA, 518 bp, Gossypium hirsutum
  Clone ID: LIB3585-054-P1-K1-E6
ccacgcgtccgcccacgcgtccggcgacggtgattggcgttaccggtagaaaccggtcgaggaaacagagatttagtgttttgaaatggaaagcgaaatctgttcaaaggaaagtcaaggttattggtcggttggttcccggttgccggaaacaaccgttagcggttattctcgaagaagcaactgattatattgccgcgcttgagatgcaggttcgcgccatgagcgctcttgctgatttgctttctggttccagctccgccacctctagctcaccgccgaccagccagtgaaacctttttttttgcttaatttccaagtatcatcctctttatttttaatttttcttttctttatctgcaagtaatcgtcatctttccttgttaatatacatccaagtacttttcatttttcatcaattattttcctccatattatgtactgaaatatatatatattccaaataaaaaaaattgtaaatgcttgatttgtagagtcaatcattactcattgatcct

SEQ ID NO: 46791 - DNA, 531 bp, Gossypium hirsutum
  Clone ID: LIB3585-054-P1-K1-F10
cccacgcgtccgcccacgcgtccgcccacgcgtccgcccacgcgtccgcccacgcgtccgcccacgcgtccgcgcgggcgtccggaaatcttttcgattcagaagaaagctcggtttacagacatgaaagctcttgtgtttttggtcgtagccaatggggtagctgctgcctattccttagtacaagtggttcgttgtgtggtgagtatggtgaagggaagtgtgcttgtcaataagcctttggcttggaccattttcagtggagatcaggcaatggcatacttgaatgtggccgccgtgggagccgcggcacagtcagcagtgtttgcgaagctggggcaggcggaacttcaatggatgaagatatgcaacctgtatggcaagttttgtaaccaagttggggaaggaatatcaatggcagtgttagctagtgtgtgcatggtactccaatctggtatctctgctttcactctattttgcttatgtggtgtcaacatagccaaaggcaacttccggtggtagaatttcagc

SEQ ID NO: 46792 - DNA, 540 bp, Gossypium hirsutum
  Clone ID: LIB3585-054-P1-K1-F6
gtttcctcagcgaccagctctaataccattccatgctttggagttacgacttgttgatggcgagggtaagtgggaggttcgttcaatcaagcaatgatggtgcaatgacaaagctctttgtttgtgctccgtatggtgcgggggacattatcagttgacatgtagttataggcaggattaatttgttatcatgctgcgaacaatgggtaagccaaaggtaatggtaggtggtagtgataattctgatttccttgatggtattggaataccacaggctttgcggtattggctggattcagaaaggggaatcaaattagaacagattatttttagtcaagaattagtaaaagagaacaatcaaaggtaaaatcttaattttataatctatgtgagcataaagaaagattatgtacaggtttttcgttccctcccccattttttacccttcctcttatgggattcatgttgtaagaattgacgccttaatcattcttgcctaaagaataaaatacaagggaatagattattattattattatt

SEQ ID NO: 46793 - DNA, 537 bp, Gossypium hirsutum
  Clone ID: LIB3585-054-P1-K1-F9
cccaaatcgaaaatcgatcgagaaaaagaggagaatgggtgaatggagcagctttactgctgtagtgagaggcgctgtgtttgctttacgttaccaacaaatatctcggcactgtcgctattacttatggtcctagcatgcttccgaccttaaacgtaacaggcagtattttgttggtggagcgcatttcgacccgcaccggcaaacttcgacctggagatgttgtgatctttcgatctcccgagactcctaggaagattgtctgcaaacggttgatcggattggaaggtgatcaaatcacctacgtcgtcgaccctcagtcgggtgatagatgcgaaactatcgtggttcctaaagggcatgtttgggtagaaggagattacatctataatacaaaggattcgaggaatttcggagctcttccttatggccttctcgaaggcagagctttttggacgttattgcctcgtaaagattttggacccttgacacccaaaccaaaataaaatttgcgtttctatgattggtaggttctta

SEQ ID NO: 46794 - DNA, 446 bp, Gossypium hirsutum
  Clone ID: LIB3585-055-P1-K1-A1
agggatcctaaacctgtttcgaacccttgtaaactgttatgttccgagccaagttttgaccaaagacgagccgctgtccggtcatggggaaaccaaccgctagaagaggcggatccagaattgaatgaaatcatgaataaggaaaaacaaaggcagttcttgggaattgagcttattgcttccgaaaactttgtgtgccgagctgcgatggaagcattgggaagccatttaacgaacaagtactccgaagggatgcctggcgccaggtactatacgggcaaccactttatagatcaaattgaaaccctatgccacgagcgtgcattgacagcttttaatcttgattccgagaaatggggtgttaacgtgcagccttattcgggtacttccgctaatttcgctgtttataccggactcttgttgccaggcgataggataatggggtt

SEQ ID NO: 46795 - DNA, 450 bp, Gossypium hirsutum
  Clone ID: LIB3585-055-P1-K1-A6
gatactgcattaatcaaggctgcgatgagactatcattggcttctttggaagcagctaatgtcaaagatattgcatcttcggtcacaacaattcttgctagatctatcaaatattattttttttctgtagaatgggaagattgcgttagggagaagaagagttctgagaagagaccaagaggattgaaggccaggggagtatggaaagtgatttagattgaagaccatggggagtatggaaagtgattcagattcagattgaagatacatcaatggcagctatttagattgaataggggtctgcttgctggggtttgtttagtgtatagatgtttgatattttttatatatataaaaatgagaataattattgtttttggataaatacttgtaattttggcaactatgatctcatgagattatattataatttttatgaatttatatttt

SEQ ID NO: 46796 - DNA, 472 bp, Gossypium hirsutum
  Clone ID: LIB3585-055-P1-K1-A8
gaaaaaaacatagaaaaaagtatcaaaatagcggccatggaagctagttagaagtttgagacgaacagtcatctcttatctttaacttcccactttcatatcacaaaatttcagtaattctgtgggaggaaaattagagagaaattgagccaaaatgatgatgatgaagggagaacagtggtctaatctaggctcaacgatggcggccattatgttcgcgtatgccatgttccgacagtatttccctccacaacttcaggactatatctttcgatatggtaaaaagctgtcgaatttcatgtatccttacgttcatgtaaccttcgatgaattcatcggcgagaggatgaagaaaagtgaagccttctcagcaattcagaactatctcagtgacaaatcttcttcaaacgctaagcgactcaaggctgatgttgttaaagatagtcagtctttagttcttagcatggattat

SEQ ID NO: 46797 - DNA, 452 bp, Gossypium hirsutum
  Clone ID: LIB3585-055-P1-K1-A9
atcacgcgttcgcccacgcgttcacccattctttcgtccacgcgtgcggattttgcagacgggattttgttttttatagtttcaaatttgtgggttttttttttcatcatttgatttgatttttgttatgtgcagcgagcaactttttgatccggaagaagtggatgtggttcattagctagataaagaataaggcttaactctctaaaaatttaaacttattaagatttatatgaagaattgtatatttgaacttgacactacttatacaattatttaaaagtttattaaattaatctttacttaaaacacttttgctgctataactatattattcgttacataatggcttacttttgaaaaaagtttgtttcaaaattttttttgggaattatactatgttattaccagaaagttggcttacatgattattattcttgaaacaacggttt

SEQ ID NO: 46798 - DNA, 338 bp, Gossypium hirsutum
  Clone ID: LIB3585-055-P1-K1-B12
tttcatcacacaaacactgataaagttgttgttcatagcatgaaatttaatgagcctcaatataaatctcaaaaggcaagcatcggagcagtggagcaactggaaagtgacatgaaagttgaagctactatgtaagaccattaactgcataaagtctagagagacatgaaaatggcaaaagaagctaaagaggcccgtatgcataaagggcatgaaaaaaaaagttaaagtctgctcaagaagttcgttcacaagagaatgagcaatctataacagcacgtaaactttcgggaaatggtaagaaacctaatggagccaatgaactcggaatacgtgag

SEQ ID NO: 46799 - DNA, 478 bp, Gossypium hirsutum
  Clone ID: LIB3585-055-P1-K1-C1
acaagatgaccttcgccacaggactccgctgcttggatcgaatactttgaatcaaaagctgtagggcagcaagaagctgcacgaaatggaactcctaagccagatgcttcaattgcaagcaagggtcatcttagtgtgtccgacctgctcgattacattagtcccgatcaagtttctaaaggaactgatgtacagaagaagccgctgcgtgccaaggtgttacagactagtgacaaaacccatgacgcatgtcacaactttgtaacagatagttctgtgttcaatgctgtctcggagaaaagtatcagtactgcagatattaatgaaagaggaatggtgagttctatttgtcttgaagagccaaagaaaactaatgatgtcactagagttgagccaatggttacaagtgaagttttcgaagagacaacttctgatgaagggtggcaagaagccaattcgaaaggacggtcgggaaatg

SEQ ID NO: 46800 - DNA, 599 bp, Gossypium hirsutum
  unsure (1)..(599): unsure at all n locations
  Clone ID: LIB3585-055-P1-K1-C9
cggaaaacccgggtgcgacgtcacgcctgtccgcctcacgcctgtcctgcaaaaactctctagattactttnatgttagaggcctagagctggcntttcaaaagtggtgggcagcgnngtctcacttactctgcactctgtcatannctatgctcacttcaaatctcaactcagctatctgctgttgtctaaaactgcctcggagtgaaagccctttgtttatctagactcacaantatgaaaagagctttagtggactccaacatgctcctgtctacttggctaagnatgaattctaaggaattctctcactttgaggctcctgctggagtataagaaggtctagattgcctaagaaactaggaggactgtgaaccgtgcctactggtggagttttgtctggcagtgccctgttagggaaagggatcaattcgtgctctttctggtggaaagagcaaaaagatcgtgaagaaggttcttgaagatttcagaaggctaaaggaaaaggtgtcatctcaagagcctagaaaccttgatatatactatctcttgaattcgaatttggagggtggggatttaatgttttttacctttggcct

SEQ ID NO: 46801 - DNA, 442 bp, Gossypium hirsutum
  Clone ID: LIB3585-055-P1-K1-D1
gaaaaagtgtagatatagaggaaatttaccgtgctctgatagaattcattgatacggatcagggggattgaaaacttagtttttcaatacttagctggaggacatgtattacatacactatttgttgatacacgatgatagaaaaataggcccagatgaacatattaattgtatgtgacatatatctgaagaatattcaatttattttattatctttccattgaatcttatcttctcaaattatttcattatataatttcttctatggtctatgatagatgttggtatcttcctttagtcttattctactaacatgttgctgagatggtggtgttcttattatgtctggttagattgcgctcacctgaatacatcacaataatgcacggcataattacggtcatacagtaggtttcatatgaccttttgttccacttatacc

SEQ ID NO: 46802 - DNA, 489 bp, Gossypium hirsutum
  Clone ID: LIB3585-055-P1-K1-D5
ctgaccaatgataagtttaaatggcatcgagttgttgtgcaaggacagggacccggaccgggctatggccatgttatggatttggttgcacagagatatcttgtcactgtaagcggcaatgatggaaaacgagttctttcagatgcatgggctttggatactggccagaaaccatatgtatggcagagactaaaccctgaaggcgataggccttctgctagaatgtatgcgactgctagtgcccgctcggatggcatgtttttgctttgtggtggaagagattcctctggggcgcctctagcagatgcatacggtctgcttatgcatagaaatggtcaatgggaatggactcttgcacccggagtttccccttcaccaaggtatcagcatgctgcggtttttgttggtgcacggttgcatgttactggaggtactcttagaggaggacgagcaatctaaggtgaagcaactgttgcaatactggatact

SEQ ID NO: 46803 - DNA, 478 bp, Gossypium hirsutum
  Clone ID: LIB3585-055-P1-K1-E1
cccacgcgtacgcattattcagctccgcatatggaacatgttttgcaacttcaatttgagcgggagcggcagttggaactacaaccgcaacatcatcagttggagctttagaggcagcagcagttggagcatcaccggcagcagcagttggagcatcagctgcagcagcaattggagcatcagcggcagcagcaattggagcttcagcggcagcagcagttggagcttcagcagtatcaacgtctgttggagcttcagcggcagcagcagttggaacttcagcagcatcaacggcagttggaacttcagcggcagcaggagcttcgtcaccaccaaattgaactgttgcagcagttgcaacaacaacatctacagcagcagaattctcaagctcaacagattcttcttgatcaattgcttgagcatcagatttctgatcctggctatggtcaggatgtatttgatgctgctagagaca

SEQ ID NO: 46804 - DNA, 426 bp, Gossypium hirsutum
  Clone ID: LIB3585-055-P1-K1-F1
cccacgcgtccgggaagactaaatgtaaacaaacactaatttacacattgctaatacatcggagcggacccttaatagagatcccgaagactaaagcatgaaactagttcaacaaacctaatttactaattatcaaaaagaaaagagattaagggatctagccttttggctgcgtgaagtctccaattttgattttctaatttcctatgctttttatgttgttggtggtgctggaaaaggtgtccactgatgtgcttggatcaatagtaggataactcagtccagtagtatctgaatctaataaccctactctgcaaacatttgaatccaacttcgaatccacttctgattcatcgtctaattccacgtcgggagcaactgtgaacactatatccggctatttacatttacttgcgggatccatct

SEQ ID NO: 46805 - DNA, 477 bp, Gossypium hirsutum
  Clone ID: LIB3585-055-P1-K1-F6
caggaagttaagatacagaggatgcaaaggctacaagatcttggtactaccatgttgaagtgatggaaactgatggatacacctattgaggagcaacagatgtttcagaatgttacctgtaatatagctgcttcagaacatgaaattgcagaacccaccactctctctgtggatttcatcaaatatgttgaggcagaagtttctaggttggaagagttaaagtctagcaaaatgaaagagcttgtcctgaataagagattagagctggaggagatatgtaggaagacgcacttggtcccagattcacaaagtgcagtagaagatgccattgaagctattgagtctggggctgttggtgctgctaccatactagaacagattgaacttcaaattgctaaggtcaaagaggaagcttttagcaggcgagaaatacttgaaagggtggagaaatggttgatggcttgtgacgaggagtgc

SEQ ID NO: 46806 - DNA, 498 bp, Gossypium hirsutum
  Clone ID: LIB3585-055-P1-K1-G2
gcttcttcatagccaatcagcagatgtgctccagaggccactggaggcctgctgaagatggcaaggtgctggacctggtccaacgctatggtcctcataattggaacgccatagccgaaaagcttcaaggccgatcaggcaaaagctgcaagctgagatggttcaaccagttagatcccagaatcaatagaagccctttcacggaagaggaagaagaacgacttttggcttcccatcggatccacggcaatcgatggtctgttattgcaaggcttttccctggccgtactgataacgccgtcaagaaccattggcatgtcatcatggctcgtagatgccgccgacaaagatcctcttccaaaactcttcctccttccacttccacctcacatcaacctcacataacaagcaccacccttttcccccacaataattacatgcacgctttccctccttactcttatttcaaacaccttctacgcacacaatccaaaccct

SEQ ID NO: 46807 - DNA, 462 bp, Gossypium hirsutum
  Clone ID: LIB3585-055-P1-K1-G3
cccacgcgtccgatgaccccgaagccctagagaaccgatccataatatcttccctcaaggtgtcggtcaaatcccaccctgaattccagcatctcgatttcactacccctccttcctcccctagggacgccattgtaagttacgggatgagggataccatggtggattttgagattaaagatgcaatgatcagccttgggaagaggaagagagggaggaagcccaatgtgcaggctgttaattccgaggaagagagagagcggggtttagagattgtgaacaaaaatggagttgccgtcgatttggtcgcattgggcggtttggaggatccttatgcggaggaattgaaaaggaggaccgagggaatggcgggaagtgaggaggctttgctagggtttatgagggatctgggtgggcagtggtgtatcaggagaaggaagaggaagattgttgatgctagca

SEQ ID NO: 46808 - DNA, 497 bp, Gossypium hirsutum
  Clone ID: LIB3585-055-P1-K1-G6
cccacgcgtccggacaacttcaatccagattttctctccatcttccctctgaatctgctcgctacggaccgtcatttcccccaccaggtatgattcatcttttctctctaaaacttcttttgctaagttatcggcttgagtattcttcgatctgtggataaattggaaagtgacatcttgaacactagattttctaatctgtatatcatgaataatcactccgagaaccgacttgtccatttctttcgattggcattttttaatgactgtttttgaatccccctttattgttgctgttgttaaccccatttttattactaatttgatggcatctaaacctgcgagggcttctgctgcgaatgaatgtaaaattgactttgaggcttttaaatcacccgtctggtctcgaacactatacctgagtccgatctggcatttcttctgtcaaaggctgcgtcaaactaaactatagtaccctcgtcgcctctgtttgacca

SEQ ID NO: 46809 - DNA, 504 bp, Gossypium hirsutum
  unsure (1)..(504): unsure at all n locations
  Clone ID: LIB3585-055-P1-K1-H4
cccacgcgtccgcccacgcgtccgcatagatgctgctgtgaaaaatgaattgtttctgcaggagtgcccttgctttcctacaggaacccnaaattcccgagaggcttctggatacaattcttcaaggcaattagaatatgggcataatgaaatgtatttaaatgccccatcctctcaaccaagtcaacagtttcaacctggtaatacagcttttgtgcaaaggcctttaccccctagcctgccgcaaacttcgtctagccatttctcattcacaaagccttcaatgccaccgcatcctcagcattcataccctccacaatactcattgccatcgcaacatgatggccgcaggccatttgtttctgatgaacagtggagaatgcctgcaggagaatatatagcaggaagaaatccaccatctgctggtccattgtttgtccaagaagcttactttagaccacctggtgaaagaacgccttcaaataatatggcttttccgattgc

SEQ ID NO: 46810 - DNA, 458 bp, Gossypium hirsutum
  unsure (1)..(458): unsure at all n locations
  Clone ID: LIB3585-056-P1-K1-A12
aattatgctaatgagagattacagcagcattttaatcgtcatttattcaagttggagcaggaggaatatatccaagatggcatcnattgggcaaaagttgattttgatgataaccaagattgtcttaatctttttgaaaagaaaccattgggattattgtctctgttagatgaggagtccacttttccaaatgggactgactcctcatttgccaacaagctcaagcagcatctgaaatctaatccttgtttccgaggagagcgagaaaaagctttcactgtctctcattttgcgggagaggttacttatgacacaagtgggtttttagagaaaaacagaaacttactgcacctggattcaattcaactactgtccttttgcttatgccaccttccttcgatatttgcgtcaaatattcttaaccaatctgaaaaacctttggttggtcccttacataa

SEQ ID NO: 46811 - DNA, 521 bp, Gossypium hirsutum
  Clone ID: LIB3585-056-P1-K1-A9
caaaaatgagttgttgctgcgatgaaaacgatgacgaatcaaccctcaccagccgcctggattccttctcctccaatcccatccttatcgattcaactgccaccatctccccgatgaattcccatttcgcagctctcacgtgtcgggacactctccggctcattttcgagaagctttctctcgcggatttggcacgtgccagctgcgtatgcaagacctggaacgccgtcgcttccgatgacaatatggttgtggaggcattcaaggctccttggaagcttctcgatgtggtggggacgcccagttcgagaagtttctggagagataatgggattgggaagttcgctatctcgcatcggattttgagaggggagactgttgctagtcttgccgttaagtactcttctcaggttacggacataaagcgcctgaataacatgatgagtgaccatgggatttattccagagagaggctattgatccctgtaagcaatccagacattcttattaatggaacatgc

SEQ ID NO: 46812 - DNA, 543 bp, Gossypium hirsutum
  Clone ID: LIB3585-056-P1-K1-B4
attagaactctcttttggagcttccttcgttcgtttcctttttcctgcattaccgagtggaagcatctgggtttttcgaggtgcatttcaatatgagtgaagatgaacaacgggaatattttgagttgcaggaaacggaatacccagaaacagttccatcggttcttaaacataaatcttcaaaacaagtcgttttagaaagtgaaacatctggtttgtcgaacacaattagtgctatgcaatctatttcaatcagcatgccatcggcaggtaacaagattattaccgttgttgatgaaaatgcacaaggttttagcattaatggagttggtggtgattcttgtccgccattagagacactcggtaacaatgccgagccgaaagcggtcatgtttctgtctcggccgatgtcgaaaggatcgagtatcggtgaggcggataacgatagtcaaaggttcaaggataaaaactttgattttttcaaaacatggtccgggaaactcgaaagacagataacgagtttaagcggaaggtctcggaaat

SEQ ID NO: 46813 - DNA, 477 bp, Gossypium hirsutum
  Clone ID: LIB3585-056-P1-K1-B5
ggaaatttagtgccttcctttggaacctgttctgatatagttggactaaatgttgatagcgaggctgttccgattccgggaaattcagtgccttcctcgagtgtgaacgagggagatttgcatgaggattttgactttagcgatgaagttcttaagtacataagtcagatgcttatggaagaagatatggaagataagacttgtatgtttaaagagtcatcggcagcacttcaggctgccgagaaagcgttttatgaggttctcggagagaggtatccaccttctcctaaatatgatggtgatcaaaaccaagaaagctccgatgaaagtcatggtcaaaattgttggggatgtagtagtgcaagcattagtagtggtagcgtagttgatcccggtcacaatcacgatttcagtgagcaaagggctctgaacttcccatcccaggctagttcatctcatagctcgggaaacagtact

SEQ ID NO: 46814 - DNA, 503 bp, Gossypium hirsutum
  unsure (1)..(503): unsure at all n locations
  Clone ID: LIB3585-056-P1-K1-C5
cccacgcgtccgcacaaaatgctggagagagtcctgttgtcaacctcttcaaatctgcgtgcaggtgcaactgtgtcaaaccctaggtgccnaaatccagcctctttttacacaatgtcaaagcaggcagaagctgcagatcttctgtacaaggctaacttaaatactggaagtgtattagaatacgcccttgcatttacaagtgcagccttagataaatattgcagtaaatggagtgctgccccgaagactgggttcattgacatcacaacctcaaaggatttctatcgtatatatagtggcctccaaattggatatctagaacagtctgttcaattacagcctaacaatcatgatatgctgggggattcagttgcttggggaggctgtaccattatatacttgctcggccaacagctgcattntgagctgtttgattnttcataccaaatcctaaatgttgcggaagttgaagctgcatcaatcatgcaaacgcataaaag

SEQ ID NO: 46815 - DNA, 486 bp, Gossypium hirsutum
  Clone ID: LIB3585-056-P1-K1-D1
ggaaaatgtcttaccctttctaattcggtaagacattttcaggaaaattagaaggaacacaaaggcttccctttcccttccccttgcccttccctcattcttgatcggttgttccaagaaaggctacaccgtaatcgtttgttcccatgcccaataaaaactcaattccctccaattggagctctcatcgcctgaccgtcacatcctcctcaatgtcgatgtggtctgtcctgttgttcttcgattcatttatgtatcctccttcgactcctcatctccgttcgttggcctcacctcaccatcttagcatcgtcgtctctgtcgctcgaccgtcagccttacctctgtattttgaagaaaccttaaaaaattagggtccacagtcgagaaaaattcatctctaatctcctcgaggtgcacacttccaaaacttgcactctttaactttgaagcaagtcctgtacttgacttgcgagtgatccccac

SEQ ID NO: 46816 - DNA, 574 bp, Gossypium hirsutum
  unsure (1)..(574): unsure at all n locations
  Clone ID: LIB3585-056-P1-K1-D10
cccgtccggtccttgtcgtgtcttctccatctgctacagaagaatgtttgtccaggagcgacactgtattcgcaaaccggcctcntctgcttgccgggaaacaccttggttatgattatactacacttgtttgggccccatatggcgatcactggaggaacttgaggcgtgtggcgtctctccaactcttgtcatcgaatcgtgttcaaaagtatctcgggatacgcatggatgaagttaaatctttggttgttaggctttttaggagtacttcaaaggggagtggtgagtttcaggtcgtggagatgaaatcgatgttcttcgagttgactcttaatgtaatgatgaggatgattgctgggaagaggtattgtaggaatggagaggatgaattggaagaagagaaaaagttcaaagaaattgtgagagagtcctttcaagtgagtggagccacaaacattgtagattttgtgccgattttgaaatggggtggattaaataaaattgagaagaagcttggaatattaccagagaagagagacgaattcattcaaaacttggttgatgaacgcag

SEQ ID NO: 46817 - DNA, 389 bp, Gossypium hirsutum
  Clone ID: LIB3585-056-P1-K1-D12
ggccgttaacactacagtcagggaccctgacaaccaaagaagatcttaccttggacactacagagtggagactgaaatctttcagcggtttaactgatgaagagcttgatgcccctattgtggtggaccttgtcttcatgtgcacacccgtacttgtttgaagatcagaaagacatgacaccacactaggaggggaacgttgaaagctggcaacaaaaacagtacagtcgttgactattgcgactggtttacacatggatgacagattgtatgacagaaagacgaccgttcagttatatagcaagcacactggggtcctgatcaaacgtgctgaaggagtggaattgctgaaacacatgactattacagatcttcttatgactgtcttc

SEQ ID NO: 46818 - DNA, 486 bp, Gossypium hirsutum
  unsure (1)..(486): unsure at all n locations
  Clone ID: LIB3585-056-P1-K1-D3
atttcttctcctattgaaaaaaaaattcgagtttatacgacaatgttcgttccaaagattgagctggtatgagatatttcggtgtcagatctctccagtttgaaggaatcagatgttagattagagactcattttttaaagatcgtggaggttaattagaaaaaatgaaagcaaaagcggtacaatcgtcatttagggatcggacgcaagaatttctgagcgtgtcggagaggttaaggaagtcgatcacgtctggaccgagccaaaatgggccgagtagcagtagttcgagagcggaggataagagatctgtggttgcgcatcaatcggagtttaataggagggcttcgaagattggattaacgattcatcagacttcgcagaagctttcanagttagcaaaattggccaaaaggacttcagtttttgatgaccctactatggaaattcaagagctcactgcagttatcaagcaggatatcactg

SEQ ID NO: 46819 - DNA, 468 bp, Gossypium hirsutum
  Clone ID: LIB3585-056-P1-K1-D9
cccacgcgtccgcccacgcgtccgcggacgcgtgggaagacgcagaaggaatcaatcaggtaattctgatgccgatacacagaggaaaaactctgatgcggaccggagtgacgatccagatttgaggttggagagcagaatgcaccatcacccctagacttggggacaaaatgagctttagaagctgagaacaagggaaactaccatcattacatttgttactattccgatgccttcagatgacccccatatagttgagatttgcggcacatgcaggaaactgagggatttttttttattttttatttttaatttttaatttttttttcttttgtggagctctggattacatacatatcttctagattgtagaaaacattagcttgtcttgaaaagggcattggcactagattttctgtacaggtctatatggattctatataattttttgcctcgttattcggatgc

SEQ ID NO: 46820 - DNA, 561 bp, Gossypium hirsutum
  unsure (1)..(561): unsure at all n locations
  Clone ID: LIB3585-056-P1-K1-F9
cccacgcgtccgatttccacatagaaaattcgacgccgaattgagaaccctgttaagagaagatgtcgacggtgtacgttttagaaccaccgacgaagggaaaagtgataatcaacacgacgtatggcccgctcgacatcgagctttggcctaaagaagcaccgaaagccgttcggaacttcgtgcagctttgcttggaaggttattttgacagcacaaccttccaccgcattatcaagggattcctcgtccaaggcggtgatcccaccggttccggcaccggtggagaaagtatttacgggagtgtgtttccggacgagttccattcgcgtttaaggtttaaccatagaggtatcgttgcttgtgccaatgctggtaccccgcattccaatgggagtcagttcttcatatctttggataaatgtgaatggcttgatcgaaaaaacactatttttggaaaggttactggagactctattttcaatcttttgaggataggtgaggtcgacactgatcaggatgaccgacctttggatccttctncgagaatcaaatctgtcg

SEQ ID NO: 46821 - DNA, 469 bp, Gossypium hirsutum
  Clone ID: LIB3585-056-P1-K1-G11
ctttaaattgcagtggaacagaagtccaggaaagagtggttcgcacttcgaccccgcagtgatttgtttgtcccgactgaaagaaaagatgtgattacttccactctatcttggacagccatggctgctattcttgttggcttgggtttcacaatgggtcctatgcagttgcttaagctatatggcattccatattgggtaggtttcaagtttcttctttcaaggaaacgatatcgggaagtagaaaatatgatttgactcgtctttggtttgatgtttagattttcgtgatgtggctggatggggttacatacttgcataaccatggtcatgaaaagaagctttcttggtcccgtggaaggtatatgaaatttgttggtctaatttaatatgctaaggcgcctatgtttaaattcatattgaaaacctaccaataaaattatctattttgataggaattgattttctt

SEQ ID NO: 46822 - DNA, 447 bp, Gossypium hirsutum
  Clone ID: LIB3585-056-P1-K1-G12
cccacgcgtccgatccaatttgaaaaaaaaaaaaattcagctaataactgaaggcgtgagagagtaagagagagggctgaagctgatccatttttcatccataatttacatctataatttcagcttcatcagttgttttaaggaggcaacagtttcttataagatctctaaaggggtacagtgtcagtgacaaaataagaatggaagctgtgaaatgcttgagtggaggagcctctttagaggctaatgctgagtctgttttgagagcaattaccccatcacttgaccctactagacataaaggccaagctgggaagatagctgttgtcggagggtgtcgtgaatataccggtgcaccttactttgctgctatttcagctttgaagattggcgcagatttgtcgcatgttttctgtacagaaggtgctgccacaattataaaaagtt

SEQ ID NO: 46823 - DNA, 581 bp, Gossypium hirsutum
  Clone ID: LIB3585-056-P1-K1-G3
agaacttcgagattcaaaatcaagatcgttgatggaatcacatgactcttttgggcaggcgaagtctgatgtcaacgattccggcggggactggaaattccccttcggtatccccgacgcttccaccggcatcacaatggtgtctccgccggaatcacccctggacaagctgccagatgatctttgtgccgcgcttcatgacggccgggaaatattccactctcctagatacaaatccacctccacctctgccgctttctatgattgcaatgatgatgaaatgatcgacaatcacggcggaaaaactgctagtgctgacactaggagggcagtttatttgggaaaggatgcagatttagggttttccgaggaggaagttgattcggcgaggaagattaaaagcacttcgaattcagattgcactaagaagaaacgggtattgccttcacagccgttggattttgaaacagagttgccttcattgtcttacggcaaagcggaggattgggagaaagctgatgaagacccggatgtttatgaaaccgggacgggtcattcggatacaaatgccagcagattgg

SEQ ID NO: 46824 - DNA, 574 bp, Gossypium hirsutum
  Clone ID: LIB3585-056-P1-K1-G9
ctttcttgcaagcacttgttcgatatgtttcgagtggcttcaagtttggaaaagaggagcgagcattgcaaatccgttttggaaactcttattggttcacaactggatcaagcaaccatagattttctgcttgttccaccaccacgaaagaaacattacatgtatgatatgaacctggttctgaggctggtaaatgcatttcagaatgaactgagttgttgctcatccctggttcgattacgaaaagttggtagcttacttgactcataccttgtggaagtctcagcagattcctacctgaccccttcaaagtttgcagcattagtcctcctgctgccagattctgcaagagaatcccatgataggctttttcaagccatagacatttatctacaggttcatggaggaatatgtgaagcagagaaaatgagaatctgcagtgcacttaactatgcaaagctctccacagatgcattgagacacttggctcgaaactcaaaatttccatcaagaatagctatacaaggtttcattaatcagcagtccaagcttgagaacttatttgagggccaaa

SEQ ID NO: 46825 - DNA, 536 bp, Gossypium hirsutum
  unsure (1)..(536): unsure at all n locations
  Clone ID: LIB3585-056-P1-K1-H8
gagtctccggcgacccacaacttgcctgccactcttccccttagtcgaattcattgccgggcaaacctaacccaaattcaagaccttgctctgctcagaagttgttagtgaagtttccggtgacccacaaacttcgggtcaaccagctgctggctgtgtaagtccacagaatcagcttgtttcagtatcacagatacagactaccgttgatacgaaacatccgagttccgaggaggatgagaagttgagacacacaccaaacgcgagagcttcttccgcaatggggcagtatgacagtgctgaatatgttactattggtgaagtgccaactcccccggcagataacttcaagaaagtctcagttttaccacttattttcctgatcttctatgaggtttctggaggtccattcggtgtggaggacagtgtccaagctgccggaccatttcttgctcttctcgngtttttggtgttttcattcatctggagcattccggaagcattaataactgctgagatgggcactatgttccctg

SEQ ID NO: 46826 - DNA, 232 bp, Gossypium hirsutum
  Clone ID: LIB3584-025-P1-K1-A10
acagcatttctattggacgttttgaagcctaatctgcctgagcatgcttttctacaaacgagggtttaggaaatcaatctagttacttttccaaatgttgctgatgccattttagcaaatggcatgttcagtcactatgaccgtcctcgcattgcacaactttgtgagaaagctggtctctatgctctatctctgcagcattacactgagttaccagatattaaactgtgtt

SEQ ID NO: 46827 - DNA, 271 bp, Gossypium hirsutum
  Clone ID: LIB3584-025-P1-K1-A4
ctcccgggtctttgaatccaatttcaagctcacaaagaacaagtggaaattttcatgctttaggtgtgattttttctccccagaaaatcccaaatccgaatatattgatcattttctgcctgaggaaacagtacagcccgaggttgataagtctagccctcacaaaagagattggaaatcaactcttccggaggctgcagatgcagttttaagggcagttggctagcagtggactgtaccatggaccgcacagaccattctgaaggttatg

SEQ ID NO: 46828 - DNA, 202 bp, Gossypium hirsutum
  Clone ID: LIB3584-025-P1-K1-B11
tgcacttcattatttctgggatagatgcagatgtttgagcaaataacatgctgttcgtgataaccttcctggtgatcccgatgatatgggctcaacataatacccaattttttctcctgcctttaaaaatgtagtgtttcttgacattcttcacagagctttagtcttgcgaggtcaagtacatgagtgccattacctatta

SEQ ID NO: 46829 - DNA, 173 bp, Gossypium hirsutum
  Clone ID: LIB3584-025-P1-K1-B6
gtatgatttgacaattgatctcactttttgtttggtttgtgagggtgttttatgggcgtggaggggcttattctatgtttacagggagggatgcgagcaggtcattggcgatgttgtcttttaaacctgaggacctgactgtgaacctttaaggcttgatttctgagtatctt

SEQ ID NO: 46830 - DNA, 303 bp, Gossypium hirsutum
  Clone ID: LIB3584-025-P1-K1-B7
acaaaacacacgatccctctctcatcgtgatctccgctctctcctctatatcagagcgagggggtatataccgatctcgatgtcctatacaactcaatttgcactcaatatctcccccctttcaacttccttgaagcacaaccagcaacctcttcatgggatctctgatgtcatctcacttaggtggccatctcttacaatccgaccttgacctatgcgcctccgcatttcttgtcgcggccaaacctgatacggtggacaaagtatgtagcatactgaggcagcaactaccactaccagaag

SEQ ID NO: 46831 - DNA, 225 bp, Gossypium hirsutum
  Clone ID: LIB3584-025-P1-K1-C11
caaaaccagtgcaccatagcgaattatatcatttctgtagaaaggcttaaccaagggatggttataccaagtgaagcccctgaagtgatagaggagaatcgtcctccatccaattggcctgctgtgggtaaagttgagatccgtgatttgcatgatctgatatcgaccgaatgcaccattaggtcttctaggaatcagtcgctcatttcaatgtgggcacaaaat

SEQ ID NO: 46832 - DNA, 385 bp, Gossypium hirsutum
  Clone ID: LIB3584-025-P1-K1-C4
cccacgcgtccgcaactgctgaggaggcattagccgatccttacttcaaaggcttggctaaaattgagagggaaccttcttgtcagccaatctcgaaattagagttcgagtttgagaggcgaaggttggtaaaggaggatgttagggaattaatttacagagagatactagaatatcatcctcagctgctcaaagactatataaacggaaatgaaggaactaattttctttatccgagtgccattggtcaattcagaaagcagtttgcatatcttgaagaaaacagtggtagaagtgtgccggttttccttccggagaggaagcacacgtccctaccgaggaatacagttcattccattacaatacctttgaataggcagtcagc

SEQ ID NO: 46833 - DNA, 129 bp, Gossypium hirsutum
  Clone ID: LIB3584-025-P1-K1-C8
cacatcattaccatacaccatacctgatagtatatgttctcctgacctttactaggggggagtctatataaatccgtacattatcacaccatatttgcaatgaatatcgctaactacgaccataatcaa

SEQ ID NO: 46834 - DNA, 246 bp, Gossypium hirsutum
  Clone ID: LIB3584-025-P1-K1-D12
ccaatttccagaagatggattggatctagtaggtctgtacacgtaactgcatctagtgctacaattggtacggtcactgtcgagcttacatcctagtctcttatttgcattctcactaaaccttcttttttagtgtttgataagttgatactatctacctattttgtctgctttattaaattggttttatcgtgaatcctaggttttgcactcgatgggattgaatccaaggagtatagatctact

SEQ ID NO: 46835 - DNA, 319 bp, Gossypium hirsutum
  Clone ID: LIB3584-025-P1-K1-E7
cccacgcgtccgcccacgcgatcgctcttggagtcctgaggcaacaaggctactgtggggggcatgtacaataactatgtaggatccatggacaagccaaaatcgagaacaaacagcgaaagtctagctaccggttcgagtagactaagtagaaaggtggagcgttacacctccgtggcgcgtagacagcgctggtagcgcaaggaagaaagtagttagcgtaagctgtttcaccgcggatgaggatagtctgagacccttccgcaaccatcattgataccagtcttaatcaaactgatgaccagctatgaggaagaga

SEQ ID NO: 46836 - DNA, 353 bp, Gossypium hirsutum
  Clone ID: LIB3584-025-P1-K1-F10
cccacgcgtccgcttcaactggtttttctttatattttattctgcctgtgtcgtaagttctttaggcatcgtctatgttgaggatagtattagttggggactgggatttggcatgtgtgcagcttttaattttctgggcttggttattttcttcctgggaaaccgtttctaccgccatgataagcctcaaggtagcccttacacgagtttggctcgtgtgattgttgctgcatttcgaaagaggaacgtcttggtttcatctgaaagcaagtattattatcatgtgattaatgatggagctaataaagccatcgttgtaacacctaaacgcagctgcaggttcttgaactcgt

SEQ ID NO: 46837 - DNA, 355 bp, Gossypium hirsutum
  Clone ID: LIB3584-025-P1-K1-F11
ctgatgcatgcttcgtctttaacaaaagccaatctgagttttgtgatgaccattgacagagatagatatagtatgattgcacaaagcatcggtccatctttagggacctcctagaaaagctttgccatgttgaggaattgaccgtcgggacttggtgccttcaggttttatccatatgggaaataaagggcatatcttctccattgtcaaaacgccattgtttggtactggaaactgaaatatgtgaatgggatattcctgggatcgtgaatctgcttcacagttcaccttatctgaagaaactggtgataaatttgaattactgtgacaactctaagtttgagtttgatcagac

SEQ ID NO: 46838 - DNA, 258 bp, Gossypium hirsutum
  Clone ID: LIB3584-025-P1-K1-F2
cacactgtttgctctgtatattgaaattttctttctcgagattcagtctagccaaaaaaggtgcggatcttctagaagactctaaccggcaagacgaatcactctcgaggtcgagagctccaacacgatcgacaccgtgaagaccaaaatccaagataaggtaggcatccctccagaccagcagcgtttgatctttgccggaaaacagattgaggacggacggaccttggccgataacaacatccaaaaggagtcaac

SEQ ID NO: 46839 - DNA, 254 bp, Gossypium hirsutum
  Clone ID: LIB3584-025-P1-K1-F8
gctatagatcgcgagctgccaatctgagacgtagccaagattgcatgcgcgagcatgactgacgttattaatatactatagggtgagctagagacatcacactgtgcgaagtgggacaacaaaatgactgtgaaaaaccatgcttttcatggctagaccttgtagagcaagatccctgtatcgatagctagcgtagaaacgatgctgcacaggcggaaactacttgcaagcaaataaatagacgtggatgggag

SEQ ID NO: 46840 - DNA, 272 bp, Gossypium hirsutum
  Clone ID: LIB3584-025-P1-K1-F9
cccacgcgtccgcctacgcgtacgaccactcgtacaaagaggaaaactgaccacgagagagagcttcctatactcgagctgatacttgtcacctcacaatggaggaaaggtccatcgaagctgaacttgctgaaccttgcttttcctggtgagacttaccatagaatcactcatgctagaaatagctagtgttcttacaacgctcgatagttttaaactacttgcatgcatataaactgtggtgtttgcagaatttacattgcttgacttca

SEQ ID NO: 46841 - DNA, 222 bp, Gossypium hirsutum
  Clone ID: LIB3584-025-P1-K1-G3
cccacgcgtccggttggatgtgataacaatgaagttgatgaacttagagtttggttgatgaagggtattatttgttggggacattgaattggtctgatcatttgccatggttagcacaatttgatcctcaaaatatcagggttcgatgctcgaaccttgtacttaaagttaatggctttgtcagtgggatcatatcccaacaccgagttcgaactaacgagg

SEQ ID NO: 46842 - DNA, 454 bp, Gossypium hirsutum
  Clone ID: LIB3584-025-P1-K1-G7
agcgacccgatacacagagaggatcatgcacgagacagagacatggaggtagagaccgagcaaaagtcaccgcaccatggcaaagttgccagagtacataagctgcctttgcgacaaaccgaagataatagcagagcgacgccgccttcatcctcagcgagtaatctatacgctcaaactgaaccacatgtagaaggatcgaatgatcacggctgtgccattgcggtttactccgttcaaatgagcttttgccgactcggcttatggtaaaactggatccagctagtaagctatattgtccatatgaacctgacaaacaggggaggagcgcaaatcaagataaaaaacacatgcaagtcatatacagctttcaagtttcaaactactgcaccaaagagctgtctcatgcgccctccgggtgccattctagcccccggcgagagcttcatatcaa

SEQ ID NO: 46843 - DNA, 557 bp, Gossypium hirsutum
  unsure (1)..(557): unsure at all n locations
  Clone ID: LIB3584-025-P1-K1-G8
gtaggtttccagcaatgaggacgcggaaatacatttttgtgatagctgtggattgcgattcagtctcagatattccaaaagtaattaggacaattatggatgcagcaggaaaagagaatcctatagggtttatattatcaacatccttgtcagtatctgaagtgcactctattttgatatcaggaagcataagccccttggattttgatgcttttatctgtaatagtggtggtgatgtgtactatccgtctttaagctcagaggatggtcttgggcttcccttcacggtggactcggattatcaatcgcatattgaataccgttggggaggagaaggtttaaggaaaactntagttcggtgggccacttctgttagtgacaaaaatggacaaactgttgaagaagacgagtcacgatctactacccaatgctatgcattcagagtgaaagacgcttaactgattcctccggttaaggagcttcggaaattgatgagagttcaggctcttagatgccacgttatctattgtcaaaatggcaccacactgaatgtaatc

SEQ ID NO: 46844 - DNA, 566 bp, Gossypium hirsutum
  Clone ID: LIB3584-025-P1-K1-H8
ctccactatatgcggcgcctcctctatccagaatcgatgatacccgtaacgccctccttccttggccatcgcatgagccgctttgttggcttcccttgccataataatggcttgcagacacgcccttgcctcggccatcactggatctgaaatgttttcccatgggtaggtacaagctaccattattagaccttccttgtttcgtgctatgatacttgagatagaacatcttgttatttgattaaatgaaacgtcaaaattgatttttatggtgtcattgtctggtggttcccaaactgaatgtctaacatcacatgagttctttaatctctcccccataatagttgtttctgcattgtaggcttaataaatcccacaacttcagttacttgctctcgaataccatcatgatagagtttattgcgattataccaaattgcccaatatgcgatagatctgattctacatgtctttatgctctgattttcaaattccggtgctaaccaatttttccaactggactctctactacaatgtggaactttccactccaaaaccctgcaaaa

SEQ ID NO: 46845 - DNA, 302 bp, Gossypium hirsutum
  Clone ID: LIB3585-052-P1-K1-B6
cggacgcgtgggtgagcatttacttcattgtatgcttgatataatcatgcaagtaggggtgctggtctgctttgcctgtagggtggtcatctcttcccaattcgtagtgatgggaagctagcagcattttagtttttattccacatgttgcttccttttctcttggaagcttcttttagcagttttaagcattgtacagttcatgactgatggatcgaaaagatgttctgattgctggttcattttgttttctcaaccatacagttatttcaataaaattgcaaccgctgcaatgtgctttt

SEQ ID NO: 46846 - DNA, 417 bp, Gossypium hirsutum
  Clone ID: LIB3585-052-P1-K1-B9
ccctattatgggttgcacatatacaattatcatccaatcactattacttcaagaggtacgtggcctttgttaaggctaccgatcagttacaattaagccacacagcactcaattaagacaaatatacatggatcatgaaaggataaagaatatcaatcttccatactctctcccatagcatcaacagctaaacgccacttacaagcctcaattattttataacccgctactaattgaattcagtgacctgatcaccaagtttaccacaatccattgcgatcccatatgaaccagctgttgttcctgaagtaacattaatataaaaagctcctaatgtatctctgcctaaccaattctccaaaagatcaaggaccctcttgaacaaaccagcttaaccaaccaaactacccagtctat

SEQ ID NO: 46847 - DNA, 483 bp, Gossypium hirsutum
  Clone ID: LIB3585-052-P1-K1-C5
ctcttgcaaaacaagttcatttggctttcagaggatccgatatcatgttgataaatctgagaggtgtatgataacgcctggccacactcaccgattgaatgcgctcacgaagatggtaaagtggtatttcaagatggatcaattgttgaggcagaagtcattattcattgcactgggtacaaattacacttaccatttctcaagtcaaatgggatagttaccgtggacgataaccgtgtcggacctctgtataaacatatatttccaccgagcttagcccctgggctttcttttgtgggaataaattacagggcattggtgtttagagtaatagaattacaagcaatatgggtagcaaaagttttgtccggcaaggtgaagctgccaacacaagaagcaatggcagcttctgttgaagaattttacgagcagatggagaaggccggattgcccaaatatcatactcatagccttcagaatgat

SEQ ID NO: 46848 - DNA, 487 bp, Gossypium hirsutum
  Clone ID: LIB3585-052-P1-K1-C9
gtttttgctctctgtttttgttttgcaggtgatgggacgggtcggtggcagtagagctggaaaccctagggtttctaagttggcttaaggccttgggcctggtgttggttcattgggcttagttggtttagtttgtttttgggtgtaatagggtgtaatggatttgggttaatgggttggcaatttgggcttggtattattttgtttgttcattgggcccggtaatttgggcatttacaaaattaaccactatacttacagatcaatcagctcttctagcactaaaagatcatgttattcatgatcctgaaaatgtcttgacaactaactggtcagcctctgcccctgtttgctattggtttggtgtaagttgtgtcctgggttgggactcgtagacatccttccacctcaattgggaaatttatcattcctttctctccttcgtatcagaaataatagtttctatggcatattacctgttcagtta

SEQ ID NO: 46849 - DNA, 422 bp, Gossypium hirsutum
  Clone ID: LIB3585-052-P1-K1-D11
cccacgcgttcgcttcaattacatactgtatacgcgatggctacaaatcccatcttgaaggcgcttaacgttcttcctaacgatccttctacctcttgcagagcatgccctgtttcttaagacatgtatcattggcaatctactcttataggtccaccttacagtccatatgcctagaaagtagcttataacaccattcatttaccttacaactatgcatttcagacacccaatgttgccttcaacacaaatgtctttcaccctaatatttacaacaatggcttactctgcctaaatattttaaaagagcagtggagctctaacctcaccatatccaaggcatcgctcttaaactgctcacttttgactgacccaaatcccgatgatcccttgttgccagagattgaccacatgtacactac

SEQ ID NO: 46850 - DNA, 477 bp, Gossypium hirsutum
  Clone ID: LIB3585-052-P1-K1-D4
gcggagaggcccaacacggcaatcccgtactcagtcttcagtgcggactactcagaatgcgtcagatacgataggaagagggtcaacaaggcagtcgcatactcggtcaccatagcggacttatcagaattcttcaaataggagaggagtactggctcgtttcactagttctgctagagtgccgcggttgaggaatcggattctgaatcaaagtcgcgcagtatcatctagggcaaggaattatcactttcctttggacatggatttcgatatgcgacttgatatattggaagccatggaggctgctattggagatgatgatgacattgctggtcacatcttccgagctcacaatgattttaacaatggcgattatgaaaggtttctgacccttgatgataataatcatcaacatactggtgcatctcttcaccgaattaacagtttaccactctacaaagtgcagactgataactt

SEQ ID NO: 46851 - DNA, 336 bp, Gossypium hirsutum
  Clone ID: LIB3585-052-P1-K1-D9
ctgaaatcaagatagagagatatggcaaacccctcttccaaagctacagaatctgggtcgggggagctgcaaacgtcatcaactacacctggcggggctgatacctacaccaaatacgatgacggagctaacccctacgagcctcaaattatgggttttttgaaaagggatagcgaatgcacgatcccaatgtaaaaaactacagttccagagacttctactacaatatattatgcaacaccctcaatacccacactgatcgacatggccacgttaactgatacgccaacgtcacacccactgtcagcaattattttcttgggttacatggagggt

SEQ ID NO: 46852 - DNA, 360 bp, Gossypium hirsutum
  Clone ID: LIB3585-052-P1-K1-E9
cattgacaaactctcactcaaagctcaatcactctaatcttttgcttttactgcgagagggcttacatgaaaaacttgaatacttcaactaatttatatttatatctactacatttttacattatcacaatttattactcctaattagttttcagtctcaaaatctggcaaacatgtaatacttatgactctgtactatcatgctactgcggtttaacaagtgatacttgacccacatatagaaatacaaaacccatatgcactatgatataaccacttattcctacataaaaggtaaattactgtgtcatttaacaaatattcttatatcacatctcacaactctaatgaacttaaaca

SEQ ID NO: 46853 - DNA, 468 bp, Gossypium hirsutum
  unsure (1)..(468): unsure at all n locations
  Clone ID: LIB3585-052-P1-K1-F12
ggaggatgttgtggctgctcgtcatgaagcacagaaactcaaggaacacattagaagcatgcagaatgagagtgatattcagatcanggttctgcaggaaaagattgcaaaaatggaaccggatattcgggttggtgagagtgttaaaaaagagttgcaacaggcacttattgaggcacaaaatttagtcaaagtgagacaagagttaattgcccaaattcaacaggcctcgcaggagttggcaaaaactcgttctgatgttaagtgtctgccggagttgcatgctgaacttgaagatttgaggaaagagcaccacagattacgcgttacatttcagcatgaaaaagagtcaaacatagagcaggtggagcaaatgcaagctatggagaagaatctaatccggatggcaaaagaagttgaaaagctacgcgctgaagtcttgagtgctgagaagaaaatgaatggaat

SEQ ID NO: 46854 - DNA, 490 bp, Gossypium hirsutum
  Clone ID: LIB3585-052-P1-K1-F3
cccacgcgtccgcgaaaattttaagtttttttttaaatggtggtgaagatgatgaggtggcgagccatggccgcctctattatcaaaaaaatacgaggtgaagttaattgtaaggaggctagaagggtgggatccggtgagggaaagtacagataagccggagaaattaacggtggagattcgatggaaaggtccaaaggcttcccttagttctttaagacgaacggtcaagaggaatttcacgaaagaagccgacgccggtgaccaaaacggcgtcgttctatgggatgaagagttccaaactctttgtagcttatcggcttataaagaaaacgtttttcatccatgggagatcactttctctgtcttgaatggcttgaatcagggagctaagaacaagtttccttcgatcattgggacagcatcgatgaatctcggtgaatatgcttcttcttcggaacagaaagagttcgagttaaatgtcccactc

SEQ ID NO: 46855 - DNA, 255 bp, Gossypium hirsutum
  unsure (1)..(255): unsure at all n locations
  Clone ID: LIB3585-052-P1-K1-F5
cccactcnnttctttactcgtgntcagacgctttattctacacacaaaatctaaaccgacccgccctatcttacaaactttccctaaacatagtcaatctattaaacaaaataatatacaatcccccaaaaaactatttacaattatctatacttataaaaataattattatccctatattatcaaacacttataaataatatttattcaattaaattctaaaatacattcatacaaaaattaaaaaaaatcaat

SEQ ID NO: 46856 - DNA, 472 bp, Gossypium hirsutum
  Clone ID: LIB3585-052-P1-K1-F8
gttagcttctcccatacatcgttttcggcgcttctttaaaccctaacaagcaccgggcgggcttttaatcagatgaaaatcatacaacgctctaacggctgccaacaccaccccacattgtatagacaaagagcaacttaactatttttgtactgtttttttccttttacttcatgactattatcttcaggtttaactctctaattctcattgaacgaaaaacctcatcttctctactcaacaatttgaccatactttttgctacatttgtactacctaagtaactcttgatctttgttctcaatggatgaaggcacatcactgtttgtattaactaattgtaaatagtcattgagacattaagtctcattaagctttgatagacaatgctaatccaagctagatatgttttatcttattgaacactatcatcgcaatgcatgagattggattacacatcatgtttaaatca

SEQ ID NO: 46857 - DNA, 582 bp, Gossypium hirsutum
  Clone ID: LIB3585-052-P1-K1-G2
gaatttctcagttctcttctgtttcaaagaatgaaggcatgttttcagctgtaaaaggtggcacgaaagacaacatgaggatttgcagaactcgaagtcgattattcaacgttgttttctttcttttaggcgacaggcaaacagagaaacattttaagtttggaccgtctaagcatctaaagcctcgaaggtcgggaacaagtttgcctcttttgcttgatttactgcacccctgaagagcaagatcgctagactgccaacacaaaagtgtatgaagcaaccatggcagtgcgttacaaacgaactaaaatccgtccctacaacgcattgccacccaggtccgtacaccctgtcgaaatcctgcatttagaactcaaatcaaagatgcatacggtatatagtttccaacatattcgataccccatatggagttacaataaattctagcttagagccctcaccttttttataaactgggctatatcagtcgattcagtggctttggaaaatataaagaagcttttgcagttaagtgaagtgcagccttctgcatcgtatggagcatatcggtttcgcctacaa

SEQ ID NO: 46858 - DNA, 354 bp, Gossypium hirsutum
  Clone ID: LIB3585-052-P1-K1-H11
acgcgtacggtttgctgtggatgagaaacctgttcaagttcaaacaacaataaatgggagaagagcaaaggggcataaactcgaggtccctcgaaatattgacgaagcaaagaccaaaaagagtgcaaatgtttataacatgccgaggacaatgaagaatcaaagttccaatttgcaagagagaaaacagacaaggcaggagaaacctgctatctcaagagaagcagatcatgaagccagcacgttctaagaagcacaaacacacatcattatacccaacgtgtcagtagcaagcccaaaatcataacgcgttgcacaagaactgttgacagaagcacacaaagatttaatttt

SEQ ID NO: 46859 - DNA, 300 bp, Gossypium hirsutum
  unsure (1)..(300): unsure at all n locations
  Clone ID: LIB3585-057-P1-K1-A2
ctgccgtaccggactcccagtcccggcccggcgtccggttaacctttgttttgatgagtagtaattttacatttatattaatgtgtccgaaattttcggaatgatcaacaaataacatgtatcaaatttgtttctaaagtcagatcttagaggataagttgatatccaaataggatcatcaaattgaaatcagcgtngcaggtcccattgaatcagggtcgacgtgtacaatggaagctngcctancgtgggttacaacccatacgcatggacanaggtgtcaaacatcgtatttataga

SEQ ID NO: 46860 - DNA, 508 bp, Gossypium hirsutum
  Clone ID: LIB3585-057-P1-K1-A6
ttcgtctccacggttggggactatgaagaaaagctctgtttcaacacggaaatcgggtgcctgtcgtagtcccgggactcccaattatcatcatcacaataacttgagtgctgggatgcagaagggttcgagttctgaacgtgtaccattgcacaacaatggtgtaaagaggcaggggaatgttgctgggatgttgccttgtaacaatggaaggactttaccttcaaagtgggaaaatgctgaaaggtggattctttgtccaggggatagtggtgtgaaacaatctgtcatgcatcctcaaagaagaccgaaatcaaagagtggtccacttggtcctcctggggctgcttacaattctttgtattcgccttcgatgtacatctttgatgggggtaacatggggaatttcatggctggttctcctttttcagctggtataatttcagcaaatggtttggtagctcattctcgtagccatggtggtgggtttgctgttcgaactgagcct

SEQ ID NO: 46861 - DNA, 370 bp, Gossypium hirsutum
  unsure (1)..(370): unsure at all n locations
  Clone ID: LIB3585-057-P1-K1-B9
gaatatatagcatgtcttaccagcaagtagagggttttgattacatggctgaagatttttgcgatgatatggatgaagacagctgcggtagtgctgctgacggagacgtggatgccgatgaatatgacatgctgaccaaggtgactgatacatccgctgcacaagcgcgcaaggggaaagacatacaggggattccgtgggaaagattgaacataactagggaaagctatagactgacgaggcttgaacagtacaaaaattatgagaatatcccgtcctcaggtgaaactgtcgaccaggaatacaaacagatagaaaagggtgggaactactatngaatttttcacaacacgagatcggttaagcctac

SEQ ID NO: 46862 - DNA, 515 bp, Gossypium hirsutum
  unsure (1)..(515): unsure at all n locations
  Clone ID: LIB3585-057-P1-K1-C7
ctttaatttcccatcattttcctaaactaccaccacaaccattgtttctccttcaagccatgccccttctctcccatggcgtaaaactcctctttgggttcttttttaacgataacacaaatacgttttcgtttttctttttttaagtttttgactgtgaatttttttatatatatatcgtatatgggaaactgtcaagcagctgaagcagccaccgtggtgattcaacacccagggaacaagatcgagaggatttattggtccgttagtgcaaatgaaatcatggggtcgaatccaggtcattacgttgcccttgtggtgacttcaccgacgatgaagaatgaaaatggtacgccggtgaaacagcttaagctgttgaaacctgatgatactctgttgatcggtcaagtttataggctcgtcagctttgaagatgttntgaaagaatttgctgcaaaaagtgtgtgaaattggggaaattgttgaaagaaaatggaggacttgggcttggaatg

SEQ ID NO: 46863 - DNA, 318 bp, Gossypium hirsutum
  Clone ID: LIB3585-057-P1-K1-C9
cccacacgtaccattagctcacgtaaaaaattccgagctaataatgcatcacataaggctgtggatcaggttacacctatccttctaaacgactcgcctatgtgaaaggaggcagtcctctcctaatctgtgagatgctaaagtgtccatacagtcacttaatctagcactatagctcgcggcgttatcatttgccagcttactacattcgggtgagacagttacagatacaccaccactgctgatgacactcactccaatgtatactcgatcaccacatccatataggaaggctcccaataatgctacctgagtgga

SEQ ID NO: 46864 - DNA, 513 bp, Gossypium hirsutum
  Clone ID: LIB3585-057-P1-K1-D10
cttaattatgacctaagattgcatggatcaagtgataataatgaccccatcaattcatgcgggtttttttttgtgtgtgtgtggcttgagtaagtggtatgcagtatttaattagcctcaaagtttgctgatcaaatgcttttatttttctttcttggttaagctttggaggcaaaaaaattaaggtaaatgaacataatttgcagttaattgtttatattatctcttaggtaggtacatcatgaagatgttataggtctcttgtgacaaagacatcttcggtttcatttttatttttattttattccatttctttttagctaaacctttatatttttaaaagttttgaaaacacattatcagatagattattgaaggtggcataaatttaatataccaaatattggtgtagccactcacagttatcattgtatatatagatatcatcctttaaatattattacgccaaacatatatatgtatatataagtggttgatcttcagttttacatc

SEQ ID NO: 46865 - DNA, 520 bp, Gossypium hirsutum
  Clone ID: LIB3585-057-P1-K1-D2
aacaatttcgcttgagagcagttcttcagtcttcttcaagattaaaagttttcagtctctggagagagaagacgatggcgttttggtggccgatcatcgttctcgcctttgcttatgctatctgtcgtttcttgctgatgctcattcccccaaatgttccttctatcgatgtcgatgcctcagatgtgttggatgacgggaaccaaacgcaagaaaacagcttcatttacataccaccaaggggaaggccacagcaatcagacagaaaagttcaatgctatgagccagctactatgaaatatttgggctttttcccagcattgacacctgctgaggttgaggagcgtgtcgcacaagcacggaaagcacagaaaatttgggctaaaagtagtttcaagcaaaggcgacagtttttgcggattcttctaaaatatattattgaacaccaagaactgatatgcgaagtctcttcacgtgatactgggaaaacaatggttgatgcctctttaggagaaataat

SEQ ID NO: 46866 - DNA, 517 bp, Gossypium hirsutum
  Clone ID: LIB3585-057-P1-K1-D3
cccacgcgtccgcccacgcgtccggttgcagttatctctgtcagcatcaaacctgcgcaatgttggcatcttatcaaagagtgatcctatggcagttctgtatgtaaagaaaatggatggcacactagaggagcttggtcgtactgaagtcatactcaactgtttgaatcctacttggattgagaagattaatgtttcttatcagtttgagattgttcaaaatttggtttttcatgtatatgatgtggataccaagtattacaacatgtctgtgaaggcactaaagctgaatgagcaggattttttgggagaagccacttgtgttctgtctgagatagtgaccaaaagaaatcaatctttaactctcaatctccatggaaaaaacggtccaggaggttccaaaaactttgggacactgactgtccatgctgaagaatcttgtttatccagaatggctgtggagatgaaattgcgttgttctgagttaggcaacaaggacatgttttctaaaagtgat

SEQ ID NO: 46867 - DNA, 512 bp, Gossypium hirsutum
  unsure (1)..(512): unsure at all n locations
  Clone ID: LIB3585-057-P1-K1-E1
cccacgcgtccgtttttgcatgttgatcagaacatgcattgtaaagattgtgcaaagtgggttggcgctttaccagagatgtcgtttagtgcaaatacggaagatctgcatgatgatggttttgaggggtcacatgatgagcatggcatttttacgaaggttttctttgaaaatggtggtggcagcacaagtaaaagatgtcctattgctggtgtaggtaattttgaatgtgagcatagcaagaaattagatacatcattgtgttcaaatagtgcaaattcagctgtaacaagctggtcttgctcaaaaaatttatgccaggaggatactaatgcagtaattgagagttatgggggaacattgagtggtctgatgttgttcttttggttcccagagaagcttccattgttcattgcttggcagttgctttgtgaaactcaatggaaacgcttggctggaggaatgtgccatgccagaagcagcanagctttggattgagccatcccactaat

SEQ ID NO: 46868 - DNA, 532 bp, Gossypium hirsutum
  Clone ID: LIB3585-057-P1-K1-E3
tgcaaactcaaaaaaagcttctcaaaactctcatcttccagtttctgtttgttgttaagaaagatgtaaacttggtgttgattttgatggagttgtaggatccctctgcaaataatcttgtatacttatttgtactcttttcaaagataaattccagggctcctagaactccaacggaatctgcttcttttatataaagagagagatgggagagatgtcaagcttccagttgggtgtgattggggccctgtttctgtcagttgcatcatcagtctccattgtcatatgcaacaaagctttgatgagcaatcttggcttcccttttgccacaacactaacaagctggcatctgatggtaacattttgcaccctccatgcggcgcaacggttcagtctgtttgagagtaaaccaatagacatgaagacggtgatgctctttggcatccttaatggtgtctccattggtcttctcaacttgagccttggtttcaactccattggcttctatcagatgaccaagcttgcaatcata

SEQ ID NO: 46869 - DNA, 575 bp, Gossypium hirsutum
  Clone ID: LIB3585-057-P1-K1-E4
catagagtttcatttgagttgactacggaagaagttataagatgtgcggaaactggggcagcgaacatcatctgaagctgttccagaatctctacataatgaagcaacaagagaaagagaagaaaacacaactaaggtggcagaagattatgaatatcgtgtcggtgaaacatccaatgaaagaccagagaaagctccagcagacagggaaggcacaccgcagtaccacgagaatcaatccttaacactcgggtcagctaaagaattcaattttgagaacgtcgatggagttgatgcccataagcctattcttagttccgattggtgggccaacaagaaggtagccggaaaggatgataatgtagccaggaattggtcattttttcctatgatgcaaccaggagtaagctaaccggtacacattttagtcgatgccttctgattttcacatcattttaagaacataggtgtggctttggggatccagagtcaacaatttggtaacagcaacagggcacaagtaatcaaccatatcattgatattttaagggggggtttgacacagacggcgcata

SEQ ID NO: 46870 - DNA, 525 bp, Gossypium hirsutum
  Clone ID: LIB3585-057-P1-K1-F1
cccacgcgttcgcccacgcgtccgcggaaaccctaaggaatcggcaaaaattcctttttctttttttcctttaatttttcttcctaaattttgtgaacctctatattcttacttctttctcgattcctgcaaattttaatcaatctaaatctaatactaatttttcggatatgtgtttgtattatgaaaggatatatctaaatatgtttttttacagaaaaaaaaaagaattttaatgagaggaaagtgtgttttgagccatgttttattttctcaattaattgctcttgatctgttgttttccttgttttagtctgttaagcaatatctatcggaatttatttccttggaaactcttctgactttagttttaggcttagattctcttatttttctgtaaagaaatatcttaagcgtgcgaatgttttgtcctgaatccatgatttgtcttccagaaaaaaaaaaatcataatttgcaaaattcttgaagtttggtaatttgggttatcctagttcttctcactc

SEQ ID NO: 46871 - DNA, 508 bp, Gossypium hirsutum
  Clone ID: LIB3585-057-P1-K1-G3
tagacctcaaaagcctcccagtggagttcccactagatgggtttctctcttttgcattgtcagggggttcttgggtgtacttgttgtcaacagattttgggatccagttgaagtggaagaggaggcttcttccgcacagaaacatcggagaaacgaagttcatcccatggttatttgtgataaggatgtttctgttcggacagggaacattctttctcgagtttcacaaacccgggatgtaattaatacattagacaaaacaatctcctcattggagaggcagctagctgcagctcgagctgccaaagcagataccgaggaaggatctccgatggttacaaaatcaggaaccaaggacttgaatgaaagccggagagtattctttgttatgggaattattacggcgttaaggaatagaaaacgaaggaattcaatccgggagacttggatgcctcaaggggaggaattaaagaggttggagaaagagaaaggaattataattcgattc

SEQ ID NO: 46872 - DNA, 579 bp, Gossypium hirsutum
  unsure (1)..(579): unsure at all n locations
  Clone ID: LIB3585-057-P1-K1-G4
gacgccgtttggttcagacagaggctgagatcaagtcgaaccagtttgagggtaaggaacggttgggctccgttcctttcttagattgttttcgtacattcctatttttgttttcagttttgcagtaatttttaaggtttttaaaagaagaaaataaaatatggttgatcgacttaattagaataatgatttaaattctagtgggtttagcactttacattatttaacaaaatgttttaaatatgatttttcccgtttgaaggtagattgaaactcaaaattaaatgctaactttgggttttaatgcatgagtatgattttgaatttcaattcaactgatgtatgtgtgctaaaagcattagcaggttagagtctgattttctcttcaaacttgctcttttttatttaacctcttaagcttttggttttgcacaaattttagacccagtagccaaggcggaattacaaaccattccatgtgacaaccaagtccgcccctcactggaccatctnctctatgtttgctgcctcttcaaccccatcgaatacagtgtttctacttcctattgattctaacct

SEQ ID NO: 46873 - DNA, 512 bp, Gossypium hirsutum
  unsure (1)..(512): unsure at all n locations
  Clone ID: LIB3585-057-P1-K1-H10
ggtctataaaggtaccatgaagggtgggccagaaattgctgtgatatccctctgcagtaaaggagagcgctggacaggttatctcgagctctattaccagagagaggtggcagaattggcaagattgaatcacgagaacttagggaaattattaggctactgtcgagagagcactccatttacgagaatgcttgttttcgaatacgcatcgaatggaacactttacgagcatttgcattatggtgaaggatctcaattatattggacaaggcgaatgagaattattctcggcattgctcgaggacttaaatatcttcatacagaacttgatccaccattcactatattagagttaaactcaagtgccgtgtatcttacagaggatttttctcccaagttggttgatttggaaagctggaaaagcattctttccagatcggaaaagaactccggctccgttggcaacaaccggagccgttgtctacttnctaattccgttgaaaaacgccatg

SEQ ID NO: 46874 - DNA, 510 bp, Gossypium hirsutum
  unsure (1)..(510): unsure at all n locations
  Clone ID: LIB3585-057-P1-K1-H9
gttgattctgaattaacaatacaattgcaaagttgaatctgttctaggtgcagtttataatggaagctatagtccaatctaattttagtttgggataaatttcttttaagggggtggctggggtatactacttttagtggaagaacatctttacatttcaaagacaatggttgtgtcattcaccgggtgcattctgtggagattgtactcgattcttgacacaaaatctagtgtttataaaagcttctacttttggattttccagatttttaatagattcagccttggcacttagcgccacacttgttaactntcttggctctgcttctacttctcttctgttctgatctaaatctaattttgtatttagtttgttctgtttccctttntgcctgtcaagtctttcgtttcctctaagttacttaggcaataatggatgggggatcattgccaccaggttntagggttcatccgaccgatgaggaattggtggatatacctgaaaagaaa

SEQ ID NO: 46875 - DNA, 331 bp, Gossypium hirsutum
  Clone ID: LIB3585-018-P1-K1-C12
ctttgtgatagttcactggtatacgaaggcggcaatacctgctgatcctacagaagagctacgcaggatgctccaagaagcgcgtcgatatgttgaatctgctcttaacaatcttgctgctgatgttcctaatgctgaaaatctttgccaacagactaaagcaaaagaagacattcatattcagttatataactccgttagtgccataagcaatcctaggatagaagaattcatcatgcatgatcaaaatgaaaagcgcatgaagctgcttgaccataaacattcctttattttttttaaacttacaccgcaacttagccttcatgacaat

SEQ ID NO: 46876 - DNA, 280 bp, Gossypium hirsutum
  Clone ID: LIB3585-018-P1-K1-C9
atatagacacatacacaccaccgtttcagctctggctgttactaaaacaaagatgcatcccgctcaacggctctttaactgagctcagaagcaccaaatacagcagctcaacatcgttgaggcaaagataggggtcagtatggatgaccaactgatgcacgagacctatgcaataccctgcggatggtctggcaatgctgcaacttcaacagatgatgatgatgcatccaactcatcattccattgattataatgaccataatttcaattgatagcaaca

SEQ ID NO: 46877 - DNA, 267 bp, Gossypium hirsutum
  Clone ID: LIB3585-018-P1-K1-E10
cttgcagagagccttatctgctaagatttagtcttttgttcgcggagatcaccgatgacatcggccccgtagctataaaattgcaggtcagcttgttctatggatcaacagccagtggacaaaaatgcttagactcagtatttcatctcacgaattccaatcctacatgcttgatcatgattctaaacaagttaccggtctggcatacatataatgccggagggaaatcgatattctaagttgtcaattatgtgcagggtcatattg

SEQ ID NO: 46878 - DNA, 147 bp, Gossypium hirsutum
  Clone ID: LIB3585-018-P1-K1-F1
ccacgcgtccaggcactctagtttacgaactgcaatgtccggtgtacaatatgggattatcaaccagctacagtgagacggtgttttaattgaaatcttatctgaaccgaattgcgaaagattgaaactctgatcgctttaatggtc

SEQ ID NO: 46879 - DNA, 303 bp, Gossypium hirsutum
  unsure (1)..(303): unsure at all n locations
  Clone ID: LIB3585-018-P1-K1-F10
cccacgcgtccgcccacgcgtccgcccacgcgtccgcactctcacaatatccccttatcaattaaaattccttatctctaatcatttccttatcaatgaagatttgcataatttgaggattctagaatttgtttttttattactcctatgttnttcggntcttgatcagactgaaatctgatagcttgggtcttgtttattttctcttgtagctgtaaaaatgctttttcttcgactatttcagtgatgaaattgttgatcactcatcattctttgtaaccctgatcatagaaagacctatat

SEQ ID NO: 46880 - DNA, 200 bp, Gossypium hirsutum
  unsure (1)..(200): unsure at all n locations
  Clone ID: LIB3585-018-P1-K1-F7
ctttctttttctttcattctgcaaagcttatttgctccttccatgctccatcattttatcagacgccaactttttgnttatattctgctctccattcatttactcaaaccacccacttctttgttcatatatcaacttactgcaatctctttgatctcattttgtactccttcattgtctcttctgtatagtttcgtact

SEQ ID NO: 46881 - DNA, 380 bp, Gossypium hirsutum
  Clone ID: LIB3585-018-P1-K1-G1
tgccattgtaatccaaatagttcctttaggatctattgatgagctggctaaacaagactttgaacaacctgccatggatatggagttaagttacttggagtataaaataaaggcaaaggagagctcacttataagtaaatataaggcggatcatttgatcattaaagaccctttatcagttcataaacaggggtgggatgcagtaaggtcaatatatttggataaacagaatgtgaagcttgatatcaagaggtttagaccaacattgttgaaagcacttcagttgcttcatcagtagaccatatttgtattctcgatgttatttcatgtgctaatagttctcttactgaataggccaaatgattatatgttattattgg

SEQ ID NO: 46882 - DNA, 567 bp, Gossypium hirsutum
  Clone ID: LIB3585-018-P1-K1-G9
gggaagagaagtttttatgcagcagcacctctgtcactctgtacgttttgtgtactagaggcttttaattttgcagctgatcaagtagctgaatttaaagttgaaggccaagaattggtatcagttacgggttttgatttgtggggatatgtgaaacctataacaaggcttggatggtgccaatgggctggtgctgctatatttgcttgggggtggttccatcaatattgttgtcatgcaattcttggttcacttagagaacgtggagatcgaactgctgattatgtgagtcctcatggagattggtttgaaattgtctcaagtccacactatttagctgagatgataatatatgctggtctattggtcgcgagtggaggaactgactttaccatatggctacttcttggatttgtggtggctaatcttgcatttgccgcagcagaaactcaccaatggtacctttcggaagttcgaggactatccacgtaatcggtgggccattcttccatttgtttattaagtccaaagagacaaaaaggttttgaaaattttttttttaaaccc

SEQ ID NO: 46883 - DNA, 269 bp, Gossypium hirsutum
  Clone ID: LIB3585-018-P1-K1-H7
aaaaccgggccgacccacgcgtacgctcttttcctggcatggtggtcctattattctcttgcagatcgagaacgaatatggagggatggagggtttatatggtcagaaggggaaagagtacttcaggtgggctgctaacatggctttgggtctaggtgctggggttctctgggtgatgtgcaagcaaactgattcttctggtgatataatagatacctgcaattattactactgtgacggtttttaaccaaatttccctaacaaaccaa

SEQ ID NO: 46884 - DNA, 321 bp, Gossypium hirsutum
  Clone ID: LIB3585-018-P1-K1-H9
ctcgcggacctgggcaagcaaccattttccttacaagtttgttttctggattaatccatatggctgctcaatgtcccttaagctgcatgtctgtgggttggcatgggatgggtgcacccctggctcaggggccataacccggctgatggcttagtcgcctccacgctgcttctttttgcagggaatgggatggtgctgatccacagtgctgtgcctcgcatgaatgccttggatcgctctgtgggatcaatgaaccatctacttgaatttgttcggatttggtggaattaaattgttttatggaatcccaacttatcttgt

SEQ ID NO: 46885 - DNA, 167 bp, Gossypium hirsutum
  Clone ID: LIB3585-050-P1-K1-A1
ccacatttcaataattctttttacttgccctcaatccatcctgaccgtactgtatgtggcccttgccctgacccccactcacacagttcccaacttcctgaggtattaatacaccgtcgtgtccaccctctacctcggctactcccgcttcatcaccatctcttaca

SEQ ID NO: 46886 - DNA, 417 bp, Gossypium hirsutum
  Clone ID: LIB3585-050-P1-K1-A12
attagaatgagatatatcatctatgcaactaccacttgctcatctgcttacaaatattcatctttctgactcgtgtggtttctacgagtgtaatggcagcaactaaagcaaggactatctgtccaaaaacaaccaatcgttgctttgtccaagatgatgccaaaagagctgacagggtagcttgctgccaatcataatcttatagtaaacaagctgattataacaacactggtctcacagatgctcgtcatcactctgaccatgatctcaatgctgtcaacaggaactctagctattccaatttaccatttgatatgacgagggggtttcaattgcaacctaggtgtggagcctataaagccaaaacaaatgaacattttatgccttggaggaagaagtggaatagttgaaagctga

SEQ ID NO: 46887 - DNA, 540 bp, Gossypium hirsutum
  Clone ID: LIB3585-050-P1-K1-A9
agctgctcttgcacagatgaatcttttgcaacaacagcgtatattgcagatgcaatatcaccaccaattgtgggaaagcacttcctcaacaaaggcctcaactacagccacagtttctgcagcagaatttgcctataagatctgctgttagaccagcttatgaacctggcacttgtgctcggcgtttgactcaatacatatatcagcaacagtgtaggcctaatgataacaatattgaattctggcgaaaatttgttgccgaatattttgctcctaattcaaagaaaaagtggtgtgtttcgttatatggaaatagtcggcagactaatggtgttttcctcaggatatatggcactttgaaatatgcaatcgcaaaccaggtcgtggttttgagacaactgttgaggttctgcccagattatttaaaatcaaatatgacagtggcacttttgaggagcttttttatgttgatattcgccgtgaatatcttaatggaaatggtcaaattgtccttgattattcaaaagccattcaggagag

SEQ ID NO: 46888 - DNA, 451 bp, Gossypium hirsutum
  Clone ID: LIB3585-050-P1-K1-B10
cccacgcgtccgaccaacgtgcgaccacgcttacaatcacgcgtcctcccacgcgtacgtacacaccttcggtgagggtcactactctgttcactcaaaaactctctattcccttctctccaccattcctttctttccttccccaaatattatttaccttcaatatcttcctccattaaatcaaggcctctaacttctaccattatcaaaggaattagaaataacatatgaagtttcacgaatccaaataagcactaaatgtggatacaaataataaaactatatttgtagctacagcaacggttaatactaacaaaaaggtctttgaacagctactttttaaaggattttcagtcaaagctctcctattttatttgaggaaaactaaaactttcctttctaacaacaacccatttctttaaattatcaagcaaattttactgaagaatca

SEQ ID NO: 46889 - DNA, 190 bp, Gossypium hirsutum
  Clone ID: LIB3585-050-P1-K1-B5
gagctatataaggcctggatgtgtggttctgtcggtttatgtgtcaatgccggctgctgcctgggagcaacttgagaggagacctgcttcggtatgtcaattgtttgttgcaagactctgattcaaatttttggagaaaggctaggtttttagttcatacagggaaccgtcagttaacgtcacataaaga

SEQ ID NO: 46890 - DNA, 534 bp, Gossypium hirsutum
  unsure (1)..(534): unsure at all n locations
  Clone ID: LIB3585-050-P1-K1-B8
atctcaccccccatttttttcacccagctgatttggattttggaatctcctacagaacaaaggatgagcagcgagagccaaggggtaagcttaacttcctcagcanaaccccctatgaagcggaaacgtggggactacacacctgcaacacctgaacctgacaatctgaagagaaacaagcagagtgcatggataagtgaccctgcctcttctgacatgttaggtcagatggtttctggtgtcattgaaggttcatttgatgctgggtatgttcttcaggttaaggtaggtgataccaacacgcatcttagaagtcttgtttttctaccggggctatttgctcccattaccaatgctaaccatgtggctcctcatgctaagatgcacaaaagaaaagatattcctatcccgtttgtaaacctccatggtcatcttcatgttttgagtccatcatggaaaaatgagaagccggttgagcaaaataatgacacatttaaccgtcctgaccgaagtttacaccatgggcttgagcct

SEQ ID NO: 46891 - DNA, 391 bp, Gossypium hirsutum
  Clone ID: LIB3585-050-P1-K1-C1
ccgacgcgtgcgtgctcactctctcagtgcttcactccatatcctcttttccctcttataagaaaaaatgacgtggagggcctgcatattcaacgtggccaatgcacataccaaattggagccaagctcttggaagctgttagtgctgagcatgtcatatatgtaactgctccttaccaatgagactctgattttcaactagtgcgtatcaatgtctactacaatgaagccaggtgaggtagatatgcacctgcagctgttattattgatcttggacctggtaccatggacagcatcagatctggccctgacgaacagattgttagaccagataacttcggttttggtggatctggagcatggaacaactgggctaaaggccattacacag

SEQ ID NO: 46892 - DNA, 317 bp, Gossypium hirsutum
  Clone ID: LIB3585-050-P1-K1-C3
gccatacatccggacacgcgtccttaaacttggacgcttctccccacaacaagcacctactcttattcaactccatgggatgatatgcatcatattggcacatataacctatcatctaccaacaaaaacacttaacgaagtaacaaactcaccatatcaaaccataaaaaccaactctatatacaataaagttactacattagtcactaatcacagatgatacaaattctaaaatctaacaaataaacagaagatttcggctatctatacattaacaatctatgcatacattatgatcaacacagaccaggtctata

SEQ ID NO: 46893 - DNA, 505 bp, Gossypium hirsutum
  Clone ID: LIB3585-050-P1-K1-C6
gttctagatcgcgaacgactccatgctattgagacctttggtttttcatgtaacttttctgcgcagttggagagagggacattatcttcagacatgtcagcttttaaagctgcaaatcctggtgctgttttcgaagattttatccggtggtattcacctagagattgggagaatgacgaaagtgaggcaaaaggtccatccacagatcttacagagggtatgaatgttgactggcctcctcaaggaaggctttcacggcggatgtctgaaagtgggaacttttggcgaaagatttgggatgaggctcctattttgccagcttctgagcagaaaccactactggatccaaaccgagaagggaagaagatccttcattacctggaaactatgcaaccccatcagttgcttgagcaaatggtctgtactgtatttagggcgtcagctgacactctaaaccaaacaaattatggaagcttgaaggagattgacacgaaaatggaccaac

SEQ ID NO: 46894 - DNA, 535 bp, Gossypium hirsutum
  Clone ID: LIB3585-050-P1-K1-D4
gagctttgcaacaggcaatacaaattggctatggaatttgaggtccatctgagttcatatgatcacaaccacagagagcgctttaaagaaatgagagaaatgcatggtagttccagtcgtgatgatcgacaaaagcgagagcagcaacgccaggaaagagagatggctaagtttgctcaaatggctggtgctcgtaaacagcagcagcaggagtcccgggaggaatctgggcctgcaactactcctgctcctgctcctgcttctgccattgctactgcacttgctgatcaggagcagcggaagacattgaagtttggtttttcttctaaaagcagcagctctaagaatgcatctggtagtgcagtgaagaaaccaaaagtagctgttgcatcagtttttgggaatgacagtgatgatgaatagatatagttagctatttatcttcttaggcatgtttgtgttatgtaatgggttgcataatccctaagattggtgtgacaatgatggcccttatttaacattttgtgtatttcat

SEQ ID NO: 46895 - DNA, 539 bp, Gossypium hirsutum
  Clone ID: LIB3585-050-P1-K1-E1
gtgatgatgcattagatgactcaacaaggacatgcttggaacttctttgtggtcccgatggtgaacttccagaaagagctgaggaatttggaacctcgccttatagagcacgtcagcaatgagatcatggatcgagacccaaacgtccgatgggaagatattgccggcttggagcatgccaaaaaatgtgtgacagagatggtaatatggcctttattacgtcccgacatatttagaggctgtcgctctcctggaagaggtcttcttctcttcggtcccccgggaacaggcaaaacaatgattggaaaagctatagctggtgaggcaaaagccacatttttctacatatctgctagttcattgacaagcaagtggattggagagggtgaaaagctagtgagggcgctttttggagtggctagttgtcgtcagccggctgttatttttgttgatgaaatagattcacttctatctcagcgtaagtcagaaagtgagcatgaatcaagtagaaggctcaagacacagttcctcattgaaat

SEQ ID NO: 46896 - DNA, 519 bp, Gossypium hirsutum
  Clone ID: LIB3585-050-P1-K1-E2
cggacgcgtggggaagagattgctactgttgacgagtcagcagccacaaagtttcccactgctgttaagaccccaagagtgacgcctgcagtatctgtcactccaaggaagcgtacaataccttctaaaaaatcccagactggtcaaaaacatgatttggttccaatatcaaaaacaccagtaaggaaatcttcctactcatcgcgccgagaatctcttccattgctaacaaggactgcagccttggtgaccccctatagagccaatgtcgatgtcggtttgcttcgcagcattaactcccctgatgtttctgttaataccccacgaattgacaaaataacagagttccctttagctccttctgatggtccccttttttgcgttcgtggaacctcatcaacatccgcgaagtgctcttcttcttcaatcaacagtgccaaccattctataacaaaagacaactgcacagttcagactctggacaaaggtattacaacatccaattgcagtgaccaaagt

SEQ ID NO: 46897 - DNA, 539 bp, Gossypium hirsutum
  Clone ID: LIB3585-050-P1-K1-E3
cccacgcgtccgcccacgcgtccgcggacgcgtggggggatgtcaaatgttaatgtcaaatcacttcttgtcagtagagaagatgttttagccatggtcttcgcattgcttgaatacttttttgaactccttttattccctggactgaaagaacatttttgggttagtaatctagggcttgcaatgcttgttgtaggagaaattgtaaggaaattggctattgtaactgctggtcggtcttttacacatttaattagggtttatcatgaggaccatcataagttggttaccagtggagtttatgcctttgttcgtcatccgagttattgtggtttcctgatttggtcagttggtactcagataatgctttgtaatcctatagccactgttggttttgctgttgttgtttggcggttttttgcggcgaggattccttatgaggaatattttttgaggcagttttttggggcggattatgaggagtatgctcgaaaagttccttctggggttccatttgtgatgtgataattcttggatta

SEQ ID NO: 46898 - DNA, 268 bp, Gossypium hirsutum
  Clone ID: LIB3585-050-P1-K1-F12
cccacgcttgcaaaatcctctaagctagatactatgattgatataatattacctaaactccctctctccgtgcacggggacaaaacaatcgatagattcctgtaatctcatatcaccattccctgactgttgtttttgatatattaggtaacattatctgaatactcttatttctgataccactaccaatattctgttttatttacaaaaagaaatcaactttaagtttccagtcactgccatattatgttacatttttcacttacat

SEQ ID NO: 46899 - DNA, 435 bp, Gossypium hirsutum
  unsure (1)..(435): unsure at all n locations
  Clone ID: LIB3585-050-P1-K1-F7
ctctatattgcatccgaacgcacataaaggcccagtcttgcctatccttgcatgcaacgtctaagattaatgggaggaggacctgcataaacttctgctgtcaaagaagtacaaacatttgaatttaaaaccgtcttcgtaacaagaattacttccatttgatcctaaaccaccattcctgccatcgatttaaaatcccttcggctaaaactatcatcaaagtgaatagttatcccagaactatgatctatgtgaatcgccctgttactcgtacacaaggacccatattccacagcataccaatagacctttcgagagacttgttttggaacatncaatacctaaagacatgtgataaattttctttctcagatctacatccagaacaaacagcaaagttctctactcgtttatatctcaaattaactagagtag

SEQ ID NO: 46900 - DNA, 271 bp, Gossypium hirsutum
  Clone ID: LIB3585-050-P1-K1-G11
attattcctaactttactgtattaagcatcatatttatcctgatttctaaactccatgatataaaactgcggctgggggatacgatgctttaaacacccctttcaaccaatcttgagccagaaaacacatacatcgcaccattttatgaaatactgtacctactgttattctattaattattactgtttccttctgccaaatttaccaccctaagcaacttatcagtttcatataatattcttccaacaatttacctcatgctcattatac

SEQ ID NO: 46901 - DNA, 315 bp, Gossypium hirsutum
  unsure (1)..(315): unsure at all n locations
  Clone ID: LIB3585-050-P1-K1-G4
cggaagccgtcagaaaaaaagatggactggactccttagtgtggaagaaggatngaattggagcatggggcgaggcggtattttgtttgggcgtgctctcttgagagaagtcgagtattggtgctcgatgaagctactgcatcaattgataacgcaacggacttgattttacacaaaaccattcgcaccgaattcgcagattgtactgtcattacagttgcacacaggataccgacagttatggattgcacaatggtattggcgatcagcgatggcaaactcgtggaatatgacgagccaacaaaattgatacat

SEQ ID NO: 46902 - DNA, 494 bp, Gossypium hirsutum
  Clone ID: LIB3585-052-P1-K1-A5
gcaatgaaccctatagttgctgcaggcataagtcctaattttagagatgcaaaaggtagagcggcgcttcactgggcatcatattttggaagagaagagactgtcattgcacttattaagctaggtgcttctcctggtgctgttgatgatcctacaccaaatttccctggtggaagaacggctgctgacttagcatcaagtagagggcacaaaggaatagcaggatacctggctgaagctaatttgaccacccatctttcttcattgaccgttaaccaaaatgtggtaggcaatgatgctgcaactaaaccagcacaagaggccattgagactccttctgaagttgctccgtctaataggacattagatgacaattgctcattgaaagggtcccttgctgctgttagaaaatcagctcatgcagctgctctgatccaagctgcttttcgcgctcgctcagcccatttcagacaattaactaaaggcaatgatga

SEQ ID NO: 46903 - DNA, 507 bp, Gossypium hirsutum
  Clone ID: LIB3585-052-P1-K1-B11
gtttttgtgatctccttcatgttacttatggggtttgatttttggcctttttttttgtagagatttgttcattcattttgcctgctgcttcatttgatttcaccttggaattccagaggaaaaagaagctcagcggacagcaaaagaaagaggtgcttgaaagagagatctccatgcttcagaaaatgctaaatcaagaagaaaagatgcatgagattctaacacgagtacatcatcaagaggctggctcttccatctccatccccaatttcctccctccaaagacgaaggagctgttagcagagctggctatggttgagggtgagatagctcgtttagaaagccaaataagccaacttcgacttgatctaaaacaggaaaaggaagctaccaaggcaaaacaatggcaacctgggagtctaatgtcttaccttcaaggccatccatccactacatctaacccaaaccccattaagcaaggtggtcaagaaaaggtggttttttgag

SEQ ID NO: 46904 - DNA, 450 bp, Gossypium hirsutum
  Clone ID: LIB3585-016-P1-K1-F12
cttatatgtgggacttcaacgggtggcattttcgcatctgcacttggtattaagttgatgagctcggaccaattggaagaaatatacagaaatcttgggaaagttgttttctctgaacctgtgcaaaagaaaaatgaagccgcaacttggaaacacaagttggaccagctttataaaagttcatcacagagtttcagagttgttgcaaaaggatctaaacacaatgcagaaaagttagagaagttgctacaggacatgtgtgctgatgaggatggtgatgacatattaattgagactgctgtgaaaaacattccgaaagtttttctcgtgtcaactttagcgagtgttacacctgcgcaaccttttatattccgcaattatcagtaccctgttggaaagcccgaggtgcctattgcgacgtttaaaaattcaagaaccactatgctagga

SEQ ID NO: 46905 - DNA, 510 bp, Gossypium hirsutum
  Clone ID: LIB3585-016-P1-K1-F2
cccacgcgtccgaaagttgcaatcaagcgtggcaatccgctatctgagcaaggtgtgcatgagttccagactgagattgaaatgctttcaaaacttcgacaccgccaccttgtttcgttgattggttactgtgaagagaattgtgaaatgatcctagtttatgattatatggctcatggaacattgcgtgaacatctatacaaaacaaaaaagccacctcttccttggaagcaaaggctggaaatatgcattggggctgctcgcggtttgcactatctccacactggtgccaagcacactatcattcaccgggatgtgaagacaacaaacattcttctggatgagaagtgggtggcaaaagtttctgattttggattatcaaaaactggccccacattggatcatactcatgtgagcactgtcgtgaaggggtagcttggctatttggatcccgagtatttcagacggcagcagctaactgataagtctgatgtttactctttcggggtt

SEQ ID NO: 46906 - DNA, 475 bp, Gossypium hirsutum
  Clone ID: LIB3585-016-P1-K1-F4
tcacgcgttcatatctttcttttgagaagaacctgtcgatcgagtcacagaaaggccttacgatagcaatactatctagtttctaactgacccctgcttaccactaacactgccaagcatggtgatcaacgatggatgatattgctcgaatcattcctgggattaacaaatggacaccttacggtctgcgtgatgactgcaacacctaaatgttacaaggggccagaacaaaatgccttgggtaatatactagtgctatgtctattacttgggatatgagcaggggtagcttcggattggatgtggctcataggtaaaaagaatgcctcttaaaagattcaaggcttaggttgttatatgatgtagaaatgtgagttttcacaaatgctgaaatatgagagtttatctcataatatgtgagaatgtagaacaatgccatgccgctataaccaaccttcgagatgcttaatatttt

SEQ ID NO: 46907 - DNA, 516 bp, Gossypium hirsutum
  Clone ID: LIB3585-016-P1-K1-F5
cccacgcgtccgatcctctggtatttggagattatcctcctgaaatgcgccagtaccacaggagtgaactgccaagattttccagtgaagaaactgagtatatgagaggcagtattgattttattggccttaatcattattcaacattatatgccaaggattgcatccattctcgttgcgtcttaggtggagaccatttcatcagaggctttacattcacaactggagaaagagatggcattctaatcggtgaaccaaccggtgttgaaagattttatgttgttccgaggggcatggagaagattgttgatcatgtttcaaaaagatacaataacatgcccatatatgtaacagagaatggatattgtcccccactgactgaagccgctccaaatttgctgcatgatgtcaaccgaatcaatttctacaatggttatcttgctgctttgtcccgagcaattaggaagggtgctgatgtacggggatactttgcatggagcttgatggataactttg

SEQ ID NO: 46908 - DNA, 139 bp, Gossypium hirsutum
  unsure (1)..(139): unsure at all n locations
  Clone ID: LIB3585-016-P1-K1-G2
cgcgtncgggtgggggagccttcggaggcggtggtagctcttattctaagaaggcagaagcgaggtgaggagtgggtttcttgctcttaaaggtgctctcgcaacaatcgtacaatggggacgaccaaaaaagcttctc

SEQ ID NO: 46909 - DNA, 414 bp, Gossypium hirsutum
  Clone ID: LIB3585-016-P1-K1-G4
tttaatttcacaggaaaaaacattctgggaaggggggttttctcaacccgaatgagatcccctttaagtcgtggaacacactcttaaaacctctgaagtcaactacgcttaggaccctcttgatgctgaggtatgaccaaggtgcttatttgtttttaccatcatatgtcatgcggacacatggagcaaaacaacaaggtgaaactgttaaaagaactccaaggaagcaattagagtctgttttttaggtttgaaatccttgagagttaatattatatctctatgttctgcacttccaagtgttggcttattttatttaatttaaaatgttattacatattttattcattttttatgaatatttatgaaatattatatgattattttaatataagattgctgttttaattatat

SEQ ID NO: 46910 - DNA, 462 bp, Gossypium hirsutum
  Clone ID: LIB3585-016-P1-K1-H1
cccacgcgtccgcccacgcgtccggaacatgtgaagtaacaatgtctagggcttccgtgtgacaactaatgtactggttcctaagctggctaaaattgttctgattttatatacatgttcacaggaaagtatagtgagtatggcagttgccggagccataataggagctgcgatcggagggtggatgaatgatcggttcggaaggagaactgcaatccttattgctgatttcctgttttttattggagctgtggtaatggcttctgcccctaacccttctctgcttatcgtaggccgagtttttgtgggacttggcgttggaatggcatcaatgacatctcctctttatatttccgaagcatcccctgcgaaaatccgtggtgcccttgttagtaccaatggatttcttatcaccggtggccagttcctctcttacctcatcaacttggcttttactaatgc

SEQ ID NO: 46911 - DNA, 527 bp, Gossypium hirsutum
  Clone ID: LIB3585-016-P1-K1-H3
tagaaacatgcttcaaatgagcaacgttggatcttaccctcctgtgtttcgccagctgaacggtgagggtgttcatcctccgcagcagatgatggctcaattgaagaagaacaactactccatggaagacaccagtaccaccacccaagaagattcagttccaatccctatggtggatcttgagtgccttagcctgcataagcttggggatgcttgtaaaaattggggtctttttcgtttggttaaccatgggatcccttcaacccttttgaccaaacttcagtaccatgccaagatgttgtttggtttatcctttgagtccaagcaagccttaatcactaaccctatgtcttatttctggggcacccctgccttaaccccatctgggactgccctaaaccctgctgcctcgacttcaactatgaactggctcgaagggtttaatgttccactcactcaactcccacacttccattctgaacatcctatgcttcattgtttaagcttttgtttgaagaatatggaag

SEQ ID NO: 46912 - DNA, 382 bp, Gossypium hirsutum
  Clone ID: LIB3585-016-P1-K1-H4
gccacagcgtactgagaaaagaaatggccagaagattgtgcaacgtaacgtcccgtataatgggcggaactggcttcgtatcgtgctccgtcgcatttcgttttggactgcgtttcggtgtgggtctacatgtcggcaaacatatgcctcccgacaagcacgttcctgtaaatgacgagataattactgacaatggaactgcatttacagaacctagcattgatccaatcgctgatactgacgcataatactaggcattagcttgcatgtgcggaggctcgaactttttttcatcggtgggtttgatggataaggggaatgataaggcattcaagattacattctcaccataagactatccatatgacaacctgtgagtgga

SEQ ID NO: 46913 - DNA, 373 bp, Gossypium hirsutum
  Clone ID: LIB3585-016-P1-K1-H6
ggattctctaagctgccccttagcttccgcactcaaaggaaaaaaaactgaaacattacagctcgtccttgttgactcggttcctggactatttttagccgtctaggatgcgactcgagtgccaggatctgatgtactgctaggatctgctaaggctgttgagggggattatatactggatcatgatcacggcactgatgcttgggggctgactggggactcgtttgttgactttgacgctgagcttgccgaaggcactgcacaaagtcattaataaacccatgatcctgcataacactgaggcgtctaaggctgttggtgtaactgaagcaagtgttgtctattaagtaccaacctgacgagatgttcaact

SEQ ID NO: 46914 - DNA, 556 bp, Gossypium hirsutum
  Clone ID: LIB3585-017-P1-K1-B1
ttccaatctttcaatgtcctttgtttaatttttctttcatcccaacaatccttcttctcacatctacatttcttcaaacacttgtcgtgcgtacacgaatatgtcaaaatctacataaaacgaattatcaagtcccctatttttttccataaatatggtggcatttaatgcatcgtgtttctttaatggttcctgcctcaacctgtgatcatcattcaccattgctcaatttttttttttggtgtgacattgtctcccctgcaaacaggctttggatggtgcttctttcatggagaagaaagataaagaaacaatgtcaaaaatggatgactacgaagtgattgaacagattgggagaggtgcttttggtgctgcatttcttgttcttcataaagctgagaaaaaagagtatgtattgaagaagattcgtttggctaaacaaactgagaagttcaagcgtacagcacttcaagagatgaatttgatggcaaagcttaacaatccatatattgtagagcacaaagatggatgggtggaaaaaggatcttatgtttgc

SEQ ID NO: 46915 - DNA, 536 bp, Gossypium hirsutum
  Clone ID: LIB3585-017-P1-K1-B12
cccacgcgtccgattatacccaaaatcctcaaataattatcaatattgaatcaatcaaatcattggtgttatttagtcattaacttgggatttaagttctagttcggatatatcaaaatcgatgaattcaattttaaatatatttgtacctaatcatgtatgacaacttatatctaaaatgttttttaaaggaaaaagatagtatcattgaaatttattaggactatttttttaagattcctatgcgataggtacatatgtgttaaaatttgatcctcctatgttttaaatatactcaatgtttgagattatatttgagttgatatttaacacctaagctagtgattagactgacaaaaaaacttgatgcaatattaatatttcaatgacaatagtatattttaaagttttagcccctaataactctagtatagcaaacaaaataggggttcttcctaggggttcattataaggatgttttatttaaaagggttataaattgattccaagttttaaaaaattacttgagtcttgaa

SEQ ID NO: 46916 - DNA, 550 bp, Gossypium hirsutum
  Clone ID: LIB3585-017-P1-K1-B3
atttcactaaaagaatcatcttcaccaccgctactcaaaaaaataatccaccccgcagtttcaaaacaatgtcttcttctcaaaacagcaaagtaacagcaccgtacggttcatggaaatcacccatcacagccgacgtcgtttcgggttcatctaaacggctcggtggcaccgccgttgaccctcagggtcacctcttttggcttgagtcacgaccttctgaatctggacgggtggttcttgttaaggaagctggagatgaaccgattgatattacaccaccggagtttgctgtacggacgttggctcaagagtatggaggaggagcgtttaggatttctggggatacggtgattttctcaaattataaagatcagagattgtataagcaatcaaccagttccaaaggttcttgtccagttccaatcactccagattatggaggaccagttataagttatgccgatggggtttttgattcaaggtttaatcgttatatcaccgtaatggaagatcgccgtgtaagtagtacaaattcaaccacaacaat

SEQ ID NO: 46917 - DNA, 557 bp, Gossypium hirsutum
  Clone ID: LIB3585-017-P1-K1-C6
agttaccctcagagcaacatagggaaacccttgcttccgagattgtgagaagcttgggacacttgtcagagcctgaattgtccagtatacgggcacgactgttgagagaattcttgcctgacgatgtgtgtccactaggttcacagtttcctacggatgctccgcataaagtatatcaagccagtgctgaagagaatgaatttattattgagggagctccaattttgtcattagatgatgatgatgatgcttttgtagaaccattcgaaggtcaaatcatggataattcagagttttccggagaaatttcaaatctcatggatgtcaatcaactactagaatcagtcttggagacagcgtatcagtttggaagaagttccgtctgcactggacccaacatgtcttacaaggaaattgcccatcattgcgaggcactcgtaacagggaagcagcagaaaatgtctcatttgttgagtgcccaactaagacaagataacatgacaaaccaggcaggtccaatcgttgagcaaactggcaataccaatctattcaaacta

SEQ ID NO: 46918 - DNA, 549 bp, Gossypium hirsutum
  Clone ID: LIB3585-017-P1-K1-D10
cccacgcgtccgtgttcctgttggcatacccggaatccttatcacagatgtctcaaagacaatggatcttattgactactataatgtttctacaccgagagactggactggacgagtgaagagcttcaaagctattggtagcatcggcgatggtttgatgccaattctccataaatctgcaccagaggttgcactattttctgctcgagggcctaacataagagatttcagctttcaagatgcagatcttctcaagcctgacattttggcacctggttctctaatttgggctgcttggtctccaaatggaacagatgagcctaatttcgttggagaaggatttgctttgatatctggaaccagtatggctgcaccacatatagcagggatagctgctcttttgaagcagaaacaccctcaatggagccccgctgctataaaatcagccttgatgactacatcaacaaagctcgaccgagcaggaaggcctcttcaagcacaacagtattctgaaacagaggccatgaaacttgtccctgccactccttt

SEQ ID NO: 46919 - DNA, 535 bp, Gossypium hirsutum
  Clone ID: LIB3585-017-P1-K1-D12
gggaattgttgaagaaaagactagttcaggcttgcccttcttgctcttctgcttctggaatttcttattaccgttctgagttgcagtctcctaagcctcctgatgtctttctcatcaagctttgttgtgttgatagaaaaggccttctgcatgatgtgacacaagttctctctagtcttgaactcaatatacagaaagtgaaggtatcaacaactcctgatggaacagtggtggaccttttctttatcacagacaccagggaactattacatacaaaaaataggcaagaggagacttataaagcattggaagatgttatgcaggatgctatgattagctttaacatcgaaaaggttggaccagaaattacggcatgttgtcaagcatctccatatcttccgtctgcaataactgatgatattttcaacttagagatgtccaatgacctcccaagtgtatcacttactttcaacaatgtttgtgtcacgatggacaactcactcagtcctgctcacacgcttgttcagattgtttg

SEQ ID NO: 46920 - DNA, 555 bp, Gossypium hirsutum
  unsure (1)..(555): unsure at all n locations
  Clone ID: LIB3585-017-P1-K1-E4
cccacgcgtccgcccacgcgtccgtaaatcttgaatccaaatggaagtgcctggatttgatgttgatggtgatcctcaaccccatggtcatggaagcctgattcaaagcttgtttgctttctgtccttcacagaaagcattaacaacctctgcaactcacataaacatggagtcctgggatggaaactcgtcatcttctcaacatcccgattcaggtattttctcccacagattatcacccaacactcaaatccatcttttctcacccaaccccagcaatgaagatgagggcagaatgtgtcaagcaagcattgtggtggatgaaaagaggctgaggagaatgatatccaacagggaatctgcaaggagatccaggatgagaaagaagcagcaaatcgaagagctgcaatcacaggttaatcaacttcaaacaattaatcgtcagctttcgcaaaagttgatcaatctgttggaaaacaatcatgagatcctccaagaaaatgctcagctcaaagagaaagtttctactcttcatatggngctttctgatgtgtt

SEQ ID NO: 46921 - DNA, 544 bp, Gossypium hirsutum
  Clone ID: LIB3585-017-P1-K1-G8
gaaattggaggctgcttggaagaatgaggatgttaagaatccaagtcgaaagacggtcaaggatgttgtggagaagtttgggtctgatgatgatgtgattgcaattggggatgtttattttgccgatgtggaaagagattgggtgttgcaaccaggcggtccgattgctcataagtgtaagacgttgatagagccaagtaaacttatcttgttgactgctgaacggttcattcagacgttcttgggtagtaattttatcgctcttcatttccggcgacacggcttcttgaagttctggtatgtttttctattttgttgtgatctattgcttaggaagccaagaaccttcatagttttacgctacagaataaaaagcaaaacattgaaatgatggcattgggcgtattttgctttgatttcgaagtgttggaaatttgctagagcatgagggagagtttgttcataattattgagaaactcaatttgagtcaaaaatgttttgggatgatgattgatgtcggtttgtgtgaatgccactaacatt

SEQ ID NO: 46922 - DNA, 545 bp, Gossypium hirsutum
  unsure (1)..(545): unsure at all n locations
  Clone ID: LIB3585-017-P1-K1-G9
cccacgcgtccgcccacgcgtccgaaaaaagttaaaaaggtaagtagtgtaggatggaggtaacaaagttgcgtcgtattggtttgcaggagtaaaaggagtgagtgatgagatttgagaaagggtagaattgtcagtttatgtttttttgttttcacaacaccactcatacaacggattggaaatgatgggactgttggtatgtttgatttgatatcttcatttacttttcttttttattttttatcaattaattcaaagcaaacaaggcaaatcagaaggcacaaaagactagaagcgttagtagtgcggtggttgtttttgacttcattttttttagttatgtgattggaagtttaacatttatttatgaaaatagaatgtacgtttatttcctaaaaaatactatgacaaaaaaattagttactgttgttggttaaaaataataataatataagcctacactaaacctgtgtaaggacttggtagtttgcccggcctaatangccttgctcaatttggatcgggcttcaataaagactttt

SEQ ID NO: 46923 - DNA, 556 bp, Gossypium hirsutum
  Clone ID: LIB3585-017-P1-K1-H1
cacaaagggtttttggaagcaaagcagagcgaagaaaacccttcactgttattcactctgttttcgccaatgaagttcctctttcgattcatttccggtcccaacaggactctgcttcgttcactgggtcgccgccagttttcggatttaactggaacaaaagccaaacgaaactatgctgacaatgtctctgagtacaacactgtcctcgcttctctcaatgccaaacgaagacattttttgttgagggatgtttttgatgatatgatgctggatggggtgcagccaactagagatacttttgaagctttgattatgggaaccatgagagggtcacgcctgcaagatgctctctttttcagagatgaaatgaaggccatgggattagtccctgaggtctctttgtacaactttttgatctcaacctgtgggaaatgcaagaatgctaacctcgcaattcagattctggaagaaatgaagagatacaatgtgaagccaaatggacaaacttatgtttgtcttattaatgcatgtgcagcagctggacgactagatc

SEQ ID NO: 46924 - DNA, 493 bp, Gossypium hirsutum
  Clone ID: LIB3585-017-P1-K1-H10
ctttcctccgccatcacactctcctcgcccactccataactaactacgccgacctcgctagccacctcggcgtttccttctacgccgacccacacgaccttttcgagcaacaccctgacgtcgtccttctctctacttccatcctttccactgaaactcttcttcagaaactgccctttcaacgactgcgtcgcaacacccttttcgtcgacgtgctttctgttaaagagttcctcaggaaccttttcttgaagtatttacccccagatttcgatatcttgtgtacccatcccatgtttggacccgaaagtggtaaaacctcgtgggcggggcttccttgtgtctacgacaaagtgaggatcggggatgaggagagtcggataaagagatgcgacaagtttttggatattttcgagaaagaagggtgtagaatggtggagatgagttgcatggagcatgataagtacgcggcggggtctcagttcgtgaccca

SEQ ID NO: 46925 - DNA, 195 bp, Gossypium hirsutum
  Clone ID: LIB3585-018-P1-K1-A1
ctcagttctgagcgatctgcaaaaaagagactcttatggtgctacaggcagcccaacagtgctgagcgacgccacatgaaagtgcatagagatgctgcaaatatttcttaatccaccatgaccaattcttcttactgaaagccatcactctaaccactactatggaatgctgaaatcgtgagaaactgacggaca

SEQ ID NO: 46926 - DNA, 455 bp, Gossypium hirsutum
  Clone ID: LIB3585-018-P1-K1-A10
aagtcatcgaggacactcatattattaatgggaaacaagtggagattaagagaacaataccaaggggtgctgctggaagtaaggatttcaagactaggaagatttttgtaggtggaattccttcaactgtatccgaagatgagttcaaggacttctttacacaatatggagtagtccgagaacaccaaatcatgcgggatcatgctaccaatcgttctcgtggttttgggttcatcacttttgaaactgagcaagcagttgatgatcttttggagaagggaaacaagattgattttgccggtgcacaggtggagataaaaagggcggagccgaagaaaccaaattctcccccgcctccatccaaacgatataatgattctaggactgcatatggtggcggattctgagatggttatggtagatatggatgtggtggatttggtggtggttataat

SEQ ID NO: 46927 - DNA, 191 bp, Gossypium hirsutum
  Clone ID: LIB3585-018-P1-K1-B3
cccacgcgttcgattttggctatgtttgttcgaaaaccacagaagaagctactcattaatgagaagctgcgtcgtctaggaagtcgaaagatcgtcaccaatcgaaaacggcgcttctcctcaccgctcaatcttccgttttcctccgctccaaatctcctaaagctaactctctctttttctcactttcc

SEQ ID NO: 46928 - DNA, 589 bp, Gossypium hirsutum
  Clone ID: LIB3585-018-P1-K1-B4
cttttccttttctcgtgatctttcctcttttactcttcttgtaaatttcttcttcttctcttttggcgcattgaccattgattttgctttgtaacctagacaaaaacttcaacaagactgaaagaactagttgctaagaaacagcagatagaaaaccagataagattgatcgatcgtgttaagggaattggactgttttaaaagattgatgggtcgttgtgggaggcataatggtgcagtgaggcaatatataagatcaaaggtgcctcgtttaagatggactcctcaacttcatcactgttttcttcatgccattgacagacttggtggccaacacaaagctacgccaaagcttgttcttcagttgatggatgtgaaaggactcaccatttcacatgtcaagagccatcttcagatgtatcgaagcatgagaagtgattatggcagacaggttacgagctcaacccatgaaagaagacaatcttttgatgataaccatggctttgatggatgtgttgtacccattgaagaattatgttctcatttgatctacattaattgatttccttctaaaaggcatggaattttt

SEQ ID NO: 46929 - DNA, 381 bp, Gossypium hirsutum
  Clone ID: LIB3585-018-P1-K1-B6
gaccaacgcgtccggtctttaagaatcgaacaccattttggtttggcttttttaacacagctgaagaagcagtctaggctggcgctatggctgatcattagctgatacgagagttctctaggctgaattgtacgcaccttaatcacccacgcgctcatgttttaggagagttcgttgactccaaacccctccatgccttggttgatgctaagcttcatgctatctgtcaatagactacaggcacaaggaactctagtgaatactaacaccctccgcatggccgctgagtgtgattaccccagaaaaaccgaggagtttgatcatcaacaagacaactcatcatcatcatcatcattatcacgctgatgaatcatcattagc

SEQ ID NO: 46930 - DNA, 223 bp, Gossypium hirsutum
  Clone ID: LIB3585-018-P1-K1-C1
cccacgcgtccgcagtattcagcctatcggttgacaagctctcttatctctgagtataaagctgttgggtggatgtatcaggaacggtctttgtataacgttgggaaggataagattgccgatttggaaactgcaactgagttggatcccaccctgccattcccatataaatatagagcagttctaaaggcctaggagaagcaaaccatggttgctatttctg

SEQ ID NO: 46931 - DNA, 483 bp, Gossypium hirsutum
  Clone ID: LIB3585-014-P1-K1-E6
gccacgcgtccggactcactctggtatggagcctgcaccctaaaatactcattgagagctcggcacagtcaaggtcaatccaatgacgcccggagctaaagcttgcacttctgcctggagcactacttgttgcacccctgactcagacactccttctcacacccatgacatagaaactactcattccactcgggatgtgggggctccttctgacacaccggcgtacgcactgcgtgtttgcacctgcatgtgtcactgattgttagacagctgctttcagggctgcgtctttaacacctgcgcatgatgctccacatatgacacaggcgtgtaggaactgctaactcaacaccatgtaaaggatctacatcaacgactatttatgatactggcttatgcgggtgctgtcttttgtagaccgcatgctattattaaacgcaacagccactgacttcattgtttctgcatccacagccatccatc

SEQ ID NO: 46932 - DNA, 513 bp, Gossypium hirsutum
  Clone ID: LIB3585-014-P1-K1-E8
gtgctgatgtccttgcaggctacgactatgtcccagctgctgctttggtgagtcatccagctctttattccaaggagcttatgaagcagcatccggttggaccagctatagtgcatccagctgaagctgcaaagggaccaagttggaatgatcttcttgaaccaggagtcaagcatgctttggtagtaggtgtgggaattgaaatgctccagcagttctctggtatgagcagcattttgtactacattcccgaaattcttgaactggcaggagttagaggccttctttcaaacactggcctcagttcatcttctgcatcactgcttatcagctgcgttacgacctttttgatgcttcctagtataaccgttgtcatgcggtttgtggatgttgctggtagaaggaggttactgctcatcacagtcccgctcctggcattatgtcttttcatcttagtcataggaagctttgtgaaaatggggagtgttgtgcgttcagcaatctcaactggta

SEQ ID NO: 46933 - DNA, 501 bp, Gossypium hirsutum
  Clone ID: LIB3585-014-P1-K1-G12
agctcaagtgctaaaaacaacgacttgaacatacccaaaacatagccccaaaatggcgacgccaccggtggcggcagggggaaactttgaagcatcaccaccaccaccgatgcaacctcccggaacggacatgacaggtatatgtttcagagaccaattatggctaaacacgtacccgcttgatcgaaacctggtttttgattactttgccctatctccattctatgattggacctgcaacaatgagcagcttatgatgcgatccattcaccctcttgatctctctcaactttcgaaaatgactgggatggagtacatgcttagtgaagttatggaaccacacctctttgttattcgtaaacaaaagagggacagtgcggagaaagtcacaccgatgctagcgtattatattttggatggttcgatatatcaagcaccgcagctttgcaatgtctttgcagctcgagttggacgtgctctctattatatatcgaaagcttt

SEQ ID NO: 46934 - DNA, 482 bp, Gossypium hirsutum
  Clone ID: LIB3585-014-P1-K1-H1
aaaaaaaaaagcgataacaacaatttctctcgctcaagctttgaacaaataatccgttttttgtttcctttctatccaaacacacagttttgcattctcagaaaatctagtcggatctttctgtaccacaggcaacattgtaataactttttttctctctttttttttaatcatggaataatgaaattcagattcatcatcttaaaaaattttatttttttcctcattttttagagaatctgcttttatcaataaattctaggattagtgtttttatttttaaattgttttattgattcatcagatcggtttctggataatgtagttgtttttaaatttaagaatcttttttggtcctcaatttaatatttttaaaaattataatacctttaaaattctacaatgttaaggcaattcctcagtaaaattccacggagtttcggtaattcggattcgcctgagttaactcggccggacttatt

SEQ ID NO: 46935 - DNA, 506 bp, Gossypium hirsutum
  Clone ID: LIB3585-014-P1-K1-H11
ccaccattgattttttttttaaaaaaagccctgtttttgtatttatttcatattgtttaatctttacattgatccatggtgtgttattaaatgtgtttgattcataggggagcctatgtcaatcgcctgttgctgtcccgtccttgaatgtgtctactgtttagcctgtgctcgttgggcatggcagaaatgtctatacactgctggccatgaaagcgagcactggggtttagccacagtggaagaatttgagccagtcccacgcctttgtcgtttaattctagctgtttatgaagatgatctccataaccctctttgggcaccccctggaggttatggcattaaccctgattgggttttcttaagaagaaatgatcaagaaactgaaggccgagctccaccttacatgatttatttagatcatgaaaatgctgatattgtgtttgctgttaggggacttaacttagccaaggaaagtgattatgctgttttgcttgataccaact

SEQ ID NO: 46936 - DNA, 413 bp, Gossypium hirsutum
  Clone ID: LIB3585-014-P1-K1-H6
gcggccgaaggatcctgccgactcacctaagcacgaaggccaagatctcccagaaaatggatgcctatcacgaagagtgcataaccgcgtggatcagctcacactaacccgacgattccggatccaatgctggattctccgcgaggggttcagttaggaatgggaatgaaataatatagattcatatacgaggaaaaggtcatgtatagattcaaatgctgtacctatgggatcgggatagagaaagatgacaaactgaagatcacacatagtgctgcagatcgaaagatcaacctgatctatcgcgtaccggttagttactgagaaaatacttgatactctatagcatcaaacgtatgcgacttagggagtgattgtaggcaatgaactgtatgcaaatacgagatcaagaa

SEQ ID NO: 46937 - DNA, 350 bp, Gossypium hirsutum
  Clone ID: LIB3585-014-P1-K1-H9
gtgaactccggtgtttaaattcgacaaaaagaaaaagtcagaacaaatttggggattaatggaggtcgagtctggagcgcaaggtgttcaacacgtaatctatgacgagaaaagtgtacagtgaatgtgggtgcatcacactatcaacagaatgatacaagatcacgacacttctgcagcgatgagcatattgtgattagcagacaactgacataacagattgcaagaactgaattgaaataacttctttcgatcgttaggaggttaatcaacgtgatataaaaagaactatatgctgcttctgtgacaccaaacatgatggtcactactattgcatcaactgcagaacc

SEQ ID NO: 46938 - DNA, 197 bp, Gossypium hirsutum
  Clone ID: LIB3585-015-P1-K1-A11
caatccccaatctcatatctttcctttgatttttcttttctctctcaagatacaacccggggcgctggtttaccaaccaggagtcaacatgcaaggaagaaaaatctaagtcagatactaagagtgccaagctattcgtgaaattcaaagctgggaagaaatcggggaaggctgccaagggtccacaaaagccaaat

SEQ ID NO: 46939 - DNA, 512 bp, Gossypium hirsutum
  Clone ID: LIB3585-015-P1-K1-A4
cccacgcgtccgcccacgcgtccggagaaatgggaaggcttccagtaacaatttcaaaaggtgataggggggagatatttggacaacgaccaacggaagaatcaaaaggtttgaaggatggcacaggtcaaatttcaaggagtttactagaagggggtgttctactcttccgattgatcgagcggttgagggtttaatcaaggggttgtgccaggaggtcagacatgacacaaaattgatggaggatatgtcttcgattcgtgaatcggatgatgaaactgtggaggatgcgacttcggcataaagttttggttagtgactgtaaatctcttgggttttatgttgatgattcctattttttgtgcattattttggaactgccaaggatgtggtcctcctcgattctataattttctgtttgaatataggaaagattttcatccgaatcttgttgccctctttgaaacaagaatcattggaacaaggctgattctattacaacaaaattgggg

SEQ ID NO: 46940 - DNA, 320 bp, Gossypium hirsutum
  Clone ID: LIB3585-015-P1-K1-A8
ggagcacttcggacctattaaagatctttatccccttggtgacatggatggatctttggatacttatgcttataatgctgatggcaaatgtatccgcctttttgtttctgcaaagccctgcccctatcaatctgttcctacaaaggtggttactgtccggccatacatgacctttacaaacagactcggtcaggagatatacattaagttaagcagtgaagatgagcctaaagttcttcatacttctgattcaagaatcttcttcttacattgtgagaatgatgggatagataaacttcatgtacgactagaagatacag

SEQ ID NO: 46941 - DNA, 228 bp, Gossypium hirsutum
  Clone ID: LIB3585-015-P1-K1-B1
ggaggatcctcggtgctagagtattttccatcatacctttcgattcgaggttccggtttctcttcctattggatgataagagcagccagctttcgaaatctaaagtttgagcagagcaggcatttctccatatcacattgtatagtagtggttgccgatgataatagattttcttacataacaaaactcaatgcatggttacccaaattataaaggaactgtttaagt

SEQ ID NO: 46942 - DNA, 188 bp, Gossypium hirsutum
  unsure (1)..(188): unsure at all n locations
  Clone ID: LIB3585-015-P1-K1-B11
ccacgcgtccgttatttattttataataataaaaaggaaaataattnctactccttcggatcaattggtttatggtgaattgttataggagaaattagattaccaaaaatggttctctgataaaaattcccgtttgttacctgcgcaaatctcgggaaggaataccctttttttccccctgtagttaa

SEQ ID NO: 46943 - DNA, 385 bp, Gossypium hirsutum
  Clone ID: LIB3585-015-P1-K1-C1
ctcaaacagtcaaccttcatcaggaaatttccagtttttgcctcaagaattgtcagatccaaatcaggaagatgatatattgggagaaatccttccaccctctggacctgcaaatgatgcagctttacatacagtcttttcagcaccatccagccaatctgcactacctgtagctacttatggccagcatgcacaatcaggtgctaatatgtaccaacccgcgcagccaagtgcgaatccatatggccagcttgctcagcccagtgctaatccatatggccaaaatgggcaaccaagtgctaatccctatgggcaggcctgacagcctaatgctaattcatatggccaaaattgggcaccaaatgctaatccctatggtcagcct

SEQ ID NO: 46944 - DNA, 191 bp, Gossypium hirsutum
  Clone ID: LIB3585-015-P1-K1-C4
cccacgcgtccgcccacgcgtccgcccacgcgtccgtctcttcaacatggaaaactataaaaacacagttgtaatatatgaagaaattgattggagagggaggttagaacttatggctattgagcttcatgtttaagctcgtgtcaggctacatatgtatgcatcgtcttgctggaacgaaaaaagagctg

SEQ ID NO: 46945 - DNA, 249 bp, Gossypium hirsutum
  Clone ID: LIB3585-015-P1-K1-C8
gctctgtctactcaaggaatgggtcatctggtcgataaaaagtttcgacgccttaacattggccatgatgttggcttggaaggcccaaccaccgccaatcaaattttaattaaattaaatgatgatctgtccatcgggatagaggctttctctcgaatagcttctggcagttcaaataatggccatgtgaatatttgtgaaaatctttttgagggtcttaccatctcaacaggtggtcggctttatatt

SEQ ID NO: 46946 - DNA, 525 bp, Gossypium hirsutum
  Clone ID: LIB3585-015-P1-K1-D10
attagatgacgctgctcggatggttactcaattacgggatgaggcccagaaactgagggagtcaaatgagagtctgcacgagaagattaatgagcttaaggctgaaaagaacgaacttcgtgatgagaagcagaggctaaagaccgagaaagataatctcgagcggcaagtaaaggcattaggttctcaaccaggattcgtacctcaggctcctgctattcctactccattttctaccccaagccaagttgttggtgggaaactggtgcctttcgttggctatcccggagtttccatgtggcagttcttgcctcctgctgctgtcgatacatcacaggatcatatgctccgccctcctgttgcataagctggcagcctgttattttgaggttgctttccttagcagaaacaaccattgatcataattgtatctgtcatctcattgggtgctgatctttttgatctgcattgattactggattactcccttttgaaagagtatgtgacgtgagaactgatagcaat

SEQ ID NO: 46947 - DNA, 334 bp, Gossypium hirsutum
  Clone ID: LIB3585-015-P1-K1-D12
cccacgcgtccggcagagcaaagccttggcttgacattactttccctcaacttcgacctttgtgggccaagtacattgatttctctgataaattcatcaagggttgtcacattcgggtatcttaaaacaaagggttttttttttttttttgagaatttcagtgtcccatagtgatgataaaattaagtatctgtatatgacaaccaaatgaggtgagagatctttacgaaaaaaaaaaaaaaaaaaaaaaataaaaaaaagataaataattaaaataataaaataaaattaaaaaaattataaaaaagaaaagattaattaaaataaaaatttt

SEQ ID NO: 46948 - DNA, 528 bp, Gossypium hirsutum
  Clone ID: LIB3585-015-P1-K1-D5
cggacgcgtgggcggacgcgtgggcggacgcgtgggcggacgcgtgggtgagagcaaagtttattaccttattgtggatctagtctattcattggactggtggaaattgtaggttatggttggtagaatgtatgaatttcatgaggcttgattatttaacgtgtaagagtttaatatatccatttccaattcttaatttaagtggtatgggtttaatggaactttttcttgtgggttatgtgggtaataagggaaattcattgtattcctttaattcagcttcttgttacccttgataatcaatattaatgcactaatagttcaactatgtggttgaccaggcactggatcaagtggcttctactgatctgaaacaggtcatgcttgttaaggcattattaaatgctcgtgacacactgcttgcggagctgcaaaaacgtagtgatgccattaaccatgctggtgatttgactgaatttacctccaaaaatgaaccaaatgaagttgtttgattcttttttggaagaa

SEQ ID NO: 46949 - DNA, 545 bp, Gossypium hirsutum
  Clone ID: LIB3585-015-P1-K1-E10
gccattatacacagatacaagttgtccatacctggacaggcaattttcttgcgtcaaaaatggtcggcttgattttgactaccatcactgggagtggcagcctgaggactgtgacttgcctagatttaatccagaacttgcacttcaaaagcttcgaggaaagaggctactctttgctggggattccctgcaaaggaatcaatgggagtctttcgtttgcatggttgaatggactatacctccagaaaagaagtctatgaaacgaggaaaagttcattctgtcttcaaagccaaggaatataatgcaacgattgaattttactgggccccgtttcttattgaatccaatacggatatcgacgttttagatccgaagaaaagaatactaaaagttgattcagttgccaagcactctaaacactgggaaggagctgatatacttgcgtttaatacttacgtttggtggatgagtgggcttagactcaagacattatggggttcatttgcaaatggcgatgaaggttacgcaaagctggatacagcag

SEQ ID NO: 46950 - DNA, 383 bp, Gossypium hirsutum
  Clone ID: LIB3585-015-P1-K1-E2
acccgtccggttatggaatatctaataaatataaaccatcctctttcttaaaaccttcttaaaacctggctatggtttatctaatatatcccatgcatggaaaatgatatataaataacttggcatgcggtaacatggatctcatggtccactatagtaatattggtattttaaaagtttgataaaaagaaagaatgctacatgaaaaccttttttttgctccctaaaatgtgatgatgactcgttaatatgtctgtaaccaacagcgcttacttggtgtttacaatatccttaatttatttgtcaatgtttgttttatgtaatttaattaatgctttcttctgggacaaagttttcaagtggtggaatctttttaacaggga

SEQ ID NO: 46951 - DNA, 169 bp, Gossypium hirsutum
  Clone ID: LIB3585-015-P1-K1-E3
gcgtccccacctcgctttaaaaatggtatctcacataactcttatcggtgccacctcatgttattcttactatcctcttactaagtaagtaattatgcctctacaatcagtgatagtactttgcctgtctataaaactttgcccatatgtgccgacttatcacaaatga

SEQ ID NO: 46952 - DNA, 541 bp, Gossypium hirsutum
  Clone ID: LIB3585-015-P1-K1-F8
gcagaacttgaatttcttggatctgggttccaacctattaaccggatttataccccaagaaatatccggctgtcggaatctcacttttctggatctgcattccaactctataggcggtaccttgcctctcagcttgagcaagcttatttcacttcagtttgttgatttctctgataacttaatcgaagggacactgagttcgagccttggttcactgagttcactaactaaactcgttcttgggaagaaccgattctctggatcaatcccgactgaactggggttctgttcgaagctacagttactagatttgagctcaaatcagctgatgggtaatattccggcaactttaggaaagattccggcgctggaaatcgctctcaatttgagttggaaccagctcaccggggagattccggaggagttcacgtcattggataagcttgctattctggatatatcccataatcaactggttggagaccttcaaaatctttgccggctgcaaaatcttagtcttttaaacttgttctataacaac

SEQ ID NO: 46953 - DNA, 281 bp, Gossypium hirsutum
  Clone ID: LIB3585-016-P1-K1-A8
gaagaagaaaatgactgtcattgatatattgactctagtagatgtgatctgtaagaggtgcgacatatattacgtctaaatgtatcttgaccttattatcttcggctacttttccttttttttttaattttcttttattgttattctctttgtttacgctttttatctttaattatatttaatacttttatatttatttttgttttttttatttcttttctttttttttatttttttatcatttaatttatattttatatatatttttttctttatcattt

SEQ ID NO: 46954 - DNA, 505 bp, Gossypium hirsutum
  Clone ID: LIB3585-016-P1-K1-B1
cttttatggcacctcctccagcttcaactttcttggcatttcatcctcaagataataatatcatagctattggaatggatgactctgccatccatatttataatgttagggtggatgaggtcaaaacaaaattgaagggtcaccaaaaacgcataagtggtttagcattttccaccagtttgaacatcctggtttcttctggtgctgatgctcagcttttcttttggaataccgataactgggaaaagataaagtcagttacacttcaactgcctgccggaaagacctctcagggtgacactcgagtgcaatttcactctgatcaagttcgattgttagtgtgccatgaaacgcaacttgcgatatacgatgctaacaagatggaatgcattccgcagtgggtgccccaagaagtactttcttcatctatatcgtgtgcagtatattcctgcaatagccagctagtttatgctacttttaccgatggtaacattggagtgtttga

SEQ ID NO: 46955 - DNA, 502 bp, Gossypium hirsutum
  Clone ID: LIB3585-016-P1-K1-C5
gtttgcagggtattcagtttctcttccatgggcgacaaggatgaaaattgctcttggagctgccaagggtctcgcatatcttcatgaagcagaaaagccagtcatataccgagatttcaaagcatcgaatatattgttagactctgtaagtattgcccttttttttctttcaggattttcttcaatttgtaatgatgttgcgttttgaaaaaagttttttctttcttgttccaggattacaatgccaaactttctgattttggtcttgcaaaagatggtccagaaggggatgatactcatgtttccaccagggttatggggactcaaggctatgctgcccctgaatacatcatgacaggtaacagcatttgatttaatatcgttttcaatggatttaatttgctaaaagctgatatatttgattggggttgtttcaggtcatttgacggcaatgagtgatgtatacagctttggagtggtactattggagcttttaacaggg

SEQ ID NO: 46956 - DNA, 461 bp, Gossypium hirsutum
  Clone ID: LIB3585-016-P1-K1-C9
gagcgagcaaccaagattcacatagtggactttggaattgttcaaggagttcaatgggctgctcttttgcaagctctagcggccaggtcggctggaaaacccacccgaattcgtatttcgggtatacctgccccggttttgggatcatctccagctccctccctttatgctaccggtaaccgtctacgcgactttgccaagcttctggatttgaattttgaattcgaaccgattctaactccgattaaggaactgaaggagtcttgtttccgagttgataatgatgaggtattggctgtaaatttcatgcttcaattatacaatttgttagatgccactccggtaaccgtggaagcagctctctgtttggctaaatcattgaaccccaaaatcgtgacattgagcgagtatgaaacgaagttaaattcagtggtgttcgtgaaccgattcaagaatgcatt

SEQ ID NO: 46957 - DNA, 385 bp, Gossypium hirsutum
  Clone ID: LIB3585-016-P1-K1-D2
gtaagcatgtaggatgctcttctgctgatggccgtttattgttggagtcatccaagattgctcgtgacaaatgaaaactagaggatgcggttaactatgggacaaaggcattggcaaagatgatagctgtatgcggtccttatcatcgaactactgcgagtgcttacagtcttcttgctgttgttctctaccatactggagatttcaatcaggcagccgtatatcaacagaaagctctggatattaatgagagggagctcggtcttgaccatccagataccatgaaaagctatggggatctttgtgtattctattatcggctacaacacatggaaatgtgcttgaaatatgtaaaccgttccttattccttcttcatttcacttg

SEQ ID NO: 46958 - DNA, 366 bp, Gossypium hirsutum
  Clone ID: LIB3585-016-P1-K1-D5
cgaccacgcgtccgaaaatagtttaaattatcgaagtaaataattgttctttttaatatacaaacttatttatgtatggatatttgttcatcgtttcatgcttttggcttccattagatcttcattgccatttttgtttttgttttttttgtgggatctttcaaatccagagatgtgaagatcgcttctgttttctgcgatgagctccattgctaagatcacattacattgatccatggaagaatctggggttggttgttcgatactgatttgattccttgaggaggcaactgaaccaatcgatatacacatgtggatatggcttttctgttcatactaactgaaggttgctattgggttgagact

SEQ ID NO: 46959 - DNA, 263 bp, Gossypium hirsutum
  Clone ID: LIB3585-012-P1-K1-F9
gctttacaaagaaaaacttcagatttcagaaaaaaaaaattagaaagtgagttagcataggctgcagcattagtattttgtaggatgtgctaagttgcccatgatgaccaaagcaattgcttttggcgcgttaagatttggattttttttggtgtcatgttgccttgtttcagttcattactttggtctgaaacttcttgttatgtttttatagctgtatacctttcctccattgatgaagcttaagctcaacaatttgcttg

SEQ ID NO: 46960 - DNA, 569 bp, Gossypium hirsutum
  Clone ID: LIB3585-012-P1-K1-G12
atttcaaccatcatcctttcttcttttttcctgtctttggattttggggttcagaattttgttggaaaaatgagcactgctactttcaattcaatttgtttcaatcaaggttatttgcggaagggagaagtgaagatttcaaaagtgaagaatagaaaccaaagagtaaagttttatgtaggaggagcctcagtattatcaacaaaatgcatgcaatcttcagaaaagaacaaaaaggaagtccgcattggtctccttggtgctagtggttatactggagctgagattgttcggcttctaggtaaccatccatactttggtattacattgatgactgctgatagaaaagctggccaatctatgggttcagtgtttcctcatttgataacacaagatctgccgaccatggtttcggttaaggatgcagacttttccagtgtggatgctgtattctgttgtttgcctcatggaactacacaggatatcatcaaaggccttcctcggcatttgaagattgtgatctatctgcagactttcgctaaaagatatcgctgagtatgaggaatggt

SEQ ID NO: 46961 - DNA, 547 bp, Gossypium hirsutum
  unsure (1)..(547): unsure at all n locations
  Clone ID: LIB3585-012-P1-K1-G4
ccacgcgtccgggtgacttcaactgctaagatactcattggcatctcattaaacccagatgacagcaaggaactcttgtcatgggcaatcagagtcctagctcgtccaaatgatggcattattgcactacatgttcttgttggtgaggagccgaagaagtgtaaattggtaagaaacgatcagtcaaaacttcggcaggcgaaagctcatgttatatcggtgcttggagaatttgcaaggacgtgtcagtctaagcaggtaaacttggaggcaaaagtaagacttagctcgagtgttagaaggggactaattgaggaagcaaagtccatctcagctaattttcttcttcttcttggctccagaacacgatcaagagaaacttcacataaaattacaagttactgtttcgagcatgcccccgaaggttgtgcaatggtttcaatagggaagtcaaagcggccactgcaaaactcaaattctacatatgcacatctngatgaaactggtcaatggagcatgagatggtctaacacgagtgataacagtg

SEQ ID NO: 46962 - DNA, 525 bp, Gossypium hirsutum
  unsure (1)..(525): unsure at all n locations
  Clone ID: LIB3585-012-P1-K1-G5
ggtcgaccacgcgtccggcagagtctaggcatcaaaaagctatctgaagttgtcacagagaaactcgataatgaaggcaatttagagactttggatggtattggctccatcccattagatattatcagagagaagctgttaagcagatcctttcagggtgctgtgtggactcttgtaaatagtatagctggttatcttccaggaattaacaatctggatttgggaactatacatagttctctggaatctattgcagacaagttgcagtttgttaagtgccttcatacccgtttctggctcctatcaagatctcaagatattacctttgtatctaaggattctgtaattccagagtgggagaatgaatctagacatcggactctntacttcgttgacaagtctaaaggctgtattttggttgctgagcctcccacttatatctctgttcttgatgttgttgcaactgttgtaagccaggttttaggatcccncattccattgcctataggatctttgtttcatgtc

SEQ ID NO: 46963 - DNA, 111 bp, Gossypium hirsutum
  Clone ID: LIB3585-012-P1-K1-H2
cgcgtccgaagagagggtccctcagacaccctttgttgggcccctcattacgaagaaatgtaacctgccttggatcatattcgctgcgtctaagcccacacctgagatctc

SEQ ID NO: 46964 - DNA, 527 bp, Gossypium hirsutum
  Clone ID: LIB3585-012-P1-K1-H7
cccacgcgtccgcccacgcgtccgaaagctctccccttcccctctcatttggccgaactctaatccccttttgtgcaaacgccgatccgccaccacagtcggcgaccagcgtattcgggctttaggggaggtggtttttcagccttgagatcccccttttggcttcgatttcaacgaagcaaaaaagagatttgtggcctattcgcaaggtaagccctctactatcttgttctttttattttttttaacaaaaacaacaaccaataactcaatgagaaaacgaaatggttcattgaaagctaaagcgattcggagaacaaagaaatcacctctgctattttgattgcttttttttttattattctttgtgcgtatattgcctccgtaaccttacaaatgatgaaatctcttggctatatagccgaagagatagaaatgattaaaaataaataaaaaatacaatatttgtttttttttgctgtgcgttcggtcgttttgcaggtacggggtgtgcgtggcgcgagtac

SEQ ID NO: 46965 - DNA, 414 bp, Gossypium hirsutum
  unsure (1)..(414): unsure at all n locations
  Clone ID: LIB3585-013-P1-K1-B10
cacaaangnnngncgcgatgcttttttaaattttatgaggcggaaaatagctggtgagagtcgttactagattaagaacatgtccaaagatgagatttcaaaggatcctgttgctatgtgcgactttgaagaagccttggcataggtccagagaagtgtattacatgcctatattgagaagcatgaataatggtttaccgaatttggatcatcataactcaaaacctgttacctgtaaggggaagcttatatttgtctgttatcctgatatattccaaagaaagggagattcattgattattatataacccctcattattgttataatttattatattaagtgttattaccttttttattataaatttctcctttatattataaatatatttttatatttattttttattaatt

SEQ ID NO: 46966 - DNA, 542 bp, Gossypium hirsutum
  unsure (1)..(542): unsure at all n locations
  Clone ID: LIB3585-013-P1-K1-B3
cccacgcgtccgatcctcaccgttcattgtttcacccctctcatcatcatcaaaagaagctaataaaaccagaaaaagaacgctcaaaaccaaaaaagaaacaagtgattcatttcagtttatgaggaggaagtgtagaacagttgaaggaattgcagttatggagctagataacgtcggagttcgaacgatagccatggcggaggaggcggcaaccgaagcagttcggaataaacgaagaagatttaacgacgacgacgaaggcggagcagcagaatgtaaagtaacttcctcaacgacgtcgtatatccagttaagaagccggaggattttggtggatcatcatcctcgtaatgaaaatcagtgtttgagcctaggtcggaccatgatgatgacgtgtcatgttgttcaagcattatcggctcgtgcggaaaaaggattatcgaattgccagatccggaggtgatcaattttgaaactttttattttggttttttgaaaaatttcataatggattctaggaatntcggtttgtcgagctt

SEQ ID NO: 46967 - DNA, 538 bp, Gossypium hirsutum
  Clone ID: LIB3585-013-P1-K1-B6
ggaccgcagaggaactatcacaagcgctggataatctttcaaaggcagtagatggatatttcaaaatagtttcgactgggggttatgctttgctttgcaatctaagaacaagcgtgggtgtcccaaattcaatgctaggaagaaaagtagaagagcaagctgtgagatgaatcatgaatgtattcaagttgaagctaatcttgtcttatacagatggtttaggttgagaccttatattatctcagaagtagacatgcataacctttaccttgttcgggttatggcggtacatgtcttgtgagttgtaaggtatgttacactactgagttaacttgtttatacaattaccatgcctgcattatcttcattactgaatcatactagtaggaaactggtcttaacaaccagagagagctgttttgtgattaatgtgtttacatggtgagtgataagagctccatctcttcttacaaatgcattttttacagatgatatctcgaattgccatctgcatagtcagtaaagtccttggtatttc

SEQ ID NO: 46968 - DNA, 527 bp, Gossypium hirsutum
  Clone ID: LIB3585-013-P1-K1-C1
cttttatttttatttcagatgaaaatctcctaccacctccactcatcatcctggtaacaatagcaagagatcttcttaggttttgcataaaatgcatagaagactctttgtttttggattttgggtgtggcggatttgcgtgtggtggaaaatttggagaaattgatgtcgaaggcgaagttttccaaagcaatgctcacgtctcccatagtgcatcccagcgattgtaggaacggcgaggattcgatcaattatgaacaattgttgttagtcttcttcccttcatcatcatctttgggttttttttttataaaaaaaatctctgaaatattggatctgaatttctatcctgccaggcttttaatgagtttaccttttccacctctactttgatcttgtttttcatgtaaatcaaaaccctattttgtttatccgccttaaaatttatttctactttcctatgctgcaaactaaaagttgaactttgatgatcaagatctttccttttccaatagtttatgttttgg

SEQ ID NO: 46969 - DNA, 528 bp, Gossypium hirsutum
  Clone ID: LIB3585-013-P1-K1-C7
gtttcttcatcatctcatggtgatattggtcttcaacctataagctttcctaatgtggctacaatttctgttacaaattgtgaaaacttgaaaactctttttcctcttggatttgtcagttctgctcaccaacttaaatatctcgtggttaaacaaaacccgaaattggaacaagtatttgaagtagaagatggaagggaagtgacaaccaagaaagagataaagtttgataaattagaacgattagcacttgaagaactggcttgcctcgttgagctttgtcctaagggatatcattttgtgtttccggctttgacctttttgatcgtaagagaatgtcccaacatgactacaggcttcttcattgattcaaaccattttgtgcattccaagaaaacagaggcaactgaaggaccagccactgctcaaagtacagttcacaactacatgttttggggatccttcatgaggagtacattaccacattacatggaagaataaacataggtaaaacaagtttgtcaattt

SEQ ID NO: 46970 - DNA, 347 bp, Gossypium hirsutum
  Clone ID: LIB3585-013-P1-K1-D5
cccacgcgtccgctaatttaccgtatgccaagacacccagtctgaaaagggctcactccattcaatctaacagaccgtctgaacgaacgactgatcttggctcttggtgatgtaaaagttctttgaaaagaggccttccctatctcatctgcgacctgtgagacagctcaagtggcttagactatgcgactatgagcacacatccacgtgcccattcactgctattcgtgagctgatgtacaggacacagtcatcaacgtgcttgctcacttacacatgcatcatggcacagattactccacctcactagcctatgtgtgatctgcctttttgttatccacgatgca

SEQ ID NO: 46971 - DNA, 536 bp, Gossypium hirsutum
  unsure (1)..(536): unsure at all n locations
  Clone ID: LIB3585-013-P1-K1-D6
ttaaatgatgttgatgattgaatcagctatggccgtccgatttcccaccccaaccaatttctgctcctcctccgcctttcacagaaaggatttccaagactaaataaagcttccctttcgagaaggaccctcgtaaagaataacattcgggcaaccgctgagcatttaggttcagcatccgatcctgcaaagcataaaggaaggtcgcattaccatccgtttgaggatattggtgaggctacatctaaaaagagcaatgatgctacactcacagctgcagaaacctctaggacgatcattgaggtgaatagtaaagcaacagttatgtttacagggatgatcaatgatgaagttcatgaaaatattatgtggccagacttgccttatgcaaccgatgaacatggaaatgtatacttgcaagtgaaaagcgatgaagatattttgcaaagtcttactgtagaaaataactntgtgcaagtaattataggatttgacactacggaaatcatgaaggaaatcgaattatcaagtccatc

SEQ ID NO: 46972 - DNA, 598 bp, Gossypium hirsutum
  unsure (1)..(598): unsure at all n locations
  Clone ID: LIB3585-013-P1-K1-E2
aattatccgggtacgancccacgcccgtccnnnggtatgcctggcttgttaggtattcatttccttgaggaactaaacgtgaagggaaattctggaattcctgcagagcatgataacaaagccactaggttgaagggtcgccgcttaagccttacttgggtccaaacattgtattgaacaagggtcgcagggagaaggtagatctattnagaatcatatggaaatccttaagagnttaccaacctcgagcaagcatatttcctagtgttcttgattatacagattgtccgtattcctggcccttttgtctgcaaccactttatgctggtgcgatgcctgtgatattcaatgctactgttctgaatgggatgggtgtcattggctatgttcgtagtccaccgatatggcatccttcaaatgaggaagggaatcttttaagtattcgctttacttattcagaagtcatctggccttggacaggttacttagcacttcacatgcaaattaaggaagaaggtgcacatttttccggagtgattgagggcaatgtaactgttagagtacattctcctccagcccaaggggagagggctgttcg

SEQ ID NO: 46973 - DNA, 480 bp, Gossypium hirsutum
  Clone ID: LIB3585-013-P1-K1-F2
cccacgcgtccggcgggtgaatgactggatttctgcattgcccccactgagatatttcagttttatacgaaaatacgagtagagagctgatttggtttacctgttttgatgaacctgttatagagacgagttacaaagaattcatgcaaggtatgtgcttcagggttttttttttttgttctttccattttctaacacaggttttctttactgggattttaattaaatgtaaaatcagattgccagtatatgcagattattgtaatttttctttcccattctttcctttggagtttagagttgttcgatttttatggtgttatatccattgaagctgccgggctaatgtatattgtaggtattaaggagatgtcaatttggtttggatttacattctgaaatggaggttactcaatttaaaaatccccttgaattaagatgctgcaaaagtttaaaaaaagaatgtgattttgttttggt

SEQ ID NO: 46974 - DNA, 115 bp, Gossypium hirsutum
  Clone ID: LIB3585-013-P1-K1-F9
ttttcccctttgtttcccattttatttcgatgactgcatgcaaaacattatgtgcacattgaacattattcacgaaactttgccctctttatgttagaattgttttagttgctat

SEQ ID NO: 46975 - DNA, 624 bp, Gossypium hirsutum
  unsure (1)..(624): unsure at all n locations
  Clone ID: LIB3585-013-P1-K1-G3
cgtccgcacncnnttggtttcctgggattcaaagtttggtggataagtgtgatccagtaagtagttcnnctttaagccaagcctgctgccatttttttggcttaattcaaggatccagacanntgcctgctgcnnacctgttccagtattcacannagttcatgattggcttttctgcagactatttagcttcttctttggagtcttattactgaaaaagtttcttgcaaaagaaaacggttcttcctagntggctttctgaccaggatgnttgcttatggcttgnnatgctactccannagttctgnnncaaagcctcacttttagtgcgagnngagtccgtgttttggttgaggggagtctctttaaatcatcttatgtanaagcanggcattctgnnatcttaatagttctttccccgtaaaggttatttannattgccatgattcaaactatttttacattnntagcacnnctttgagaatatgccattaatttatgggattgctccagatgctactatagttctttggagctgttggcaaaggctgtaagagttgaacactgtgaacgtgttcatgtgattatagcagcaaaacgagtctgcattgccaattgtcgtga

SEQ ID NO: 46976 - DNA, 534 bp, Gossypium hirsutum
  Clone ID: LIB3585-013-P1-K1-G7
gagaactgcatcttctagcagcttaggatctacaggcaggaatccagcagaagttaagctggagatgactgggagcttaattgattttgatgctgatccagaacctcctgttgcttccacagttactcaggcaccacaaacaactgagactcaatctgttgtacagacaataagttctagcaatgaccaaaactgggcctcttttgattttgcttctcagaaaaatgtttctcaggctcgttcaaatatgaacaccctggactccgttctttctcaattgtccgttccagcatctgtacctggtgatcaatcaggagtttatagcagtggcggtggacaaatacctgcttctatggccaatgtgaatggaacacctcttggcatcaacaccaatattgcattcacagggcagatcgaaatgtcaccctttggtactgctgctcctgcagctgcaccagttagcaatttcacaacactgccttctactggtgctttggcagctgcccctggattgatgcctgtcaacggtggtag

SEQ ID NO: 46977 - DNA, 536 bp, Gossypium hirsutum
  Clone ID: LIB3585-013-P1-K1-H12
tgaattggcagaatgcaagatacaaggcggacatactagctcaccctttgtgcgagcaactcttgtctgcacacgtggcgtgccttagggtcgctacgcctgtggatcagctcccgaggatcgacgctcagctggctcagtcacagcatgtggtggctaagtactcctccctcagtggtgggtcccagggcgaggttgccgacgacaaagagctcgatcagttcttgacacattatgttctgttgctatgttctttcaaagaacaattgcaacaacatgttcgagttcatgcaatggaagcagttatggcttgctgggaaattgagcaatcattacaaagcttaacaggtgtttctccgggtgaaggcacgggtgcaacaatgtctgatgatgacgatgaccaagtagacagtgatgccaacttgtttgatggaagtttagaaggtccagattcaatgggattcggccctctgatcttaacagatagtgaaaaatctttgatggagcgtgtgagacatgaactcaaacatgaactc

SEQ ID NO: 46978 - DNA, 468 bp, Gossypium hirsutum
  Clone ID: LIB3585-014-P1-K1-A2
ggaatatgttttcgagctctctgtcattgcctccttctagcaaccctactgcctttggctcaacaactccctcttttgcttcacctttccagccagctcagacttctggagctttcagctttagtaatcttggtcagacacaaatgagtggtggatcaggcatttttggtcagagtaatgttggcctaccgtctgtgacacaaaatgctgctgtagtacaacctgtgactattagtaatccctatggaacactccccgcaatgcctcaaatgtcaattggtcgggctgggactgcaccatctgttcaatatgggatttctagcatgcctgtcacggacaaacccgttcctgttagaatatcgcccctgttgacttcacggtacatttcacaaagacggattaggttgcctgcaaggaaatatcatcctaataacgacaatccaaaggttccatttttcaatgacgatg

SEQ ID NO: 46979 - DNA, 549 bp, Gossypium hirsutum
  unsure (1)..(549): unsure at all n locations
  Clone ID: LIB3585-014-P1-K1-A4
gttttattcctgggaatttggaccaagatgtggttgatgaagttatagagatttccagtgatgaagctgttgaaactgcaaagcaattagcccttcaggaaggcttgttggttgggatatcttctggagcagcagctgctgctgcaatgaaggtggggagaagaccggagaataatgggaagctgattgcagttgtctttccaagctttggcgagcgatacctctcctcagtgcttttccaatctattcgagatgaatgtgagaaaatgcaacctgagccatgaagtcccctgtattttttgatgaataaaaacagtttttccaatcaattgcttgaaattcttcaactatgagttatgaaagcaataaaattcttgactggaattatgctgccctcttttaattgttagagacaattcagtactgggtgttcttgactggaaaataagaaattttnaaaggtcaatttttttttttcccaacttgaaaaaaaatatttatataatattattgggtgggcgtgtttcttggtttttacaaatttttttt

SEQ ID NO: 46980 - DNA, 507 bp, Gossypium hirsutum
  unsure (1)..(507): unsure at all n locations
  Clone ID: LIB3585-014-P1-K1-B1
aaggagtgaaaggaagcgacagctcgctggaaaaggagcttgtttctgaaaccaccactattcatattgagataacggctaccaagaatgtggtatctgaggtaccatctactgagaaagagagctcaggacaaaatgagaatgtgaatactgatatcgaagtggagagtgaggattctaagctccagtctgatccaaagcccaggttggagaatgtgggtccaaagcctgaggtgaagaatgagggttcaaagcccgacgtggagattgagggtctaaaggctgagggggagaatgatgatccaaagggccagctgcagtgtgtgggttcaaagcctcagctggaccttgaagagtcgaaagcgcagctggagatcgagggttngaaggctccccacatagatgacgggcgtgattcgtctgctccaaacatccaggtatctgaggtcaggcctgatttacggtttcaaagtaaatctggttctatttctactgattctgtctcaa

SEQ ID NO: 46981 - DNA, 272 bp, Gossypium hirsutum
  Clone ID: LIB3585-014-P1-K1-B2
cacgagcgttcggccacgcgtacggaggacaaagtcagctcctttcgggcccgaataaatcatccatagagagaggatatgtacacagggactatgaccatgaatgtggtggatgcgtaggcaaatgcgagcgtcctagtgcagcatggttaccattgtacgatataggaacgtgacaacgctggggccgcggctggattgaacattgtatacgagatatctcacagaacaacacaaattatggagtggtgcgcgattccattgcatcacat

SEQ ID NO: 46982 - DNA, 486 bp, Gossypium hirsutum
  Clone ID: LIB3585-014-P1-K1-C1
atgtgccagagcttcaggtttggaacaatgcggcgtttgacaatggagaatctgaagatacaaacgccatcaaggattcttggtgtaatttcaattcaggatcggtaaatcagtcactggaatctgatggaagtaaagaaaatcagagccccctttggataaaatccccaatttccttcaaatctactgcgtctgttgttaagcctcttagttccaagaatgttactggtaacaccagagagccaattccagcgaaaatgaagagtggggtttgcaaggaagaagagaaaaagcgtgatgagaaaaagattgatatggagattgaagagatagagaaggaggtcggtcgtttgtcagcgaaactcgagtctcttcgactggaaaaagctgaatataatgccagaagcatttcgatgaaaggaagaatagtgcctgcgaaattcatggagcaaaaacagagcatcaagaatttggagacgacgaaaa

SEQ ID NO: 46983 - DNA, 335 bp, Gossypium hirsutum
  Clone ID: LIB3585-014-P1-K1-C12
gcacgcgtcgttattttgatttttttggagttcataacgattactgggcaatcgggactaaagacacccacaagttagatgagaccctattcgttgcactgcggcatatctcatggtctaatagcatgctgctgtgaacatggtagtggccagggttctgtccaaagagggttcagtccacacactgtgaccgtatgtggaccgttggtttgctgctacactctactgtcttggtccttctggggaaaggaaagattatggctggcctgttgaaatctgacaacgaaagggtactttcgctagctagatagaaggtctatgaagtgtctctgaag

SEQ ID NO: 46984 - DNA, 329 bp, Gossypium hirsutum
  unsure (1)..(329): unsure at all n locations
  Clone ID: LIB3585-014-P1-K1-C8
ccggccgaccgaaaaaaaccatnacacanctttcgaaacttttaaaggcttataagagcncacagggcgagcaatattagatctactattgtacaccaactaacttataaccttctctctataccttcctcacctttatgttgaaagcttaactgattaatacctccattgtatattgccaccatcttcaaaccactctccttaattgcacgaagtacaaaatattttaaccttatagaacaatattaacatcataagttgaacaataaaagcaccaattttttcaacattaataatcaaacaaatcttttttaactattaaaggtatc

SEQ ID NO: 46985 - DNA, 501 bp, Gossypium hirsutum
  Clone ID: LIB3585-014-P1-K1-D4
agcaattccaagatcacggtcacgctatatggaaacaaataaacaagcacattctgctgctggattagaatgcgagttgaattgtcctacagttaaatcgtctcaagctagcactgtatcatcgattccaccaatagaaagtcacattccccctgaacctgtgacccgaaatctgatcctttcaaggaaagagcgagagaaagagagcagtatacaaaaacatcgcatatcagaaagcggtcaggttgttaataagtttggtggtagcaggccaaaagtaggtggctatagaattaacagtgagctggggacaaagaacatgaaaaatgctggaattgccggtaattctgggatgggccgacttgcagttatcgcttcctgaaatgagcggccatggcgtattcactcattcatctcctttccagttcaaccaagccaacatatgtatcaggtatcctcaattcgaatcatatatttactgccttcaatgtacattgaatg

SEQ ID NO: 46986 - DNA, 503 bp, Gossypium hirsutum
  unsure (1)..(503): unsure at all n locations
  Clone ID: LIB3585-014-P1-K1-D5
cgcgcatattatcgcttggtgataaaattgtaccattttttcgttatttccattagttccttggcctggctaggggtgcagaagttagtagcttgtatagggataatgtggcaagaatgccaatgatcttaagggtttattgtttatgtattcctgatttggacaagataaaaataaaggaccatagagaaaatgagataccaatgtcagggttgtttaacattttaatttcaatttcatctttgataggaaaaagtaaaatattatgatatcgcaactgagaaacaagcagagtttgatagaaccgtggaagaatacattaaatgaaaggtatattgctttaggttttatattgtattttatccacgaagaaagtctttgatatgtatttgatgaagagctgcaacaaataagcagtagctatcttgctctacatttcccttggctgaaactggtgaagatcaagaaactntaaaatgattcggactttgatgattaaacct

SEQ ID NO: 46987 - DNA, 536 bp, Gossypium hirsutum
  Clone ID: LIB3585-014-P1-K1-D6
aaactttcggctgatgattccgtttttcagcctagttgtaccttgatttgcgctagacaaccatccatggattgaaggcgtctctcgtcaccgtcagatcagtttcattgttcatcacttaaagtaagtcctcattgctaccgtgtatgatttgatctgccaaagaagaagaacaggaactttttggatgggcatattttctagaagaaaaacatactatgggtagggcttcaaactccactcgttgcaccctgccattgatcaagacttgcgagattttggaagctagtcacgagctcggggatcgtcagagaaatccgtcacactatcaatcacttttatggtattttataagtttgaacttgaacttatggcatgtatagtctagttattatgtttgattttgaagtatgtatatattgatagccatgcgaaaatgacttgattataatgttaaagtttgtgtgtatgtggctatgacttaaattcaatttggaagtatatttcatggtgtatatatattgggtattaggggt

SEQ ID NO: 46988 - DNA, 291 bp, Gossypium hirsutum
  Clone ID: LIB3585-014-P1-K1-D7
cctattcttatttgtgctgaacgtctcaaactcaacatcaccatggagcataggggatcccctacactagtgagcaaggtcactgcctacacagccaacccttctctaccaggtactaatgcgcagcaatgcggaccctgagagactgtgtaccgatcacgaaggcgtaggccaccgttaccgtggctccagctgtgctggctgcctctgaaccaacataattatagttgttctcatcctcataacagcgatcaatactgttttattgaaggatctctacaacacctactc

SEQ ID NO: 46989 - DNA, 502 bp, Gossypium hirsutum
  Clone ID: LIB3585-014-P1-K1-E10
tggtataattgctttaaaactgccatttacggcatcagttatcactgttcttagatttatcattagatgaactcctaatggaggttgtttcttaaatgcaatttcgttacacagattttgcatccgtaatagttaatggctgtttatttgcacatctcttgatcatccaaagtaagtatgatgtcgcactttatgctgtcatgtgtatttgagatgtgcaataagatgatggggttgtcataaacaagaattgtttggaaatctcaactgtgaaatgcctatccaaaactgtttgtaacatctggtttactgatcctatattaccatgaaatatgttatttgcaaggtttatttctgcctcttttgaggaaaactgatagtggatgcctgttttctttattatgtggtacggggatttgaatgtgaaatttgatgatcttaacaacagcgcataatctcaatctgcattttcaggcaagaaatgcttatggcccgtgaaaag

SEQ ID NO: 46990 - DNA, 494 bp, Gossypium hirsutum
  Clone ID: LIB3585-014-P1-K1-E2
gttgtcatcatgggtttataaagttacaagtgatcccagagaaagtcctttcatcaccaaatctgagctaacatcaatccaggctgggcaaactgatcctcccacaactacagctgagtttgcacctataggcctgctgctatcaaagttacccacatgggcaatcatattcgctaatgtaaccaacaattgggtgagccttctcatcatatgtaaaacttctcattggcttcattatttcttttacaacataataaagctgcactttcttatttcagggatactatgatcttctctcatggatgccaggatatttgaagactgtacgtagttcgctattaaattatatttgttggcatactctgggacctgataactctgtagagatcaacatagtgagtatagatacacatacacacacgttggcacacagatttttgtcaagcttacatatggatctatcttacatcttttgttcaatttcttttataaat

SEQ ID NO: 46991 - DNA, 410 bp, Gossypium hirsutum
  Clone ID: LIB3585-010-P1-K1-H2
cggacgcgtgggcggacgcgtgggcggacgcgtgggctttcttcaatctcgtctatgtcactaagtgcctaagtcctaaaagatggaagaccaggtatgccgacttcggtttataataaaacaggccgctgataaaaaccagttctataaatgcatcaatatcttttgttaatctagggttttgtttttcttttgtggttgtttagttgctagtttaatagaaaacaattccaacaaaaaaggaaagatgcatataatctattcagagtataattgccaaaatatcgggaaaaaaaagggggtaatatcttcttatggttatttgaattagactagagctgtcacaaagtggtgtcaaattgattgatatgtgaactggtatggactgaaactaaaaaattggttgtatc

SEQ ID NO: 46992 - DNA, 473 bp, Gossypium hirsutum
  unsure (1)..(473): unsure at all n locations
  Clone ID: LIB3585-011-P1-K1-A10
cgaccacgcgtccgatttgtagggaaggtaaaaccattgattgtttgtagnnnctgagcgtagctaaatgggagggtaggccggatttggatagttatgctatcttgctagaagggtgggagaaagaaggaaatgttagtttggctaaaactactttcgatgagatggttgctgaagtagggtgggatcccgctaatgtaccggcttatgatttgtttttgagtactttgattaaggggaaggatggggttaatgaggctttgaagtatattgatatactgctccagaggaagtgttatcccgggatcaagttttttagggatgtccttgaggattttcagaaagtctgtaatgttaggggagctgagttgatttggaaggcaatggtggagaaagttgggattaggccggatacagaaatgtattaatttgataatcgaattgccctgttccaagaattacacatatacagc

SEQ ID NO: 46993 - DNA, 532 bp, Gossypium hirsutum
  Clone ID: LIB3585-011-P1-K1-A7
cggcccgacccacgcgtccgcccacgcgtccgcatccctcatcattcaaatggttaaatcaaccaagattatgagaagatcaatcttcacattccttcaaaattatcattatttcactttaactcctgcacttcttgctttcccttactcactttctcttcttctctcccaaatctttgttccatcttcttccttgtttcaatcaatccatggccgtctcagtgttgttttccaggcctctgggttcccttattcatcagattcctttacatttctcagttccaaactttcccaaaccatctgtttctctgtctttgcactccctttcaccttctctttcttcctcttatccaaagcctccgtaatcagttgttttcgccatgggaaaagcttcaaacaaccttctttctcttgggttctttcactttacaaacctctcctcgaaactctaatctgcaatttcttcttaatcatctcagccaacgccacagctatcttctgtttgttggtagggttcaattcccttgatggg

SEQ ID NO: 46994 - DNA, 552 bp, Gossypium hirsutum
  unsure (1)..(552): unsure at all n locations
  Clone ID: LIB3585-011-P1-K1-A9
cgcgtcacgnngttagttgcacggcattggccanntcgagtctcttttcttggtaccctttttcaaggagcctagatgttgacgagtgtagctttgagccctttgtcctcgtattcataacccnncacgaattcagtggaagtatannttcgtgtgtgtggtngcaggattcgattcaggcatttttccaaaagcaaagctcataatggtaggaatacaattaatggtcacagcagcaatatgatcaacactcgaaggccaggtaatattgttgaaattataaaatgtttttgagttagatattgaactaaatagtttgctacttgttgtagtcctagtaggaccttcaaaacaacctgtcaatgttttggtaagtcatttctctcttttgaaatgctatgtacttaattttgtatgtgaataatcttttcttgccaacttacatcctcagggttcaagtgttaatgctaacaatcacaacaagcgaaaactagagggagatagttaatcagaaacaaatgccaaggcgttagcagtaggtttcagtttcac

SEQ ID NO: 46995 - DNA, 550 bp, Gossypium hirsutum
  Clone ID: LIB3585-011-P1-K1-B10
cccacgcgtccggtgaggatgtagtttcatatgattcatcggacgagaactatggtcaaccgaatagtagttttagaagcagaaaaaagaaagccccaacaccacgacaaacaaaacaaaaagcccctaagaatgtgaaacaagggaaacgtcggacaacaaaacaagtaatctctcagcaaagcaaacaagacactcgtcggaatcggaataccaaaattgagcaaagtgctagacaggacaattcatatgatgaagatgagatagaaggtggacccagcacgcgccttaggaaaagagctcgaaagccttcaaaagagccggaaacaaaacctaaagtgaagaagcaagctctgaagaacaaagcaaagagtgcttcaaatgcgaaagtaagagatgagggagcagaatatcaatgtgacatggaaggttgcaccatgagttttggcttgaaacaagagctcgtcctccacaaaaagaacatttgtccggtaaaagggtgcggaaagaagttcttctcacacaaatatctagttcagcatcgacgagt

SEQ ID NO: 46996 - DNA, 492 bp, Gossypium hirsutum
  Clone ID: LIB3585-011-P1-K1-B4
cccacgcgtccgggaatttgctcttatcgtcgtcaccggaagtactgtaacttacgttccttgctccagttgtgcgcattgcggcaagcatcaggatccaaggttccaaccagatttgtctagcacttatcaacctgtaaaatgcaatccgagttgtaattgtgatgatgagcaaaagcaatgcacttatgatagacggtatgctgagatgagttccagcagtggtgtgcttggggaggatattgtttcttttgggaatgaaagtgaacttgtgccacagcgtgctgtttttgggtgtgaaaatagggaaacaggtgacctttacagccaacgggctgatggtataatgggtttgggtcggggccagcttagtattgtggatcagctttgtgataagagtgttattggtgattcattttctttgtgttatggtgggatggatgttggcggaagtgcaatggttcttggaaaaatcactcctccccctgaaat

SEQ ID NO: 46997 - DNA, 546 bp, Gossypium hirsutum
  Clone ID: LIB3585-011-P1-K1-C4
aaggtccgaatctttctcatctcttacatccaaaggttcaatacctgaagcaattctggaagctaaaatccaaaagaggcttttcgtggtctacatttcaggtgaagattctgagtcgaaaaacatggaggattctacctggactgacttaaaattaaaagagtcactgtcaaagtattgcgttctattgcataaatgtggtggaagcaccgatgctgcaaatttttctgccatatacccgcagaaatctgtcccttgtataacggcaattggatataatggtgtacaagtttggcaaagtgaagggagtattagtgctgaagttttggcatccagtttagagaaggcatggttgagtcttcatatccaggaaacaacggcagctgtccttagtgctgcacttgcttcaaagaaatatgaatcatctagttctgggtcatctactgttagccagtctgaacaaggaagttcttcaagtgcttctgttccatcaaccacaatggccaatgttgtccagaccttggagtctaacccatctgttatgtc

SEQ ID NO: 46998 - DNA, 370 bp, Gossypium hirsutum
  Clone ID: LIB3585-011-P1-K1-D4
accacgcgtccggccacgcgtacgcccacgcgtccgctttacaatgagcacgttgtgaagtcttgagggtgctcatgattcgttgatgctgtataataactgatgtctacgccactgcttggcatgacaggacgaaaggattcaacgcatggttactgtactcctgtcttcaggctcaatggaaagtgtgtgccacaatagtgctgactcgaatgaacagaactacatgcactcgtctgagtgctgtacaacgaatagctctgttcaatgccctacgtccgatgacagacaggctagttagtatctaaaggctactgaccctatgctcggactacctggacagcagccgcctgacagaaatccagagctc

SEQ ID NO: 46999 - DNA, 532 bp, Gossypium hirsutum
  Clone ID: LIB3585-011-P1-K1-D5
cccacgcgtccgcccacgcgtccgggttttttggttttttgctgtaatgttgtgctgttggggtttctgtattgtttggatctaaggatatttagattgagagcttaaaaaaatttaaattaaaaagttgcagcttttagtttcccctttcttttgtcaaatggaaggaagcaaaaaggttaaatctttggttttggtttgtttgatctcggtgctactgcatccattctggcttatttctgctaatgtggaaggtgatgcattgcacagcctaaggaccaacttgaatgatcctaacaatgtactgcagagttgggatcctacccttgttaacccctgcacatggtttcacgttacatgtaacaatgataatagtgttattagagttgatcttggaaatgcagctttatctggtcagcttgtaccgcagcttggcttgcttaagaatttgcagtacttggaactttacagtaataacataagtggaccaattcctagtgatcttgggaatctgactagcttggtgagcttg

SEQ ID NO: 47000 - DNA, 542 bp, Gossypium hirsutum
  Clone ID: LIB3585-011-P1-K1-D8
agcaaggatacttccttatagacaaagatggtaagatcctggaggaacagagaggcattattagatctaactgcattgattgccttgatcgaacaaacgtgacccagagttaccttgctcagaagactttagacatccaattgcaaaggcttggggtatttacttctaccgagtacatttctatgtttccggaagattatgtgaagttcagaacattgtgggctgagcaaggtgatgagataagtcttgaatatgctgggactcatgcactgaaaggggatcttgttagatacggcaaacagacagtagctggatttataaaagatggaatgagtgcgttatcaagatactatgtgaacaattttcacgacggaattcggcaggatgcattggatcttgtaagtggtcgttatactgtcagtaaaagtaatccttcaccattccagctaaacagtttcgaatccttctcttatcttccagtggcatcagctttgctgataggaggtttgacactgacaaccttctcacttcagcaaggtatc

SEQ ID NO: 47001 - DNA, 471 bp, Gossypium hirsutum
  unsure (1)..(471): unsure at all n locations
  Clone ID: LIB3585-011-P1-K1-E3
cacactctagatcatctttcaaaaaaaatatgcaaggaaccaacgcaggcatcaacatagctagcttaatagcgtggggcatttcaagggtggaggcaagcctagcagctcgccatatacatcacgtgtcactaatcgaggcgctaccagtagcatcgccaatatcaccaccattgccaccactatgatctccgatcttgccaccaataccaccaataacatcgccaccaacgacattgccaccgacatcatcgccaccaacatggacaccaaccgaggcaccaatcgatgcaccaaccgagacaccaaccgatccaccaactgatgcaccaacactggctcgaatactaaagctaccaacaatgctaccatcttagcctacgtctatcactgagcttacacatgttcccacccatagctcgactaacatcccttctatgattccatntatacctccatcttcacctccat

SEQ ID NO: 47002 - DNA, 541 bp, Gossypium hirsutum
  Clone ID: LIB3585-011-P1-K1-E5
atttgattcagatatgaatgacagttctcatcctgaaggtatccgaagaaccactggagtatccaatgcagctggtggcaaggatacaattgcaggcatgctagcttcactcatggaagtagttagaacaactgtggcatgtgagtgtgtgtatgttcgggcaatggtgatcaaggggttgatttggatgcaaagtccgcatgaatcatttgatgaacttaaatccattattgcatcggagctctctgacccggcctggccagccacacttttgaatgatattttgctgacattgcatgcccgtttcaaggcgacaccagatatggctgtcacacttcttgaacttgcaaggatctttgccactaaagtaccaggaaagatcgatgctgatgttttgcaacttctttggaaaacttgtcttattggagctggtcctgatgggaaacacactgcattagaagcagtcactattgttctagacctcccaccacctcagcctggatcaatgtctgggtttacatcagtagacagggtatctgca

SEQ ID NO: 47003 - DNA, 545 bp, Gossypium hirsutum
  Clone ID: LIB3585-011-P1-K1-E6
cccacgcgtccgcaggttataacaaagcttctttatctactgaaccaaggagaaacgttcactaaggttgaagccacagaagttttcttcgctgtgacgaagctcttccaatcaagggatatgggtttgaggagaatggtctatgtgataataaaggaactatctccatcagcagatgaggttattattgttacgagctctctcatgaaggacatgactagcaagactgatatgtatcgagcaaatgctattcgtgtactttgccggataacagatggaactcttcttacccagattgagagatacttgaaacaagcaattgttgacaaaaatccagttgttgcaagtgcagccctagtcagtggtattcacttgctgcagacaaaccctgagattgttaaaagatggagtaatgaggtccaagaagctgttcaatcaagagcagcccttgtgcagtttcatgccctagcattgctccaccagatacggcaaaatgatcgactagctgttaataagctggtcagtagtttgacaaggggaagtgt

SEQ ID NO: 47004 - DNA, 543 bp, Gossypium hirsutum
  unsure (1)..(543): unsure at all n locations
  Clone ID: LIB3585-011-P1-K1-F1
cccgacttgaaaaatctgagcctcaaacccaagaccacttgaatccaaaattgacccaaacttggaattaattcaaaccaaaatgatctgaaatttttaaaatccaaattgagtagatctgaaatcaatttgactcacacaatggactggtctagtacaatatattaactagaaaaactatttatatcttctacttctgttttgagttatattatttatagtggtagaaataacttttaggaagttcttggaatttcccttatagagtattataaacttctagttcatgggaagcctctctgtattcagagacaagtttagcagtggatcatgttatggtgcttatatgggtgggaatgacattagagagccctttgatctaaaaatattttttcagcaggtttcacttttggaatgagtttttgctcaaacaaacccaaacattnaattgcatgaatggcattgacaaatatagctggtgattgaaaatgttcctgactattcttctcttgttcggtttagccatccttgcgggctcttact

SEQ ID NO: 47005 - DNA, 170 bp, Gossypium hirsutum
  Clone ID: LIB3585-011-P1-K1-G10
gcattactgaatgccaatgtgttgtgtgcccattttgtgttgtcgtatctaattaatagcaaaaatagcttattggacccaataatctgttgaacttttccatcttctaattaatcaattatttaaaatgaaatgtgtggaaaatattatattttcatgttttagttgtt

SEQ ID NO: 47006 - DNA, 545 bp, Gossypium hirsutum
  Clone ID: LIB3585-011-P1-K1-G5
ttcgtattgaaagtgttcacccaagtattgagaacttggctccaatgatgtcgatagaatcattattcatccctcaaactctccctcttaaaagttcttcagttgacagaactgcaagaaaatctacttgggcgtccctcaaatccccaaaatttcaaaggggcccttcaaggatcagaagtttctcagcgaagtcaagtttgggcttcgaaaatggtggattcaaacaggtcccaaatggggtcggtgaaaaagatggagttatcatcgtggaccatggttctcgccgtaaagaatccaatctcatgctaaatgaatttgtagccatgtttcgagaaaaatctgggtacccaattgttgaaccagctcatatggagttggccgagccatcgataaaagatgcatttggtttgtgtgtccaacgaggagcaaatcgcgtgattgttagtccattctttctcttccctggaaggcattggtaccaggatatcccattgttaactgctgatgctgcaaaggatcaccctggtgtatcttatataata

SEQ ID NO: 47007 - DNA, 297 bp, Gossypium hirsutum
  unsure (1)..(297): unsure at all n locations
  Clone ID: LIB3585-011-P1-K1-H2
cccacgcgtccggaaagactcggatcccgcaatggatgtggagggctcngatgtggttccaacatgagagccataggaaaaggaagagaaagacactcataatccgaaagtgagtcagattcaaagcgagcaatcaccggttcagtcaccatccggatcgaggaaatcagttcattggagtccggaattgatcagcgaatcgtgtgctgtggatcacagttccactcatgtcaattcctgacggatccaatacttacgttactcatgcttcttctacgaaatcttaaattgtttcct

SEQ ID NO: 47008 - DNA, 347 bp, Gossypium hirsutum
  Clone ID: LIB3585-011-P1-K1-H8
attgaaattggttgtcgatgcacatctggcctagggggagaacatactctagctctctgcctactggaggagctcctgctacgtccggctcagacttgccctcaaccctagagtgagggaacgagtacatcccgtaccttgcttaagcgagcatcacgctgttaacaactgaccgtatcgattaccgggctacggcgggacatgatatggaactcttggcacaatcatttctcaggagataaccctgacacccttgtggccttgatctgcgagaaagcctcatttacagctgcggatcagttgcctatacctttagccgacaagaatctacctactcctagatgcaa

SEQ ID NO: 47009 - DNA, 491 bp, Gossypium hirsutum
  Clone ID: LIB3585-012-P1-K1-A5
gggttaaatatgttctgtatgattaattgtttgactttctaggtgaagttggcaaggcaattaattcttcagaaacctagaatcattggtgttctgctgtttcttgaagataaggagtcaaatttgggttttaggttgaaattcttcgtttaaaatttgatgtttgatatatcaatttttgtgaattgggtgtgggaatcgtcttaattggtggtttaattattatttttaggttttggaaatctcatggttgcactcgcatcaaaatcagatgaagtgtgtaacgaaaactcaagaaattagcgaacgactgaaacccaaaattgagactgtcgatgccacacgggcgtgtgggcctaaattctgaaaattttccctagggttgtggttgtcgtgcgaatcgaatataacccttctgtagggcccgtatggtataaaattgcctataaaccatgatttttgatactctgttactgtttaatatgactagc

SEQ ID NO: 47010 - DNA, 513 bp, Gossypium hirsutum
  Clone ID: LIB3585-012-P1-K1-B1
ccgaccacgcgtccgcccacgcgtccgcccacgcgtccgcgactgtgtgtctgtgtaaaaatatggggaggaggccttgctgtgccaaagaagggctaaacaaaggagcatggactgcaaatgaagaccaaatcctcaaaaactacatcaccatccatggtgaaggcaaatggagagaccttcctcaaaaagctgggttgaagagatgtgggaagagttgccggctccggtggctgaattacttgaggccggacattaagagagggaacatctctattgaagaagaagagctcattattagactacacaagctccttggtaacaggtggtctctgattgctggaagattaccggggcgaacagacaatgaaataaagaactattggaacacaaatttaagcaaaaggatgcaaggccaaaaaaaggaatatttctccaaataccccccaagtttcttctcacaatgtgattaggaccaaagcagtgaagtgcaccaaggccgtcaatgttgat

SEQ ID NO: 47011 - DNA, 244 bp, Gossypium hirsutum
  Clone ID: LIB3585-012-P1-K1-B4
cgcgggctggcgtgctagcattccttattataaatctcattaaacctttatatatgctcgggaagagctggcaccaggatgagaagagatccaaacgttgctaaacaactaaaataggaccgttacgctcctggagtgacgaagatgttttactctacacagtataagagcttttggacattatagaacccattattacacttatcgaagtgaatacaagcattcttactagctagttctatga

SEQ ID NO: 47012 - DNA, 579 bp, Gossypium hirsutum
  unsure (1)..(579): unsure at all n locations
  Clone ID: LIB3585-012-P1-K1-C3
ggttcttggaaacgctcaatctgtcctataattctctagagggacctattccagaagacttcagtcataggttttcatctgattcattttggggaaacaagtatttatgtggaaacctaccagatttctctccttgcccttctaaatcaagcaacgagctaaagattgttcaaatcattcttccagttctctgttttctggccttcttgggtttaggagttttgctcttccttagatccagagccaaagataacattcctgaaccaaatgtcacaaaaaatggagatttattctcaatcttgaactttgatggaagaattgcatttgaagatatcattgaggcgaccaacgactttgacatccgatactgtattgggactggaggttacggtagtgtttatagagcgcagttaccaagtggaaagattattgccttgaagaaacttcatcgaagagaagcagaggtcctagcttttgacaagagtttcaagaatgaagcaaaaatattatcagaaatacgacacangaacttagtgaagcttcatggattttgtctccataatcgttgcatgtttttga

SEQ ID NO: 47013 - DNA, 492 bp, Gossypium hirsutum
  Clone ID: LIB3585-012-P1-K1-D10
cccacgcgtccgccttattctgtcattgctttacctgctacctctcggtttacccatttcattttcatccctaacattcaatccgattccccccctcgatccctcccattctgatcttttgcatattctgggactccctcagccaggtataatattcgtttatccctcaacgttgctttttctatcatatgcgcaaggctgtttactgctcttggaacatgttcaaatctatattcctggaaacttgattgtagcttatgaatatcactgatataggcacacacctttgatttatctgggatattagatctgcatttctttattatcgatagtgaatctccttcaataatgatttttctccatttcatttctttacctattttgatcgctttccggcttgcgagcgcctctgctgcaaaaggggatgccacctattggtaaatcatcgagcatgagagtaagaccttaccttcgttgtctctagccacaatc

SEQ ID NO: 47014 - DNA, 558 bp, Gossypium hirsutum
  unsure (1)..(558): unsure at all n locations
  Clone ID: LIB3585-012-P1-K1-D12
cccacgcgtccgaaaaaaaaccatgaaatcctctcgccaattcagctactcatcgcgttcaacctccacactagtctgcactgtcaacagcgaccactcaaattctcctcaacaacccaaagaaatccccatcgaaaccccagtcccaatcaccgtccacctccccgacgccgcctccgtcgcagccgcaaccaagatccaatcagtttaccgagcccatgtcatccgcaacctgtacaaacagatctcagacgtgaattcctctgccgaccgtctgcaacacttgatccaacgccaagaaacagtggacgctatcaggaacgaggagaaagagaagctgaggataaacgaaacgttgatgggtcttttactgaaacttgattcggtaccaggtttggatccgacggtaagggaagggaggaggaaagtgagccgtaagatcgtggggttgcaagagatagtagatgggatatcggaaacgaaagtggaggacgacnganagtggtggtgtggacagccgcgtgggatatttacgatgaaggattgggatgaagtggt

SEQ ID NO: 47015 - DNA, 378 bp, Gossypium hirsutum
  Clone ID: LIB3585-012-P1-K1-E1
ctgttggaaagaagtcatcacaaatttttgattcataggagtctgatccagagtggggcggctggactactagtcaagaattgagaaatccatccattagaattatttttcccactatcgagcaggtgaaaaatgcatgttctggcatctctccttcaaggcgaattcttttcttttcagagaaaacatggcaaagattgagaaatgtgggtatactacatgatgcaattccttctccctcgaatagagtagggcatccaatgcacgtaaaggtggcacggaggcgtttctggtccaaggcaagctcatcttcatctggttgggtttactgtgggtctcataattttagtgcagctgcctggtgaagacctatttcca

SEQ ID NO: 47016 - DNA, 508 bp, Gossypium hirsutum
  Clone ID: LIB3585-012-P1-K1-E3
caaaattcgcttttgggtttggtagatcgcttcacttgctaattgggatgttactattttctgagtgttagcaagcaggctaaaattcatgggggctgttctgagcttggctgcaccaaggagttcgataaatgactgcaacgaggtcttacaaagtggaacgtgcaagaaaaataagtcctcatgcttgaatgaagataactcaagattgattccttgtcttcctgatgagctgtcattgcagatccttgctcgacttcctagaattcactacttcaatttaaggttggtgtcacagaagtggaaggcgactgttatgagccctcaactgtttaatttgagaaaagaactaggaaagacagaggagtggttatatgtgttaactaaacttgacgaggaaaagcctctatggtatggtttggaccctttgtcaaggaaatggcagaagctgccatcaattccgagtgccggttttgaaggagattcccgaagagtttatggaacatgg

SEQ ID NO: 47017 - DNA, 493 bp, Gossypium hirsutum
  Clone ID: LIB3585-012-P1-K1-F2
ttttagccaccgcgatatcattatacgcaaacatgcttgttgccaagcttcatgaatttgacgggaagaggcatatcagataccgagatctcgcaggacaaatatatggtagggaagcttattatattacgtgggcattacaatatgtcaatctgttcatgatcaatatcgggtatctcattttgggtggttccgctttaaaggctttttatgtacttttcaacgaggaacatactttaaagcttccgcactttattgccatagaaggagttgtgtgtattttgtttgccatttcgacaccccatctctcgtctctaagaatatggcttggatgttcaacggttctcaacctgatatatatcattgtggcgtgcgtgctggcaactaaggatggactcaatgctccggctagagattataccatacattggacatcaaccaccaaccggattttttcaaccattggggcatctgcaaatctcgttttgaattc

SEQ ID NO: 47018 - DNA, 457 bp, Gossypium hirsutum
  Clone ID: LIB3585-009-P1-K1-A9
atggattgcaagaacacgctacattaccttaaagcatacaaggtggcgaaaagcgtcgaagtgaaatccagttccttgtacatatgtttaagtttaaaagggatcagacagcctggctgttcacatcaaggtaccaggggtagtgctgtgtcatgagagcagaaaccgcccggaagaaggaaagcaatgcctatcattctagggaatgaaaccttcgagagaatggcaacgatggggttgctgccaaactgcatggtgtgtacgatgaaaaatatcaacatgcaccaagtgtcaactgacagtgtactaactatcgggtccggtgtatctaacttgacaccactgatcggtgcttctaccgctgatgcttacgcaggaagatacgacaccattgttgcagcattcgtggatggatttatgggaaagcttacgataactttgacggatttggatccac

SEQ ID NO: 47019 - DNA, 525 bp, Gossypium hirsutum
  Clone ID: LIB3585-009-P1-K1-B10
atgagatcagatggaatagcaccaaccgacgttacattcctctctttgcttcatgcttgtagccatgtgggcttagtcgaaaagggtatggaactcttgaagtcgatgactgatgtttatggaattattcccagggcagaacactatgcttgtgttgttgacatgttacgccgggcagggctcctcaatgaagctaagacattcattcagggattgcctgttaaagctgacgtgcttgtttggcaagcattgcttggtacctgtagcattcgtggtgattctaaaatagggaaatatgcagctaatcagctgattttggaaacacctgaaagcccagtgccatatgtatcaatggcaaacatatattcttctcgaggaaagtggaaagaacgagcaaggaccattaagagaatgaaggaaatcggggtgtcgaaagaaattggtataagttggatagagactgaaaaagaagtccacagctttgttgtgcaagatagaatgcatccacaagcagagcttatgtat

SEQ ID NO: 47020 - DNA, 321 bp, Gossypium hirsutum
  unsure (1)..(321): unsure at all n locations
  Clone ID: LIB3585-009-P1-K1-B12
gaagcctcgccactattgagctcgagccccacaagacagaataatgaagatcaagatcaggatcagtgttcttggaccagagccatgaatgtacacagcaccaaagggaaagaggaaggatggaggatactctatcactaacacaattgcatcataagctgaacatgaaactgctactgttgcgctgcatataaaggtaccaagccatagagcttaanagctggctaaattgttatgatcttcctcaaagataacctataaagatggggatggtgatgatatttttgaatagcgcaaataacaagctcaacaagggacagt

SEQ ID NO: 47021 - DNA, 470 bp, Gossypium hirsutum
  Clone ID: LIB3585-009-P1-K1-B4
aacgaattaggctttcgtcttttatcagacgatcttgacatcagaacagcccatgaagtaccatcacaaataaaaggccaatctaatgatgtctcaccattaccatcccagaaagtgtctttaattgatattgttgatccacacagtataccaatggaaagtgagtctggtttggtgagtgaggaaaaaccaaaatcaattggtgtgtaagttgaagctgattctcaatacagggaggatgaggaaatgtcttcccatagaagctcacttttcataactatagaaactgacaaactttcggaagagttgcagcttgatataccggaggattagaaggcaaatagagaaaatttattgagagatagacaagtctggggaacaagaacctcatgttctagagcttaatgcgtattttttcttatgtgatgatgactctaggctacttgaatatttgactggtgggttaacaa

SEQ ID NO: 47022 - DNA, 445 bp, Gossypium hirsutum
  Clone ID: LIB3585-009-P1-K1-B6
cctaggcgttcgtttgggcgttggtatgcacatctgcattcagacgcttaccgaaaagacgatcactctgaaggtcgctagctatgacacgatctacaacacgaaagccaaagtgcaagacaaggtacgcgtcccggcaggcctgcagcgtgtcatgttacgcggaaagcaactcgaagaccggctgactgtaggccattacattatcgagaacgaattgactattgatttggttctacatctgcgaggagggatgcaaagcttgatgaagactttgaccgggaagaccattagtttaaaagttgatagtctagatgcgatcgataacgcgaaagcgaacattcaagacaaagatcgagttccaccaggtcttccaagggtgaattttggggggaaacatgttgaagatcgaatgacttttggtgggtacaatgttgaaaacgag

SEQ ID NO: 47023 - DNA, 500 bp, Gossypium hirsutum
  Clone ID: LIB3585-009-P1-K1-B9
ccctaatccatttgtgcagctgaacaagaagaagaagaagaagaagaagataagtactatattttcaagaatggaacgtattctgtgggtcgaaaagggtgtgatatcatcattcacaaagacaagggagtgtccagaatccatgctcatataatggttgatgaaatgactcaatcatgtcaagttcgaatcagagatttgtcaaagtacgggacattcattaacaagaatcttagttctaacaagaaagttcatcattttcctaataaacagaccttttgagaagatggggacctcctttcttttggaacaggaaatgcaacctttcgattctcttatgtgccgcttgtactctatatctgctgtgctgaggcctcccagatgaatcatcatcttcaggacaaagtttcatccattggtgctcgtcttactcatgtttacagtgaggattgtacacatgtgattgttgatcaacatgtgcccctgaaaagggatatgct

SEQ ID NO: 47024 - DNA, 437 bp, Gossypium hirsutum
  Clone ID: LIB3585-009-P1-K1-C12
gttagagcttcctccaaagctcaaaaatctatgtaaccctagtgtcctgcactctcactggtgaataccgcggaggtggctagcggtaacttgacttgcttcatgttgttattatggagtggtagcaactctgtgacaaataacatcgttaattaatatattcattcaaagcaaacatgggagaaatgtcaagctaacaatggagagttataggggccctgccaatgtctgtagcatgatctgactctattgtaatatgcaacaaagctttgatgagcaatcttggataggactttgctaccagactcactagttgggatgtaatggaaacattcagaaacattaatgctgcacaaagatccaatctgtttgagaataaatcaattgacatcaatactgtgatgctagttggcatacataatggaggttctaatgga

SEQ ID NO: 47025 - DNA, 512 bp, Gossypium hirsutum
  Clone ID: LIB3585-009-P1-K1-D6
gacaaaatgaagctcgagaggaggaagagaaaggaggagcgccaaagagaggcacaataccaaatgcatctagcatagatggaagcagctagggaaggaatgcctgttgtttgtgtgaatcatgactctagtggcggcccagctgttagggatattcatatggagaacttcaatgtttcagttggtggtcgtgatcttattgttgatggttcagttacactttcttttggaaggcattatggtcttgtgggaagaaatggtacagggaagacaacattccttaggtacatggctatgcatgctattgaaggaattccttcaaactgccagattctacatgttgagcaagaagtagttggtgatgatacaacagccttgcagtgtgttcttaactctgatatcgaaagaacccagcttttgcaagaggaagctaatttacttgcacgacagaaagaactggaccttgaagatgaaaatggaaagagtggaggagatctaaatgggatgcctga

SEQ ID NO: 47026 - DNA, 394 bp, Gossypium hirsutum
  Clone ID: LIB3585-009-P1-K1-D8
cgaacctttgcactagaagaactcgaggatgctacgaataacttcgacacaactggtttcatgggtgaaggttctcaagggcagatgtataggggtcgtttgaaagatggcacctttgtggccattagatgcctgaacatgaagaaaagccatagcactcaaagctttatgcaccatgtcgagctgatttcaaaattaagatatcgccatttagtcagtgctcttggtgactgctctgagtgctacttggatgactccagtgtcagccggatatttgttatcatagaatacgtgccaaatggcactatagggagctggatatatgaaggacatgcctgacgaacactgacatggcccgagcggatatctgctgcgatggggatcacaaagggca

SEQ ID NO: 47027 - DNA, 509 bp, Gossypium hirsutum
  Clone ID: LIB3585-009-P1-K1-E1
cccacgcgtccgaaactcagttacaccgccatcaagcaagatccacttgattccccgccgccgtccctacctccccggttaccgattccgccgccgttagcggtggtcaaaaccgaaccagaacagcaacaacgacagcaagaacaactacaactacaactgcaagaaaaagaacaagaagaacgacaaccccatttattaaaattcattgacgacctcacctccttctccactgcaatcgaagctttcaaatatagattcgacgaattaaccaaacacctcgatttcattaaccaagccattggctccaaattcaatgaacaaagcactcaaattgtaccccaaccttctcccaaatcaacgcaaaaagtaccccaaacagtttctccttcggtatcctcgctttatggaattggaaacctttgcgaaaggatgcgtagcaaaagagtacgtaaatatattattacccatttatcagatatcccaaagcttcgagaagaagtccctgc

SEQ ID NO: 47028 - DNA, 446 bp, Gossypium hirsutum
  Clone ID: LIB3585-009-P1-K1-E5
cccacgcgtacgcgatgggtgggattaagaaaagcgccgagaatctcagcgagcttataatgggagatcagatcgataactcaccttatcggtttcgaatgaatgtgaatgagtctctgtacctatgcactaccagtcctttgaacgagcgcgaggttaagcttttgaaacaaaggactcgagatttgtatcaagtgaatatgattctcgataatttgcctgttatgaggattacgaaacaaaatggggttaacattcaatggacgggattcccgattgggtatactccgccgaatagtaatgatgattacattatcaatcaccttaagtttaaaattttggttcatgagtatgaagggagtggtgtgcatataatccggaccggtgaagaagggatgggtgtgatttccgaagctgattatacgaatgcttctggttatgagatt

SEQ ID NO: 47029 - DNA, 423 bp, Gossypium hirsutum
  Clone ID: LIB3585-009-P1-K1-E9
agctgatctacctaactcatgtttactttcaacggatgtactaatgggaatgcgcgctcaagtataccttgccaatcccaatcccccaagcaactagctgccaggtgttagtgcaagcttggccccatgcattcggtcgaacccagctctacataccagaggagcaagtgacattgtttgcttgtcagatgatgactaactgctttgaaaatggggctgggatctaaatctaccagcgcacggtgagaaaatggggcctgactttgctgcggaattagcatttgtctaggatgtatatgaaccagcattgttcgtagctcatcgtcattggaactaggcaatatatatattcttctgggatatacttgagtctgcaaatatttctgaaattgtacgctaagctattcctgaggatctgaatga

SEQ ID NO: 47030 - DNA, 505 bp, Gossypium hirsutum
  Clone ID: LIB3585-009-P1-K1-F2
ataatttcttttttacttagtttcaatggctgctattggttcttgtttttccaagttttgttcggctgtgtttctccttgtgttcttccatggaagaaccaatgctaagctttcaaccaatttttactcaaaatcatgccccaacttgttacctactgtgaaattcattgttcactctgctataatgaaagaggctcgaatgggtgcttctttgcttcgcttgttctttcatgactgctttgtcaatggatgcgatggatcgattctactagacgacgatatatcgtccttcatcggagaaaaaaatgctgccccgaatcgcaactctgctcgaggattcaatgtggtcgacgacatcaagtctgccgtcgagatagtttgccctggtgttgcttcatgtgctgatatcttggctatttctgctagagactctgttacaattcttggaggcccctattgggatgtgaaactggggagaagagatgctaggactgcaagccaagct

SEQ ID NO: 47031 - DNA, 505 bp, Gossypium hirsutum
  Clone ID: LIB3585-009-P1-K1-G1
atttatcatgatactgccttaatattgctgacgtatcatatcaagcaacaaacatctgtcatgaagacaccaagtaccaaggtcgaatggttcatgagggtggaacctacaaaccgtggcggcactgaaatatagtatgggccatatgaggactgtcctccatactctatctctccaatacatgcacactttgagaataatagcctatttgctgacgttgaagagcttgttcaggaaatcgaaatatcacattgtggcaacattcaagtcacagagcattacacgttacactcatgcaggtgcccggcacaaaggtgtatattcaagggtcgattaccaatcaaggcgataatctaatggtgcatcttcatttagatacctgctggcaagattaccagctagggttcattctgtctactaccgggatgaaataggaaacatctcatcctcacatctgcgtacaaaatctttgaagtcggagctggaaaatgagccacgttattct

SEQ ID NO: 47032 - DNA, 483 bp, Gossypium hirsutum
  Clone ID: LIB3585-009-P1-K1-G10
aatgtagcttcatcatggagctgagcatccacaagaactggtcctgatagaatcccaaccaccaaaaatgacaagtataaaaatgccattatctgagcttatcttttgtaatgcagcaagctcctcttcaaataacaagtttttgaggaaaaagcattgaggttggagcccaaaagacagcaactttctcactggtcaaagcatcgcagtcagtatacaaagagtgaagatttcccagagactgaaaacccaaaaaaggacaaacatatcccattagagatattgccagaaaactagtagtgatggagaagcaagtagccccatagttttaggtaaagatgaaaggaaacccgaggaaagattacggtgggagagtgagagagaagaaagaaacgcaagagaagatggggtgaaggaagaactgaaggggtgatgttaggtagatcaaagaaaatgattcagtatgcttctgaagaaacaagt

SEQ ID NO: 47033 - DNA, 188 bp, Gossypium hirsutum
  unsure (1)..(188): unsure at all n locations
  Clone ID: LIB3585-009-P1-K1-H11
nccacgcgtacgaccacgcgtatcgccacgcgttttggccgccccggaaatttgaaaaaaaggatctcagggaaactcaactctcctccttcctttctttttcttctctctcagcaataaaatcctgtccatttctttctctctgttacccttcacaaagcaaagaacctcaaatcctcttttatcgt

SEQ ID NO: 47034 - DNA, 331 bp, Gossypium hirsutum
  Clone ID: LIB3585-009-P1-K1-H4
ataagaataaaaaggatccaaagagagagagagagagaggacataattaagaataaaatataggaaaaagaagtgaactatggtcaagaaatttctatataaattcatgcctctagtaacatattttgatcacaaagcaaactcaagtagttctaaaccctttaatttgtcccccttcgccaacatgcctctttatgtgccaaaatccataaaccttagcctcaatgaagagcaattgaaggctgtcttcagaaaacacgacgtcaatggcgatggttgtctaagtaaggacgagttgatgaaagttttccgtgaactcggatcccggaac

SEQ ID NO: 47035 - DNA, 386 bp, Gossypium hirsutum
  unsure (1)..(386): unsure at all n locations
  Clone ID: LIB3585-009-P1-K1-H6
cacgccgtnnccgctccctatcaaacgaatcttcacaaatcgataattcatattctccgctcttatcgctgtcnnntcaaatgtctgagggttgagtaatagcaaatgtctttctggctgtccaagtcgtgcctagtaacccggatggtcagtcagtatggggaagaatgaaattggacactgctccatagttnngtggtgaatgtcaacttttcaattctaggatcctacttgtaatatgcgccaattgcacctcannacctatggccagctgatctataattctagaatctgcgcgccaagtcctctacanagcacccacagaattacctcactcttctgcttccttaacgtagagtcccctggtgccaccattctttcaatgt

SEQ ID NO: 47036 - DNA, 442 bp, Gossypium hirsutum
  Clone ID: LIB3585-010-P1-K1-A10
cctactccaaggccatccaattttgaagaaaacaatacagtaatgtctccacgatttggattttatccagcacagactgttccttcatcctaccctgctccaaaccctgaattctcatccgtcacgaagaacgctaaagctacccaacaacaacagcagcagccagttcaaccacagcagcagcctaaggagaaggagaataataaagagaatcatgatgccaaggaattgcacatgtttgtgtggagttcaagtgcttcgccggtttcagaaggcggaggtctccatgtctatggtggtacagatttcggagcgtccgagcaatctggacggtctgagcagggtgctcaagagataaggatgttggtcgcagatcaccctgaaaacggggaaaacaaaggcatgacaagcagtggtgactgtaatggagaggactttagct

SEQ ID NO: 47037 - DNA, 294 bp, Gossypium hirsutum
  Clone ID: LIB3585-010-P1-K1-A7
cccacgcgtgcgccacataacgcatcgaatctgtggtacacgaagccaaagggcggcgccttcagacagcggcggcagcgctggcggcactggccaactgccatgaatcgccgaagccagaggagaagatggacaaggacacgaagctgtgcgacaaacggtgggaatcgaaacggtggctaaagtattgcagcaaccataccacttccgactactttcaaacttaccagaaagccgacctccttgccaagcgtaacacaccagctgcacatgccgccgggttctgggattacc

SEQ ID NO: 47038 - DNA, 459 bp, Gossypium hirsutum
  Clone ID: LIB3585-010-P1-K1-B11
cccacgcgtccggttggtggaatggggttgcttgattctcttttaggtgctgaaggaagaaaatccttcaaaaggaaagacagtgatgcaggtgaagcaggtaaagcattggaggagctgaggggttccctatacaatgagcttagaacatcagaaggagccaagcggcaacagcaacgattttgtggaccggtggtggcgatgacgttcaatttcttcgtggctgtcgggattattctaaccaacaaactagtgatggggagagttggattcaatttcccaatcttattaaccttactacattacgcccgatcatggcttttactagcaattttcaggacactttcatggcttccggcttaccctgcggcgaaaacgacatcttcctgatctattttcctgttgggagctataatggctttcgcgtccgggcctgctaataccagcttaaagaataac

SEQ ID NO: 47039 - DNA, 394 bp, Gossypium hirsutum
  unsure (1)..(394): unsure at all n locations
  Clone ID: LIB3585-010-P1-K1-B12
gnggccggcttcaacggaggagttcacgttctacatgaatgggcatgggctgggactccaaatgagggtgctgcttgactccgtatgccaagtctggcttacacttggcatcagattcttttgggaccactcactggaggtgtcattgatggaatgatgcatggcttactcgagatattgaaccaaataccggaattccagtcttcccaacaacaaagtttcaatttgggtgcttgggtcctccctaccgtaaaagcgttgcaagctgccataactctaggaaccggttgatctttgggaccaaaaggccctcatggatacatttggaagtcatgtgcccacggattctcattaatgattgcaaacaacagagaaaggaaaattgctcttgtgg

SEQ ID NO: 47040 - DNA, 254 bp, Gossypium hirsutum
  Clone ID: LIB3585-010-P1-K1-B6
aattcctttggtgaaggggaaaaaaaaaactgatcttctttccttatttccttctcatcagaaatcagagaagcagaaaatttcttcttctttattagaatcttccattctatctctctgcatgtgaatcaaatgtcccgccttcttttcatctcttcatttgatagtcttccttgttctcgtgcaattatattgaagccttttgcacgaaaataattcactaccagttgctcactctgcatggctattcaatc

SEQ ID NO: 47041 - DNA, 423 bp, Gossypium hirsutum
  Clone ID: LIB3585-010-P1-K1-B9
gttccagaatcgcaaatatgcgatgatgaagtgggacagatttggtaagaaaggttttgggctgaggatgctagagaatatatctgctggtcatttccttattgaatacgttggagaggtgcttgatatgcaagcttatgaggctcggcaaaaggagtatgcttctaggggtcagaggcatttctatttcatgacattgaatggcagtgaggtaatacatgcgtatgtaaaaggaaatctggggcgcttcattaaccatagctgtgatcccaattgtcgtactgaaaagtggatggagaatggtgaaatttgcattggactgtttgcattgagagatataaaaaagggtgaagaggttacatttgactacaactatgtgagggtatttggagctgctgcaaaaaaatgtcactgtggatcacc

SEQ ID NO: 47042 - DNA, 415 bp, Gossypium hirsutum
  Clone ID: LIB3585-010-P1-K1-C10
attacccctagctagcaaagtttcccgggaaaatgattcgatcggcgtgaaaaagaacactctaaccgggcgagatccagtaccatgaggtcgatctatgatccctttttaaacttacagaatcgaaagctttcctcttcaattatttcatggaaaatcgagaacaagcccgagacaaaaccctaattaccgacccgaagaaaatcaatgctgcacatgaaaatgtgcaactaattgaatgggaagatttcgacaacgagctagctagattgtggagtttaacttctgcccttaaggaagctaatgagaagaaacaaagtcttcaagagaaactccagtcactaattcaggtaaaaaatgagtctttgaataaactgaacgagcttgaggaaatgcgtgagagactcgaggcaag

SEQ ID NO: 47043 - DNA, 374 bp, Gossypium hirsutum
  unsure (1)..(374): unsure at all n locations
  Clone ID: LIB3585-010-P1-K1-C4
ccgcgccacgcgtcggcttatgtatatctactttgcagacttgatggtttgggtgggtggcaggaccttggccagttacatatccgaacttggacaacctaaaatacggngttggcaaaataccctttcacaggttacttgttccattcggatggttttttcatattgcatgggtttcggaatggccttattcgcatctcccaaatggaaattgctgcttggagttctttctattccaccccttatattttttatattaaccaatttcttttttcctgtgattccacgatagctcttaagggaaaggctcatgtgagagaggcaaaaaaagtttcactgactccacttatcgaggtaaattttgattgtgatag

SEQ ID NO: 47044 - DNA, 423 bp, Gossypium hirsutum
  Clone ID: LIB3585-010-P1-K1-C5
ccgggcctgcgatcccacgcgtcgccccacgcgtccgggccggacttcagcggatcacatacaacacagatgcatatgctgggaaaaaaaaaccaatgctcagggaattgttgcctgtatggagccttactctacatattcgatgatgtgtgaaacagtgttcctatcgtggactttcatatcgatgagccaacaaaagacaatgtgttcaaagaagtgttgacaacacgttcagcagcagttattcgctcaatgggatgtaagaaagttgaagtggcttgtctttctatgcatgaggcgactaacttattcttgagcaaagttggacacgacgtatcggtctaaactactttagaatcaggtatgcatcttgttgtggaggaatgcgatggacttcctctcgcacttgtgacactagctgct

SEQ ID NO: 47045 - DNA, 445 bp, Gossypium hirsutum
  Clone ID: LIB3585-010-P1-K1-D11
cccacgcgtacgataccgtgtatgtctatcttacttatgaacccttgctcttcacggcggctgtgttaattcacaggttaatcacaaacccaaatctcgaattctgtctcattgctcagcgaagctataaagacaatgactaaggatattgagactgcacagcaacgtggtgggcgagcctcgctcaaggactaccacgatccaccacctgctgcattgatggatgctgaagagataaccaaatggacgtgttacagggcagtgattgccgaggccattgctacactactgtgactgcatgtcactgagatgaccgtgacaggtgacaaggtccaaaccgaccctgctgagaacactgaagaccccgattgcagtggcctaggtattcatgagacagcttgggctatcggtggcatgagtcttgatgcaagtatactgcaccgat

SEQ ID NO: 47046 - DNA, 404 bp, Gossypium hirsutum
  Clone ID: LIB3585-010-P1-K1-D2
gccacacgtactgaaaatcctaattccatggcagtgggagaaatcccacgtgtacaagccgggcggtgtgtatatcaaatcgctggcgggtcttgggaggctgtatgtgatgaacatggcattgatgccactggtgactatgtccgcacttcggctgttcagcttgtaaggcttgacgattactataatgaatccagaggcggcagatatgtgccttgagctgcgagaatggatcttgagcccactactatggactgtttactagcagggcctcctggaaaatagaataaaccagatgactatgtgttcggtcaagatgggtctggcaataactgtgctaacggacattatactgaaggagctgaatggattgatgcagatattgatgtagcatcggaagaggc

SEQ ID NO: 47047 - DNA, 449 bp, Gossypium hirsutum
  Clone ID: LIB3585-010-P1-K1-E10
cccacgcgtccgggagaacagaagttcaagtcagaaattctgaacattgtggaaggaatgaatgtggaatcagtcttaataatcctgcatctgaatccagcccccgaataaacatgcccgaggaccgttgcagccatggtggaatcacaaagaagggaagggatgagctgatactgaaactacaaaatggctctgctcatggtctgaaccctgcatgttttgttgctacacaatttggctgtgagaagactgaagaagaggagaatgtgtcgatatattccgataaagttcaaattactattgaagatgaacatcatgatgcgtctcctcactcagggaagtctagttgcatttcagataatgattctagtcctataaggactatggaatctggaatgcaatcctgtaattcaactattcctgcttctgatcaatcttcgggaacccat

SEQ ID NO: 47048 - DNA, 344 bp, Gossypium hirsutum
  unsure (1)..(344): unsure at all n locations
  Clone ID: LIB3585-010-P1-K1-E11
cccacgcgtccggnggaacagacacaaacacccgacactcagaaaaccgagcgaagaagaaaacgggggccaggcttgatctttccttcttcacattcaccagttttaattctcatctcaaattcatattatttaaagatttttcaacaaaaaaaagtttatctgtctcaaatctaggtctacgaaaggagaagcaaatttccccaaacacccaatgaaagaatcccacgctattattattattattataatgattatcattatggcattgacgctctggctcaacaaaaagatcgaggatccccttatacagatcctacgcaagggagcacaacccaagcagt

SEQ ID NO: 47049 - DNA, 449 bp, Gossypium hirsutum
  Clone ID: LIB3585-010-P1-K1-E5
cggacgcgtggggaaacttgagatcttcttggccaaaggcgcacctggctgcttcacccgctgggcaaatgggtatacctgcaatgcccatttgtctatatcccttgcaaaagtctctatatattggtgtaatctgatcgaaattgggttgtatagacttgatacagcaccaacacatgagaccgcccatattagcaccatctgcttatgatccaaccaactgattttaaagcctgggagagaccataatacgcagacctcaagatgaacgatttgacttcaggctcttatactggctaagaacaagaaaacagtgctgactaccaccacgcagttcatatgacagaagagagtgcatcctacggtggtgaaaaccttgacatgtcctttgacgctgaggagtacatcaaagacgagctgattgagcttgcgaggctgaacgaccactt

SEQ ID NO: 47050 - DNA, 434 bp, Gossypium hirsutum
  Clone ID: LIB3585-010-P1-K1-F10
catttattgcagagccatctacacagtcgaattcattagtcggaactgaagaatacattgctccagaaattattactggtgcgggacacagtagtagcattgattggtgggctctaggtattttgctgtatgagatgctctatggccgaacgcctttccgaggtaaaaacaggcagaagactttctccaacatcttgaacaaagaactcaccttcccaagtagcatcccggttagtcttgcagctaggcagttgattaatgcattgttgaaccgagacccctccagccgtataaggtaaagagctgatgctgctgacattaaacaacactctttcttacacggcattaaattgggctcttatacgctgcacgagcccaccgtcattggaggtacctcttcaatttattaagaaagatactacaaacaccaaaga

SEQ ID NO: 47051 - DNA, 145 bp, Gossypium hirsutum
  unsure (1)..(145): unsure at all n locations
  Clone ID: LIB3585-010-P1-K1-F11
cccacgcggccgcccacgcgaccggggacagatgagaaggcgaaactgacagagacggggcacagaaaagcagnacagaggaagcaacacaggcnagccaatgaagagcgggatcaggaagancngatgaagcgganggaatcag

SEQ ID NO: 47052 - DNA, 347 bp, Gossypium hirsutum
  unsure (1)..(347): unsure at all n locations
  Clone ID: LIB3585-010-P1-K1-F6
gacccacgcgtcgcgaaggaagnngccataagacatcgcggcccttaccagagangcaagaagccctcaaagacctgccgacaaatgggttcaattcggatattaagaccttgcctgatttctatagggaccttaaaaaagacaaaactcaaaggtgcccggacattttcatagcaggttaccctggttcattatatggcagactattcccaaacaattgcttgagctatcatatatncttcttacagntcgcattggctctacaaggttcccccatcgctttncgatgagcatgggaagtttatcaacagagggaacgcttacatatcggaatcgaaccctacaag

SEQ ID NO: 47053 - DNA, 149 bp, Gossypium hirsutum
  Clone ID: LIB3585-010-P1-K1-F7
acgaagacgcatgggctgacgcttgagctgacgcatgggtgacatggagcgaccaagttacacggaggctaaccacgttgtgtaccaggtgatctaccctaccagtgctttattcagagcgactacagtgcatgcaacgtggatgcgcc

SEQ ID NO: 47054 - DNA, 431 bp, Gossypium hirsutum
  Clone ID: LIB3585-010-P1-K1-F8
cccacgcgtccgcaaaaaaaagctttctttgaagctcattataagacccttgctgctaggaaagcagctgccttgcttgaacaagctaatgctgctgctgccactaatgctactgaaagtgaagctcaaaacccaaaccctcgaatggcagaaactggctccatttatgattgtaaagagaataattcagaaattgtgaaggttcaaagcagctcagttgatgaaccccaagttcttttggagaataatatgaaaaatgaagcttttgaaaagaatggtgtggttgttgataaggctgaaattacagatttggaggttaaagaaacaacccaagtgaagaacaattgtgttaaagctaaccagtcaagactacttggagatgataaagaattggagcttagtgaagggactcaaatggagaaacctctact

SEQ ID NO: 47055 - DNA, 378 bp, Gossypium hirsutum
  Clone ID: LIB3585-010-P1-K1-G10
cggacgcgtgggtccaattcaagaatgtgaaatggagggacatgaagatggtgctgccccaaacgtaagcacggacaaagcggtggccccaaagcacttctcaacaccccttcatgctaaaaccactgcgaaattcaacgccaggaaacgtcacgagtctgctgaaaatggtggcgatggtgaagatggctctgtgtcttgcaacaagtgcaggcctcacttcagggagaagatctacgtggttactttagacaacaacaaaggagttaacaagcatacctgttccatggcacgtcctaatgggatattcaaggccatctttcatgatgtaacacggaggagtgccaaagaaactgatcgtgatacatccagagaaga

SEQ ID NO: 47056 - DNA, 204 bp, Gossypium hirsutum
  Clone ID: LIB3585-010-P1-K1-G2
ggtcacagaagctggcgctgcatgacagacttctagctctgctgagtcagacatgaatattgggaaccatgcgatagctccaagaagaatccgtttgcaactctctactgggccactgaatggctccgcaagctgcgtcgatggcgggaacatgacaagtgctggccttggtaaagaagaagtgcaggctgctctaactgaggc

SEQ ID NO: 47057 - DNA, 529 bp, Gossypium hirsutum
  Clone ID: LIB3585-010-P1-K1-G4
ggagaaggtactcgaaccattggcataattagcaaaatagatcaagctgcctctgagcaaaaagcacttgcgggtgttcaggctctcctgttaaatcagggaccaccaaagacagctgatatcccatgggttgctttaattggtcaatcggtttcaatagcttctgcacagtctggatcagaaaattctttggaaacagcatggagagcagagtttgaaaccctcaaatccatactaactggagctcctcagagcaagctgggaagaatagctttggtcgatgctcttgcacagcagattcgtaagcgcatgaaagtcaagctttcaaacctcctctccgggttacaagggaagtcccaaattgttcaagatgagttggtaaggcttggtgagcagatggtccagagtgctgagggtacaagggctattgcattggaactctgtcgtgaatttgaggatagatttctgcaacacattacaactggtgagggttctggatggaaaattgttgccagttttgaggggaatt

SEQ ID NO: 47058 - DNA, 351 bp, Gossypium hirsutum
  unsure (1)..(351): unsure at all n locations
  Clone ID: LIB3585-010-P1-K1-G6
cccacgcgnccgcccacgcgnccgnngcggcccacaccnngaagccgcccagnngggaagggcggcaggcnacagggcancgacccganncangggagacgagacggaagcacagaaccaaagccacagccacgaaggcggagcaaacggccggaaacccacangggaaggcaccccacgcagcagccgnganagccaccggaaaggcagggacagccacgacggacaaanganccaacgaaacanggcacgggacgcccccgggggggagagaaaggagccgaaaccgagggncacnggacgaananggaaggaacaacaaagaccagaggccaacangngcanaccaaa

SEQ ID NO: 47059 - DNA, 492 bp, Gossypium hirsutum
  Clone ID: LIB3585-007-P1-K1-B10
cccacgcgtgcgcccacgcgtccgatccagcctttgatgctcaatagagcacatggtgcgaggactactctcacatcaagcatcgacatgagagaccagggcttgggggaatatttctagatgctctaaatgacaacgatcaagagatgctgctgtcatgggccactggctgtgcacattccggggcacccgcatacgtacccactagagagaagaaggaagaatacaccattcactgacagccacacggcatggcaaacaatagcgaaagggccgatacattgaacctaactagggatatgatcgacgtacaacgtgcggactgaagactggaggctgcatcgagagcattcgaggctgtctacgtttaactgcacggagggaatacgagcatcaactcaaataggtgaaggaagtgggtaaactataatatgctggcatgaatcccaaggaatgagaaagagactaagtgggtgatgttttttatttttc

SEQ ID NO: 47060 - DNA, 515 bp, Gossypium hirsutum
  Clone ID: LIB3585-007-P1-K1-B5
gaattcggacaatgcacgtacgttacaggcaggtgagggtagcatcattccagaggaaagaactagtgatgtgcccaaatcatgtgagaataccaatggattattggaagatgaagtttcagaaaacaaggatgatgttgagaagggagttagcaatgatgtgggtttctttgattgtaacatatgcctggatttggcccgggaacctgttgtaacttgttgcggacacttgttttgctggtcttgcctctaccgatcattacataagcattctgatgcaaaagaatgtcctgtttgcaaagaagaggtgacaattaaaactctgatcccgatttatggcacggggaaagtcaaccttgagccataagaggactccggtcttaagatccctgctcggccaaatgcacggaagctggagagctggaggcaaactattcaaaggactgctctaaatctcccagtggaagagatgattcgccgccttgaaagtagatttgatttgacccgtgatctga

SEQ ID NO: 47061 - DNA, 503 bp, Gossypium hirsutum
  Clone ID: LIB3585-007-P1-K1-B8
cccacgcgtccgaaaagccggagattttgggcatcgaaatggacacaatcgaaaaccaatgcggcgctccagctatcaaagctttgggttctctctttaagctcactcaagttcacttatgggattatggttctaaggagattcgggaattctctttcttattatccgacaccattaaatcatgtacaaaaaatgataagaactgctcaagcatgtctcatgggagctgtgatttcagcagctcagtagaggatattgaattggctaaagaaatggatgctttgggacttccgctttgcttccacaccaacaagcagacaagtagtaaaatgactgttagcagaaagaagggtacacgtgcaaagcattctaatcgtcataaagatattgaagaagtgatggaattttccaaagtgagtgagatggagattgaatctcctatcttccatgataactcgagcagatctttttgggaatcatcttatcatgatgttgcagtgggt

SEQ ID NO: 47062 - DNA, 523 bp, Gossypium hirsutum
  Clone ID: LIB3585-007-P1-K1-C10
ggacttcctagtcttccccgtgtgagattcaataaggaaggaaacctcctttctgtgacaacagcagataatggattcaaaatacttgcaaatgctttgggtctcagatctttaagagcagttgaaacatcttttgatccattgagaacgccaattgtttcttctgcaattaaggcttccggctcttctgcagttgcaaatgttggtcctgtcagttgtaaagtggagaggagctctcctgtcaggccttctccgatgcttaatggagttgatcccttgagtagaagtgtcgaaaggccaagagttctggatgatgcaatagacaagactaaaccctggcagttagctgaaattgtggatcctggtcactgtcggttggttaccttacctgacagcacagatacctccagcaaggttgttcgccttttgtacacaaattctgctgtcggtattttggcacttgcgtcaaatggtgttcagaagctatggaagtggccccgtaacgagcaaaatccatctggaa

SEQ ID NO: 47063 - DNA, 455 bp, Gossypium hirsutum
  Clone ID: LIB3585-007-P1-K1-C2
ttcccttcttaatatgaaaaacatttgaccaagttaaattaaatttatgttttttcgacgtaattcaggaaaagaaaatttcttaatattttattatgagcaattagttttatctcaataaaaaaaatgaagtcattgataatggttcgcaaactgtgggggatgacacaagaaccttctggactaagggactcctatcaaagctgcttaatcacacccatgacgtctcatcatggactggtgggatcagttctggaggttttggtagtgggataaagccctatcgactaaaaacttatgatgggtggcttctttagggaaaccccttcgtagatactcttcgacttacataaaattattctgttggcatcatagagaaacacacagaggctctatttgtaagacctgagattgatataactcctgaaggcactgttgattcatccaatgatgat

SEQ ID NO: 47064 - DNA, 488 bp, Gossypium hirsutum
  Clone ID: LIB3585-007-P1-K1-C8
attgccagacccatgtctatgggcccaactggtgtagggaaaacctaactagcggaggcccgtgcgtgctacttgttcaatactgaccaagcccttgtcccaattgatatgagtgagtctatggaaaaacatgcagaatcaagactcataggtgctcaacccggatatgtggggcatgaagaatgaagacagctgacatacattgttcagcagaggccatatgctgtaattactttttgatgagatagagaaagcccatggagatgtgcataatgttttccttcaaatattggatgatgggagagtcactgattcccagggtcagactgagagctttaccaacactgatatcattatgactgcaaatgtgagttcacaatacattcttaactcagatgaggacacacctaaaaatatagcttatggaactatcaagcatatggtgatggatgctgcaagagcagtttttcgacctgagttcatgaatc

SEQ ID NO: 47065 - DNA, 439 bp, Gossypium hirsutum
  Clone ID: LIB3585-007-P1-K1-E12
tggagttccgtaggcacccgcccttcgaagagtcaagaaacccttctgcaccatgcgcacgcacgacaagatcctatatgcaccacctccactcactttatatggcgcacccttacaacgtcctgcttactatgatgctgctgttactcaagtaaatcgtcatgacaaacatccaccatgtcgcaacgtcaccggtctaatgctatatcaccacatcgatggacctcctccaacagctgatcatgatgcatatcggatagcaccggctctgtatcggcgtattaaaccctactagctaggtgtgtataagcaccttgaccgttacatttgtcagcagcctaccagctgtatcttcccatgactcaattagaggttatgtagatttgtctactcttcttgctattctctaatctgtctgctatttttatggtttttaata

SEQ ID NO: 47066 - DNA, 459 bp, Gossypium hirsutum
  Clone ID: LIB3585-007-P1-K1-E5
accaccgttaagaagaaacatatccatgggatactaaatgctgcgagtaggggaattatgttttcacttgaagctatgattgataggtacataataagcttggagtcatcagatgcagcttggctttatattcatgtgctctggcaaatattatcttatgccatagagatatgatggctggggaactggtcttaagctcgtaagtgcatactatggtataacatatgcgcgtcatatatacattgggattggcttaattcgtgctgcctactgtccagatcatttggttacttctaaggactaagatggactacaagcgtgcgattatactgtgacacataccaccatcagtttgggatacacgattcttggactaagcataatcaatgtgtggaagggctgcaatatctggaagcctgagcataagtgaagatcggcatatctgattgtgatcatggc

SEQ ID NO: 47067 - DNA, 530 bp, Gossypium hirsutum
  Clone ID: LIB3585-007-P1-K1-F10
actcagagctgactcggggattgactcagatacaaagttttagccacgtggctgactttttcattatcgaagtaaaaaatgacagtccactcgaggactttgagggacataatccacaaggctctaggttatcttattgctttggatgtacacgtggcatatttttgaatcgttgattgccggaaatattttgattgtaaaatattgtgtttgtgtataaatttgatcaaattaagttagttttttatttatatttttggttttatagtaattcttaattaaattgttcatttaattttttggcactaatttatacgagtctagcaaataaaatgaatataatgataaaactagcatttaatattattgtcaatttaggagaatgtaaattcgattgtatcgaagtgtattatactcttatttataggttgaaaaaatcatatataattgtaggtatgtcaaaaataacaaatatgattaaaatttataatgagattatttttaaaaaaaactgattgagttattacttt

SEQ ID NO: 47068 - DNA, 546 bp, Gossypium hirsutum
  Clone ID: LIB3585-007-P1-K1-F2
gtcgtgcaactgttgaaatcacagggcgtggcgaaagtgaagatattcgatagcgactctgcggtcctaacagctttggcaaactcggggatcagcgtggttgtctgtcttccgaacgaacagctcgcctcggcggccaatgatcagtcattttccgacggttgggttcaagccaacatagctaagtactaccctgcaacgaagatcgaagccatagctatcggaaacgaagttatcgcggagaatataactgacacgacaaaattcgttgtacccgccatgaaaaccatccaggcttcactggttaaattaaagttggattccaacatcaaagtctcatcccctgttgctatcagttgcttgggaaactcgtaccctgcatcggccggttcgttcaaaacgaaccaggtacaatctacgattatacccatgttggatttcttgagagaaaccgggtcctacctcatggtcaatgtttatcctttcttcgcatacaaagataacagtaaaacaatctcactcgactactctttgttcaaagacaat

SEQ ID NO: 47069 - DNA, 471 bp, Gossypium hirsutum
  Clone ID: LIB3585-007-P1-K1-F5
cacaaagatcagagctgaaaaaaaaattgagcttgactcttctttcttcttctctaccacgctgtgctgttggtgctatcatcgccggagatatacgttgtggccaaaatgaaactattggcgctacaacagatttatctaggtctgcagaataatagtttgagatcatcgggaccgatagattcttcttccgatggagctactaaatcgacggcggccggactttgtcttgtgcttcatggtctgacttgcttaatttgcttactccttgtgttccgattttctcgtttggttttacttttgttatccacttgttctacctatacctgaccgtgttatttctctaccgagcttgtcaaaaccctagatatacgctaatgtattcccgctgatcccgccgggaacgtgcagataccgcttcctaacaagaccgcgacgaactcatgggtggatgtcggtcgtcacatgatc

SEQ ID NO: 47070 - DNA, 540 bp, Gossypium hirsutum
  Clone ID: LIB3585-007-P1-K1-F9
cccacgcgtccgcggacgcgtgggttatagatgggtattgcagaaatcgtgcgatgtcggaagctttgaagatcagggatgaaatgctagaaaagggatgtaatatggatgttgttacttacaataccattttgaatgggttgtgcaaggagaagatgctcactgaagcagacaatctattgcatgagatgacagaaaggggtgtttttcctgatttttatactttcacaacactcatccatggacattgtagggatggaaatatgaataaagctctaaacttgtttgatgcaatgactcaaaggaatattaagccggacattgtgacatacaacaccttaattgacgggttttgcaaggtaggtgaaattgagaaggccaagcagctctgggctggtatgatttctagaaagattattcctaatcacatttcttatggaactttgataaacggggtttgcagcattggtcatgttccggaggcattcaggttgtgggatgaaatggtagggaagggtattaaacccacttttgtgattt

SEQ ID NO: 47071 - DNA, 527 bp, Gossypium hirsutum
  Clone ID: LIB3585-007-P1-K1-G11
cccacgcgtccgcccacgcgtccgcccacgcgtccgattgaatttgagataaaaagaccaaagagtgaatgggatcctataagtgtgaattatacctctggtacaacatctaggcctaaaggagttgtttatagtcacaggggagcctacctcaatactatcgcgacgcttttccttcacggaatgcagtcgatgccggtttatttgtggaccgtgcctatgtttcattgtaacggttggtgcctcacttggggtgtcgcggcacagggtggcacaaacatatgcatgaagaacgtttccccgagtaaaatatttgagaacatagctttacataatgtgacacacatgggaggagctccaaccgtcctaaatatgattgtgaattcatctgttagagagcaaaagcggatttccagcaaggtcgtgatatgcactggtggctcaccaccggctccacagatcttgcttaagatggaagagttgggttttagtgtgactcacttgtatggccttactgaaacttaccg

SEQ ID NO: 47072 - DNA, 109 bp, Gossypium hirsutum
  Clone ID: LIB3585-007-P1-K1-G12
gccgaatcggtcgacccacgctcctatacacgtagatctaaactgtggttgagatctgtgaaatggactcctgaaagtgtgtgggtagtatccggaactcaattatggc

SEQ ID NO: 47073 - DNA, 515 bp, Gossypium hirsutum
  Clone ID: LIB3585-007-P1-K1-H12
ctgcttctcttgttatcgaagagtttggtctcaaagaggggtatggtcctttgttcattagttcatttgaacgatttactcaagcatcttcagtaagggcccttaattcttcttatgtatgtgaccaagagcctgacctagtagaggcgtacacaaattttgcatcaacatttgttcgtagttctcgtaaggaagtgttggctgcatctggtgctcttctagaaatttcttttcaaaaggcagctatatgctgcactgctatgcatcgcggggcagcacttgcagctatgtcatacttatcttgtttcttagaagttggtctggcgtctttgttggaatcaatgaccttttctcctgaaggatcatttggggccacatcaattcaggttattttccatagtggggagggacttgtatcaaatatagtatatgctttacttggagtctcagcaatgtcacgggtccacaagtgtgcgacaatattgcaacaattggctgcattttgctgtttgagt

SEQ ID NO: 47074 - DNA, 463 bp, Gossypium hirsutum
  Clone ID: LIB3585-007-P1-K1-H4
cccacgcgtgcgctgacgcgctgactcacagatttatatttaaatgcctaactcatggccgtagcattgggaagattatatgagtgattcgaatactcacccttatgctaaggaagaggtcaaggatgaggtcaatccatcagcggagacaggatctgggcaaggaactggtcgaggaagtgcttgtggtactactaaccatactagtaaccctgctggagcatcaacggttacacccatgctttcagagccatatgaccagccatcaaaccgaggtgcaactgttgatattgccaatgatcttgacgcgggactgaaggcactataggcggaacttgctgcactggatgctcgtctacatgaattggtacaggaataggatgcataacacgatccataattggaactgaagacaaaaaatgggccccgaattttcctcctattcatcatgttattccaaatg

SEQ ID NO: 47075 - DNA, 428 bp, Gossypium hirsutum
  unsure (1)..(428): unsure at all n locations
  Clone ID: LIB3585-007-P1-K1-H7
gttggatctcgtctggagcgtgacagcaggcattaatcagagattgagggcgatgtttgcaggagtgaggaagacgggagacagcatggaaccatttactgatctgggaagagaaatgatcttgtgtgaacgagcacttaagtgaggtgataagaaatttactgagaacattagatcgtagcgctagaacgatatgtctatccgttcacagagaagagacttcgtctcttacttactatcgggagggtgagtatacgctagatctgcggatagatctgctgctnaagatgatcccctgaatgagatgagctgcgaactgctgaagctgcagtatccacaagctcatctgaagcagagagatgcgtttagtggtcgtcctggcagcctgtgcttgttaccatctatgaggaaactcttgactggatcaa

SEQ ID NO: 47076 - DNA, 413 bp, Gossypium hirsutum
  unsure (1)..(413): unsure at all n locations
  Clone ID: LIB3585-008-P1-K1-A12
ctacctctatannatcnaatccgatctgactattctgtgtatcgatagttgtaactcactgggatattgattctatttgtgggtacattgttttctgcctttttatggacctagatctcatgggtacatgagaatttgtgaaggagattgctgatattgagttatagagtaggctaccatagatggtggcattgatgtaaattatcttgctgatcaaatcatagtagccatagaagctcgatgtaccaaaggattagcatggtgaacttggcttatattgaaatagttactgtaacaaaatgcatccaatatggaatgccaacaggggccggaacggtattcaacagctgctagctacggaactagatgctcagcatattgtcaaagctgcatgaaatgcaaaattggctaga

SEQ ID NO: 47077 - DNA, 215 bp, Gossypium hirsutum
  unsure (1)..(215): unsure at all n locations
  Clone ID: LIB3585-008-P1-K1-A2
ctactctttctttgtatnttnntccatcaaaaagaagcaagctagaattttagggagcacaactgcgcccggccaagtttcgctgttcagtgacaatggccattgtgaagattgtgatggttgaggttatcatggcagcttccctcggagggaatttgggtgcattacaagtgcactatgtggtcgaaggtgaccgtgggtgggatgtttcctct

SEQ ID NO: 47078 - DNA, 151 bp, Gossypium hirsutum
  unsure (1)..(151): unsure at all n locations
  Clone ID: LIB3585-008-P1-K1-B1
cgattgnnaaattttctttctcgatnnttctcttttagcccaaaaaaagatgccaganntcttcgtcanagacctctaaacnncggcaaggaacgatcaaactctcgagggtcgaagaggctcccgacaccgaatcggaaaaacgtgaaag

SEQ ID NO: 47079 - DNA, 228 bp, Gossypium hirsutum
  Clone ID: LIB3585-008-P1-K1-C12
cccacgcgttcgcggacccgtgggtttatgagtaaatttaaaaataataaaagtaaagtatgaatttggattggaacgaacaaaataagattttcatttcatttgtgagatcggattgtgttgaaacaaatagctaacaagctttaaaaaatatgtgttgaaataggaaattactatcatgagcatattaaaactgtatcgtactttgaaagcagtatttagagattc

SEQ ID NO: 47080 - DNA, 530 bp, Gossypium hirsutum
  unsure (1)..(530): unsure at all n locations
  Clone ID: LIB3585-008-P1-K1-C2
cccacgcgtccgaggccntcnnnggcctacacaactgggacaagaaagagaaggaaaattcaaaccgaatgtgacttacaaggtggagaaacaaggtggcataaaacggggaagacaaggccagtcatggtcaatggcaaacaaaaagggtgcaagaaaatcttggttctctacacgaattttgggaagaaccgaaaacccgaaaagactaattgggtcatgcaccaatatcatcttggtcaacacgaggaagagaaagaaggagagcttgtggtgtccaagatattttatcagactcaaccaaggcagtgcaactggtctgatcgaactaatgctgccacaactgttgatggaacgaccaacgtggtcatctgccaccctaataatatcagacgagatagtggcattcgaagttgttcttcaaaggagcaattaatccctcttagagatgaagtgtccggagctgggattgccgccgttgttttatcaaggtttgcctttggcattggatatttaaaaactttgaaatc

SEQ ID NO: 47081 - DNA, 452 bp, Gossypium hirsutum
  unsure (1)..(452): unsure at all n locations
  Clone ID: LIB3585-008-P1-K1-C3
cccacgcgtccgcctcagttnnnncggttcctacttcactcaagatattccattgcctgcaggaacaataattgactttcagcggacagctgatggacacctaattaccaaaatcggaggtaaccagattggagcagtccatagcaaggatttatgcagggctttctttgacatgtacatcggcaatttcccagtgtcggagcaaacaaaagaagacattggccagaacgtggcaaacattataaggagatgctgaagtggcttgttttccgtcgccattttctcaaattttaaatgagcaaatggctagtggcatgaggaactcaaaatcttttatggatgtttatacgggtactttagaggaagtgggtgatgaacacaagcaatgggacaaccagaaaacttaaatgttctatgggttttgttagggtaggttttaattattactacat

SEQ ID NO: 47082 - DNA, 369 bp, Gossypium hirsutum
  unsure (1)..(369): unsure at all n locations
  Clone ID: LIB3585-008-P1-K1-C9
cccacgcgtaacgnnnnccgtgctgacacgcgtccgtgaagaggaaggctaaattgacattgacatgagccccaattgatcagcacaaccgatgacgacaccggatgggctagaacgccaacccgtgtctccaaggctgccaaggtgggaagcggaatgtgagggtctagactgtgccatactttggtaaggaatggagacatagcgaccctgtttgactatgccaggggttctggtggccctatgtattagagtggagagatgagcgaagggcggagagagctggtagttgatcatggtgctgcttacttaacaatgtcagatccagctatggcatgggttgttgctgccaggtaagcaacaagcctt

SEQ ID NO: 47083 - DNA, 433 bp, Gossypium hirsutum
  unsure (1)..(433): unsure at all n locations
  Clone ID: LIB3585-008-P1-K1-D10
cttacacttcttccanncttatttcccagccccagcgccgctcgtttcgcggccgggttcagcggcgccgtcacttcgatttcttctgtttgcttgttcttcgctgcggccaactttttgtactcagctggcccgttgcattacgaaatggcgcagcggatggtggggtcggtttatgattggtcgtcggtgaagctggcgcttgacattggatgcggcagatggattcttctcaactcggtggcgactcagctgaaaaagactggtagttctggtcgggttgttgggttggatcgttctaaacggactactttgtccacgctccgaacagccaacgttgaaggtgttgggggagtttgtaacgtgcatagaatggcgtgtgaggtgtttccctttctaggatatcttttttgacctggtggttaaacccttg

SEQ ID NO: 47084 - DNA, 296 bp, Gossypium hirsutum
  unsure (1)..(296): unsure at all n locations
  Clone ID: LIB3585-008-P1-K1-D12
cccacgcgtccgcttnnnctctagctactgccacttcttcttcctcctttatattctgtgctgctacaaagtgagattgtttgatacatcgtacgtttccatcatagttttcaatcactcatcatccccagacctgagaaaaacacacaagaaaaaaagtctctgttgggtactgcccggtaccttaagtaccggcggaacggacgaattttgaccgatacaactggtaccgaacgaaacttgaagtggaacggaattagtgggtgagtgtcccggtctcttactggaacagagta

SEQ ID NO: 47085 - DNA, 361 bp, Gossypium hirsutum
  unsure (1)..(361): unsure at all n locations
  Clone ID: LIB3585-008-P1-K1-E11
atagatatagatcnnnnncggtcgatctagtaggatatatagctgaccaacgcttgcatgctacgcaataaattttgtatagaagcacctaacttcaattaaatggatgatcgatatacaacacaagtacaggtaaaacccagctgtacaacatagagaagctattagatctacatgaacgtataaagggcgaactgttatatggctaaaggtcagaaccaattgaagattaaaacatgttgcacatgatgtataagtaatggcatactccatgttgtataccattaaaaccggtgattgaggtggactacgcgcagaaagaattctttagttgcaaagtccctaaccagaggtcttttaa

SEQ ID NO: 47086 - DNA, 461 bp, Gossypium hirsutum
  unsure (1)..(461): unsure at all n locations
  Clone ID: LIB3585-008-P1-K1-E2
ggtcaaatgaattagaccttttntgtgactgaactggttgaacttgcttgttcgcttaaatggggtgtttaaatatttaaaaaaaatgattttaatgctaaatgaacattaaatatagtaaataattaataaagatgtatatttgacttagtggtattttctttaatatcatcaaggttcaaatctcatcatttaaaaatgaaaataaaaatatattctaaactagttctctaccgttttcttttgcttgatttttacctgttgaactttctttttactctttcagctagtgaatggtttcataatgtactggaccattggttcttggtccaactggtttaacaggctggtccattcaaacaactcttggtttggagtaatgttcaaccagttgtgttctggatgtgacccctgatatttcaaactttaatgtgctttgctttttcctttaaaaattgctt

SEQ ID NO: 47087 - DNA, 131 bp, Gossypium hirsutum
  unsure (1)..(131): unsure at all n locations
  Clone ID: LIB3585-008-P1-K1-E4
cctacgcgtncgtccacncnnnnnagctgcgtctgttggccagcgcttgtatggctcaagcaccgacagtagcacccacattatacggacccacatatgcaccaccgccaggtgatactgcaaccgctacc

SEQ ID NO: 47088 - DNA, 455 bp, Gossypium hirsutum
  unsure (1)..(455): unsure at all n locations
  Clone ID: LIB3585-008-P1-K1-G11
cccacgcgtccgccnnnccgtccgcttgtgggaagatgatgaactttcctccttactttcaaaggaagagcaaaatcaaatgtacaattgccttcaaaccaataggaatctagctgtggctcgctttactgctgtggattggatgttgaaagtcactgctcaccattccttctctgctctcactgctgttcttgctgtcaattatctcgatagattcttgtttagcctccctttccaaactgacaaaccatggatgactcaactaggtgctgttgcttgtctttctctagcagccaaagtggaagaaacccaagtgcctctcctactggacttacaagtggaggagagcaaatattattttgaggccaaaacaatccaaagaatggggatttttggtgcttttccacacttcattgggaaaggaaccctattaccccaatttcatttctttgatt

SEQ ID NO: 47089 - DNA, 293 bp, Gossypium hirsutum
  unsure (1)..(293): unsure at all n locations
  Clone ID: LIB3585-008-P1-K1-G4
ggcgaccacgcgtccgcccacgcgtccggcaatgaannnaacggaagaagaattatgaatttgtgaacaggcaacttcttgacagggaaatagatctgggtacctttgtacaaaagtacaagaagctttcggactagttaccaccggcgagctctcattcatctcgctgctaaaacatcttctatcggatgaaacggagattgatatttgattgtatctgtataaacttgatatcgacagattgttgcttgttcttgcttggcttatgaaatcatatattttgaacctttcaa

SEQ ID NO: 47090 - DNA, 427 bp, Gossypium hirsutum
  unsure (1)..(427): unsure at all n locations
  Clone ID: LIB3585-008-P1-K1-G9
attttggtcaaanttnccatgctaaactacagttgtttttacactgcaattctagaagaggggggatgaggtcatctctgcagcttccatcatgatccatggaaaccagttagctgagatgcctttcattggcacccggtatgcttataggcgtcaagggatgtgtcgccggcttctttgcgcaattgaatctgccctcagatccctgaatgttcagaaattggtcatacctgcagtcccagaactcagggaaacatggacttctgcctttggtttccaaccacttgaaactgctagcaagccgaagatgacgaacatgaatatactggtctttccaggtgtagatatgtctagataaaccactagctttcacactgttatgcgtggagcatgaattattgggcataggcttaccttattaaatctt

SEQ ID NO: 47091 - DNA, 414 bp, Gossypium hirsutum
  unsure (1)..(414): unsure at all n locations
  Clone ID: LIB3585-008-P1-K1-H12
cccacgcgtcctnntnnngctatgaggagtctcttgccaaaactaagcttcaaggctagaagtataagttcggatattgaaaaggctgcaaacttggctcccgaatcttcgattacttctctaaaagagaagccttccatgtcgaggacattgtcacttaacaagatatttactcccatgataaacagaacatcttccttgcctgtaactcaaactgcaaactcgaacccggaatctgcaatcgggggaagccttggtggctctagtaagggaagcatgcggaagatatctcgctcgttttcagttcccgtaaacgaaaaataaggaaaattaaggagaatggattcattctttcgagtggttcccctaactacgcgagcaaaggaatgtgatattagaataaccccttctatc

SEQ ID NO: 47092 - DNA, 239 bp, Gossypium hirsutum
  unsure (1)..(239): unsure at all n locations
  Clone ID: LIB3585-008-P1-K1-H6
ctgagattacaactgatgattnnttccaagcagcacatatagaagaaaggggtatgctagataggaaggagagaagtccagagacatggaaacaagtggctataaatgaagcggcaatggctgttgtagctgtgaactttcctgatcttagaaatatcgaatttgtaacaattgctcctagagcaagttgggaattaggttatgttcggatgaaaatggatcatatcataattactaaa

SEQ ID NO: 47093 - DNA, 516 bp, Gossypium hirsutum
  Clone ID: LIB3585-009-P1-K1-A10
attttgttcttcccgagaattaaccctgctctttctctttctctttctctttctctttcattgaatttttttaatagaaaaaaaaagatttaatttgaaagaaatgagagatgaaaactaaatacttctttttttctatgtgagtgaaaaaaaaagagggaaaacgaccatagaaaaaaaaaggagttgccaatgccttttgattgtcttactctttgagctttgaagccatggccgacgatctgagtttcttcagcaaggattctttcatcctaaagctgccaaagaagtctccattggtgttgaggatggttgtgtcgttgtttgcaatggtttgaggagtgtatatattctcaatttgtttgaagcaaataagcaccagcagcacgtttgagtttttgaatatcggagtgattcaaaagccttgtccagaacctaatattgagccatgggaaattccttacgtgcactatcctaaccccaaaacttttagcagggccgagtgtgcatgcaatc

SEQ ID NO: 47094 - DNA, 232 bp, Gossypium hirsutum
  unsure (1)..(232): unsure at all n locations
  Clone ID: LIB3585-009-P1-K1-A11
ancaaagganncncnaacaattctcnacaattttctttaaaattatctcctatacccccagagaggtgttgctaactcattatcgaactttttataaatttatcaagagagaaattattaacataaataaaccatgatagtaccaaccaacttcatcgaccagatacattgcggcaatcttcttataccacatagacgatctacttgacttccctaacgaaaatgtcaaatc

SEQ ID NO: 47095 - DNA, 431 bp, Gossypium hirsutum
  Clone ID: LIB3585-009-P1-K1-A12
atgacgcgtgggctgagacaacaccctcttatatgtgtctcactagcgaccggtagccacacggattctgctgatggtcgacgtatattcgaaacacaagcaaccgcatgatagctactacaaacggctttaatattctaaaagcgcgaagagtctaagtacaaagagcctgaatacaaacaggcaatgtctaaccattaggactgaaaacctgataagactgtgaagcacatggacgaaaaacagaaactctgcaaacaggatgatgagttcctcaagttacacgaatcatatgcacaaaaagagtacgatggagaaaatctcgagttccacaaatgggaaaagccttaagagcacgaaaaacacgaagtcaaatatgcacaaataccacagtacaatgtaaaacatgatgaaggcattgaacataaaca

SEQ ID NO: 47096 - DNA, 530 bp, Gossypium hirsutum
  Clone ID: LIB3585-005-P1-K1-C5
cccacgcgtgcgcggacgcgtgggaatgaaatgaaatcgctttagccctgcaaactgaatcacgagcgataatatactcaacagtctttctgcatagatggcacaagcacaacaaaccagggaaagttcatcactaccaagctgtgaagcttactttgagaaagtaaattccaggaagaaattaccgcaaccggtgcaagagactctaacaaccgcttttgcaagaatccctgtttcatctatcccgcacgttcctgctggcaaagagattgaaattcaagcagacacaacagttgccgatgctgttaacgttctatcacattgcaacattttgtctgcacctgtgataaacccagatgcagacactagcatgaactggagggagaggtacttggggatcatagatcactcagcaatagttctctgggtactagagactgcagaggttgctgctgatgctttatcagccaacacagctacaggctgtggtttaggtgcttgagctgtcggtgctcttggagcattagcag

SEQ ID NO: 47097 - DNA, 315 bp, Gossypium hirsutum
  Clone ID: LIB3585-005-P1-K1-C7
tcctttagcctcccaggccggcatgggttcatcggaagggctccacttcgctccggaacgcaccggatacacgaggggcttccttgttcttctcgacggaggtcgaagacagagccttgcggccacacaacggagagagagaaggccccggcggtcgtcgaccccaaacaggatcgggttatcttgcagtgtcaacctggaagcgtggtgtgccccagcgcgatggggcgcgtgaggccaaggcaagggagggcgtgaatctgtgggaggttttgtgtgaaaatgtcagttggggctgggggcttaggtttgata

SEQ ID NO: 47098 - DNA, 237 bp, Gossypium hirsutum
  Clone ID: LIB3585-005-P1-K1-C9
agacactgtacacaactggatcggctcgcaacacatattcttatcacctgctatcgtgattacgaagtgtttatgatcattacacactcattacatgtcacatgttgattggctattctgtatcgctctaatctagatcgttatcggctgaagggatatgtgaaaactgttttaatgcttaggctctcttctttgcccaactttctggatataccagaatatttgtttatatttcaa

SEQ ID NO: 47099 - DNA, 211 bp, Gossypium hirsutum
  Clone ID: LIB3585-005-P1-K1-D10
cagacgcggaggcgggcgcacgcgggtcttggagcaggatgggtcactggcccgaagtgcaggtcgagctcgactaaatgtcttccttctagaacggcttgttgacggtgggacatatggttcatataggcaaggaaaaacgagaaacttgctctaggcagagttcctaatgttgtaaaaacgcgatactatcaccggtgctctagtcata

SEQ ID NO: 47100 - DNA, 396 bp, Gossypium hirsutum
  unsure (1)..(396): unsure at all n locations
  Clone ID: LIB3585-005-P1-K1-D11
cttggctttggctacccgcgatgttnttgctttgtctggtggnccttcttatgctgttgaattggggagattggatgggttaagctctacagctgctagtgtcaatggaaagcttcctcacccaactttcaactagaatcagcttaattcgctttttgcagcaaatggactcagccaaactgacatgattgctctatcagcggcacacactcttggattctcacattgcgacaagttttccaacagaatatacaattttagccgtcaaaatgcagtggacccaacgctcaacaaggactatgctactcaacttcaacaaatgtgccccaggaatgtggacccaagtatagccatcaacatggacccaaacacacccaggacatttgacaatgtcta

SEQ ID NO: 47101 - DNA, 478 bp, Gossypium hirsutum
  Clone ID: LIB3585-005-P1-K1-D12
caatcatgaaaagcttgtttccaggagtgatctgcattgctatataaaagaaagcttacagaaagaaaaatgaaagatagtttatttgtttggatatgttcaattagtcggaatagagttaagatgaacctgtagacatagctttatacaatattatttttgctgtcaaaccttagagttggtcggttggacagcatatataatatatgtattcgaaattgatgatgatgataatgattggattggtggggcaatgtaacagctgttctgctgtggatcttgatgacatgaggtatgtttcttcaatatattaactactttatgttgttttgatattttattaactactggatgtgacatacatagtcctgtcctggttagatgatggtttaaacgtaagcaaggattagacatcttatattaaatgcattttttggttgcttttctcatttgtcaatttattttttcaataattaac

SEQ ID NO: 47102 - DNA, 200 bp, Gossypium hirsutum
  Clone ID: LIB3585-005-P1-K1-D8
aaatctggaaatatagttggggtgggggagtcagcagttaagatttgccctggtaagaggaaagtggattcttataatgttgattttgaggttttcgagaaggctataaagggaggtattgttcctccatttgcttcatcggagaatgaacatgaaacccaccttcctgccagagaaaagcagtttgagcatgcttagat

SEQ ID NO: 47103 - DNA, 514 bp, Gossypium hirsutum
  Clone ID: LIB3585-005-P1-K1-E3
gaaattcccatctgtaactgcagctcaaaaagaagtgggtggctcttattatgttgttaggaaggttcttcaagagttggaatataaatctaaaatatgctcctcaaacagcagttatgaaaatttatcagcaaaagctgccaataaagtggataaaccattttctgtagttgaagtgatctcaactgcagtccaagatgacacttgtgcaagagctatggatgatgtaaagatgcatgacacaaatgacaagcaactggaggctgacagaggtagttgtcatgattttgttttggaagaaaatagtgtgctgaaagttgatgctaagggccttgagaaacaagaggatgctaaagtagggggtcttgagatggatgattctgacaattttctaatatttccagacaaacaaaaaattgtcgaagctactgatcaagatcttgaatcagacaagctgtttaaaactgaatcttaaggtgttcaatctgagtttggtgtagtcaaagatgatcta

SEQ ID NO: 47104 - DNA, 142 bp, Gossypium hirsutum
  unsure (1)..(142): unsure at all n locations
  Clone ID: LIB3585-005-P1-K1-E7
ggggnnnggcccggccctggttttcaccgtgttctgtgngcnctggcgcccggtgngnggggtcgtgtccgtncctttcttcnccnccccggtcgtgccccngtcctgtcctggntgggnngccgnggttgcctgtgtggtt

SEQ ID NO: 47105 - DNA, 476 bp, Gossypium hirsutum
  Clone ID: LIB3585-005-P1-K1-F12
cggacgcgtgggttcgatgcttggccaacaaattctagaagtcctcctaccaggtcatagctggctcctttatgtagcgctgcttgcgccagagtatgagcgtagaaattttctgcttggggtatgaaatgaaactttatatctggaaatctgcctgtattatgctgaatatctatgatgatcgcaccgatgttcgatttgtctatctctgagttctggcataggacaattacagcctgtgaatctgccaaaattgatcagtttattaagacccatgaataaccctaacttgactgcttgtaaccgtacatgcgcctatgtcacatatggatttgcgatttcggagtggatggtcagatttgatgctagaattcttcctctcgcgtgtcatactaacaggcctgaggccgatctaaaggctagttggtcaaaggccacgtcgaaataaattgcgacccctgatctccttctttcct

SEQ ID NO: 47106 - DNA, 294 bp, Gossypium hirsutum
  unsure (1)..(294): unsure at all n locations
  Clone ID: LIB3585-005-P1-K1-G10
tcccggtcgccccgcgtccgcccgcgtcgtccctttttttcctgcttttctcctcccnncgnntctgtgtctttcttgcgcgcggcggtgggcggcgtccctcgcgcngtttgcttcnccccttntccttcgcttcttctttttcgtcgccccccccctctgccctttgctcggcttgtttgctggggtgcgctgtttctcggcctntgttcttgggtgtgtggtggtgtgcngnncttggccgcgcttgnttccngcggggggttcngggtctttcctgtgtttcttgccctg

SEQ ID NO: 47107 - DNA, 164 bp, Gossypium hirsutum
  unsure (1)..(164): unsure at all n locations
  Clone ID: LIB3585-005-P1-K1-G4
gcccacgcgtccgnngagatggtntnntntccacttnaaatttgacatgagtaagcagccatgctgaacaggatagagaagtctgcacaaattacaaatcatcaatttctgcacccatcatttattgcagtggttcaagatttgtgcgttgatcatgatgtgaa

SEQ ID NO: 47108 - DNA, 261 bp, Gossypium hirsutum
  unsure (1)..(261): unsure at all n locations
  Clone ID: LIB3585-005-P1-K1-G6
cgggtccgaccccacgccgnntccgaaaatctgtgattcaaacgagggaccttcctcttcaactataaactctcttttgattcgaggaaccaaaactcgcgggtgcgtttttttttcttttgcgtgtctgtcgaccagtgtttannatcgcaaatttgtagcttttttttggggggagtgtttngtgggtcgggggggtggtgagtggggatntgaggaagacgggtgaggtgagaataccgtgtgtgggtattgtgggca

SEQ ID NO: 47109 - DNA, 373 bp, Gossypium hirsutum
  Clone ID: LIB3585-005-P1-K1-H5
cttggccgggaaccggacagtgggcaagctgacagcatctgaaacaggaatgctgcgtgttggggtcggagcgctgtcacctagcgaggccgaacgaacaacttacatatcagctggtgagaaagaggatcatacatcactcctgacagctggcaaaagaatgaagacaatggcactagagtgggctgaggatcatgcgggggtagacgtattgggcactactgcaaacatctggccacatagcgatcataatctcattaccatgaacagcaggaggtacggcggagaattatgacgccttaaatggatgttcagcgatttgaaaccgttaaaatgacgacagatggaacataaccacggcacaaggatctga

SEQ ID NO: 47110 - DNA, 429 bp, Gossypium hirsutum
  Clone ID: LIB3585-006-P1-K1-A11
cccacgcgtccgaaaatctctagtcgacgggagatggaccttagctttcagagacgacgaatcttgcaaaaccgctttatctatgatcctggaggagatcaatctacaaaacatggaagtggagagaagactaaaaccagttcttgaccttgaactgtaagattctccaactcttttattttccaaataccttctttgagtacactttgctcaaaagttgaaaatacccattgttaccatcctgctttgaggttcatgttttttttaggtgagagtttatttccttttacaattacatccttttgtatatggtgtagattaggtcccccagtccctagatttagtgccattcttggtttaactagctatagctaagctatatcctatatcccttatttgatatatatatattagttttgccttcttttt

SEQ ID NO: 47111 - DNA, 495 bp, Gossypium hirsutum
  Clone ID: LIB3585-006-P1-K1-A7
acgcgtacgcggacttcgaattttcgatctggtgttctattttggattttttgtttcaatttaagcttgtggaatttcgttgggagaaaaaaatagggtttggactatagaaatttggttatggatggtaataaagatgaggctttaagatgtgttcgcattgctgaagaagcaattgcttctggtaacaaacagcgtgcgctcaaattcattaaaatcgctcaacgcctgaatcatactttatctgttgatgaactcttggatgcttgtaaaaatcttgattctgggacgaccccggtttcacctgttggtgaaaagcgtgttttaagtgatgagaatgaaggcggttcaactaaattggatgagggttttgatggtgacagaagttatacagaggaacatgttcagctgattaggcagattaagagaaacaaggattattattcaattcttggtgtggaaaagacttgttcggttgatgagattaggaaagca

SEQ ID NO: 47112 - DNA, 476 bp, Gossypium hirsutum
  Clone ID: LIB3585-006-P1-K1-B5
gatttcaaaaaatgtcgaaaccctggggtggcgtcggcgcgtgggccgccgaggccgagcgagaagaagcggaggaacgtgaagctgcggaagccgcagccgctgcgcccacggctgaatcgcggagtttccctagcctaaaggaagccgttagcgcgaagcgcaagagtaagaaaatgactctctcggagttcaccatggggacttattcgtcctccgccggcgccggagttggtggtggtgctagggtaacggattacaacaagcttacacccgaagagatgatgctcctccccacccgacccaaagaacgtacccctgaggaaatgcagtatagccgtctgggaggtggattttcatcttatggtaggtccggtccatctgcgggtcgagttatgcatgaaagtgacggcagcgacggctcatggggctccggaagaaggcagtacggaggctttgatgaagaacgacggggt

SEQ ID NO: 47113 - DNA, 508 bp, Gossypium hirsutum
  Clone ID: LIB3585-006-P1-K1-B7
acgcccacgcgtccgccttatcccccccccctctctttctcacacacacacgaacaaaccatcccaggggagaaatagttcatttcatttcagatactgaaccagatatcgtggaggtagcttaattacaataatgaatggttaccagcagcaaaaaaccacggagcaagtcgtagacagaaagcatggagaaggcaagttaaaacacgaaccaaaagaagggtcagcagataagcaatctcctcctgcttcacctccttcagcagcttcctctccttcccatgaattctccttcactgttgtctctctgcactcttcgtctaacagtgtccctggtaaaaccaaaaccccaccttcaatggccatcgatttgtctcctgcagatgacattttctttcatggtcatttgctccctctccacctcctttcccacctcccagtctctccacgttgctctacaaattcattggatggcttcaacggtcccgtaacagatgaaccaaaacct

SEQ ID NO: 47114 - DNA, 332 bp, Gossypium hirsutum
  unsure (1)..(332): unsure at all n locations
  Clone ID: LIB3585-006-P1-K1-C10
cgnntccgtagttctanngatcgcgagggcggctcgctctacgagagtatccannagcttacgtaccgcnngtgcatgcgagcgtgcatagctcgttctatagtcgtcagcctannaattcaattcacttgnngccgtcgtctttaccaaccagatcgtgacctgtnggaaaaccccgtggcgcttaccccaacgttgaatcgaccttagtcagcaacatcaccgccttatctgccagctgggggcgtaataagacgaagacggccncagcacctgatcgcgccttctccaaccagttggcnngcagcctgacatgagcgaatgcggaccgc

SEQ ID NO: 47115 - DNA, 501 bp, Gossypium hirsutum
  unsure (1)..(501): unsure at all n locations
  Clone ID: LIB3585-006-P1-K1-C11
caatatcggcggttcagcttatggtggacaaaggtcgatatgttgcacccctgatcttgctaagctagaaggttgcaagcaaggtgaagtcattaggataccttcggcaacagagattaattggccaatggtttttagtatacagttcaatgggaatgatttatcaacacaaatgaacaatgctgaggttcccatcaagaaaactgggatgcataatttgttttttattgcatgtgatccgaaactcaagggaacagtaatgagtggaaagacggtatggaagaatcctgatggttatttgcctggaagaatggctccattgatgacgttctatgtgtacatggcaattgcttatttgttgcttagtgccatttggttctcccaatacatgaggttttgggaagatatccttcaacttcagcactgcattgccgcagtcattggtcttggcttgttcgaaatgatattgtggtatcttgattattctaattntaacaaaac

SEQ ID NO: 47116 - DNA, 487 bp, Gossypium hirsutum
  Clone ID: LIB3585-006-P1-K1-D5
cccacgcgtccggaaaatcagcaccgtccaattccgagctggtcacactctgctctgagttcctcaacggcggcaccgataccaccgcaaccgcactcgaatggggcatcgcacagctaattgaaaaccaagacatccaatccaaactgttggacgaaatcaaatccacggtcggggatcgaagagtagacgaaacagatatcgaaaagctcaagtacttgcaagcagtagtgaaagagctcttacgtaggcacccaccgacgtacttttcgctcacacacgcagctactgaggaggcagcaacattggggggatacgacatcccgacggatgcgaacctggagatttacctgccgggaatcggcgacgatccgaaaatatggtccgacccagaaaagttcgaccccgatagattctacttagggaaagaggatggtgatataatgggggtgaaaggggtgaagatgatgccgtttggggtagggag

SEQ ID NO: 47117 - DNA, 282 bp, Gossypium hirsutum
  unsure (1)..(282): unsure at all n locations
  Clone ID: LIB3585-006-P1-K1-E1
acgcattttcatactcttcttcctatcaaactttttttttangaagcactctctacgtatggacgtgagcactatcgcttggtattgggctatttcatgaaacaaactgttccttgagaagtattcattttttaatactgctttaagcattctgcatcttcttggtactcgtattgtaattgcagatggagctcttactccagcaatttctgtgcaatctgctatcgctctgaccaatttttctaaatctacagaccattatcagtttccagccttggtttt

SEQ ID NO: 47118 - DNA, 493 bp, Gossypium hirsutum
  unsure (1)..(493): unsure at all n locations
  Clone ID: LIB3585-006-P1-K1-E11
gggatttgattctcacgtccaaactcttccctgttctcaccaaaagcaaaaccaccatggctcccttccagcacccgtgcttccaacgacggctgcccctcacgatgatagcggtagtaacaccgctgcgcgagatgaccaaatcggctgcagatttgacattggatgcgaggacgaaagcttcggccacgaccatgaccagggggcgaccaccacgaaaggccccgtctgtcgacggcaactgagtcccttctacaacgttcgcagccactaacacatcctgaacagatcgaatctggagagcttcacattcactcagagcatcgataagacgttgaaaaggtaacggcactgggaagagcgacgcatgagagacgatggcgtcaaactctgatgagaggccagcgagaaggaccgccgttcgttcggcctctgaaattggagagccagacgctgcaaggagagcacacaaggttntgattttgtcaacata

SEQ ID NO: 47119 - DNA, 451 bp, Gossypium hirsutum
  Clone ID: LIB3585-006-P1-K1-E12
gtgggatcgtgtttctattatcacatatattatctttcatatatatgtgtgcgcgttttcgtgctgatctatgcgagaaggacatactgcgtgaaattcaaagctctctgaccgttcctacaatggcaacgcaagctcgggcttgacttcttatcttgtaattcatcaccaatggacacagcaagagcaatcagtcaaagaagggataggcgatatatacctacccagatgagactgttgcgtgccagcaattgactcaagccaatgcatgaatgttcacacctactgccattgtatcaacgcgatctggtgcatacagacatctcagccaacaaagacaactgctgacttacaacgtacaccctgagtataccagtgtcagctgccactacaatgtctagagagagattgaccaacggctttgatacatattcactacactaaaacaaca

SEQ ID NO: 47120 - DNA, 430 bp, Gossypium hirsutum
  Clone ID: LIB3585-006-P1-K1-E8
ggcagatcgcaccgttacgggcaaagagggacttatgatcttgaacaagactctggggccttacagtgaccaagctgctaagggtgtgcattctaactggctcacgcacgtgtacagagctacttctagagcactcgctagcgctgatcctgtgcagaatgatttagctgtgcgctctgtgagccataatgcagaaaggcggacagatactgacatacatgatccagcctaacatacaggctttaccatggccatgacaaaatcacatgctgtggatgctgcatactgtttgcttcacgatactgatagattcactactgatgatatatagcctgctggctgcatgcacaatgatcgaattgcaggcgataccatactgtagcatggtgatgagacatgtgatgctaactatcatgccacacaagaaact

SEQ ID NO: 47121 - DNA, 448 bp, Gossypium hirsutum
  Clone ID: LIB3585-006-P1-K1-F10
tgcatctgatagagggcataatagatcaagttaaaggaactgcctacatctcctgggtgcagccgagagttctgggaatcccacagatcaaatccttgcgggatcggttggataattgggtgggcaaagtacacactgcttgcttatcaatcgaagctgaaacacccgaccttgtcgcaccatgatcttttttccctttctgtccagtatacgaaaaggaaacaaaaggaaaaggcaatggcaagcaatgaggatattgcttgatctttaaatcgttcttttgaaaggagagcggctcagaccttttggcatttgttggatctcaatggcaatggcaatatgcctaaggatacagtgttaaaaattgaaaagagcgtcttttctgtttcttaaactttgtattaggaattttcattagaaacaataagatgatccactttcacatggg

SEQ ID NO: 47122 - DNA, 586 bp, Gossypium hirsutum
  unsure (1)..(586): unsure at all n locations
  Clone ID: LIB3585-006-P1-K1-F11
cccacgcgtccgcccacgcgtccgcccacgcgtccgcccacgcgtccgcccacgcgtccgttttaaggaggaggtgtgccgataaatgtgtgttggctccatattttcctcctactgatcctgccaagttcaccattgctcatcgtgtcttcggtgctagcaacatcatcaagttcttgcaggaacttcccgagacacaaagggctgatgcagtaagcagcatggtatacgaggcgagtgcaagaatccgagacccggtttacggctgcgcaggagctatttgccaactgcagaagcaaatcaatgagctccaagcccaactagccaaagccaaagcacaagctgaagtagccaacatgcagttgcaacaagcaaaccttgcggctttcctttgcatggagatggcagaaaccacgtctgctcaaccaaattcccaccaattcgtcgacaacccaagcttcatggaagataacaattttgggtctttctgggaacctctttggacattatttattgcttcaaggtttaattaaggcccatgaaactctctcctaaggagaaagtgaaggacatttntagattttaa

SEQ ID NO: 47123 - DNA, 506 bp, Gossypium hirsutum
  Clone ID: LIB3585-006-P1-K1-F6
cccacgcgtccgacgaattcagattttgtagaggtctcaggcaaagagacccattgtctccattgtttatttattttagtaacggaggttctccatttggcgttggataaagctttagaggaagggttgatcgaagggttcaatgatgtaattcaagggatgaatttttctcatctgcaatttgctgatgatactattcttttccttaaagctgacgataaagtggtgactaacgtgaagtacattcttagggtgtttgagatttttcggggcagagcataaattttaacaaatcctgcttagtggggtttgaagtggaagaagagttgttgtttagaatggctactatatgcaaatgcaaaattggaaatctaccttttaactatttgggggttccattgggtgcaaatccgaaaagattatctacttgggaaccaattatagacagagtcaggaagaagttatcgagatggaaatgtcgatctctttcatgggctggcagggta

SEQ ID NO: 47124 - DNA, 250 bp, Gossypium hirsutum
  Clone ID: LIB3585-006-P1-K1-G7
gcgacactatacacacccccatataatatatcttataaacaaatatcacctccaataggcgggttatctaattgaaacagacaggttaacccttgcacttcaaaactcatagacaaagccaacaatcacctcaaaactaacagcttctaactctactcaaacaagcatgccattcatccaaatctcaaaataccaaactattacatctaaaacaaactacactttcattatcaacaccatttttcaaacc

SEQ ID NO: 47125 - DNA, 487 bp, Gossypium hirsutum
  Clone ID: LIB3585-006-P1-K1-H8
cccacgcgtccgcccacgcgtccgccaatctctaaagcttaaggaagatgaacaaagaagagtgcgaaaatcgaaacccaaaatcaaaaccctaattccaactctaaccctaacaatcaaaaccaaatccgaggatccaaagggaaatcatgcaagggttgcctttattactcttcagctcttaaatctaaatcccaaaaccctacttgcgttggcatccctagaactctccaacaagtacctaggtacataattggggaatctgaactggaagcttcaaaggaaggccgtacactcactgatttcaagtatgcttgtgttggttactcggtttacttagataataaagattcttcagctgataatcaatctgataaaccagttgaattaccattttgtgttggtctcgaggtattgttggacagaacagctgcttcaaatgatcatgttcctgccaatatccataaaaacaaagatagtcatgtgc

SEQ ID NO: 47126 - DNA, 524 bp, Gossypium hirsutum
  Clone ID: LIB3585-007-P1-K1-A10
gatgaaaatcacatctacatactctctgggatagcaatcttgtccttagtgttcttggacttcaaaaagtccttgtgaatgtgcccttttttgctactgtattaacttttatgaggggatatccagccatttttcttaactgatttacccctaattgctgttgcattaatcgcaacctgacaaaagatatcagtcagctgaaagtttgtggtgtggaccttttttttcttcttttttttcaattttagctgcaaaagttacctttgaagcatggaaatctttttttttttttctttctgcatgatttttccggcacgtactgtcctgcttgttatttctttccagttgcagaggcccctttgtttctcttttgttttctggttcctgtttacttgattgcaaagcataagtttgctgaccaagtttaataagaggcatcaacattctttgcaatctcaatccgcaacttttcttgtctgtcagttgaagctgaaaaccttagttcgagttgataacataatgac

SEQ ID NO: 47127 - DNA, 512 bp, Gossypium hirsutum
  Clone ID: LIB3585-007-P1-K1-A3
cgaagatgaaacctcctgttaggttttcggatgaagaagtgtagcaattaactatcaggattcaaaatgctgggacagaggttgtcgaagcaaatgcaggtgcagggtcagccaccctgtccatggcatatgcggctgcaagattcgttgaatcatctctacgtgctctagatggagatggggatgtctatgagtgctcttttgtgcaatcagatctgactgatcttccgttctttgcatgtcgggttaagcttggaagaaaagggattgaagcaatgattccatctgatcttcaaggattatgcgcgtatgaagagaaggctttggaagctcttaaaccagaactgaaggctagcattgtgaagggaattgcatttgcgcagaagcaaccagttacagcatgaaactgaaaagtttttgaagctctaaaacctcattgaaaccatgcttctaacacatataatccctgcacaagaaccttcaattttgtagaatgaatgttgatttttcta

SEQ ID NO: 47128 - DNA, 519 bp, Gossypium hirsutum
  Clone ID: LIB3585-007-P1-K1-A8
cggacgcgtgggcggacgcgtgggttggttgatgcaccaataccatcttggcggcaatgaagaagagaaggacggtgagcttgtcatttcaaaagttttctaccaaacacagtctagacaatgtggatcaatcaaggactccctaaagttgcagagtggacatgaagcttctcatcaccttaagaataataataacaatgggcttgtcgagttctataacccttctttcatttcctttgatcaaggtggccaacgcagagccaatccaacacagctacttccccactttgcagaccatgatgggtctttcattccttgataaatacaaggatcaacaatgggaggtgatacgtatctacatagtatatatggatcccggaggcaagatcaaataaagcattaattggtgacgtataaatataataaattaatatatataattagcctaaaggttgggaagaataaggtatgatttaatagctagttgaagaggagaagaaacattctttaagatggaag

SEQ ID NO: 47129 - DNA, 468 bp, Gossypium hirsutum
  Clone ID: LIB3585-003-P1-K1-C8
gtgaaactccattttcaacaaaactcagcttcagaaaaaggaaatggagaaggaaacccaagttcaaattccaagggtgaagctgggtactcaaggattggaggtctctaaattggggtttggttgtggagcactctctggtatgtacaatgctcctctctcgcatgaagaagggtgttttgttttaaaggaagctttttctaagggcatcacattctttgacacatctgacctttacggcgaactttacgataacgagatcatgatcgggaaggctttgaagcagctttcgcgggatgaagtgcaattagcaacaaagtttgggatccgtgtattagaaggatttaactttgaggtgaaagggacccgtgaatatgttcgaaaatgctgtgaagctagcctgaatcgactcggtgtggactatatcgatctttactaccagcatcgtgtcgatactttagtccccat

SEQ ID NO: 47130 - DNA, 344 bp, Gossypium hirsutum
  Clone ID: LIB3585-003-P1-K1-D2
gtcggccaaggcgtccgccaacgcgtccgaatttaacaaccaataacaagttcaagatcaacaactaacttcggaatttcggttcctttttcatttcaatcaaaggtcactcttagtcggaatcagccatcgtcttttactttactagattttcagcttttttccttccattttttctcaatccaaacaatggagagcttagcccttcaagctttctccactgttaccaccactcccttctcgctttcctcccggtcttcgcttcacctccggtctagacccatttacgaaaatttccagccatgcatgttccctttatcttcaatccccacccttcgatcacc

SEQ ID NO: 47131 - DNA, 396 bp, Gossypium hirsutum
  Clone ID: LIB3585-003-P1-K1-F1
cttttggggagccgaatgttggagaagaaaagctttgaaatttcggcaattggagataaaaattcaaggaggctgatgcataaaatagagtttacttcagacttcacaggatttaagaaagatgggacacaatggttggttgataacacagacatcaaacttgtagatgtttgcaaaggaacgcgtgtgtttcatcccttaccgggttagctttccacagtgtgtctcaaaagttctcacctgtgtaggtgaacatagcaaagtgtcttctcaagtagctaggcaaactataaagtgacgaaaagagaagctgaggatcgaaaatattaccatttctgtaaggcatttccagtcatcaacaagaggttgtccagctggtcaaactgtgttcagtac

SEQ ID NO: 47132 - DNA, 429 bp, Gossypium hirsutum
  Clone ID: LIB3585-003-P1-K1-G11
cccacgcgttcggtccctgaattgggtagcaaacaatgctgctatgaggagcttagaacactaatggtggctactgatcggtctgattctattgtcatgggtgaatgggctatcgctggtcatgctcgagcattgcttgaatggcacaacctatcacgattttagtggccattgtggagaaaatacaattcccaaagaagctggaagaaggaaacactgctacaatgaatcctgcaaaaagaggatttaccctgctgttgatcctgttgtcattatgtaggacattgatagagaaaatgatcgtgcactattaggtagacagtctagattcgtacctagtatgtcgagttgttgagccggattcatagagccaggggaaagcttataaaaagcagggacgagagaaacatatgaagaggccggtattga

SEQ ID NO: 47133 - DNA, 396 bp, Gossypium hirsutum
  Clone ID: LIB3585-003-P1-K1-G2
tctttacatggttttaggccacctcctccttaaaacaggtaaagacttgtaggatccggtgatgggtctcgctggattgtcgatgagacatatcttgaatggaggtacaatattgacctctgatctcttatgaaggggatttcaatgcttatgagtttccaccaatatccaaacagcctccacagtcaattacatcagagattggcatcctatgttatcctgatggcgtgtttgcatataattcttatcctcggtgatgatccaatggtatgagcttgaagtgagcgctgatccagtcatacagtgaaagattgtttgagtatcatatcatgctttcagccctacgatgaatccctgcgatgttgaactgcaaaagatggagagagacagagatga

SEQ ID NO: 47134 - DNA, 458 bp, Gossypium hirsutum
  Clone ID: LIB3585-003-P1-K1-G3
gttgaatcaaaaacacaaagatcaaaactttctaagttattatctaaagtaaaaataatggtaggctaaatctgagatcaatttttaacaaaatccagttctggtttcaatcaatattctgaaaatctcatcctatcctgaggaacaaaaaagaagacgacatcccatataccaaaaggaacaaaaaagataaaagagaaaaaagagagccttttcttattgaagattattgctgctgcattgatttggcgactaagagacgggtttatggaaatgggttgtcttgttttcttcataataatcgactgaagccaaccatgaagtattttcgatgctcatcgatggtaaaatcatgaagaacttgttctactcaaagaaacttttatgatgggtgattttgttgggtgtatattattttggctctaattggttgtcaaagattcaatattgcactgatg

SEQ ID NO: 47135 - DNA, 446 bp, Gossypium hirsutum
  unsure (1)..(446): unsure at all n locations
  Clone ID: LIB3585-003-P1-K1-G4
cctgctactagttccttacgaagatggaggccggaacctgcggccattccccggaaatcttaaagcctgatgggtcggttcagtcaattcctatccttggatattgaggagccgacattgtatccaaccgaggaagagctcgctgctcaacggcgccttcgtgagatagtgcangaatgccacgtcgataatatattcatggagagcaagtttctccaagcagagtctntattgcagcttgtcgaggtcattatcttggctgcaagtcgtttcagcaagggaactggggtcatggaagatgacactgctgtgttctgcctggagttgctgatagttatcacactaaataaccgggatagaattttgataatctggcaaaaggtatacaagcacatatcagatattgtccagcaaaaggcagtaccatgtgcgctagttgaaaaagc

SEQ ID NO: 47136 - DNA, 177 bp, Gossypium hirsutum
  unsure (1)..(177): unsure at all n locations
  Clone ID: LIB3585-003-P1-K1-G6
taggtctcttgtgtttcttctgaacctgatggacggaagctgtactcagcatctgatgatggtcatgtgcatgtctatgatgctgaggggganagctantaattgggcaatgtcaggtcattctgggctggtgtngagtgtggatgtaaagccccgatggtgaggctattgcaactg

SEQ ID NO: 47137 - DNA, 135 bp, Gossypium hirsutum
  unsure (1)..(135): unsure at all n locations
  Clone ID: LIB3585-003-P1-K1-H4
gcatgtactcaacgaaaggggggtaacaaattgggttaaagtccaatggattcctgaccagcatctcttggtttccattttttggtcgctttgggatttggatttcctcctngaacacaagttgctatattttta

SEQ ID NO: 47138 - DNA, 487 bp, Gossypium hirsutum
  Clone ID: LIB3585-003-P1-K1-H8
cccacgcgtccgcttcagctctctcaaaactgctcagaagaactctagcagattgataaccccattgtcctttttttttctggtatttttgggttttttattttattttgaagacaagaaatcaaacagcaatgcagcttcatgtttcaccgagtttgaggcatgtaacagtgtttcctgggaaaggtgtaagagaattcatcaaagttaggattggttccagatgggtttcctatcgaatgctgttttattcgcttctcttcttcacattccttcttagattcatctttgttttctccaccgttgataccattgatggagatctttccaagtgttccaccattggttgcttgggaaaaagaatagggccaaggattttgggaagaatggagtcaaatgttccagaggtgatataccaaatactagatgaagcaatcagcaaagaggaagtagaaccaaaatctgatattcctcagacactacatga

SEQ ID NO: 47139 - DNA, 380 bp, Gossypium hirsutum
  Clone ID: LIB3585-003-P1-K1-H9
gccacgcatccactccattgctagcggcatctttagacaagtcaagcttacaggctcgtgcgtccaacgaagaaactacaatattgggtcatgttaatccagacgactagcatgttttttacaacgtccacactgttaaatctttgaatgacactaacatacatgtgactgattacattcgaatagagactattggtcttattacaaatagtatgaaagcgaacgccctcacgaacaaatgttcaccctatactgctattcttacacgacatgatgcttcccataaatcccaggaactgtgaatgacacgcgtacacataccattacactcgacaggacgctacaaaaccatgatctctgtttctggcgctcatttatct

SEQ ID NO: 47140 - DNA, 434 bp, Gossypium hirsutum
  Clone ID: LIB3585-004-P1-K1-A4
gccacgcgtccgccgacgcgtccgtccacgcgtccgtttcaacaccattgagcccatttattggtggttctgatcttgcggggaaagcaagtatcgagaggcccaatattgcaaacaagagattcagctcaatgcccactgtatcagagaatcataaacagaatggtgatgctaggactaggtgtacatcttccaatgagcaggtgactacaatatctaattttattccaacttcctatcggggatgtactcatctctcgctgcggagtagagcaccattaggatgtgttcctgctcaatctatggctaccatcaagcttgagctacttccattgattgatggcattataactttggacagtttactgattgcactttaggagaatgatcgtacatatatctcaaagcactcactgatgatgaatgcagcttat

SEQ ID NO: 47141 - DNA, 349 bp, Gossypium hirsutum
  Clone ID: LIB3585-004-P1-K1-A7
gacccacgcgtacgcctacgcgtccgaccactcgtactaggtctagttggcggactcgtttgcttaacgcggggggctttctagttttacccgcttccacacataacatgtcttataaaataccatccaaaacccttactaaaaccagcaaaaatagctatagttatatttataggatccgtgtccttttgtactgatcctgctaagtaatttgtccctcaagtttcaactttctacaaaaccctcgcttttaaagatccatacttatacttctacattttactgtaagatcaaactcaagaactttcctcaccaagttggttcaatcccttatatccatacaaacacc

SEQ ID NO: 47142 - DNA, 502 bp, Gossypium hirsutum
  unsure (1)..(502): unsure at all n locations
  Clone ID: LIB3585-004-P1-K1-B11
cccacgcgtccgaaaaaaactgtcttaaatatatccatgtgtgccatgtcaactgtggttttattactaattttgtggtcacgtgattttattaagttggtatgcctcttggtttttagtttttcaactgactgattaggaaactatgtcttcttaattcacccaagatataattaatgcactataacaatgtgcacggaccaagcacatttgtgaacacttatgcatacatattcaggtatcacagtgaagaaaaataagttatttgtaaatctgagcaatgcaagacatttttcattgacctttttttgtaaatctgagcaattgtgagcacagtgaatctggacatggagaaaacttgtaaacttttaaccattttaacgaagctcctatggatctgttcatttaatcaagtaatatcatatagatttgttggcaaaagaatatttttgttgttctctggacataatccttgtgtgcattttgttatagntctaattat

SEQ ID NO: 47143 - DNA, 484 bp, Gossypium hirsutum
  Clone ID: LIB3585-004-P1-K1-B5
cccacgcgtccgtttgaagccatgcatcgacggacggctgactatcacatcgaggatggcattctacggtggcagcattctgacggggcgtgccattattgacatggtctattaagggtgaccagcactacaatgccaactggttactgaatcatctgaaagaggcgtgcatgatctcctatgatacggcacgacagaatattaagaaggatgatattgctgaagggattgacaggctattgggagacaaaaacatcaaaacccatgctgggacgcttaacactaaatctcaacacggttttccagcgagctcagctgtatgtatggatgctttcaaagattgtatcgtgaacctgtatgcacattaagcacatggtttccgtcacggagaaatatatgtatataaatgctctggataacattgacatatcatgaggattatgatctaccttattaatcggatcttgactgggcatactgatct

SEQ ID NO: 47144 - DNA, 285 bp, Gossypium hirsutum
  Clone ID: LIB3585-004-P1-K1-B9
caaaaaagagaagcctgaacctaagctactcttttatgcacctccaaagaaagaggagcgtggacctaaaccaccaatgtatgaacctccaaagaaggagaagcctgagccaaagccaccagtttatacacctccaaagaaagatgagcctaaacctaaaccaccagtatatgaaccttcaaagaaggagaaacctgagccaaaaccaccgatttatacacctccaaagaaagagaaacctgaacctaaaccactcgtatatgaaccttcgaagaatgataagcc

SEQ ID NO: 47145 - DNA, 411 bp, Gossypium hirsutum
  unsure (1)..(411): unsure at all n locations
  Clone ID: LIB3585-004-P1-K1-C9
cccatcgtacgccccaacttcctcccctgctttagaacaaatcatggaaaggggcagggcgtgttcttacatagcataaccaccacaacacattngaaaaataattcaagactccaaatatataccactgcttctactgaaactacacactcaacaaaaatgtttcatttattatcctttaactaattttctatgttcttattgatctaacttacagactaaccattatttcttccttccgctatttaaattatccactactctaccaaaatacaccaattaacaatgactgacgtttgatatactctcctccaactcatctatatctactgttactaccaatctctaatcctccatcttctacttaacatcttttcttcttcataatatccattttccactctattcatc

SEQ ID NO: 47146 - DNA, 395 bp, Gossypium hirsutum
  Clone ID: LIB3585-004-P1-K1-D3
ccttattaatttttttccccaaattttacccattgtatacccctaaaatttccccctaaagtggggccctaaaatcagtatccccaaaacacatctaatttttcacccaaatcgaaatcctgccaccatttccatgtcgccatactgatccgtaatcctcagcatctctctcactgcatttcctgtttctctaaatctccatccctttgattttcgccgaaatctaaaacttctattttttgaccgacgatgggaaagaaagggagtggatggttctcgacggtgaataaagtgttcaaatcatctagcaaagacttgcccgacaaaaaatctatgaaacaggcgcagtttcaccccaaggaagaaaagttgagaggtttttgttagggagttat

SEQ ID NO: 47147 - DNA, 501 bp, Gossypium hirsutum
  Clone ID: LIB3585-004-P1-K1-D4
cggacgcgtgggctccacctaatcagcctcatgtggaggaggatgctcaacttgcagaagcagtttctttgtccttgaagacagcagagcaagagaaggcattgcatgaccagggttggtccggaacatcagaacccgaagcttctaaaccagctgacatgcaacttgggcacctggaagtctcaaatgggaggttaatgagaggaagctcttccattcatgatgatgccgaagatgtagaggagcagcctctagttaggcgcaggaccagacaggcatcatctggctcaggggaatctgtgaaagaaattggagttgttgaggctagctcaccatcaaatcctggacagcaagatgcaggcaatctcccacggaacaatgggaatgcctttccttctgatgagtggggaggcatctcctctgaggagcatgatgaggcagtcatgcttgaggctgcaatatttgggggaatccctgaaagtagatatcattttgcatatg

SEQ ID NO: 47148 - DNA, 493 bp, Gossypium hirsutum
  unsure (1)..(493): unsure at all n locations
  Clone ID: LIB3585-004-P1-K1-E4
gtccgcccacgcgtccggatattttctcgaaggttgattcatccataccttgaaagatactattcaaggccttttgatccttctttcgtgcttctcgtaacgccttcttagcgtcatttgataaagctgcttctgtagcggcatctccgggctcgatgtatcctttttcaacgatctcccaacaatcttgcgaaccgagcaaagccttcattcgaatgctccaatttccataatttgtcttcgtcaattgtggaacttgtagctgaattacgtcgcccatatcgacttgttagatgaacaccaaaggtactccgaactggacacgaaccggacacgaaccgaactccgaaccaagctccgaaccgtagctctgatgccacttgttggaaacgtgatgggccgaaaatttactttttattacacactcaatatattacaatacgaagattacagatattntctcaatgactagatagtctagctgctgctagat

SEQ ID NO: 47149 - DNA, 295 bp, Gossypium hirsutum
  Clone ID: LIB3585-004-P1-K1-E5
ctagtgctagatcgagagcgaacgtcagaggggcaagctccactcgctgcctgcgacgaaccacatcttctatggtgtcgcccaaataccatacactgtgcgtcgttaaacaacggcgtgactgtgaataccctggcgatacccaccttaaccgccttgcactacatgccgccgtgatcagctgacgtactaccgaatagtcccgcaccgatggcctttctcaacgcgggctcaagacgaatggctaatggcacacgccttgcagcggcacatcatgcgcgggggctgtggctgt

SEQ ID NO: 47150 - DNA, 580 bp, Gossypium hirsutum
  Clone ID: LIB3585-004-P1-K1-F4
cgttgggcacagtgcaggataaagctctcccaatctgctggaaaggaacgaaacctttcaaatctgttcatgatgtcaagaactatttcagcaccttgacattgaagtttaaagacacccagaatattcagctagagttacagccggaagcgtatcttattgtcacggaagatggcaatgcttgctttggaatcttgaatggcacggaagcaggattgggagacttgaacgtaataggagacatctcgttgataggcaaaatggtggtctacgacaatgagaagcagcggattggttggatatcggcggattgcaacaggcttcctaacagtttggacagtaattacaaagaagatattcaacgaccatatgctgcaaattttggtattttagaagagaatcatcctaaaacacaaggttcaagcgagaccaatgttcgggtgcgcaaccgagagctctgataccaaaaaagagttgtaaaaggtagggtgaaaagtattgtggggatacaatatatttgtccgtaatccaaggtataaaaatgtaaatgtattaatggcagatacaaaaaggaaatagt

SEQ ID NO: 47151 - DNA, 494 bp, Gossypium hirsutum
  Clone ID: LIB3585-004-P1-K1-G4
cccacgcgtccggtacttggagatattggtgtgcgcatccaacaggagacaaagaaatactttaaggaaattggcatcccggcagatgtgaaatatattgatccaacatacatgatccgtgcatgccgtgcaaatgcttctgatggaattctctgtactgttctgggacaaaatgcagtccatggtgcatttgccggatatagcggcattacagttggtatatgcaacacccactatgtttactttcccattcctgaggtcatttctcatccccgggaagtagatccaaacagccgtatgtggcatcgatgcttgacttctacaggccagcctgacttcatctaaaagcggttagtttaatcaaaagagggaacaaatttaagttttgaaattgttcattgaaggtgtgaacaagcctttagaatatttccttttaggctgtagaagaaataaaaccatgatagcaattggttaaagataaaaagaaacgaaca

SEQ ID NO: 47152 - DNA, 516 bp, Gossypium hirsutum
  unsure (1)..(516): unsure at all n locations
  Clone ID: LIB3585-004-P1-K1-G5
cccacgcgtccgggaatgggctggtgcttctattgctagtgttggaattcaaggtcttgcttatgggattatgttgggcatggcgagtgcggtacagaccgtgtgtggccaagcatacggtgccaagaaatacgcagccatggggatcatttgccaaagagcaattgtattacacataggagcctcagttatcctaacattcctctattggtattcggacaccgtccttcaagcaataggtcaatcggcaagtatagcagagcaaggccaagttttcgcccgtggtttaatccctcaactttacgcattcgccataagttgccccatgcaaaggttccttcaagctcaaaacatagtgaatcctttggcttatatctccgttggggtatttttgctccacattcttcttacttggcttgccgttgatgtattgggatatggtcttcttggggcatctntgacattaagtctttcatggtggattcttactattcttaatggactttacattggttt

SEQ ID NO: 47153 - DNA, 467 bp, Gossypium hirsutum
  unsure (1)..(467): unsure at all n locations
  Clone ID: LIB3585-004-P1-K1-H12
atttcatagatcaaaagcttactagccaggttcatgagattgttgggcgaattaacggaagatttggaactcttactgctgtacctatacatcatctggttcggctatacctttatcatctttgtttttcactgtaatatgatgaaagaactattgtgcttaccgtcaagcttagcaatgcactatttagtcaattttatagcatgcactgccatcaaggcattaaggagaagtttttcttttccccacgggatcattgttttttatctgcttaagacaacattatcctaccctttattgttactttcaacacgcctctatgttcatntattgtgaaaagatttctaatgcatntccttactcttttataggatcgntctcttgattttcatgcattatgtgcactatacgcttgtactgatgtagctcttgtgacatctttgcgagatggaatgaaccttgtcagc

SEQ ID NO: 47154 - DNA, 517 bp, Gossypium hirsutum
  Clone ID: LIB3585-004-P1-K1-H9
cggacgcgtgggcagttaccaaaaattctttcctctatctgttatcattttcgattcactcctcatttgaaacatcttcaatccgggttccttggccactcctcttccaaggcagcttcattgcagatcggcgtatcccttaccagggcattgccgaaagacatggaagctgtcctcttccccagaccaacatcgagggcatctcacatttgtggttattcgcttgcatctgagattgactagtgtatgaatatagttccagaatatccgccagaatagaagtagaattttttatggaatttgtaaattccaaagttttctgtttaattctttagtatcagtctgtaataaataactattaggatccagaaagttcacttttccaaacgagcaagtcttcgcagtttgttactgcaagtgggatctgcaaaattctttgagtaatgtccgtttgaaagataacaagttctacccctggaatccactgacctgtccaaatggagatgccattttcttt

SEQ ID NO: 47155 - DNA, 505 bp, Gossypium hirsutum
  Clone ID: LIB3585-005-P1-K1-A3
aatatgtatatgtatatgtatatgtatatgtatatgtatatgtatatgtatatgtatatgaatatgactacaggaatatggagaaatagaaggcgaatttgcagagattggagtggagagagttttgaagggacatttgagtgattttccagtattgctgccgaaaaggaaactatctaaacgtccattagatgaagaaaatacattgccttgttggttatctgaggaagaagccaattactatgtcaccaaattccagaaaactggtttcactggtccactcaacttctacagaaaccttaacaggtatgtgtatatatatatgtatgtatataaaactcagggtcgtaaccagagattatgtttaggagtgctgagttatgatggcagaaactgggaactattgaaaccatggctgggttgtaagatcaaaacaccagccaagttcataatgggggataaggatctggtttatggtgtgcccggtgtgaaggattacattcac

SEQ ID NO: 47156 - DNA, 333 bp, Gossypium hirsutum
  Clone ID: LIB3585-005-P1-K1-A5
aatattataacattgtatatgttatagatatgtatatgcatatgaatatgtatatgaatgtgagggcattaatatggagaaatagaatgaaaataagcagagattgtagtggagagagtttagaaagaacatttgaaagattttacagtattgttgccgaaaaggaaactatttaaacgtacattagttgaagaaaatacattgccttgttggttatctgaggaagaagaaaattactatatgactaaatttcagaaaaaaggtatgactgtttcactcaaattctagataaaccttaacaggtttttttatatatatatgaatgtatataaa

SEQ ID NO: 47157 - DNA, 342 bp, Gossypium hirsutum
  unsure (1)..(342): unsure at all n locations
  Clone ID: LIB3585-005-P1-K1-A8
nccacgcgtnncggcgagcttacatnnnaccctctttgtcactctcaaccattcagagacggcagctccgcttaagctctgaggcaatggcattggccctcgctgagtacaggagaccctacgttctactccaagagccagacctgagaaccatgctgagacggatcgatgcccataacgccagcatttgcgttggcagagtccttgccaggatcctccgaaccaatgtcggacccaagggcatggagtaagttctccgaagccccgctggcgctgatgccagcgcaagtgtctgggcaacaatatttgtgcacatggatgttgacaaccaaatggctaaac

SEQ ID NO: 47158 - DNA, 279 bp, Gossypium hirsutum
  Clone ID: LIB3585-005-P1-K1-B10
gccatgaattgcatcgatatctgacctggctgtactctcagacagtgccagtgatctagctcgagccgcatgcataatctggggacacatactccaagctggagagggaaacgagatcccttagactatatgtgcctactgactgcttgctacgctatgtctatggtacattgaggctaacagcatgcacctctgcctcaatagacacggtggatctactctgctatagatgtcctaagactagtgatagccataacattagcatactgacctacacca

SEQ ID NO: 47159 - DNA, 400 bp, Gossypium hirsutum
  Clone ID: LIB3585-005-P1-K1-B11
ctttgcttcacaaaagtgcttttattactactaaaactactgttctagtacaagaaccgactgactctttgacattaaacacattctttcaagcttcaaaacaaaacaaacaccatagagtagagcatcacttgacattttgcattaaaaaaaaaaagtgaaattactctgtgatttcaacgaccctaacatttggcctctccggagcttgagtttgcttcccaatagtgacgatgagcatcccatgtgtacaaagactacctttctgaggataccatatattaagtgctgattttcatctaacattacaggatgctttatataagcactgtacatggaacctttatgagcaggttgaagttatcactctatgcaatggactgctgagattgaccgttta

SEQ ID NO: 47160 - DNA, 280 bp, Gossypium hirsutum
  Clone ID: LIB3585-005-P1-K1-B7
cgcattcacgcggggagagctcagcgaatgtggcccgcaaagcatctgccgcggtcaagatctggggtgatatgccggagggagactgtcacaagtcgcagcgtggtacgcaacaccaagtgttacttatacactcccaacggcaagctcttgacccagagcttctcaccctcggacgaaaaagcgaatgcctccgtctacatgacccacggatctggatccgacactggttggctcttgcagaagatctggataaactatgttaattagggagatgctg

SEQ ID NO: 47161 - DNA, 469 bp, Gossypium hirsutum
  Clone ID: LIB3585-005-P1-K1-C10
cccacgcgtccgcccacgcgtgcgcccacgcgttcggtgaaaaagaagttatatcagacccaagcacaccaaaacctaatccagagccctttttttatgctcctgaaggaaaatctgatcattattttgagatgcaagatggagtaatacatgtctatgacaataaagatactagaagggagctctttcctgtagctgatgcgacaacctttttcactgacttgcaccacatacttcgcgttatagcggcaggcaatatcagaactttgtgttttcaccggctaaatcttctagaacaaaaattcaatcttcatttgatgctaaatgcggatagagaatttctggctcagaaaagtgcaccacatagggacttctataacgtaaggaaaagtgatacacatgtgcatcattcagcgtgcatgaaccagaaacaccttttgaggtttatcaagtcgaagttgaagaaaag

SEQ ID NO: 47162 - DNA, 453 bp, Gossypium hirsutum
  Clone ID: LIB3585-003-P1-K1-A1
cgtccgccacgcgtccgttttaaccatcggataactcgttcgagaacgagtacaagattactgaatttggtacctggtttagatcgatgagttaggctttcaatttgttaatccagttgaacacattcctaaacaccgtcctgtctgagtttttgcctttcccgcagtgtaggacgccgttcagcggtaaatcagtttggatcatcggcttgtgcaggatcggatcagcagtcgcaactagagcctgatctatcaactgcttcttcagttactactcgcgatctacgaaacccaattcctactacaacttctactcaaacattgctgattgggctgctgattgtcaaatactctttgtggcatgcgctacgtccgacgtaactcaccacatcattaaccgtgcagttattgatgcatggggtcctaatagcattcttatcaacatccgactag

SEQ ID NO: 47163 - DNA, 485 bp, Gossypium hirsutum
  Clone ID: LIB3585-003-P1-K1-A10
cgtgtttcggtaactttaaccgtatctgaaaaaaaaaggtgaaaaagaaaaagaaaaaaaaaaactcgtaagcaaagcgactctacttagcagagttatgaagttattccatcccttgtttggcaaatgagaagcaaataattgtatattataatcaatgttaagacttaagagtctcgtgtcttgattaactgcattattttttgtctctccaacatgaatttctgtgtcaattgcgtgtgctgatctcatcagaaagagaagaatcaacgagagtttgaagtgttgccgtagtaaaggtagaagcggctttgtttttttgaagactgagaaacatgcctttcccaatgaagatccagccgatcgatttcaacacgctagaagaggcagcgctgccgcggtcggaaacagtaaagccgttggtgaaatcgcggttcaagcggctgtttgaacggccgttccctagcgttctaagaaattccacg

SEQ ID NO: 47164 - DNA, 283 bp, Gossypium hirsutum
  unsure (1)..(283): unsure at all n locations
  Clone ID: LIB3493-033-P1-M1-A4
ttcctaaatatttaatttttttaaccaacaagggcggggcaaaataaaggctttaggcacagcacctnaaaaaaaaaaggaaaaaaaactttcagatcacctttttttgaaccgatttcttcattttgttattttaaaccctcaaatacaaggccttttcgggtcttatattctctctgacaaagaaccgagaaaatcgaattccaaacaaaattaaattattacctaaaccaaaaccaaaaaaaacaattcncttgttctctgctgctctttgtttgagttc

SEQ ID NO: 47165 - DNA, 218 bp, Gossypium hirsutum
  unsure (1)..(218): unsure at all n locations
  Clone ID: LIB3493-033-P1-M1-A5
ggagaaaatatctgtgatgggccgatcatcacgcaattgtaagcttctgcttgtgcaagcattaangangaanggacatgttgttgctgtaactggggatggtaccaatgatgctnctgccctacatgaggcttacattggtcttgcaatgggtattcaagggacagaaattgcaaaagaaagttcagatatcatcattttggatgataattttgctt

SEQ ID NO: 47166 - DNA, 232 bp, Gossypium hirsutum
  unsure (1)..(232): unsure at all n locations
  Clone ID: LIB3493-033-P1-M1-B2
gggcagatgcataagtacctgttatctttcagtttaagacataacatggacgcctccagcanctgcaccacggagaagagagaaaaactgaaaaaggggaaaaaaagcgtcgtcgnttttgcttcttgttcttcttgcctctctctctttctcagaagctcctctttcgttcttttgttcactaagtattgtaaaagatggcctacggtgaggatatttaacctctagtctg

SEQ ID NO: 47167 - DNA, 471 bp, Gossypium hirsutum
  unsure (1)..(471): unsure at all n locations
  Clone ID: LIB3493-033-P1-M1-B4
caaattcacctttagagcctgatatattgatgccgaggattctgtcactagagaaagtgaaatgtccgatgatccanctggagccaaagaaaataaacagtttgtgccattcattttttccccatcaatttctcctgcatcaatctctgcaagaggaagtgatcctccagctagtttgagaccaaaatgtgaggccaatgttgacctacaggatgttttagctgctgctgaagctgctgctgaaactgccgaacatgcagcagctgcagcccgttcagctgcaagtcttgcacaagttagaattgctgagcttacacagaaaaaaaatgagcgggttactgagagtagcagccctgagaaccctattcatacatatattcctcatcaacaagctagtacagaaaagctaaattttgatcatcagaacttttgtattgatcctgctgattctttatattctttggactccca

SEQ ID NO: 47168 - DNA, 387 bp, Gossypium hirsutum
  Clone ID: LIB3493-033-P1-M1-B8
cgaaggataggctcgcacttcagaggcttcgggaagctgctgagaaagctaaaattgaactctcatcaacatcgcagactgaaattaatcttccatttataacagctgatgcttctggggcaaaacacttgaatatcacattgaccagatcaaagtttgaatctttagtaaatcacttgattgagaggaccaaagctccctgtaagaattgcttgaaagatgctggcatttccacaaatgatgttgatgaggttcttcttgttggagggatgacacgtgtacctaaagtgcaagaagtagtttcagggatctttgggaagagtccaagcaaaggagtcaatcctgacgaggctgttgctatgggggcagcaattcagggtggtatac

SEQ ID NO: 47169 - DNA, 441 bp, Gossypium hirsutum
  unsure (1)..(441): unsure at all n locations
  Clone ID: LIB3493-033-P1-M1-C5
aaaggctttgcatgtattccacttttttgtttaagtgccctgcaattggacaatgaaatttacaccaangcatcatccttatataaatctatcgatattcacaacaaggcttgtgcatccattgttaacaaaggcgaaccattaaaaacacaattgatatatgcacctgttagaaaatattccccttgtttagatgacagaaaacaaaacaagtgttcaagtgccacttgctttgatccttggcaatcatctgcttcagaatgtgaagattcaacttgttcaaacaataatctcagatctgagaaactgttagcatcagatgaaggcttaggaaattctttgggcaaaagtatagcaggtttcccattagatgcctcagatttggccaattttctcaccagggaccggcacataggattcaattgcagtgcacaaaattct

SEQ ID NO: 47170 - DNA, 452 bp, Gossypium hirsutum
  unsure (1)..(452): unsure at all n locations
  Clone ID: LIB3493-033-P1-M1-C9
ggagcttaatgcatcctccaatcgtgtgcaggatctgcctgactccggtggtttgttgcttaatctgaggatcctcgatgtctcgggaaacaagctaaatgccctcccggaaagcattgcacgatgcagttcactggttgagttggatgcaagctttaacaaccttacatttctgcctaacaatattggatatgggctcctaaatcttgaaaagctgtcaatccagctgaacaagatccacttcctaccatcatcaatctgtgaaatgaggtccttgaggtatctggatgctcatntcaatgagcttcatggcttgccacaagtgattgggagaatgacanaacttgaagtcctgaaccttagtagtaatttcaatgacttcacagaacttcctgatcctattagtgatctgaccaatctccgggaactcgatctcagcaacaaccaaatcc

SEQ ID NO: 47171 - DNA, 357 bp, Gossypium hirsutum
  unsure (1)..(357): unsure at all n locations
  Clone ID: LIB3493-033-P1-M1-D1
cggacgcgtgggttcagaggaattaatacatggttttgatcaaaaagctgctgcttgtgtaatggcaaaaataacttctttaaaaatggaaatggaggggcaaaaacagtgcttgctttagtgaaagtaggcacagatgggtttgatgctacacggtggttggatcggaatctcattcgagtttgttccaaatttggagagtatcggaaggatgatgcatcatcttttacattaaaccctngcttttctttgttccctcaatttatgtttaatctacgacggtcacaatttgttcaggtttttaacaacagtccggatgaaactgcctactttcgaatggtactaaacagagaaaac

SEQ ID NO: 47172 - DNA, 456 bp, Gossypium hirsutum
  unsure (1)..(456): unsure at all n locations
  Clone ID: LIB3493-033-P1-M1-D4
gagaagttttcaatctccttaataaatgtcacgcaatggaccanaaaaattgcaggcaatggaatcaccgagaagcatatgtcacgttgtggccgtaccttatcctggtaggggccatgtcaatccgatgatgaacctctgcaagctactttgctctaaaacccccaacattgtcatatcatttgtagtcaccgaagagtggttgggtttcatctcttccgacgacaagcccgtcaacgtccgatttaggacgatccccaacgtaatcccatctgaacttgatagagctaacaacttccctgctttcatagcagctgtgctcaccaagatggaagctccatttgaggatctccttgatcggcttgaactcccagtcgccgccattatagctgacacgtatgtggcttggacggtacgagtggggcaacgaaagaatattccggtggcttccctttg

SEQ ID NO: 47173 - DNA, 221 bp, Gossypium hirsutum
  Clone ID: LIB3493-033-P1-M1-D6
ccgtccgatccggtcaccacctcgcgatgagaaattaaagggaggcaactctgacactacctacatacttaaattgctctatcggattaccctaacaatagagacctgatactaaacatattcaaactacagattgcaggcctatcaattttgatggatgatgttgatgagttctcggcttctactgttattgcgtgggctcaagtatacaaggggaaacc

SEQ ID NO: 47174 - DNA, 244 bp, Gossypium hirsutum
  unsure (1)..(244): unsure at all n locations
  Clone ID: LIB3493-033-P1-M1-D9
cggacgcgtgggtgggagggtcggggtaagggccgatttgattgttcaaagggttnaatttgttctcgagtctgataaaagaagccatctcatggatcttctacatgcacagagggaaaatggaaatcatggaaagcattctttgacattagttttcgtggagactaaaaaaggagccgattcattggaacactggctctgcatgaatggatttctatcaacgaccattaatggtgataggact

SEQ ID NO: 47175 - DNA, 185 bp, Gossypium hirsutum
  unsure (1)..(185): unsure at all n locations
  Clone ID: LIB3493-033-P1-M1-E11
cccacnncgtccnacnctgnggactcatgttatttttaaaaccaggcaatatnnttctctctttaaaaataacctttnctccttcaaaagagaaaaccctnaagctttnaacaaatgcatggagattatttatatttttctcaatatcaaaaccaaactacctccaaagactaagataccctgtt

SEQ ID NO: 47176 - DNA, 189 bp, Gossypium hirsutum
  Clone ID: LIB3493-033-P1-M1-E4
ctatcaatcgtcccggtcttcttaatgaacggggtcaaatttccaaagaaaacttttatcacctaaaccatttatctactcctttccaactttcctttattcctcttcttttccatccaatttcaatctgattctcacactctatcatattctttcttactttcagcatatccaaggacactctcaaac

SEQ ID NO: 47177 - DNA, 410 bp, Gossypium hirsutum
  Clone ID: LIB3493-033-P1-M1-F5
ctgacacgtgggcacgaaaaatgacacataggcgccggcgtagctgcaacattgtcaagattgatgataacgcactctggaggggagatcgctgaagtccaacgaggtcacatcgctcggtcaactgtaaggacataccctcacactaaatgttgtgctgacaaacgatctcctgactgccatgttcatatctcaaatcacacccacatgcacctatacgacgacaaataccgactcgtgtgcgaccgatctatcatcactaagcgatgcatgttccttacagacgagactgtcatagacaatctcactgtattaccttacatggatccttcactggatgctacacacgatatggtggctgtagctgggccccaactagaccaagacgcgaccaccgcggccgtcaatga

SEQ ID NO: 47178 - DNA, 488 bp, Gossypium hirsutum
  unsure (1)..(488): unsure at all n locations
  Clone ID: LIB3493-033-P1-M1-F6
ggacaagtggaaaactccttgcaaccactctgctctggacattcacccctggtgcttccatgccttcaaaagaagttttggttgccacattttccaggtttgggcccttgaaggaatcagaggttcagatacttaaagattctagtaatgcccatgttgtttttatgcgtaacgaagatgctgcanaagcattgcggagtttagaggagagcaatcctttcggtgcaacccttacgaattatcagcttcagaataacaatattctaaccactcatcaacacatggagggattccggctgcctgcaaagcttaccggtgcaatgcctcgcctcggtgacgcacctcccattgacgttataaagaagaatctagagatgatgacatcaatgcttgagaaatcgggggataatctgtctccggagatgaaggcaaagctggagagcgagataaaaggactactgaagaaggtcagccattgtcctggatcc

SEQ ID NO: 47179 - DNA, 144 bp, Gossypium hirsutum
  unsure (1)..(144): unsure at all n locations
  Clone ID: LIB3493-033-P1-M1-G1
tccggggatgcaataaagtgcaaccagtanccagaaagcagaaaaaaacaggtgaaggataattgatcgtttaacaggccggagaaaaaaggctgggaaagcttgctctttgagcatcgtcgactgaagagaacgaaagaagag

SEQ ID NO: 47180 - DNA, 408 bp, Gossypium hirsutum
  Clone ID: LIB3493-033-P1-M1-G7
ccgaatcatatcgctctccagcttcagaccacccacacccatcctctctgcacgtcatgaccgcccgcctccccaaacactccatcacttctctcattctgatcaaagagagagatatgagaccaggtcacggtgatgaaatatgacgaccgaacacgactgttctttctcttcacaagcgcacgttacgaccttcacttccgttacctcaattacactctcccgctccaaccttggcgtcatgacttcagacttccgactcttgcctcgcccacttcaactcgaccctattgaattccagttggccgagtcatatctcgcggtacctgctccactctggcactccctattgaaatctctatgtgcctcttcttcttcgtcctccttctcttctatcaacttagcata

SEQ ID NO: 47181 - DNA, 250 bp, Gossypium hirsutum
  unsure (1)..(250): unsure at all n locations
  Clone ID: LIB3493-033-P1-M1-G8
ggctttcaagacaagcttatttgatctttgtagttccgacaaaagagaacgaaaaaaaagaagaagaaatacaatcgttttctttttgaagtcgggttttagtttttggggtcaaaaaaatgttgggagtatttatcagtgcgatagtgtgtnngccagacgagctggtggcggtcagttgacgaactgcatgacctaacataacagggggctctatggtacaatggacactcgagactagctgattacg

SEQ ID NO: 47182 - DNA, 454 bp, Gossypium hirsutum
  Clone ID: LIB3493-033-P1-M1-H4
cggagctggtgtcttctattgcatcctcagagatttatagagatagtctttttgatcgcttattgttagttctacatgggttgttaagcagttgccagccaagttggctaaggtcaaagactgccaatgatttttctggatttgaccgtgaggcattggagagtttccagaatgaattagattctatgcaactacctgagatgattagatggcgtattcaggcagcgatgccaatattatttccttctttccgcaatgtgatctcctgccacacaccttcggtcccagttggtgctcttagtgcgcttcaatccagcatctacatccctgaatcttgcaatggtaccttaaatgcacctcagagacaggttgcatcggcacgaactgcaaataacataccgggaaaagccaagtcaatgccttcactacaggagtacgatatggaaatcgaccc

SEQ ID NO: 47183 - DNA, 465 bp, Gossypium hirsutum
  unsure (1)..(465): unsure at all n locations
  Clone ID: LIB3493-033-P1-M1-H6
cactaccactactattggagctggtacgcctgcagtaccatccgatcccacctcctctgctatctatttaaaaaaatggagttattacaaggatattgaccttcatagcaaatttaactattgtccgagatctcttccatcatatgcatgagtcttccgccctcaaattcattttgacagcctacacagattagtccgactgaaacagcaatgattacaaaagcctgctctctcaagcattacagacgattcataggatcaatgtcggaggccctacacttacaccagatactgatactttgttaagaacatggcttcctgatgatagttatctgaccaattcangcattgcaaagaataatcaagttctctcaagtaggcctaattatgttaatgttaccgaattattgcaccagatctagtatacaagactttcaaagagatggcatcaaacgactccaatat

SEQ ID NO: 47184 - DNA, 679 bp, Gossypium hirsutum
  unsure (1)..(679): unsure at all n locations
  Clone ID: LIB3582-058-P1-K1-D2
accggaaccggcattcccgggntcgcccagcgtccgcagggnagcacttcncagggnagccagncccaccaataattttgcattacaatgttaggcttcatggggataagataactgaggacccagtaattgtccaaaacacctggactatagctcatgattggggtgaagaggtgcgttgtccacctccaacacctgaagagaatgaaaaagtggatgagttggaacagtgcaataagttggttggtaaagatgataatcggacaattagagtgcactcccatggtttaagattgcctttaatggggctgcaaggggttaaacccagaaggtattttccttttaagcaaggttctctttttgttgcaacacttagagtaggaccggagggagtacaaatgacagttgatgggaagcatgtaacatcctttgcttatcgagaaacattggagccatggcttgttagtgaggttagaatttctggtgacgtgaaattaatctctgtgctggctagtggtttacctacttcagaggattcagaccatacgattgatatagaagcacttaaatcagttcctctttctattcaaagaccagtggatctctntattggtgttttctctactgccaataattttaaaagaagatggctgtgagaagaactggatgcagtatcctg

SEQ ID NO: 47185 - DNA, 666 bp, Gossypium hirsutum
  unsure (1)..(666): unsure at all n locations
  Clone ID: LIB3582-058-P1-K1-E1
tcgcccagcgtcctgcgaanatacgacgnagcaaagnaagtgaagccttcgacgatactaaagccggcgttcaaggactggtcgacgtcggcgtagttaaactccctccatctttcacatgcctcgagaatatatccatgaccatccaacattaaacggtcataatttacatgggttccagattcccatcatagatctaaaacatgtttctgatccttgtttactggaaagagatagttgataagataagattggcatcggagaaatggggattcttccaggttattaaccatgggatcccacaggatgtgatgagagaggtccttgaaggtgttcggagattccatgaacaacccagagaggtgaagatgaactattactcgcgtgagactgggatcgttaggtattacaccaactacgatttgcatcagtccaaaggtgcgagctggagagacaccttgatttgtgtcatggctcccaatcctccgccaccgaagatgtatccctctgcttgcaggtaaacacattagcttttgggagaaaagctttttacacatgattttctgtcataaaactagtgatagaattgtacacatgagcttgaaaatgcagagagatactggtggagtactcgaagcatgttcaaagcataggcgatgttatctt

SEQ ID NO: 47186 - DNA, 640 bp, Gossypium hirsutum
  unsure (1)..(640): unsure at all n locations
  Clone ID: LIB3582-058-P1-K1-E3
ccccgcgtccgctctgntgggacactaggagnctgggcaaaattggagactatgcattcctcccatccgatgtacttcgccaacaagttgactgaggttgcttcagatgatcctatagactggatggagcaaccttcggatggtttagctattcaaggccttctaaggccagccttcattgaagaacattctgaaattcagaagcatatatctaccaatcagtctcgtagttctgataaacatcaggttgagaaagttgtgggagacaaaatagaagatgttagcataattaatggtcacagaaatgggttagggtcctcaaaagataattcaacatcagaagaatctgagaaaaatgaaatctccatgaatgggtctttgttttacaaattgcagatgtctaaaattcagctaattacagcacatggacatcagacagatgttgaattagaagacttcaaacaagctcaacctgatgccattgcacattcaacagccaaaatcatatctcgcctgaaagctggtggagagaagaccgtacaggcacttaaatcactatgttggagatgcaagggtatcccagttgaggaggcagctattatcagtgtagactcccttgggtttaacttgagagtttgct

SEQ ID NO: 47187 - DNA, 615 bp, Gossypium hirsutum
  unsure (1)..(615): unsure at all n locations
  Clone ID: LIB3582-058-P1-K1-E7
cccagcgtccgcccagcgtccgccctcgcgtccgcactactgaagacaggctattgatcgagcacatagaattggacagactcgtcctgttaatgtaactcggatcccattaaagaacagttgaagatagaatattatctcttcaggaggagaaaagaaaaaggttgcttctgcttttggtgaagatcaaagtgggagctccgcaactcgattaactgtggaagatctcagatatctatttatgggtgattagccatctccattttgttgcattctcctggcattttatgttcctccttgtagtttccatcaaaaagagtgagatttttgtaaattaagatggtgactctcaattttgaagtctagaggcaatttttttttttttttaactatgataactaaaaaggttcgatatgcattacaaaataattaaaatatttacaagatgcccttgccatcctatgtctgcgcttgatgggacaatgtntttagcagcgcgagacaggaatgtcaaagatttcaataatgaccctgaggttactgtgatgctcatgtngttaaaagctggaaaccttggtttgaatatggttgctgnatggnatgttatccttttgg

SEQ ID NO: 47188 - DNA, 637 bp, Gossypium hirsutum
  unsure (1)..(637): unsure at all n locations
  Clone ID: LIB3582-058-P1-K1-H7
ttgnaactggtggnagaattgaaacaggtgagaggtccggtagtgatattactggtgaccaggtcatgaaggaaaagaggagaaagacctagaatacagattctggagaaactgttgagagacaaagagaagagttgaagaaagagaaggatgaacatcagaatgagaaagcaaaacgtatcaagtgtgaacggactattatggaagcagtcaggaaaactgaaaagggaaagacaaccgttttaggtgagcttgagaagtatcaactctcggtgaagcgaatctcagaagaactagaaaagctcaaacatgctgagggcaatcttcctcagggtacctcagtggttcagcttctttctggcaccatctctgatgatcatgcttcatcatatctatctgctgcagaagattttgagaaagtagcacgttcaattctaaatgagcttggaactggctccatatctggagatgttcctgcagttgacaattctgcaccagtcttaacaggcacagtagttccggatcagggtcccgttattgcatcctcaacagttcctgtaacaagtcatcagcaaccagccaaaacatctgaagagaggagatctattttacctaaaaccaatactgacactcgtaa

SEQ ID NO: 47189 - DNA, 609 bp, Gossypium hirsutum
  unsure (1)..(609): unsure at all n locations
  Clone ID: LIB3582-059-P1-K1-A9
gcgagcctcaccaaanagtggagtcctattgtggagttgcattatagaggaggagtatacagaggacgatgccaaggaggtcttcctgaagaaaggtcgtcttattcttggtgatggaagcatttatgatggtatgtggcgctatggtaagagatcaggtgtgggtacattctatttcagtgatggggatgttttccagggatcctggagagatgatctgatgcatggcaagggttggttttattttcacactggagatcggtggtttgtgaacttttggaagggaaaagccaatggtgaaggtcgcttctattcaaaatctggtgatgtcttctttggccattttgaagatggttggcggcatggccacttcctctgtattaccgttgatggaacaaggtgcattgagatctggaacgagggtgtgctcatgagccgacagcaattggatgccgatgctgctctttgataaaatctctaaatgtgttctaaattatgtggtgtatatattaacctattttgtatagccaatttacataatttcttcataccccacatgacacattatattcggaaaccttataataaaattttcttttatttttgttc

SEQ ID NO: 47190 - DNA, 643 bp, Gossypium hirsutum
  unsure (1)..(643): unsure at all n locations
  Clone ID: LIB3582-059-P1-K1-B2
ccggaaccgccattcccgggntcgcccagcgttcgcccagcgtccgcgnaactnganagcctgaaaacatggcaatgccaaggattcagacaggaggaccatctggttactggagctctcaaggttcccctattttggacagtgtagtggctgtttacaccttattgaagttgactccataagcaaaccaaggtttcatatactggaaatgaagcctgatcactctcactggtgtgttaaatacagagttaatctcaacaatgtggcatctgagttcccagagattgctagaaggtatatggatgagtttcctactctagcactgaataatgtggaggagattgaagttcagtattatgcatattcaatactaagtgttgtgagaggggaaaaagagaagatgttgaagtggtgatggtgataccaggtaaaatcatatcccacaatcccaggctaaacacttccaagttattgtcaagctggagggctagcaatgtttatgattgtatgcaatatagatggtacaatgtttttcactatgtagaaagccttgctactctctgaacaaacattattttccttcagagcttgtaaattgtagacctgctttttgaaggtataaaagctagagtttttactttgt

SEQ ID NO: 47191 - DNA, 637 bp, Gossypium hirsutum
  Clone ID: LIB3582-059-P1-K1-B3
gtgtttccatatatcaggtttctatcatgcaaattgcttctgataagaaggttttcatccttgacttgataaaatatataatgacgtgcctgatgttttagacaactgcctaactcacttattgcggtccccaagaattctaaaactcggtatgggagaatctgccttttccaaaagagggaaatcttctcccaatatatggatctcacttttctagttatattgtctcgtatattttgaaccatcctgacatatacacttatgtttgcattcttgattgtatggtttgaaaacgaaggcagccagttttaaacaaagcatctcatggttattctaacactactgagtttgcttttaaacaccctgcacacattgtaggttataattttcaatgtgatgtaaagcaactagctcaatcatatggagatttagagtgtttcaagtgttttaatatgctattggacatccagaatatgttcaaagatccccgaggtggcctctctggtcttgcagagaaaatttgggagccagcttaaacaaaacaagacggaatagcaactgggaacaaagaccattgagtcagaatcagcttgagtatgctgctctagatgccgctgttcttattcaaatattctac

SEQ ID NO: 47192 - DNA, 659 bp, Gossypium hirsutum
  Clone ID: LIB3582-059-P1-K1-B6
gtgattgcattgtttttaaggtcaaacctcaaagaaactgtggaaaccacaaatttcaggagaattaattcctgaggcacaaattgaaggagaaattgattatgtgagagtactgaaccgagtccttccaagtgatattcgaattttaggatggagtcctgtttcaattgatttcagtgcaaggtttagttgtttggctagagaatataagtacttcttttggagaggaaatttgaatctctccgctatggagaatgcaggaaagaaatttcttggagaacatgacttcagaaacttttgtaagatggatgcagcaaatgtacacaactacaggcgtcgtattacacagtttgaaatttcttcttctaatatgagctttgaaggcggtcagctttgtgctattaaagttaaaggtagtgccttcctgtggcatcaggtgcggtgcatggttgctgtgctatttatgataggccaaggtcttgaatcagttgatgtgatagatatattactggacattgagaagacaccgagaaaacctcagtatgccatggctccagagaccccattgatccttcaatcctgtgaatttgaagatgtcaagtttatttgctcctcagattctgggcaagcacttcgtatacacttggaaaatgagggtc

SEQ ID NO: 47193 - DNA, 653 bp, Gossypium hirsutum
  unsure (1)..(653): unsure at all n locations
  Clone ID: LIB3582-059-P1-K1-B9
ccccgcgtccgccnccgcgtccngaaaaagnaaaagaaatctctcatcatttctctcttttgtgtttgtttcttgagaaatgggtgttttttctcttgtttctgatgtaacattgagtaaaactcttaaaagttttaggtttggtcattcgattcattttgaatgccattatgtaaaactgcatgttgattttttctcagtgatgatgcttttgaatgttattatgtaaatttgcggttgtccggctttagatcttttatcgacgatttgctttgttggtttcccattaaactgaaagtcatctgagtgtgagattttatatctttcgctgtctccgctcaggattttgagtttgggttttttgctttgcccacgtatgatctatagcgttagtcttggttgcttaaacaatggatgttttctttgttaaattgcgtatctttcgggtttcataggatgaaatgggagaatcccactgcattatccgcggcgttttacttgatctaaaatgtagttaggttcatttcatcagatttttttttcttatgcttcaatttcattagtggaactgaaatttggaaactttacgtggtatggtactgagctatgttactggaatctggtgactataatacagatttgtttctgcatgt

SEQ ID NO: 47194 - DNA, 654 bp, Gossypium hirsutum
  Clone ID: LIB3582-059-P1-K1-C6
tatgggtacagtaactggcataagtgatttggatcaagttcgctggccaaattcccattggcggtctgtgaaggttggttgggacgaatcaacagcaggtgagaggcagccgagggtatcgttgtgggagattgagcctttaacaacttttccaatgtatccatctttgtttccccttagattgaaacgcccttggcagcctggttcctcatctttgcatgataacagagatgatgtatctagtgggttaatgtggctaagagggggatctggggagtccttcagcacatttccgtggatgcagcagagaatagatccaaatttccctgtaaatgatcataatctgcagtaccaagccatgcttgccaatgggttgcagaacctaggaagtggggatccactgagacagcagttgcaacaatctttgccgtatgttcaacagccaggcagccatagtttactgttgcagcagcagcaacaacgaggtgtttcacaatcagttccacacaacattgtgcaggtacaatcccaaattctaagtgagaacttgccttctgtccttggacgggaacaagtaagcaatcacccggaggaacaggctcagcaacagcataacatgattcaaagtgatcagcttctgcagaggcagccagc

SEQ ID NO: 47195 - DNA, 646 bp, Gossypium hirsutum
  Clone ID: LIB3582-059-P1-K1-E2
gtttactatacatttgataattctcattctaacaatgcttgttgcataagggactatgatgtgctcttaagaatatcacctggttaatgctaccagtatgattcttcctaacagccttaaaaatcatttgctccattttggtgctcagttctggtagatcatgttatatctgagtatcaaagaggggtcaatagttctcatatccataatgacagtgagagtgaaggagcgaaaatcttaaggattcttgagacatctgctgagccagaagtccttatggcagaaatgagcccggagcaactaacttcctttgctacatataaatcaaaacttgaggctactaggcagctagagatggagaaatcaattgagaaagctctggcggaggctggattaaatgagcgagatgttgttccattcatgagggttagagttgttggattaattaataggaattatcatggaaagggaagacctaaagaaggaataataaccatttggaatccaacagaaaagcaggaatgtgagctggttgagggacaggcatatgtcgtttctggacttataccaatggaactcagattcggaaatcctttacttacaagcccgaaggatctaccaactaaaggcagcccctatctcccct

SEQ ID NO: 47196 - DNA, 677 bp, Gossypium hirsutum
  Clone ID: LIB3582-059-P1-K1-E6
ccccgcgtccgccccgcgtccgcccacgcgtccgatcttcaaatacatggtttcaggagttcctatcccacctcaactcctttattctgtcaaaacaagctttgattcttctttggcttcacacctcttccctcaccaaccccagggtggggctgttttcaggtgggttttggcagaaaaccagacccagagccggggaggtgcaggagaacctgatggaaaaaaatggagatgctccaaagaagcttacccagactccaagtactgtgagaggcacatgcatagaggcaggaaccgttcaagaaagcctgtggaagctaattcatcatcatcaacagcaccaccagcaccaccaacaacagcagcagcttccatcctttcaccatctttcccatcaatcaacagtaaccttcccacttcaagttcttctctctctttttctcctatggctactgaaaacttcacccatttcgacccctttctttattctcattcttctacgagacttcatggttcaggcttatcagttccatctcatcatttcctagactctggaactggaattgattaccctcagactgataaactttacaggtatgttcatggaacaagggaggtgttgatgaaagatctttcttccccgaagcttcagcgagtgtaagagttgtatctgattc

SEQ ID NO: 47197 - DNA, 631 bp, Gossypium hirsutum
  Clone ID: LIB3582-059-P1-K1-E8
tgaaatttatttgtcctacctaggttgagactttgttggtagtttggtaccaaatctagtcatttaatagaaacttatgtggctgccaagttagtgataacaatagcacctcgttagtttccttgacttgattgaaaattttacaggggctaagaagataaggatgcaatggatggctaagaagatatatatgtaatatacatcagatgttgcctatcatatcctctatgaatcttccaattgaattgaatggagatccaccattcataatggccttcctagccatctcttccgttttcttcactttcttcctaaccttactgcctgcatccataacctgtcggacaccttcttatatctcatctgccatcacatcacttatccctttcctgtaatccaacgtcatcactactgccaatcccagctccttcatcatatatgcattcaactgttgttcagcaaacataggccatgttacaatcggcacactaaaccacaagctttccaggattgagttccaaccgcaatgagatacaaaccctcctactgcattgtggctgaggacctccacctgtggtgcccacccgcataccatccccctctcttggatcctttccaggacccttctggt

SEQ ID NO: 47198 - DNA, 666 bp, Gossypium hirsutum
  Clone ID: LIB3582-059-P1-K1-E9
tctctctctctttctctcccttcctaattttcttgtctcgatcttcacactttcaaagcattagaaacgagtagatcggttctagaatttgggtgggaaaaaaagggtgagcacgaagagaagcacgaggaatcactgatggagaagctagctgagaagattcacggccatgattcttcctctgattctgacaacgataagccatcagagtcgtcgatcaaggccaaagtttttcgtctctttgggagagaaaggtccgtacaccacgttttttgtggaggctaattatcggagtttagtgggagcttcttcagcattgggcattctacaattgatatttccttcggctgtggaaaaggcagagcatggcagtataatgtcaaggttggaagaacttgagaaagaagaacttcagctgaagatgagttgagtaaagctgctgaaagtgatgaagatgagctgactaaagctggttttcatagaaaaaaagatgaaggttacagttatcttgatcatggtcgaagatattgagaggtaatgttgggacttggtgctttttacctgctaatacaaatgtatgttgaatgtgtcacttatgaaataggtgtatgaaggaaacaacaatagcagtccaaaggcaatgaaccaattgaagagatgtccaat

SEQ ID NO: 47199 - DNA, 541 bp, Gossypium hirsutum
  unsure (1)..(541): unsure at all n locations
  Clone ID: LIB3582-059-P1-K1-G2
nctagttctagnacgcgnagcggccgcgatgggatgggatgtaactcagttgccgccgcaggtatcgcctttgttctttgattttcttttcctaaatctggttaatatttaccctatatgtagagttttccaatttacgaatctgttctgtaaagattaacatgctctttttaaggattttgccttagatctgctattatttgatttgttcttttttcctttgttaatttgtatgttttatcattcagtttaaccatcaatttatcttatttttaagaagaaattcgtgtcttagggatttatccctcaatttgtaagattccaagggcatcggaaagatagaacaaattcatcaatatgttatattttgtgttgcacgagtctttattatgataatttttgggataaataattactttttaagccttttttagatattatatactgtttctcttttgttttttcttatggaatttttggtaggtaagaataagggattttaaggtgattggggatgataaaaaagtgttgaattttttta

SEQ ID NO: 47200 - DNA, 652 bp, Gossypium hirsutum
  unsure (1)..(652): unsure at all n locations
  Clone ID: LIB3582-059-P1-K1-H2
gngttttcagtacggtagtttagttgaggaagtagntgggcatacagctatactttatcacaggcttcagttggactggttcagcatgtaatattttctctccaatttaaattgtttatttttatgctttcattttattgataatttgtcttttgaagcagtggcagcatattgttctgttttggaaccaaacttgttaggagtacacaaaaggactcccttttggcatatttctttgttgtgatactaaccttgattgttgccaatatattttatctattcaatgtattcagaaaatcgccaaaatggactggttaagtctagtattgttggatgtgtataagcatcaaaagaaatcggaaaagatgaaacttcaccgcatcaatgaaatacaatgaaaagaaagaagaacaactgagcaagcaagaagtgaagtaagaaaaaggattgagtggagagagatgaggatgtgctgttgtgtttacaagaactgaagatttttgcattatgggtgttggccctctagctttggtactttgcagaagtattgacttagtaatctagtatgagcagtaaatcagattggtgaagacttaatgatctttccatctaaaatttattcttcatataaaccatgcatgatacttgcata

SEQ ID NO: 47201 - DNA, 655 bp, Gossypium hirsutum
  unsure (1)..(655): unsure at all n locations
  Clone ID: LIB3582-059-P1-K1-H5
ccccgcgtccngtaaatataaataggtatttgcaaatattaagaactcctttggaatatggaggcccctggggaagagacttttttgttgaacatgagatcaaaaaaggaaatctcactttaatgaggtatacataatggagactcctaactttcaatatattatgtaacaattgttagacgcttttgaactttatgtgcaagacaattcctgaaattaatagaaaacttagtcaaacaagataaatgtctcaaacaaataccataacccaaaataaaaccctgaggcctctaacaagattgagtttctacttccaagcaaaggtcaaaggcatgatgtccacataatcaatgagtgggtaatttagtaagtaataaatatgcgtaattaatgaataattttcttatttacacttaatttttatacacgaaaatcagggaaagcctgtaatatccaggaaaaatgaattttgcgtggatattaagagcataaaacagaacaaataagtcagttgccttcatggttagttagtttctcttttgaagagatttaaatcccagaaacttcacttttgttcaacttgacaataaacacttagttggcttttacaaccaagacatggatgtaagtatttcatctaaaacagatgcactgt

SEQ ID NO: 47202 - DNA, 275 bp, Gossypium hirsutum
  Clone ID: LIB3582-060-P1-K1-A3
aagcccgtaaaaaagcggtgattaacaaacatcaatcttaatggataatgggacgcgctctgttgaggttcattaagatctgaaggtgttgtggatacacgacatgtgtccttatggtggccggagaaatagatgcgagatgattaaatatgataggagtttctttgtcctttttgttcagagttttccacataagctgttagtgttgtcatatttatgatgagcatacagagggggctaaaaaaggtgttcgtccaaactgtgcaatgaggggg

SEQ ID NO: 47203 - DNA, 632 bp, Gossypium hirsutum
  Clone ID: LIB3582-060-P1-K1-A5
ccccgcgtccgcacccacttaccatatttcttcttttgaagaagaaagaagtagctttcacggtgtaagcggcctctgctggtttttggtgttggacatccaaattgtaggctgttgtttcgttggagaagatgttgtgtgcttgttcaggtgaacagttcaagtttgaagatgctccacagtctccggagtctttagcaaccagagatttctcagccagtgggctgtcgtctcggaccggagattgggaatccaagctcgaggatgttcaagtggatgaagttgaatccactctcaaagaagctctctccttaaactacgaggaagcaagggcactgttggggaggctagagtatcaaagagggaatttcgatgctgcgcttcaggtttttcagggtattgacatcaaaggtttgacaccaaggatgactacggctattgttgagaggacccggctacgcaaatcacggtccaaagctgacattatccctcatactgtgatgtcgatgcactcagtgagcttacttctggaagccattttcttgaaagcaaaatcgttggaggaacttgggcatattaaagaggctgcaaaggagtgcaacctaattttagatgtagttgaggcggcactg

SEQ ID NO: 47204 - DNA, 628 bp, Gossypium hirsutum
  unsure (1)..(628): unsure at all n locations
  Clone ID: LIB3582-060-P1-K1-A9
gggggccgacggttagcttcgcaggggagctcctgtttcaccgttcctttgttcatctctttattttcaaaacgataatggtgaatgacccccaaaccagaaacgcaatgatgatatggaaaactaagaggactcgaggaagaaaagaaacacctctgctttttttttgtgcgtattcgtatggcttttgttcgaaaaaaaactctctttacagtatctgtttgtatatttttgttgcgtaaatgcgcgtccccccccattacaatgaacattttctggctttatatccgaaacgaaagaaaaacaaataaaagaaaaataatattttctcttttgtctctgtttgttgctgcgtttgtcttgttcgcaggtacggagcagaggacatgcgctggcaaattggtgcggggcgtacggggtggtgctggcgtgtgtacaggagcatgcgtggcgccaggaggagtgtacagtgcctggaggctgctgaggttgctacggcttgaggaccccttttgccctagggtntgccaaagctgagcatgggtttcgggctgtttgggtctgttccagttagtgggcccttgtatttgggctatggggctactggtttttttgtgaattggactaa

SEQ ID NO: 47205 - DNA, 483 bp, Gossypium hirsutum
  unsure (1)..(483): unsure at all n locations
  Clone ID: LIB3582-060-P1-K1-B3
nccccgcgtccgccaaacggacctcttagggggtgcctttagaaacggaggtctgcgagtggtgatggtatctggttctgttctttttcgtaaccggctgctccagtgcctgcctaaacgctctgagcttgattcaacactatgatcctacttggtgagaatgctataagatcctctcctctgcaccgaaggaaaccataatttcaggagccatacatatctgctgatggatcattgactgagaactggtatactcagctatattattattgatgtgggcaactaatgtacgtaacaggctctttgggggttcatttaccacaggatttctggtgttgttcatattgcaaggactaatgaacatgcgtgtgcaattgtcggtttgtgtgatatcattgccatatcaacctgcataggcctactaacgatcttgatccgactcgcacgtttacctaactagacgttgactggatagcatgggcg

SEQ ID NO: 47206 - DNA, 486 bp, Gossypium hirsutum
  Clone ID: LIB3582-060-P1-K1-C9
cccacgctccgacccgcgtcctggtcctgtttcttgggtacacatcgccggattctctactcagaatctcttaagtgtggatctgtcatttgatctatatcctctctgctctggtgggagacaatatctacaactttggggaactgcttgctcatccctatgggaaagagtcttttggggaccagcggggagtggctttactatatcctactagccttcaattcatgggatataggtcactatcaagaattgtgtagcattcacaatgctgcattgaggactcaaccagcctcgggtgagaatgagaagaggctcttggaaaaaattaatgttctttgcttaatggagactatcttcagccgcccggctgaagatcgaaccattcctttaaaagctattgctgatcgaacaaaactgtcgattgaggatgttgagcatattctcatgaagagctagtctgcgcatctgctcgagggcatagtcgat

SEQ ID NO: 47207 - DNA, 621 bp, Gossypium hirsutum
  unsure (1)..(621): unsure at all n locations
  Clone ID: LIB3582-060-P1-K1-D4
taccggaaccggcaatcccgggtcgcccagcgtccgctcgctgnatgttcatggttttttgtttgcttcatttaaaacatattttctgcatatacaactgagtgtgctttgcacttttttaaaaaaaaaaaaaaaaaaaaaaaaaaaaaaaaaaaaaaaaaaaaaaaaaaaaaaaaaaaaaaaaaaaaaaaaaaaaaaaaaaaaaaaaaaaaaaaaaaaaaaaaaaaaaaaaaaaaaaaagggggggcctttttaaaaaaaacaaagttaactacccgcgtgaatccaaaagaaaaattttttttatagggcaaccaaaataaaattaatgggccgggttttaaaaacgtcggaactgaaaaaaccttgggttaaccaaaataaatccctttgaaaaaaatccccttttcccaagttggctaaaaaaaaaaaaggccccaaccaatcccctttccaaaaatttgccaaccctaaatggaaaatggaacccccccttaaccgcccaataaaacccggggggtgtggggtttaccccaaggggaacctttaaatttgcaaggccctaagccccccttcttttggtttttttccttttttttngggcaagtttggggggttttc

SEQ ID NO: 47208 - DNA, 648 bp, Gossypium hirsutum
  unsure (1)..(648): unsure at all n locations
  Clone ID: LIB3582-060-P1-K1-D6
ctcttttagnactaagctttgtttcttcttccatttcaagtaacaccccattttcttcttcaatagcatttcaaacattaaaggcactccttcttccctttcggatcaaagctctcagacgtaggtgctccatttctcttcggatggtttctggaatccctccttccagttaaaaattcattcctttgtttagcgcttcttttttaggtgaacgtaggagagtgaaaggaacgagaaacgggtcaaaaacagagaaaataggccaacgtacgaaatcaacacggcctggacttcctcacacgggcagaccacacggccgtgtccctttgtcaaggtcaaagcacgatttgcacgggtagatcacacgcccgtgcccatttaacagccttgaccatggccttaagcaatcgcacacaagcgtgtccctgccgagcccaagtttagtccaattcggaaaaggccaattttgagggctcttaggcattccaaagtttaaatacctgatgaggcacttagactgggggacgcagaggaggaagcaaagaattgctcaaggaaagccgatcgatccatctcagaagtcgaattcaccatcaaggctgaagatgtctctttagattctctcaggagttntgggttttcttatat

SEQ ID NO: 47209 - DNA, 532 bp, Gossypium hirsutum
  unsure (1)..(532): unsure at all n locations
  Clone ID: LIB3582-060-P1-K1-D9
cgggcactgcacggnaaacgttccaggggaatacatggacgggtgagagagcagaaaagcttgctgggggcacactgaacactgagagcaatgacaagagcgtggccgtttgcacttccctccgcagtcattccaatctcgattcaagggctaacatggcagtgttagtttcctacaatgcttggcttgaaggcatgctatacttacgcccataagagagcgaggggttatatatcttcctagcaagcccggacactttggtgctcccactcgacctccaccctagcgaaaacataccttgagaggaacggtagagcaacactttcgagcttgtcgcatgaacacttagagatctacactatgtgtcctatctgttgcttaaaaccggcccagcaagaagcactgcgtacttgcttgaccatgacaacaggcccaaggtattcatagcacattcttgaccgacctgtggctaaccgtgtacaatactcgggattcttcccagctggaagcctgcgaccttggctatatctct

SEQ ID NO: 47210 - DNA, 506 bp, Gossypium hirsutum
  unsure (1)..(506): unsure at all n locations
  Clone ID: LIB3582-060-P1-K1-E3
gccaaacttacatgctcacgtaatccacagctacatacattcacaacganaaaggccgtgtgttgaagtttctatgaacatatcatcgccgtgagtaagcataataacggcatcacaagacgggaatggcgactaccgaacagtgcatgaagccaataacactgatcccactctgttaaaactgccgcaccattaacattgttgcaacatctgggcagactatcaaacttgaacaatacaattaacgggccttaaatacttttatctgaggttctcctatgtcaacatgaccaaggcatgtatcacaaccccatcttacaactaacaggacactaaagatagccattgttgtgacaggagaaggatactttgaaattgataacctcctaggtccacaaagtatcagctaagaagattacactatgaaaactgagtgggactggttataaaacgatatgctgacgtcagagatccaacacatcgatcggcgttctatcatggcatac

SEQ ID NO: 47211 - DNA, 609 bp, Gossypium hirsutum
  unsure (1)..(609): unsure at all n locations
  Clone ID: LIB3582-060-P1-K1-E5
tgggtgtctgtccctagacatgtgcttcagnananaacaacacccatgatgccaagtagttggatcgtaaggagcttgtactcagggaagcttcttcctttcanacgaaaagaagcatacgactttgcgtgctgtgacgacttcagattgtatgatttctgataattggagtcaagaaatttgaaccatgcttgatcatttctccttatggagttgggtttgcgagcatttctccttacggagttgggtttgtgaaagaaggaaatcaagtcaaaggacttgaaggacacattttctggtcgggtatggttccatggaatggcaagaatagggaattaattgtacatttgttttcatcccttggttgaccatgtttctcttcctttgtcggaatctgcctacctcagattgaaatttgaagtatcaaggtgaaaccatgaacgtggtctttggtcgtaaggatgctggttttaaaagttgcctttttccgacctgtacgacccaacctgagatcagattgttaacagtattgcttggaaagtaactgtttcatcactagaataaatggcctggtctaatgttgtgtttcctcttacctcactgggcttc

SEQ ID NO: 47212 - DNA, 546 bp, Gossypium hirsutum
  Clone ID: LIB3582-060-P1-K1-F3
tttctttcttcgttgtgtttattttagtttttttaattttttttatggattgacttgagatctctgatgattaatgacttggataatgcaagatttatagcgttaatttatgcttgattttcgtttcaattatttgtttagctagaacttcgattttgttttgttttttttttttggaaatctgagtttgttgtttttattattaaggatttttactgtaaatgagttcgctgtttaattgtttgcctgaggaatttgtggctttccttttccaggttttaagtcttgttgaaaagtggattctagggttttgaactgtatattggcgtgattttggtctatttaatggttttgatttaataaaaaacttgttgcttagctcctaatcttgaattaagcatatcttaatgttgtttttacgaaattgagtaacagtagttgccattcagctgttaattaggcatagttttatctatagcgtttgtttcatttaaagcaatggctttgcatgcatgccttatgagtcgatatggttattaagacttt

SEQ ID NO: 47213 - DNA, 634 bp, Gossypium hirsutum
  unsure (1)..(634): unsure at all n locations
  Clone ID: LIB3582-060-P1-K1-F8
cccagcgtccngaagctttctagtgtgccaattgttgtggagttcagagcgtcatctgttcaaatgaacatctcaaagttgcatggggacctaaataagagcaacattgtgaagacggaatttgctgaatcaggggctttggttgatgatctcggtgcaaagggtgtggtaccccggcctttggatgcaaatagcttgatgaaaatgaagttgcgtgatttgagggccattgcgaaatcgcagaagttaaagaaatactcgacaatgaagaaagaagatctggtcaaacgattggaaaatggattaagttgctaatgaatatatgaattgctttttgtacaggttagtagtttcccacatgttttgttcttcttctcatgcttgttgcattggcatatatgtctgaatttgcatcattgtatgaatcccaaaggtaaaatatgttaagtctcttcattttcctagaagtagctatgttggatacccgcatctaacccatatttgaatataagtctttataaccttctaaagacaacccatttgggtatccaatactcacaacttgagtattggataacgcagatctttactcttgatttagggatcacacaataagagaatgctcgttcgtatc

SEQ ID NO: 47214 - DNA, 635 bp, Gossypium hirsutum
  unsure (1)..(635): unsure at all n locations
  Clone ID: LIB3582-060-P1-K1-G1
ctcctnatgtcctattatctctgctcgtactcaatctatcgacttcgttggcgttaccgagggagatgaggtttcgatgcaaaagcgcttaacatggtatataagaacggtcatggatatgtagcagtgcttttctatgcatcttggtgccccttttcaaggtcttttggaccaagcatcaatatcctttcttcttcctatccttgcattccccattttaccattgaagaatcatctgtcagaccaagcatactctcaaagtatggagttcacgggtttcctactcttttccttttaaattctacgatgcgtgcacgttaccatggaaatcgatcttttgaatctcttggtgcattctatagtgatgtcactggcattaagaactctctggataaaacatcattggaaaaaattggacacttgtcaaatcaagagaagcataatagcactgagcaggaaagctgcccattctcgtgggcaagatctccggagaatttacttcgacaagagacatatttgtctttggccaccacttttgtgctttgtagattgctttacctattgtatcctactttgcttgtatttgctcagttaacatggagacggttgattngaaatgttaaactggggacttt

SEQ ID NO: 47215 - DNA, 628 bp, Gossypium hirsutum
  unsure (1)..(628): unsure at all n locations
  Clone ID: LIB3582-060-P1-K1-G7
ccctcgcgtccgcccagcgtccgcccagcgtccgattcaatcagtggttatttcgacaacccaaatcttgcaaccttccattccaatgatcatcttatagtcctaattgctttcctattgccgatctgacactctaagggctttttagcttctttttttatcctgactttcctttataactgcatttcctcccctctgcattcgccttttgtcctctatcaccaactcttccactctcatcggggcctcttctatccagtacttgaccgtttcaaacctcttgcctttttgagccagtccatgcgctgcgacatttgcttctctagcccatctcttctgcaaactacactgcttgctgacatgcactcgcttccgccattgctgggtccaagacatttttaatcgggtatgtgcatgctctcattattaatccttcatgatcttgaatgatgattcctaatattgttgaatttgtgatttgttgaaacgaagcatcaaagttgatttttactatcgattcctctggtgggtgccgtgatttgccttcatctatttttttgtctgatgttacatttctgatatccttgacttttttgatatatgccttaacgtangatataacactaaa

SEQ ID NO: 47216 - DNA, 662 bp, Gossypium hirsutum
  Clone ID: LIB3582-060-P1-K1-H9
tgcatgaccaagttgtattaaagtagtgaaaaatgaagaacatgttgctattgtatcatctgatgttgtcagtgtaaacatcttatcttgctggttactttcaaagtatttagttattttgagaatgaaaaatttatgtggttctggctataaattcttatgctgtgattgtgttcatttatgctgtgtttggaaacataaatttaaaaatttagatttggaattcactagaggccagccagttacaatatcttttgaagtgatttgagttagatattatttttgcaatggcatttgtctatgtagaggcgaatccagaatttattttaggggccaaaattgaattgtaattttctgagatgtcaaatatatattttttaatgtattagtttatgattttataatttttgaaaggattaagtatacttttttttccattttttgagggggccaaagcataattttcctttatattgatttataatttgatcatatgtaaggggttataatttgatcatattattggttttatcaactgttgggagattgttctcataacactagctattggtccattcattgttgctgctggaggcatatctaatatatttcttcataggcttgttaagaacatccaagatgcttatgctgaggcagctagc

SEQ ID NO: 47217 - DNA, 187 bp, Gossypium hirsutum
  unsure (1)..(187): unsure at all n locations
  Clone ID: LIB3582-061-P1-K1-A9
cttgtgtttgatgcttttgattttgaacgaaaaagaatgaanaaggaaaaagggacagggtgccttatactttcatgttgtggaaaataatatcatatatatatatgcctctttcgtccgacgtgaaccatttatgttttcttatacaatttcaatataatangagaaaatcaataaattttctgtt

SEQ ID NO: 47218 - DNA, 639 bp, Gossypium hirsutum
  Clone ID: LIB3582-061-P1-K1-B2
acgatttgagaacctgtcatttttattgttgtttgaaattgtgttgactcataaagtaaaagccatagttaatgcatttttgacagtttaataatcatgtagttataatccggagttctccattccaaaatctatatattgcacttcatcatccttgcagtctccgaaatccttgagagcagatctcttttgcaattgttctcattgccataagatgctcagagtgctcatataagcaatttgcttgactgctgaaacaaactagattctcttgcaggaattgttttgtctgtgatttctgtttaaattaccgaaatgactttagaaagttcacaacagactttgaattcaagcactgctaaggcttgaagttttctttgcaaaagtatactgttacttttgataattgtgcttaaacccttgagctatttacagatgatacacgggaatcaagcatgcagttcacatgtttttactttttttagtgaagcatataaaagatcattaccggtatatcttccagtttatttgattcctacactaatagttcatcgtcaaggccttctaaaaggtaaagtagttagctcaaaattggtgcaatattctcttaccatttggctgcttcatttttttcttata

SEQ ID NO: 47219 - DNA, 652 bp, Gossypium hirsutum
  unsure (1)..(652): unsure at all n locations
  Clone ID: LIB3582-061-P1-K1-B9
ggngnaaatacgagnttatgcaattttttgatggcaataaacatgacccccattctcatcaacggacttcgtcttcctcctcaagggttctttgtccaacctgttcagtcaagataaaaccagtatgagaaacagccgaccagacatcgtattgggcaaaaatttagaaacagctggggaagaagagacagtgataatcacaagtctgtaaggaagagcaactcattggtaattattaccttttcttttaccaatgcttattttaattttccgattccagaagcacttctttccgcaagaactaactagttggtgcgtattggggtaagaaaaattgatatctctaaatctgatacaatcttctatgcctcatatccttccaaattaactggactggtactacagcacggttatttcatgttagctttctgggaatattagtatgatcatagaaaagccttcaatgaagttatttctgcaaattaactgtgttaatgttattttttctttaaatgtactgtttataggcaggtatggttgaattcattgggatgattaaggtgaatgttgttaaaggcaccaacctagctgtccgggatatggttaccagcgatccgtacgtcatgctcacgttgggtcaacaatcagtcaa

SEQ ID NO: 47220 - DNA, 581 bp, Gossypium hirsutum
  unsure (1)..(581): unsure at all n locations
  Clone ID: LIB3582-061-P1-K1-C3
cgtccgatacagttaccagnatgtttttgttatctagnaaactcaaaagctccttttgatttccttgtggcgccaaacccagatagccttttctgtatctcaaaaaccaaaccagttcatttcagcagctagaaaaatttccaacttttgtttctttggactcatttgaacctaaacccagatagcatttgctgtctaactaaaccctaagcgcggtaaaatttgctccttattgctattcaatttgctttcttcacagctgcatgagtttagaaaaactcaaaagtgggtattggtgcttcaatttctggagcaataacaagttaaataagcaacagctgaagctagcatggcaattttcgcggttacaaattctcagctctctttcaatttgtttaacttctctgtttctaggagagaagcctttatatcgagacaagctgcttntggaattcgccatcgcttctcttttagccgatggttgagtttaaactcccctgcttctaatactnataggcttggtgtttgactgctttttattggtgatgttcattaactaatactgtttttgatttttatgg

SEQ ID NO: 47221 - DNA, 641 bp, Gossypium hirsutum
  Clone ID: LIB3582-061-P1-K1-D1
ctctgttagctaagccctacatcaacttgttatcttcaacagccatggcattgtgctcagctttctgccctcgtatttccaccaacttcagacccaaacccttttcttcttttccttcaaagcctctgctttctctttctttcaaggttttttcttctcaggccactgatgcttcatcccaagataaattttcaggcagagttggttttctgggtcttggaattatgggatcgccaatggcactgaatctcataaaagctggatgtgatgtgatagtatggaatagaacgaaaagcaaatgtgatcctctcatcagccttggtgcaaagtatagttcctctcctgaggaagtagctgcaaactgtgatgtcacttttgccatgcttgccgatcctgaaagtgcaattgatgtcgcctgtggaaagaatggagctgtgagcggaatgggtccaggaaaaggctatgtagacgtttcaacggttgatgttgccacttctaaattaatcaatgaacatatcaaagcaaggggggcattatttctggaggctccagtttcaggttcaaaaaagccagcggaagatggacaactgatattccttactgcaggtgacagatcattatatgagttagtttctccactg

SEQ ID NO: 47222 - DNA, 551 bp, Gossypium hirsutum
  unsure (1)..(551): unsure at all n locations
  Clone ID: LIB3582-061-P1-K1-D8
ccagggcaaaagctcaccatagcagtgctcctacgacctgtcaataaccctggcaattaccagaaattcttccctgctggacaggataatgctcaggcatacttacaaatcttcagacgagaaattattgaggctgtcttcaatgcacgaagtgagccactagacgagctgtttggcgggaggcaaagccataggaggcagcatggacagggaatgttacaggaagtcagccaagaacaacatacgggcattgagccagggagctacttcaccaagggggaaaggtagggagggaggcgccttgaacttattgagccaaacatttagctactccaaccaatactgccgcttatacgagggttgccatgaggattgccagcagcaactccaagaagaggattcctacgtggatgccttcgaaatagacaaaggatcgatcttaggaccgaactacaatccaaaggctacattagaggttctattcaccgaacgaaacggccacggaaaaatggtctgccctnaggtttgtaggcagagctcacagtggtgct

SEQ ID NO: 47223 - DNA, 655 bp, Gossypium hirsutum
  unsure (1)..(655): unsure at all n locations
  Clone ID: LIB3582-061-P1-K1-E7
tgatagtatggcataaaattgaatattcattggnagatgatagacgtggattcagccaagacaaagtgtatactgtgaaagtatatgtggtatgtgaagtatatttggataattgtgatgtgaatacatgaaaaatatattttgattaggattgtatgagatgaatgtgaacatgcatatgtgataaggccgaatggccaatgtggtgaacgtgaacatgcatatgtgtgataaagccgaatggccaatgtgataaacgtgaacatgcaaatatgtgataaggccgaatggctaatgtgatgaatgtgaacatgcatatatgtgataaggccgaatggccaatgtgatggacgtgaacatgcaaatatgtgataaggccgaatggccaatgtgatggatacgaacatgcatacatgtgataaggtagaatggccaatgtgatgaacgtgaacatgcatatgtgtgataaggccgaatggccaatgtgatgaacgtgaacatgcaaatatgtgataaggccgaatggccaatgtgatgaatgtgaacatgcaaatatgtgataaggccgaatggccaatgtgatgaatacgaacatgcataaatgtgataaggtagaatgaccaatgtgatgaacgtggaagtgtatatatgtggc

SEQ ID NO: 47224 - DNA, 664 bp, Gossypium hirsutum
  Clone ID: LIB3582-061-P1-K1-F9
gtcaatctgtgcatcaaaggctctcaccagcgtctctcacgtctcaattatctgcatatctaccattgcactaattttacatctttggaaattgaagatgaattatctgccaccaatttgacctcgcttacactttggcattgcatgactttaaagtcattgcctgagcaaatgcgctcccttttcccatcccttgatcatctgtcaatacgatattgtccagagatagagtcatttccagaagagggtttatcctccaaattaaaaactattgaaatcggaagaactgacaagctaattgctagcatgatgaggagagcatggggtttgcgaacactcccttcacttagaggttttgaactctcaggtgcagaattagagatggagtcttttccagaggaacatatgttgccatcttctataacatctctcaccatctctgatcttccagatctaaagtttttggacaataaggcctttcaacacttcacctctctttgtgagttgattatcgacagctgtccaaagctccaatccatgccggaaaagagtcttcttacctctctttcttatttgtccattaacaattgccccttgctgagaaacgtttcaaaaagaagaaggcaaagattggcccaaggtttcccacatccctgtcattcac

SEQ ID NO: 47225 - DNA, 642 bp, Gossypium hirsutum
  Clone ID: LIB3582-061-P1-K1-G1
ccccgcgtccgcccagcgtccgcttgctcttgctccacgtccgaagcgcttgaggcaacactattcacttttgaagaggccgtggaggaatgaaagataggcaaatatactctgctgggttttcatatgcaggagcactgagcatttatatactctgcttgtgagcatagtcatatagctatttgtttctttaacttttaacacaatttggcatcagttctagaacctaatagccagtccttttagtatcatttgcgaagcacatttggattaaaggcatacacatatgtgcaagctttttatcagccctgataaatgtataagttgctctaaaggcaccatgaccttgtatggcttgaggtgtaaatagaaaagtgcaaatctaagtgaagaaaggtgcatattcctataaaaatctaataaagacgtggcaaaaggtaaaggaaatgcataaccaatataacttatgggtgttaaagcagttgactcccgtcacttggccgagctcaagtggtattgataaaattcaaggtatgagccatagaaacttctataggttcaaaagaaaataatcattggagtggtcaaggtcagttcgtttcagtaattatatacctttacatttttcattccattgcagtt

SEQ ID NO: 47226 - DNA, 591 bp, Gossypium hirsutum
  Clone ID: LIB3582-061-P1-K1-G9
caaaaacagggggtggggaacccttacggctctgcgccgttcaaccatcctttcatcaccgctcacgatgagtgacatccttcgggacccccccttttcgttcttccgttcactccattgtggcgctcatcgattcaagccctgaaatctcatcgtcgacttcgatttcagagatagagacgaggtcttatgatggctcgtatgcgcaaggtaaggcttagcctctctctactttggttattctattatacagcaactcatatgaaaacggatagaagatgaaacagatgcctaaaaataaggaagcacagggcgttcgaaaataaatcaccttcttgttctattgctttgatattgctttgctattgcgtatgtttcctctgttttttttgaaaggggaacccctgcacaatcagaattggcaggctttatagccgaatgttaaaaattaaagaacatacgagttcccttgttgtttctattggcttgtgcgtatggcttgtttgtttgcaggtacaggtgcagtgtactaggatcgtgctggcgttagaggtgtggacttcttgccgaggagcaccacagagctgtgtt

SEQ ID NO: 47227 - DNA, 602 bp, Gossypium hirsutum
  Clone ID: LIB3582-061-P1-K1-H2
ccccgcgtccgccccgcgtccgcagcactcatctactgctttgcgctgccgttttagcttttccttctttaaaaaaagcttacagactattctcaaagtttctttccttatttttcattagctaagcaaaatcccaagtttatagagctattcttcggtcactcttggtcctactgactctttgtatgtactctctgtcacttatctttatttttttaaaatttccttttctttaagctttaaaaacactcattttttgctgatttttttcttgtttttttgtgggtaaatgagactgagtgcagttcactgaaaattttccgggaaggtttttttttttgccggaaaatggcatatatgtgtgctgataatgggaatctaatggcaatcgctcaacaagttataaagcaaaagcaagaacaagagcaacaacagcagcagcaacaacaacagcagcagcaacaacagcttcttggtttgaatcctttctttttaaatccttggtctagtactacccaccatggtgtttccagttcgggtaatgtcgggtatgggcttacgggtccgggttttaccgacccgtttcaaggggatgcttgggt

SEQ ID NO: 47228 - DNA, 163 bp, Gossypium hirsutum
  unsure (1)..(163): unsure at all n locations
  Clone ID: LIB3583-031-Q6-K7-A1
ttgctgacccaactngagtttttnttgggagatgttattgtnnttgaaggaccctgacaattnagaaaaactatttggtnnagaagattggnttgncacagaaggatatgtaaatggttgttaaagggatgaaaaagatgagttgatttgttgtgtgaaaagg

SEQ ID NO: 47229 - DNA, 533 bp, Gossypium hirsutum
  unsure (1)..(533): unsure at all n locations
  Clone ID: LIB3583-031-Q6-K7-A7
tgacagnatttaactgacaagttgatcttgcaaatgaaagtctcccaaatcagttgttagcaatggcattgttcaanactgatgaaaacagctcactggcttacttaaagaagcaagaggaagaccaccttgccaataagtcggagaataccaatacatcagctcttgctgaacctgatgaattggaaggtgagaaagtggtcaatttagattctaagctagagcaaagcaccaaggaaaagggaggaaattccattcaaaatcagcgaaaccttctgacagcactcatgttggtgggagggaagttgagaccttaactgactataaagatgacagcaaggatgatgctcatccacccaaaactaaaagagagacggatgttcagccttccctaacaaaagcaactgaggatgaatccaatgatgttgctttnccaacaccaactgggactgtacatgatgagagnnatttgaaaaaggctgntttgcccaaaaggaaagaatgnttgagtaaggagatnatttttgttgaag

SEQ ID NO: 47230 - DNA, 310 bp, Gossypium hirsutum
  unsure (1)..(310): unsure at all n locations
  Clone ID: LIB3583-031-Q6-K7-B2
cccggttcgncacccncgtccgcggccgcgtgggttttggtaataaaccagnctcagncaggnctctctcataattgcaaaaagtctgaaagcttagtatacaaaaattgatgataataaagtttaactgatacaattgataagcctatgctggatcttaaacaattattccataatttcctgggaatttaactgactggcagcattaattacaaatatcactagctacatcaacattgtgcctggtgggatnaaaatacagaacaaatgcaaggatgtgaggagaaaaggacataatntntgnaaaaag

SEQ ID NO: 47231 - DNA, 416 bp, Gossypium hirsutum
  unsure (1)..(416): unsure at all n locations
  Clone ID: LIB3583-031-Q6-K7-B7
ccccgcgtccggctgntgcctatcgacatgtgccgagaagatttgatattgatgatacgattgaactgttaaggacggtccaaaacagagatcgaagcatttgctaagctagcaaaaagagcttgaatcttaacggaaagaaaagaacccaccatgaaacaagttgcattggaactggaatggattagatcaccagaagaagctgatgccatcgaacaatgtgccgatgaagattttgatattgatgatacgattgaattttcagctacggcttcttgttcaacgtntggtttaattntgaatgatagtgtaanntttgaattagatgnatagtnatgnttgtnggaannagagtgggttnaatngaggaaaaaatattggttnatagattggatgtgattaaatgttatattttt

SEQ ID NO: 47232 - DNA, 241 bp, Gossypium hirsutum
  unsure (1)..(241): unsure at all n locations
  Clone ID: LIB3583-031-Q6-K7-B8
ggcataccacattaactgcatcgaagaggagtcctcactcgatcagccgattattggcccaaactaagaaatttggtcggaaggcattgaagcattgccacgagagaaggtacagttggctacaaattcgggttgaagctgggtccagaggtccgggtggggggggactctgaatttgtcttcttcacttgagntagccttnaagccttgatgtggtttattgatntttatatntaataga

SEQ ID NO: 47233 - DNA, 286 bp, Gossypium hirsutum
  Clone ID: LIB3583-031-Q6-K7-B9
cggtaccggcattcccggtcgcccagcgtccgtcttgttgacagggggggtttcatggggcggtcttccagttgtcccgagcatatcatcacagtcgcacaaatatacaagaggccacaagagacagcaccaaagctcagacggtgaggaggggatgggttgccttgcctgtggagactcactggtgggggggggggcggctcacttggttggcgccttgtgatgtggaatgatgccaaccagtgtgagacttaggaaattttcttgctggtgcccaagggggtgt

SEQ ID NO: 47234 - DNA, 166 bp, Gossypium hirsutum
  unsure (1)..(166): unsure at all n locations
  Clone ID: LIB3583-031-Q6-K7-C12
gtccgnatcccggtcgcccacgcgtccgcattttgttccattccctctcaaaacgcgccgcataacaccaggagcaacttgtttttcccctctccttttcagttctgaaatcgagcctccttgacaccgctgaccccgttctcacgtcctagaaaggcctttcctt

SEQ ID NO: 47235 - DNA, 292 bp, Gossypium hirsutum
  unsure (1)..(292): unsure at all n locations
  Clone ID: LIB3583-031-Q6-K7-C4
cgtccgcattcccggtcgccccgcgtccgcctccccgcgccgcttctttccattcttccacttttgcccttctccctgatccccattctcctgttcctgagggatccgtttttagaccaaataancgtatcggacagggagagtttgaagtaataggaaggagnaaaagagggggggggggataaatggtaattttattatatttgtggtaggaaaaaaaaagnattattaaggtgagaaagggaaaaaggaaatatattgaaaaagagtggtaggtgtaggaataaagaaa

SEQ ID NO: 47236 - DNA, 315 bp, Gossypium hirsutum
  Clone ID: LIB3583-031-Q6-K7-C5
ggaccggcatcccggtcgcccagcgtccgggatatttggtccatcaaccatctcaaagttcaagtaagtgtcaaatacggtatattcaattttttttcatatttttggaggttccttagaagccaatgccagcacctagctcaaataggtgacggatgaggaagatacgagcacttcttgtaaaagaagagccatggcgggaaccagggcggaccaaggggattgggaggggctagggccccctaaaaggaaaagacacattggtccctttatgttttataaaattataatttgtaaatgattaaattggagttt

SEQ ID NO: 47237 - DNA, 349 bp, Gossypium hirsutum
  unsure (1)..(349): unsure at all n locations
  Clone ID: LIB3583-031-Q6-K7-C8
tccgtccgaatcccggtcgaccccgcgtccgccccgcgtccgcggccgcgtgggcgggcgcgtttacccgacctgggcacttggttatggaacgctcggtcagtctggatattctgcttggaacagtgaatttcagaaagcaaaaacttctattgggactgatagagaggtaatgcttgaaaaggttgcagacatgatgnanagggatgggggggggattggngctactgntgtggaaganaaattgnagaagggggtgtccnagtgtatagataatattgnagaagttgttgtgaagatgtgggttttgatggtggagatgatggaaattgatataaatatagtattt

SEQ ID NO: 47238 - DNA, 246 bp, Gossypium hirsutum
  unsure (1)..(246): unsure at all n locations
  Clone ID: LIB3583-031-Q6-K7-D11
ggntgttaaaaatggggtagggagtgtgtggtttgtcaaagtgcaaagtgaactagtggcatatcttggactccttcagccactaccgatacctgacagagcttggttagttgttagcttggatttcattgaagggttgttcaattcaaacaagaaaaatttaccgatgcgtggggggggggggggggttnttantttnnatttnattnnaagntttnttaatataaatataaaaaattttatttt

SEQ ID NO: 47239 - DNA, 285 bp, Gossypium hirsutum
  unsure (1)..(285): unsure at all n locations
  Clone ID: LIB3583-031-Q6-K7-D4
cacccatagaggatcgagtcaaagaccttctttctcgaatgactctacaagaaaagatcggtcaaatgacccaaatcgagcgaagtgtcgccactcctgctgatctcaaaagcttttccataggcagtatactgagtgccggtggaagtgtgccatttgagaaagcattgccagctgattgggctgatatggtggataagttncagnaggcagnacttgagtntnggnttgggatacngnttatttatgggattgatgaanttaatggataaaatagtgtttatg

SEQ ID NO: 47240 - DNA, 227 bp, Gossypium hirsutum
  unsure (1)..(227): unsure at all n locations
  Clone ID: LIB3583-031-Q6-K7-D6
ggtccgccatcccggtcgaccccgcgtccgaccccaccgccgcaccgccccaggagtaggagagcaggggcgggaaactcatcatgcaacaaccttcttgtgccttcgaagaacttcctcgctcagctttcacgttgacccgacatcattaggaaaaccacgtgtacgaggaaatgaggaccatcatcaggggggggggggactccaantcntaacaccnncccata

SEQ ID NO: 47241 - DNA, 197 bp, Gossypium hirsutum
  unsure (1)..(197): unsure at all n locations
  Clone ID: LIB3583-031-Q6-K7-D7
cggtccgcattcccggtcgccccgcgtccgccccgcgtccggacgactccagtcgtacaccacccanatggagagagacgtgggagcgccagcaggagcaggatccgcatcgagagagggtntaagataatggctgagaacttttgtcctgagataaggaaacttgtgacctgacgtgggggggggggaacaaagcc

SEQ ID NO: 47242 - DNA, 235 bp, Gossypium hirsutum
  Clone ID: LIB3583-031-Q6-K7-D9
cacgcaactgagcactaaactagctgtttggtggtaggcattatctctgaggaagcagcgaagtgcaggtgaatcgttacgtctgccagtcttgaacaaatcaagtcattgatcctaataagctacttcaccaaagggataaaagtgacgagtagattccctcttcaacttattagagccaaaccgcttgttggtggcgaccaaaacggatctattcttatgaggacttgcccac

SEQ ID NO: 47243 - DNA, 500 bp, Gossypium hirsutum
  unsure (1)..(500): unsure at all n locations
  Clone ID: LIB3583-031-Q6-K7-E11
ctgtattcattanacaaatatctttggggagaataacggagcaaaacagcacgatccatcagcggcgggtattttgaaatgttaaacggaataagcgagtccggcagtgatgtcgtgggtagcttcatatcccaactacaggctttccaaaatagagtgaaggaattagaggctgagaattcaaagctatcttctcaaatctccaaatgttgttgccataagacagaggagatgcaaaatggttctgatgttgaaagctttaaacagggtgtggaaagtcagagaaaaaacgctggaggtgataagaccagaaaaaagaaaacaatagaaagaaatccaggttatgatttgaaaattatgactcaccattccaagagatatgttgctttaagagtcatgtattttggtcagaggttttatggttttgcttnagaagcacaaatggatcccactgttgnagttgaaatttttaaaagcattgagaaaaaagggttttagtt

SEQ ID NO: 47244 - DNA, 578 bp, Gossypium hirsutum
  unsure (1)..(578): unsure at all n locations
  Clone ID: LIB3583-031-Q6-K7-E5
gcgagtaccatgnaaatcaacaaaaacattggacgtattttccacaaatggcggtcngaatggaagtcacttaactgcaattgccagtgaaaaacctcaatttgctcttgctaaacaagagcatgctttcgcaggggcttttgctggaatatttgttagcctatgcctacatccaattgatacagttaagacagtcattcaatcttgtcatgcagagcagaagtcaatattttatattggaagatcaataatttctgaaagaggcttcactggattatatagtggcattgctagcaatattgcatcttcagctccaatatctgccctttatactttctcatatgaatcagtcaaaggggctttgcttcctcttctccctaaggagtatcattctttagctcattgcatggctggtggttgtgcaagcgttgctacttcttttatttttacacctagtgagcgtataaagcagcagatgcaagttggtgcacactatcaaaactgctggaatgccttggttgagattattagaaaggggggtntgncttnactttacactgggtggggggctgtacttt

SEQ ID NO: 47245 - DNA, 284 bp, Gossypium hirsutum
  unsure (1)..(284): unsure at all n locations
  Clone ID: LIB3583-031-Q6-K7-E6
ggtccgcattcccggtcgcccagcgtccgcttaggtaacatggtgggacagtcagttttcgtagttttgctcttttctcttttcctttcctttggctgctttgctctgccaaaattccccggcagaaaaggaggagacctcgaagagtcgaggatgccagagcgagccgtcggaacactggcggggggggggaaaggtanaaaagggtgaaaggcattaggaggaggaggggtgaggatagatcctcagaggaatcaagattgggtaaggtgagttgggtgatg

SEQ ID NO: 47246 - DNA, 332 bp, Gossypium hirsutum
  unsure (1)..(332): unsure at all n locations
  Clone ID: LIB3583-031-Q6-K7-E7
ggncgaacgaggnanaaccagtgcaaaaacttctactttattttctttgaaatttattttcattttcgttttgtaatttttttttgttttagactcttagttataaattgaagatattaattttaaaaaaataattttacagagaaaaaaaagcagtaagtgaatgagaacctcgccctctttgctatctctgactatagattcagctgttcttaacctttccaatatcgcagatctctctcctcttcccgaccatatngnnatngacctnttnntgagaacgntgagagntggaaagttaantgagagaggtntnaagttgnttatagata

SEQ ID NO: 47247 - DNA, 533 bp, Gossypium hirsutum
  unsure (1)..(533): unsure at all n locations
  Clone ID: LIB3583-031-Q6-K7-F12
catgnattatcaggcctcaacctganaaaaggatccctctcttttgacaagggaagagatgagaccctaagtttgggctcaaatttgtattcaaagaatggttgagctggcaaaggagagtacaacattgcgcctagtagtggatccaatgtttgtgtacttcgactctagacagcattgggtttctcaacaggggttggcaatggtggttttgtctgatatgtcctactgggaggcttcagggaaccaacaacttgttttagctgctgttgtacgtcatctagaccacaaaaatgtcgcacatgatcctcaactaaaatcttatatcatacaagttgcagctgctttagctaggcaaattagatctagaaggatgctggctgaaattggttttgtcagtgacctatgcaggcatttaaggaaaagtttccaagccacactggcaatcagtaggagagcaggacactaacttaaacatcttgcttcaaaattccattgaagattgcttgttggaaatagcaagaaggatggat

SEQ ID NO: 47248 - DNA, 452 bp, Gossypium hirsutum
  unsure (1)..(452): unsure at all n locations
  Clone ID: LIB3583-031-Q6-K7-F4
cttaggcattcttctgcttcatcgaaattgaaggcaaaccaaagaagatttttgtattaacaagttacttccgagttactgagcgacaaaatcgtcctggctttgctttttctccctcaaatctctttgaattgggttgggtgaataaataggacatttagatgttggggaaaggaaggaaagtgtctggtagaggagagacagtcacggcaaattatgcttttggcccagctgaagatgatgctattataaaacacaggcttctgacccgtacaactactacgagaggcgaaccaccattgaagaaacttcaaaggaagtttacctcatttgtgttagaggttgaaaaagaagaagaaaactataatgattgggcaaanatttncacggntttnttacaagagttgtnnanttttgagattnnttttataaagagtaaaggtgttnttgat

SEQ ID NO: 47249 - DNA, 326 bp, Gossypium hirsutum
  unsure (1)..(326): unsure at all n locations
  Clone ID: LIB3583-031-Q6-K7-G1
nataattctgcgtttaatgagttgagtttcatgggaaacgtaatggaattgtagcttgaaatgaataagatttagcctttttgattactattngaaaaaagcacttaggaaatggagtcgatccccttnttttnntctgtgaagtcggtagtcttagttgtataaagccgacccagatgctatgcaacgatgggttctntgccttttgtatcattagatttgatcttgaacagggggaggtnatagaagagtgttatncanntggttgttttttttaagaagaggaatttgaggttttttttttttnatttttgttttgtgggggg

SEQ ID NO: 47250 - DNA, 197 bp, Gossypium hirsutum
  unsure (1)..(197): unsure at all n locations
  Clone ID: LIB3583-031-Q6-K7-G5
cgaaagactcatgaaaaggccaagtgttttgagaacctatgacaagctgcatttaatttctttggagagcttattcggttcaacccggtaatactaactcggaaccgacgtccggtttgatcgtaaagggtattatttnaatngctccnttcttggggggggggggaaatttanaananttttaattataggggggg

SEQ ID NO: 47251 - DNA, 183 bp, Gossypium hirsutum
  unsure (1)..(183): unsure at all n locations
  Clone ID: LIB3583-031-Q6-K7-G6
cgtccgcatcccggtcgccccgcgtccgccccgcgtncgcaagccacgaggcgcagggacaggnatgttccgtaagccagcagacaaataaggcattgagccaaaactacttacaagggaaaaggtggaggatacccttcacttttgaccaaaccctgtctccaaccaaaanccggggggggg

SEQ ID NO: 47252 - DNA, 274 bp, Gossypium hirsutum
  unsure (1)..(274): unsure at all n locations
  Clone ID: LIB3583-031-Q6-K7-G7
attttgtgtcccgcaacttcccattacattcgttgcatcccaaaccagacctgcgntgactgggttcggtctttcaaccagaacattaacccagaccataaccagaggatcttcgtggctggaaaaacaaccatgtgagacatgggatagccaagccaaggagttgggggggggggtgtcatcgaggttggtggatgagatattnaacaacaaccnanaagagtnttacttngtgtntnngaagaggnagngtgnatttgaataaagagttaga

SEQ ID NO: 47253 - DNA, 220 bp, Gossypium hirsutum
  unsure (1)..(220): unsure at all n locations
  Clone ID: LIB3583-031-Q6-K7-G9
ttcgccccgcgtccggccagnattaggtgttngaagagccagctggaggttgtatgaacatgcttcatggttgcagaagtgtttttgagtatgaaaaatgaacaaataagtgaaggtacatatggcattgtttatagagctaaggttttagatacatttttaaatgnggcactgaagagggggggggggggggatctaananatttanaaaaatatggtt

SEQ ID NO: 47254 - DNA, 407 bp, Gossypium hirsutum
  unsure (1)..(407): unsure at all n locations
  Clone ID: LIB3583-031-Q6-K7-H3
ccccgcgtccggtttggggatctatgggatggttcaattgcttacggttttgaccgcacagcagnagtaagtgctggtgtatatttgcccagattgaaaacgttggtagctcctatgactgttcgtgcatacttgttgacccaagatttgctgaccttttcttcttacaaagagcgttccgttggactttctgttggcttattttcgaatagatttcacaacttggagtaccaccttgcatggcgtaacttgatagatccatctcaaatgacgtcatctgtaaagatgcagcttggacatgattatctttcatccttgaagtatacattaaaaattgacaagagaaattctcctgtgaggccaactaaaggatatgcttttattgctaaaactcttttggtggtctt

SEQ ID NO: 47255 - DNA, 387 bp, Gossypium hirsutum
  unsure (1)..(387): unsure at all n locations
  Clone ID: LIB3583-031-Q6-K7-H7
cagnattatcagtcccggtgagaaaaggcagttggtactggctactctccttcgagnccagccatttatcttggtcacctgagtctggagattcatttactgccgagcaccttgcgagactggatgtaagatccccggaccgactcgttggcgagctgcattttctcgatgatacagtgacattgacaccagaggagctgtcacgtgctccagccgaagttttgggaaggagcagtcacgggacttngtacagggcaacactggataatggagtattnttgagtgtgaagtggcttngtgaaggggtnggaaaagagagaaaagagttngntaaggagggtaaaaaattaggaatatgnggnatnaaaaggtggttgagttgagagg

SEQ ID NO: 47256 - DNA, 172 bp, Gossypium hirsutum
  unsure (1)..(172): unsure at all n locations
  Clone ID: LIB3583-031-Q6-K7-H8
ggaccgcatcccggtcgccccgcgtcggctcacagcacaccttcttgtgccttcgcagaacttcctcgctcagctttcaacgttgccacgactcattaggaaaatcacgtgncgaggaaaagagcacatatcagagtaggacagatccagttgtaacacaccanatggagaa

SEQ ID NO: 47257 - DNA, 520 bp, Gossypium hirsutum
  unsure (1)..(520): unsure at all n locations
  Clone ID: LIB3583-032-Q6-K7-A1
tgccgcctttcacgaaactgggttaaccatcaaaaaccgnaattggaagtnntacaaacttccaacactttaaaaaagttaccaaacccagnanaacagnaactacnnttaaanngaaggcaaaaactagtaaggggaacccagnatatnntgttgttgctatggtaaaaggggagaaacaatgtcgatnnggatctcagatgactacnannctattatcaaggnaagnngagaagctgagatnntcttatgcatgctaaannaatgaagttttttacaacanaaacccaggttnaacaacangagacnnatgtctattgcnntgtccnnnaaggacattcatnnatcgagnatggaagnncaggagcacgaggcnnattgttgtcttaaaaggggaacaaatcanngctgcaaagcttgcctttgagaataatgttacttgtatnnctgaggtagatgatacacnttaatggactnnctgatgtgaatacntgaaaaatnnaaatgaagaatggggaag

SEQ ID NO: 47258 - DNA, 352 bp, Gossypium hirsutum
  Clone ID: LIB3583-032-Q6-K7-A3
cccggtcgaccccgcgtccgaaattttcagctcttttccctttcatcgactgaaccaaaggttattcactctttgcctccacgttatcaaatcggaccctcctaaatccccatcagagcttcgatttcaacgaattcaacaaggattcgaaggctcctcaagaagaaagtatttttgcttctgcttattttatttggggggcacacaaataacaaaaagcaaagaactcaaagcaaaatctacgagaagaatgagattttaaaatcacctcttgaactgttcccgtttttctattcaaacttctctgtgtagatttgtatcctgggtttttttttggtgttatatggttttt

SEQ ID NO: 47259 - DNA, 161 bp, Gossypium hirsutum
  Clone ID: LIB3583-032-Q6-K7-B4
ccgtccgcattcccggtcgccccgcgtccgtggttcttgcacttgctcttcctttctcacacttgctgtgttggtcacagaccagttgccacctccctgcgctgttctggtgttgccttttggtttgcttggcctttgtggatgatctttttttttttttg

SEQ ID NO: 47260 - DNA, 448 bp, Gossypium hirsutum
  unsure (1)..(448): unsure at all n locations
  Clone ID: LIB3583-032-Q6-K7-C9
ccggtccgcatcccggtcgccccgcgtccgccccgcgtccgcccactctccgccccgcgtccgatcaaaccagaggagtcagaaaaacagttgcagctattggtggagctactaatcctctcttgaaaagattgcggacctgcttttctcaattttggaatatgaattgtgggatgcttanacagggggggggggggggtaataanaaataatantatatnccttttntttttttcttanaaanatccattttttttttttttttttttttttttttttttttttttttcttttctttttttttttttccctctcttccttttttctttttttttttttttttttttttttctcctttttttttttcttctcttttttttctttctttttttttttttcttttttctctcctttcctttttttttttttttttttttttttttttctt

SEQ ID NO: 47261 - DNA, 431 bp, Gossypium hirsutum
  Clone ID: LIB3583-032-Q6-K7-D1
cccgcgtccgccccgcgtccggtttgttacaaaaaaaaaaaaaaaaaaaaaaaaaaaaaaaaaaaaaaaaaaaaaaaaaaaaaaaaaagaaagaaaggggataagaagatcaaaaaggaaggtaggctttgtttggagtgctttgagattttttatgagtgtttttttatgttaaataaaatggaacgaaagtgaccagaggttggggaaatggggagggctggggctactcctggaggttcacgcggttttgagggggggttgccccttttttcctgttgtttttagttggggaaaatgtttaaaaaggttggcgccttgtccgatttaggccgaagggtgggggggaatagtggggggtagtggtattatggattgtatggggggcgattgaggtgtggtgggtagggggggaatgatgaacggtgggg

SEQ ID NO: 47262 - DNA, 364 bp, Gossypium hirsutum
  Clone ID: LIB3583-032-Q6-K7-D3
cccggtcgcccagcgtccgccccgcgtccgtcgaattctcctcctctacggtaaaaagactcccttcccctcttttctctccggcggcgatctcaaataccggtaaatgaccgtacgcccgatactcgcactctggactccttgacactgtggtttagttatttaactcgcgctctgaacccgatatgatatctgttaactttgttattgggattctgggttgggaaatcatgtctattttgaggttgctgtgattcatattggtagctctcagtccttggtgtgctttaaaatccgtctgtggaacagtggaaaaaccataactccaaatttgggacactgttggccagacgcttaggacatc

SEQ ID NO: 47263 - DNA, 234 bp, Gossypium hirsutum
  unsure (1)..(234): unsure at all n locations
  Clone ID: LIB3583-032-Q6-K7-D6
cggtcggcattcccggtcgcccagcgtccggaaaaacgccggtgagagaaaacagctcgaaaattgatcgcctgctttttgtttgatcgtaaagatcctgggcggatctttgtccacttgtaccggatttatattcttctccatttgagggacgcttctcgatgttttagagaaatcacttggtggggggcgcggtcattaganggcctaccgaaaaccgaggtgtgctgtttt

SEQ ID NO: 47264 - DNA, 275 bp, Gossypium hirsutum
  unsure (1)..(275): unsure at all n locations
  Clone ID: LIB3583-032-Q6-K7-D7
tgtctctgctctggcattggtcagtgacatttctttgtctgtttaaccagggnaagtgtttggtttttgtccttctggaagcacaatcgatcatttcttggtttggtttctcgactcagtagtaggttacacaaggaaaaatctttagctaatttaatttggaactctttggatggaccagggggccactgntgtttttctaaaatgtaaacccgaatgttactctgacttgnnaatncatgtttgnngntnnaggaaananaaagagttttgga

SEQ ID NO: 47265 - DNA, 517 bp, Gossypium hirsutum
  unsure (1)..(517): unsure at all n locations
  Clone ID: LIB3583-032-Q6-K7-E1
atcttctctcctccctctttcaattttcttttcctttctttctcttttagtttctttctatttggtcccaaacccgtgatctgattccttttcatttcttttttttttttaacatatcatctctttcgtctaactgcattgagtttttagtagttgagattcttgggaattgttttttttttcttttaacatctttattgtgatctggttaatacagttgggtcacttgtttntgggaagaaccacaaagtggaaagtagagggttttntttatctnatgggggagtgtttttaaatttattngtgtggattattggtgtggtgggttggggggggttggtgggtgggtgtnttttttttgggggtgggggggggggggggggggggggggggggtgggggggggggtgggttttgggggggggttgggggggtggggggtggttttggttggggtggggggggggtgggggggggggggggggggggggggggggggggtgggggggggggggggg

SEQ ID NO: 47266 - DNA, 320 bp, Gossypium hirsutum
  unsure (1)..(320): unsure at all n locations
  Clone ID: LIB3583-032-Q6-K7-F2
cgtcctgtttggnattttggnnagctcaaacaaaaagggaagctggnaagnagcccntaagtagnngaaaaaaagctgcctctccctctcttccttntannnttttctttttctttttcggcttctcttcactttattcaaatcnncctaatcaccaaatnnttaaattcttgttatgttatttaaaagaaaagnaagaaannaaaaaattgaagtccagtgtgtaaagggatcttnnnagcctccaaatnncaaatcgnnggagtcggtgtcggtgtgttgtttttcttattngnnacgcctnnngaagttgnnaagtt

SEQ ID NO: 47267 - DNA, 275 bp, Gossypium hirsutum
  unsure (1)..(275): unsure at all n locations
  Clone ID: LIB3583-032-Q6-K7-F4
tccgccattcccggtcgcccagcgtccgatattttctccaccactaaacacatggcaaactcgcagtttattagccccctggctctcattttgttccttgcaagcttaatacattggacgcgaaagcagaaaacggatagtggacagcagatagaagagcccactgaacatggggagggcaggagaaaggggggggaaggaggaaattaggcgggggacattgatatgtgcagagtagagaagaggatagaatgaagnaagttaagaatgaagat

SEQ ID NO: 47268 - DNA, 335 bp, Gossypium hirsutum
  unsure (1)..(335): unsure at all n locations
  Clone ID: LIB3583-032-Q6-K7-F9
gntacacttaaaattggttcttgtccatctgcttcacgcatggattacatagcagagttcactgtcactatgcccatattaagttttactgggacaagtgatcctcctgatgaacatattgttaaaatatattgtgtacagacacaggctatacagcagtatgctttggagttatgcgaggggggggcgccaccactggaaaatattggcttggagaagtcagattcaagcgtttctcgtgatgctattaacaccgaaggctttgatactttcaatccatcgtggaactaggccttctgttcttccctttttaaccccgcgcccccccctgtccc

SEQ ID NO: 47269 - DNA, 271 bp, Gossypium hirsutum
  unsure (1)..(271): unsure at all n locations
  Clone ID: LIB3583-032-Q6-K7-G11
cttgccttctcacactttttgtaatttgaattttagttggttaaactatgttaaaaatcttatttggttttgccaaaggtatgaagtttcattttggtttttttcatggatctttttccataaatcttttgtttttgaaacttttttttttatgattttattcattgtgcagattgtgggggggggcgccaatcattttgttttcnactctggtgattctgaagttnaggaactnatgcaaacggggtttttaattttgtagtgaaaagtt

SEQ ID NO: 47270 - DNA, 363 bp, Gossypium hirsutum
  unsure (1)..(363): unsure at all n locations
  Clone ID: LIB3583-032-Q6-K7-G3
ccggtcgccccgcgtccgacttccacatcctacccactgcctcatgagtgaccatcgagttttcactttcgacaaggcaaccctgcaacctacctttgttcgacagtctatttacacctggagcaacctaagccaatcttgccagtgggccaggaatagcctgactaatggttgcggctttgacaagtcgatggtgcggatgaggccccacgcaaaggctgcgtcgaagcttgaacagcagatacagcctttgggaaaaatatttgcgaataggagaattagngttggtagctgagtgtggccctgggcaaaatggggatcgggatgtcctggggacttctcccatggctgctaagacaccgg

SEQ ID NO: 47271 - DNA, 414 bp, Gossypium hirsutum
  unsure (1)..(414): unsure at all n locations
  Clone ID: LIB3583-032-Q6-K7-G8
cttccttccaatatcttctccttcaagnaaggacagagaaatattaaagctaatttgggtttgttgaaagtgttggtggccaaatcacaagctgaaggcttgcaagcacacctggccagcttggtggaaggcttgttgaagtggcaagatgataccaaaaatcattttaaagctaagggggggcttcttgtggaaatgctagttaggaaatgtggtatcgatgctgtgaaggctgtgatgcctgaagaacacatgaagctccttactaacatacgaaagatcaaggagaggaaagagaagaaacaggctgttagctctggggaaagtaaatctnatntgtnaaaggcaacatnttncaggcttagcagatggaattttacgaaaatattttttggttttggtggtgattttttt

SEQ ID NO: 47272 - DNA, 122 bp, Gossypium hirsutum
  unsure (1)..(122): unsure at all n locations
  Clone ID: LIB3583-032-Q6-K7-H6
tctacttgtccaaggagnagaagctgagagcattggtgaaggaggcaaaacaggccattaggttcaatagtctgccttccttcaccaatgctcctcagcttctcttccttggacaatgtaga

SEQ ID NO: 47273 - DNA, 173 bp, Gossypium hirsutum
  unsure (1)..(173): unsure at all n locations
  Clone ID: LIB3583-033-Q6-K7-A5
ggaccgcatcccggtcgcccagcgtcccgagatgacactagcgactgtttggtgggagcaaacctcgaagcagagggacagggaatgttccgtaagccagcaaacaaataaggcattgagccaggactacttacagggggaaggtangagggataccttcaattatgaccaaa

SEQ ID NO: 47274 - DNA, 200 bp, Gossypium hirsutum
  Clone ID: LIB3583-033-Q6-K7-A6
cccggtcgcccagcgttcgcaagagcggttgtctatcatctacttgcactggcaacagtgctaatcagtgcacatcctaaaatcagtggtggaaccaaaagacagagaatgagaggtaccacagagcagggattatttttattcaaaatataattgggggggggggggtcaaaaactacaaaaaacaaaaaagggggggg

SEQ ID NO: 47275 - DNA, 182 bp, Gossypium hirsutum
  Clone ID: LIB3583-033-Q6-K7-B10
gtccgcattcccggtcgcccagcgtccgcaaaggttccatacgctggagacagagatctcagcttgggaggctggcaatgaatacatgctgcatgactgatatgacaggatgaaagaattacacatggggattcccttatgaggggaagagatattgatataagggggggggggggggaaaa

SEQ ID NO: 47276 - DNA, 481 bp, Gossypium hirsutum
  Clone ID: LIB3583-033-Q6-K7-B11
cgctctcttcatcacaataagaagagccgatagagcgacgcagattcgtcaaataataacatagagattatgctacaattgataacaaggaacgacctgaaaaaaatagaattgacgataccaccaaaaaatgctaaaggcctttgcacgagagatgaaaacaccttctttatgagaaacatctgcaccttgaggggggggggtgtgtgatcatgcattacactagaattgctacactcaaatacatcaagtgatcagtcttaaaagcgctccgaaggaggtgaatgatcaggacaacattgttccaagggaacaaaccatgaatgaaaagatctcggtgatgatgtttaagctgtgaagaaagacggctgctgttctgcataattgttagatgattacgagtgtgcaaatttacttcctcattaagcacaagctttcctcggcgtgatctttatcgagatctttcgttgaatatgaagaa

SEQ ID NO: 47277 - DNA, 288 bp, Gossypium hirsutum
  unsure (1)..(288): unsure at all n locations
  Clone ID: LIB3583-033-Q6-K7-B5
ggacctcagattgaggctcatcccttcttaaaaaaaaaagccttcaagcattgagaagttgaaagcaaagaaaaaaaaaaataaaaagagagggagagaagagggataatagataatagagaaaaagtcaaagatatagagagaaatttaaaattatcgggggggaaaagaaatggttttaggagacagagagagnatgatgagaagcttcaattnttgttcattaaaacttntgctggaataaaaaaatgttggggggttttgtttttgttggttttttgtggtggg

SEQ ID NO: 47278 - DNA, 360 bp, Gossypium hirsutum
  unsure (1)..(360): unsure at all n locations
  Clone ID: LIB3583-033-Q6-K7-C1
cagcgttcgctgnacaaaatccgnctttgacacagctgggccaccaagtccattggcggctgggttgtgatgtttcntatttgagtgtggttttttggtaacaaatnagaataggtggaaagtggttaaagtgttntggtgtatttttttttttttttcgggtnanntntnnnaatgttgggggggggggggatggtnntttttttttttttttttntggggggggggggggggggngttggtggtggtgggttggggggggnnggtttgtgtgttgtgggggggttttttggtgttggtgttggggtttttggtggggtttttgggggggggggtgggggttttgttgtggggttggtg

SEQ ID NO: 47279 - DNA, 326 bp, Gossypium hirsutum
  unsure (1)..(326): unsure at all n locations
  Clone ID: LIB3583-033-Q6-K7-C2
cccgcgtccgccccgcgtccgcaaataacaaatccttgctgttggcaagaggcgaactggcagnactatcagcattcttgatatttatggctttgaatcatttgataggaatagttttgagcagttctgcattaattatgctaatgagagattacagtagtattttaatngtnatttattgaggggggggggggaggaatatatttaagatggnattgattgggnaaaagttggttttgatgataattaagtttgttttagtgtttttgtgttgtggtttttgggtgatggtttttggtggggtgggtttgggtttttgttgtttt

SEQ ID NO: 47280 - DNA, 413 bp, Gossypium hirsutum
  unsure (1)..(413): unsure at all n locations
  Clone ID: LIB3583-033-Q6-K7-C4
gtcttggtcgaanggcaaggtttcattagcttttaatctttggttgagttatctgagcagccgtcctggtcgggaagatgcagttatgaaagaatttgaaaaaattttgttgagggtgaagtagaaaggcaattctgggtttgctcaatctggacttcaaattaaataattttagtttagcaccctatacaattttccttattgggttctgtcaagcaggaagagttgaagaagctttaaagatattttctattctagacgaaaagaatgttgttgtctcccctcctagttgtgtaaaggtgatagttgntctatgcaaagaaagaaatttggatcaggcagntgacatgttnttatatactntagagaagggtttnaagttaatgnntnnagtttgnaattatttgnttagg

SEQ ID NO: 47281 - DNA, 157 bp, Gossypium hirsutum
  Clone ID: LIB3583-033-Q6-K7-C6
cccggtcgcccacctccgggaagctagattaaacaacaccttttcaattcgtgattctatttgttctatttgaatctttttgatgtgttttttcgaaaaaaaaagggcttttcaacgaaaaagaaaggttataccatctcaaataaatataaacaca

SEQ ID NO: 47282 - DNA, 199 bp, Gossypium hirsutum
  unsure (1)..(199): unsure at all n locations
  Clone ID: LIB3583-033-Q6-K7-C9
ggtccgcatcccggtcgaccccgcgtccgccccgcgtccgccccgcgtccgggcgggagcaggctngtggatgagatcgacgcgatgggggtatcggagctggtggaatatgataagagtacgataattaagagggcttcgattcctgctagggatttgaggattcttggccctgtcttctctcactcatcaacnattc

SEQ ID NO: 47283 - DNA, 343 bp, Gossypium hirsutum
  unsure (1)..(343): unsure at all n locations
  Clone ID: LIB3583-033-Q6-K7-D10
aagctcaaattgaactgctttataatttattaaatcataatgagtttagttataatctaacaaataccaacaattaattttagttcaattatacatatacctacaaattttaattatgaagatgaaaattttaataatttataaatatattgataatgtgtaattgcaacttcaggggagggagactgagttctaattttaatatgttgtagtaatggntngtntgnctttaattgnacaaagtgtgaggngtaaaagaattggtgntgnattganaatatagttggaaatntgtagaattgngatttggtttttatttagaatgggtgagagttttaattta

SEQ ID NO: 47284 - DNA, 598 bp, Gossypium hirsutum
  unsure (1)..(598): unsure at all n locations
  Clone ID: LIB3583-033-Q6-K7-D5
ttggttccaaggnagcctttgttttgattgggacacgttgctcgtttttcgaagagctggatgccacagataatgaaatcgatgacgaaggtttgaagtccatctcgagatgttcaaaactatctattttgaagttagggatatgctctaacatatcggatgaaggccttgcaaaagttggaagttcttgctcaatgctcaaggaggttgatttgtacaggtccgtggcaataagtgatgcgggcattgctgccattggtgatggttgtcctgcacttgagatgatcaatatagcttataatgataaaattactgataattcattagtatcattgtcaaaatgtcggatgttaaaagcacttgagattcgtggatgccttggtgtctcatcaattggtctattagccattgctgtgggatgtaagcaacttacagttcttgacataaagaagtgcttcaatattaatgataatggaatgcttncacttgctcaattttctnaaaatctgaagcagataaacttgtcatattgttngggtacagatgttgggcttgtngcactagntagnataagtngnctgcaaaacatgacaatctt

SEQ ID NO: 47285 - DNA, 217 bp, Gossypium hirsutum
  unsure (1)..(217): unsure at all n locations
  Clone ID: LIB3583-033-Q6-K7-D6
ccccgcgtccggttcagnaattcttgacaataatatatagccaaacacaaatgaagtgtngatgaaccttgaaaactcaaagcatacagcacaaatggtgatgcaagaaattcctaatcagagtgttttacaaatgttttcacttctaaaacttgttaacactttgaggaatatatatgggggggagggacccaacagntctgcccatgatgtattt

SEQ ID NO: 47286 - DNA, 243 bp, Gossypium hirsutum
  unsure (1)..(243): unsure at all n locations
  Clone ID: LIB3583-033-Q6-K7-D8
tccgtccgnattcccggtcgccccgcgtccgtttcttttcttgttccttccttcgccgtctttgcttttattgcctcgtttcaaggaatcagatgggtaaggaaagatccattaacattgggcatcggcactcgatttggaaataccccatggccacctgattacaactgtggtattgacagggggggggggggtcnnaaaaactntnanaaaaaanagtattcaagtttttggttgtttgaa

SEQ ID NO: 47287 - DNA, 498 bp, Gossypium hirsutum
  unsure (1)..(498): unsure at all n locations
  Clone ID: LIB3583-033-Q6-K7-E11
ccccgcgtccgccccgcgtccgcccacgcgtccngaaaaaaaaaatacaagatttctttaaaatatctctctgatttccccatttaaaatgacaatcctgtctttcttcaccagagcttcacgggctttcaatggctacccttcttcttccaagcttttgcttctctgtactctcagtgggaggggtggaggtgttgtggcttactcagaagcacaagtagatgctagcaaaactagtgttcaagtgaacgaaaaagatgcaagaaaaagagagtggtggttcttggaacgggatgggccggtattagtttccttaaagatcttgatgtttcggcttatgatgttcaggttgtttcaccccggaattattttgcattcaccccattgttgcctagtgtcacctgtggaacggttgaagcacggagcattgtagagcctgttcgaaacattataaagaagagaaatggagaaatacagttttgggaagntgaatgtgtg

SEQ ID NO: 47288 - DNA, 265 bp, Gossypium hirsutum
  unsure (1)..(265): unsure at all n locations
  Clone ID: LIB3583-033-Q6-K7-E3
gtccatcttgcaggnacagttggggcggtgctgagtaggtggtggcaaacgtcggtggtggatgggacaagggcagacctaggtgtcccttttgatttttttttaattgaaaaatgtgggcttggtgggctaggtttagttttaaattgggctttaggtttgaatttatctgtaattgggtttaagggttatagaaatgggttttgggccgggcaaattgggcttgtaacaactagaatataataaatggacactcccaacattg

SEQ ID NO: 47289 - DNA, 230 bp, Gossypium hirsutum
  unsure (1)..(230): unsure at all n locations
  Clone ID: LIB3583-033-Q6-K7-F10
ccccgcgtccggnaccaaccctnactgccatatagccaccacaacggtggtcgacggagggtggtctactcgttctttaatcttgtttaaatccgcgtttgaggatctaacaccaacaatcgcaaagaatcaaaaagaaataccactcccttngttagatccggttttaacggagaggggggggggggtatactgacnattcaaagttnaggtgagtaattttgttttat

SEQ ID NO: 47290 - DNA, 411 bp, Gossypium hirsutum
  unsure (1)..(411): unsure at all n locations
  Clone ID: LIB3583-033-Q6-K7-F3
gtttttgtgctgggagctcttctggcgtagaagtggcagtgcctgagctgaagaaaggtgttcactagaaccgggttaatgtcaaggttaaactaggtctcggggtgggttcttttcccctgtgtttttttttttttcccncncccncccnnntttggggtgggggggggctcnctttttcttnnttttttttnctgtnggggggggggggggggttctttcttttttttttcttttttttcctttttttttgtgtttctgttgtttttgtttttttgggtggttcgtttttttttttgtgtggtttttgttggttggtcggtgtggttgtgttgtttgttttttttttttttttttttgttctgttgcgggtgtggtgtttttgttggtctgtgttttttttttttgggg

SEQ ID NO: 47291 - DNA, 511 bp, Gossypium hirsutum
  unsure (1)..(511): unsure at all n locations
  Clone ID: LIB3583-033-Q6-K7-F4
gtcgttannaaaacgttgnnctgttaaggnatcnnttaaacgttgnnaacccaacattnnngtcaccagggnnaaagggcttccgggnaggggatnntcatggtngnnacaatgtnntgggnnttcaacgnnnttaaagaacgcttgtcttgtgtcaagggattcttatnnaacgtcggatgtttcgttggcgtgtacaacagctcgcacagggatcgactgccgggctcagacgcacaggctgctctaacgttacacgcgtctccaggcttgatcgatacatagacactctacccttgtgcgcagagattgtgaaaatggggttattgcncnnccagtcctttgnacttgggccacacnctttttcnnacattgcntgtncnnaaatttnntccgaacttgtnntgaccaagaatttgacnnagacgatcttggcaagggaactttgagnnaaggaaccnnaagttntnntgaagaannggtgatgnnnaggtnntggtaaaggaatgat

SEQ ID NO: 47292 - DNA, 273 bp, Gossypium hirsutum
  unsure (1)..(273): unsure at all n locations
  Clone ID: LIB3583-033-Q6-K7-F9
cggtccgcattcccggtcgccccgcgtccgctcccctaatccccacggtcatacttcgggtctctttctattcgttctcctgtcaaacagcggtggtaccggcaccggcgcctctttcctcagttctcaccgctcagatccttctagtctctcgtcattctcctttcggctcccgttctgccttcctctttggggggggggggatagngatttttaccttttataagccagtcaaggtgaatacggaaaagaaacaagatgaattcggttggg

SEQ ID NO: 47293 - DNA, 212 bp, Gossypium hirsutum
  unsure (1)..(212): unsure at all n locations
  Clone ID: LIB3583-033-Q6-K7-G1
gttcgcttacctggtccaaacataacagacataacatctgcttcaagtattggttgtttttcacttttgtatcgttgcgcacaaacatgatgaaccttgcatgtagagaattttcaataacataaatgacatagcttaatattggtttttttttatacgtatatttttnttgtctaaatggggggggggggaattataaanatntgaaaaag

SEQ ID NO: 47294 - DNA, 331 bp, Gossypium hirsutum
  unsure (1)..(331): unsure at all n locations
  Clone ID: LIB3583-033-Q6-K7-G3
cccgcgtccgcaaaactanaactanatacttaagctaagagttgagggaaatgaagagattagggaatgcatagaagaataacgaagttcagtcttcaatctcacattaacaaatccctcaattttgaacttgaactctcccctgggttctttttttttttctncctccttttctctcgggggggggggggggggtttctttttttttttttctcctttnnttttttgggggggggggggcgctttcgtttcgtttttgtcgttttctggtttgtctttctttgttttttttttttttctttttttcgttgtggttttgggtttttttttt

SEQ ID NO: 47295 - DNA, 171 bp, Gossypium hirsutum
  unsure (1)..(171): unsure at all n locations
  Clone ID: LIB3583-033-Q6-K7-G7
tccgaatcccggtcgcccagcgtccgttttgcaaggtagttaaagcattaccaaacaaggctatgggaatggtggagagtttgatccaatccaaagttctgtcaatacaggctaaaagaagaacaaaatgagcagaaatgtttttncgncatttgataggatggaagtgta

SEQ ID NO: 47296 - DNA, 260 bp, Gossypium hirsutum
  unsure (1)..(260): unsure at all n locations
  Clone ID: LIB3583-033-Q6-K7-H1
cccgggtcgcccagcgtccgcggccgcgtgggcggccgcgtgggataaactgtngaagtatgaatggcagttttggatgactttttagtaaatttcaanacaattgattattgaagacaagtaagcttgatgcttatgttttgtttttttattataatgttgtttatttcaactcatgctatttacttggacttttacttatgttttttattataatctttttgtattatgtttgttatttatttggaatcatgttgttt

SEQ ID NO: 47297 - DNA, 527 bp, Gossypium hirsutum
  unsure (1)..(527): unsure at all n locations
  Clone ID: LIB3583-033-Q6-K7-H10
ccccgcgtccgctctttttctgcttcttgaagcaaaatagaaatttgagcttttacttttttctggtttagtatagtagtcatcataataaggtgggtgacaagatcatggacaacgtcctggaaattggattcagattcctcccaccagatgaagaaatcatcagtttctttcttaagaaaaagaaatgggtgatcataaagccacccgctatatcagagaggtcgacctcctcaagcatgagccctggcaattacctgccatgtctgtagtacagtccacctatccagaatggttgttcttctataaactcaacaagatttcccagagaaaaaacgatcgttctaccaacgatgggtattggaaatcaacgggtgcggatcgtcccatcacttgtggagatagtgtgattggtaccaagaagactttggttttctataaaggccgtacccctaatgggctcagaaccgattgggtcatgcatgagttncgcgccactgccggctncttgccccctaatgcggtaa

SEQ ID NO: 47298 - DNA, 199 bp, Gossypium hirsutum
  unsure (1)..(199): unsure at all n locations
  Clone ID: LIB3583-033-Q6-K7-H6
cggtccgacatcccggtcngccccgcgtccgtaaaaaaaggnanaacaacagnaaatccatcatgtggtgcttgttatggtaagctttcaaggtcacataactcccatgctccagctagctagtatcttgcactcaaagggcttctcaatcactatagttcacactgaatttaactctcctaacccttcaaaccacccc

SEQ ID NO: 47299 - DNA, 241 bp, Gossypium hirsutum
  unsure (1)..(241): unsure at all n locations
  Clone ID: LIB3583-033-Q6-K7-H8
aaaaggctaaaaagggaaaggagtgagctttttgcttctacacttgttctctgttggggtgacagcgacaatgggttacagagcgagaacaatggaggaaaaaagaaaggagggaagagagaggaacctgaaaaagacaagaaaagtgaaagagaagaggggggggggggccaaaataagnctgtgatgacaactgtgctggagaaagaggatgtgagaaccctgggggaggtngttgtta

SEQ ID NO: 47300 - DNA, 179 bp, Gossypium hirsutum
  Clone ID: LIB3583-042-Q6-K7-A11
cggaaccggccattcccgggtacgaacccacgccgtccggtacctgaccatgccgggagctgcatctgcaagttttgttgtcgtacgcagcatcaaaatggttcctgactctcgagaaccataaccaccataacgcataacagaaaagtagacattgctacgctgttgctcctcttgat

SEQ ID NO: 47301 - DNA, 205 bp, Gossypium hirsutum
  unsure (1)..(205): unsure at all n locations
  Clone ID: LIB3583-042-Q6-K7-A5
tccgccattcccgttcgnccccgcgtccgccgttccttcttccctgttttccctcccacctgaagccattccaatccacctctcctcctgattnttccggcctcacgttttcgagcaagaatagggctctgtcaaggttattgatntnnaaattttgacaaggttgttttgttntttntnttttntttttggggggggggggggg

SEQ ID NO: 47302 - DNA, 416 bp, Gossypium hirsutum
  unsure (1)..(416): unsure at all n locations
  Clone ID: LIB3583-042-Q6-K7-A6
gcgtttttggnaccagtcgcggncaagcttatggttgctgctacattggttttactatgttcaagacctttngaagttgccaactttgggcaagtgccatggctactgatagttccatcgatagccattattggaagagagataacgatgtctgccgttagggaatgggctgcttctcagaatagtaagcttttagaggctgttgcagttaataatttgggaaagtggaaaactgccacacaaatggctgcactaaccatccttctagctacgcgggatagcagccttggagaagctgggattttagtagcttcaggtgttattttgctttatatttcagctggactttcggtcatgtnattagctgtttatatggggaagatatggnangtnttactaaagnagttattttgact

SEQ ID NO: 47303 - DNA, 318 bp, Gossypium hirsutum
  unsure (1)..(318): unsure at all n locations
  Clone ID: LIB3583-042-Q6-K7-A7
gtttcctgctngtgcttggtgaccgagacatttgcgagagattcgccaggaggggatgctagcgtatgtggagaagaccaaagagaagaaaggaacatggagtggacacattggctcaccaaaaatggtaggtgccaaattttatgatagatatntnaagatagatnaggggggttgggaggtgaaaaagtggtgaattaagattttaagttagaggaaagtatgaaggaaaaagggaggaaattttatttaaaattagttaaatgtttttgaagaaattatgttgttgggaggtatgttgggattttaagtgattat

SEQ ID NO: 47304 - DNA, 415 bp, Gossypium hirsutum
  unsure (1)..(415): unsure at all n locations
  Clone ID: LIB3583-042-Q6-K7-A9
ccccgcgtccgcccacgcgtcctgagaggagacttcacgcaaaaaaaaatacttttaatttcttcttgttcttcttctctagatctactgttttatttctaaaaacttaatttttcttgttattattattactattatttattcatgattgagaagtaaaaaacgctgactcctttggggggggggggattatagccccctgattcttttccccgataaatgtgtggtttttttttccgaaaaaaagcggggcagtcggaattttttgtggtgaccttgctaggaaaaggtcacactggttcttctgnggacaggtagaggcagaagaactggagtacatgatgattattggagaagtggactgtttaagagagtgatagtttaggtatcatccggtgacatatttgtggtccca

SEQ ID NO: 47305 - DNA, 604 bp, Gossypium hirsutum
  unsure (1)..(604): unsure at all n locations
  Clone ID: LIB3583-042-Q6-K7-B1
aaaaaaatgggtactttagtgggncatgttgcaccgggttttgcattttttgcacttgggttttggcatcttttcaatcacatcaagcttcattctttaaacccaaattcatacacatctttcccatggttcccaaccttgaaatttaggtacttggagctggttttgatcatggttggttcatcaatctccatatcaatggagcttttcattggtccagcaaagcatcaaccttttgacactgattgaaccatcccatctaaccatcttcataactttgaacactcagctatatcaatgactttcttcatatatgctgctttttccatagtccttgacaaaactagcatcaatatcgaccttatgtttaagcatagcttaacacaattccttggagcaattgcctttgcccaacagctgtttctgttccatcttcactcagctgatcatatgggagttgaaggccaataccatttgctattacaaagcgctatagttgtgtctttagtcacaactttaatgggaattgggtacccaaagagctttatggttagtttcattaggtctcttagcattttgtaccaagggttatggcttatgacca

SEQ ID NO: 47306 - DNA, 281 bp, Gossypium hirsutum
  unsure (1)..(281): unsure at all n locations
  Clone ID: LIB3583-042-Q6-K7-B10
ccccgcgtccggcgatgtcggttgcgtcattcttccacctaggacattctcgaaaaacattccaaaatttccagaatccttcaaactaattatttttatttttattagggtataaattacttacagatgctgaggtgattaatttggggttntaagaaggagaataaaaaaatgagtgggggggggggggtnganttgaaaatgntaatataaagtttatgtaaaatatattggtttaagagattgtggttggtaggatggatngtgattgatgggtaaaa

SEQ ID NO: 47307 - DNA, 205 bp, Gossypium hirsutum
  unsure (1)..(205): unsure at all n locations
  Clone ID: LIB3583-042-Q6-K7-C4
cggtccgcatcccggtcgccccgcgtccgcaagacctgttcaccctcagttccagcgaccccccaaccccattccctgtcgagatgccccggcgcctccaaacttccgccttcaaaaaacctcaacacctctggctttctttnttggtacgaatgaccgnaagtgaacgcacctttgggggggatgaaaagaagaatgggaaatg

SEQ ID NO: 47308 - DNA, 254 bp, Gossypium hirsutum
  unsure (1)..(254): unsure at all n locations
  Clone ID: LIB3583-042-Q6-K7-C5
cccggtcgccccgcgtccgcttatttaccctgtctcttggtttctctagccggctgcttacctttgctaacagaccctgactaaaaaagcaccacaagcagagccacacaatacgagaaaaaaaaagaagaggtggaggacatgtgaagagtaccacgngagaaaaagaagaggggggggaagaattggcaagacctgagtngaatttagggggggaggatgagtgagtgtatagngggtgtgggatagaggag

SEQ ID NO: 47309 - DNA, 140 bp, Gossypium hirsutum
  unsure (1)..(140): unsure at all n locations
  Clone ID: LIB3583-042-Q6-K7-D11
ccggggtcgcccagcgtccggnaanataatttgaccaaaaccgattggctttcctaaaacaactgttatgctttcgcaataggctccatattggtcatatnttaagtcttagcaaagntacacgtnnntgttgggatgat

SEQ ID NO: 47310 - DNA, 239 bp, Gossypium hirsutum
  unsure (1)..(239): unsure at all n locations
  Clone ID: LIB3583-042-Q6-K7-D9
naaatcttttttttcctctctgtaaacaacgagnatttggatttaagatttgtttttcttatttttttatgtagagtctatactctattagatctgtatttaattattagattctgttttctccttctttttcttaagttgaatatgaagtggaagtattcttacaaagcatgggggggggggggggctgatcaaggaactgccactgttnaggttntaggngtggggggggggnttaa

SEQ ID NO: 47311 - DNA, 384 bp, Gossypium hirsutum
  unsure (1)..(384): unsure at all n locations
  Clone ID: LIB3583-042-Q6-K7-E10
ggtccggcattcccgnggtcgccccgcgtccgccccgcgtcctganaaaaanaaaagcaatgtgatatgcacatgttattgtaggttaaaagaacgtggtttttcgggacaggttttatgggaagagtgggttcggtttcgggttggtaatgcttcctagagaacagttagttttgctttagcaaatgatcaaagttatcatttttaattttgtatgaattgttttgttgagacttgagtgttggtgcattattaatatgaattgnntttttnggnatagtgaaaagatgtaaatangagnaaaatggggtgtttggatttaggttgggggattatgtngaattanaaggatgagaggnattttagttaattgttttatatgtg

SEQ ID NO: 47312 - DNA, 433 bp, Gossypium hirsutum
  unsure (1)..(433): unsure at all n locations
  Clone ID: LIB3583-042-Q6-K7-E11
gccacccgtccgtataacaagcagggggacgatgtagaggaccaaggtataaaaggcgtgaatgcaatgtcataaatgttctatagagcgatttaagtaaaatcaacatgaatgccagtagacattgcaggagagggagaaaacattggcactaccaagaataaaggccgttaaaggaagaaacagtgttgtgagaggaatgcatggtaaaggtaccaaggagaatccatgtgaggagagagagagaagaagaagcagaagaggaggaaactgaagaaggagagcaagaacaaagccataaccctttccagttcgattgcagatcattncaatctcgattcagggaagaacatggnaatttgagggttcttcaaaggtttgttttaaggtatnttatttttagggggataattgaggtnntgttatttatttt

SEQ ID NO: 47313 - DNA, 382 bp, Gossypium hirsutum
  unsure (1)..(382): unsure at all n locations
  Clone ID: LIB3583-042-Q6-K7-F1
tcgccctcnngcgtccgnaagggatcaacaagctaagggnnaggctctattgaaactacnnggtttcatctaatcagnatgcatgaaatgagtcagaatggtaatggtgttctaagtagtgctactgacgattgtgagagtgagaaccatggagatgcttttagaagtggtgactgtggagcaaatgaggagggtgtgtaaaatggaaaggttttgttttttanaagaggtgggggggggtgtgttttattaatatgtttgttttttgnngtttggttttgttggtgngggggngtatttttttgttttgtttgtttttttttttgtgggggggagggggggggggggggggggggggggttggtgggtgttttgtttttgt

SEQ ID NO: 47314 - DNA, 150 bp, Gossypium hirsutum
  Clone ID: LIB3583-042-Q6-K7-F2
aaagttattgggtatgattcatctttagagttaactgaatcttttatagaaggagaagagaagggaagtgaaacaaatgcaccagtcttagaacgtgaatacatgcaaggtgtcttaattagtgagtttgtgttgaataatagtttttta

SEQ ID NO: 47315 - DNA, 299 bp, Gossypium hirsutum
  unsure (1)..(299): unsure at all n locations
  Clone ID: LIB3583-042-Q6-K7-F4
aagnctgtacaaaacagcttcttggggaaccctggtttatgtgggaattatagtggttcgtgtggtggtaaggatgaagagaagcataaaggttatgtttggttacttagatccatttttatactagctggtttggtgtttgttgttggtgtggtttggttttactttaaatataggagttatnagaaagntaaggncattgataagtnttaaatggatttaatgtnattnnataaattgggttttagtgaatatgagatattggattgtnttgatgaanataatgngatagggagagg

SEQ ID NO: 47316 - DNA, 368 bp, Gossypium hirsutum
  unsure (1)..(368): unsure at all n locations
  Clone ID: LIB3583-042-Q6-K7-F5
cgtccgcaatcccggtcgcccagcgtccgttttaactttgattctttttttaaacaaaccccaaaactctttctgcttccccattcctcttttttccagcgcaacaaggctaacaccaaccttcaacgcctcctgactgatgcgacgaccgaacaggcttccccgtggtgcgagtgcgagtctggttggggttggggagtacatgatcgtggggcatggacggcgagctagggggtcgtgctcagtgtgccgacgcacgtggtggaggggagcacagctgtttccttttttgctgaaggtacaggaaatcgattctagaaatcatgcccttagaggacggtgtagngacatnggtgaatttacagatc

SEQ ID NO: 47317 - DNA, 251 bp, Gossypium hirsutum
  unsure (1)..(251): unsure at all n locations
  Clone ID: LIB3583-042-Q6-K7-F9
cggtccgcatcccggtcgccccgcgtccgccccgcgtccgcccacgcgtccgcgctaacgctattgtcccatgcactccttactgcttcctccaaaaccttcaggacgcccgtgtcccaccgcgcatttccacacctccgcgcggttcgccccgattcagccgccgtacggattcctcgggggggggggatatcatgcccccnaaagcagaaggtcaaatatggaaaactggccccgaaatgtttaccttg

SEQ ID NO: 47318 - DNA, 180 bp, Gossypium hirsutum
  unsure (1)..(180): unsure at all n locations
  Clone ID: LIB3583-042-Q6-K7-G12
cggccggcatcccggtcgcccagcgtccgtgatattttctccatccagcataaacacaatggcaaactcgcatttattagccaccctggctctcatttgttccttgccaagcttcaatcacatctgtgaggtcgaagcgaggaaaacggnaagctgtgaacagttttaaggaagcaatcc

SEQ ID NO: 47319 - DNA, 246 bp, Gossypium hirsutum
  unsure (1)..(246): unsure at all n locations
  Clone ID: LIB3583-042-Q6-K7-G7
anagaacagggnaggaaagctgatcactagcttttaatgctcaaagttaatgttgcgatcagggtggcaggtaatttgctgctcatcctttaatattacactgttgcgtagaaaaatgaaaaccctatatttcgacagcagcaacaacagtacgacgagtcaagcagnatnatgtaataggtggggggaagatgaacattattaatanaaaaaaaaattattatttttttnataaattttttaata

SEQ ID NO: 47320 - DNA, 465 bp, Gossypium hirsutum
  unsure (1)..(465): unsure at all n locations
  Clone ID: LIB3583-042-Q6-K7-H5
cggtaccggccattcccgggttcgnaccccacgcgtccgcggncagcgtgggnnatgttgnagtatgatcaacatgccagnatgttnnttcaggggnaaccccgtacggtatnngctagtgtgcatnngctcatctcggtagaaactggggtagcaggagaagaacgatctagagtctcttcgcttaccaccctcattttntctcctacgtggntcggttacccctggcaagggtatcagggtggaaaacaaaggatttcttgtttgtaagaagaagatggctacatccccagaaactttgtgttgcttttgccctgcacctttcagacagtttgttgagcatgtggtgaatttgaagtttgatgaggaaccgaattatgcaaaatacatctccctttttgatgggattgttggtncaaatncagaatttaggtgtattatatatgttggggctcaaaagcttat

SEQ ID NO: 47321 - DNA, 212 bp, Gossypium hirsutum
  unsure (1)..(212): unsure at all n locations
  Clone ID: LIB3583-042-Q6-K7-H8
ggtccgcatcccggtcgccccgcgtccgagacttaagtgaagctcaaagccttgctctttggcgaaggcctgtcactgtttttggatcagaaaccctgagaaacccaggggtgaaacgggctgattatgtgtgagttacgggttttactgacaggacaaatntgtgttattaaantttgggggggggggggtttttttttttttaatatttt

SEQ ID NO: 47322 - DNA, 223 bp, Gossypium hirsutum
  unsure (1)..(223): unsure at all n locations
  Clone ID: LIB3583-042-Q6-K7-H9
cgtccgcatcccggtcgcccagcgtccgccccgcgtcgcatagctccgcgccttgcccccanaccgattcgctccgaaccggcaccacgatggtggaccccactgtcacagctcagtgtgctggtgtatctgtaatgaggcagatattgaactatggccttgttttgtttccttcacatgctggggggggggtgagttgcccaagaagaggttcaaggtttgt

SEQ ID NO: 47323 - DNA, 497 bp, Gossypium hirsutum
  Clone ID: LIB3584-033-P1-K1-A10
caccgattcttacccaaggaaatggcatggaagcttgaaaatttcagcagcttctaggcctcacatatcaaggaagatgaaattcggaatttgatcgggagaaaagcaagataatagagtaattgacttatttcatcgtttcatactgagggttgagcatgatcgagttacaacatgttatgaattgacggtaaagaccatggttggaccatgtcaatacatgtaactatgtaagaccatgtttgggacatggaatcagcattgttatgtgagccagtgtaagaccatgtctaggacatggcatcggcatcattatgtaagccagtataaaaccatgtctgggacatggcatcaacatagttatgtgagccagtgtaagacatgtctaggacatggcattggcatgaggcatcgtgtaagaccatagctggactattggcatcgatatgagatttccatgtaagaccatgtctgggacatgggattggcacaataca

SEQ ID NO: 47324 - DNA, 252 bp, Gossypium hirsutum
  Clone ID: LIB3584-033-P1-K1-B12
gtcaagcctatgtgcggattaacatgtggactgtgagctggacctgtatgaggaatagttcgacctggaatcccgcatagaagcacgcggccagaaccgatggctgtctatgcgccagggcgctgagacagaaatatattcgatgcatggcggtgactgagctacgatggccaacgctgacacacaggtattatgctgggacgcctgcagctggctatatgaggctgtgatcttagtataaagaacaatggg

SEQ ID NO: 47325 - DNA, 468 bp, Gossypium hirsutum
  Clone ID: LIB3584-033-P1-K1-C2
cggacgcgtgggcggacgcgtgggcaaagattgggggaaagatatcaatccgactcattaagcatgaaaacaatgaaaatactgaatatcaggctgacagcttggtctacaaagtgtttggtctttattttatgcaatcatacattggtgttttttatcatgcccttttacatcgcaactttatgacccttcgccaagtgttgatccagcgtctgatactttatgaggtcttagaaaatctggtggaaaattctttaccatatctgaagtacagctataaaaagtatagagctgttagaaacaagaaaaaacgtgagaaaggtttgattggaaagatccaattcgctaccagggtggagaaagagtacttgaaacccacatattctgcaagcatttctgaggaactggaagatgggctgtttgatgattttctggagttggcactgcagtttggaatgatcatgatgt

SEQ ID NO: 47326 - DNA, 469 bp, Gossypium hirsutum
  Clone ID: LIB3584-033-P1-K1-C3
cggacgcgtgggttctggttggtgtgatgtaggaaactcgaataaagcttttggcatattctttgagatgactgagagagggtttgcacccaacataaagatttgcagcaaagtagtcagttgcctatacaggcttggcaggatagatgatgcaaatatactcctgcagaagatggtgggtactgatcctcttttatctcactttggtttggatagcctgagggccgatgttagttgcgtaaatattcagaatattgctaatactattgacgaaaatgccaaatgttttgctctgcccaacaatgtggtgtataatatagctattacaggattgtgcaagtctgggaaagttgatgatgctagaagggtttttttagctttactgcaacgaggattcaatcccgacaatttcacatataccactttgattcatgggtattcagcctcaggtgatgtcaatgaagcattc

SEQ ID NO: 47327 - DNA, 493 bp, Gossypium hirsutum
  Clone ID: LIB3584-033-P1-K1-C7
gcagctgagtcaaacgtcccagtgtggtttgagcctgtatcgattgcaaaatctgaaagaattgctccaattgtaaagtatgtgagtgcgcttgttttgtgcagttttacactaatccgtgatactgtttgtaagttacagttgagtgctttccttgcagttatctctctcttgctatcttttggttactaatcaagaggttttctgcagattacttttgcttcacctaatgaagatgaactaattgctatggcaaatgctttatcttctcaaaatttattttgcccaattgaaaggaataattgttctacggatactttgttccagatgctgaaaccagcgatctggcttttgctggagaagggtgtcaaaattcttgttttgactattggttcagatggtgtacttttatgcactaaaggggaatcaatctcctggagaatttgtctggaaaagacgcagcaacatggatttagtcgacagttatttgaaa

SEQ ID NO: 47328 - DNA, 488 bp, Gossypium hirsutum
  Clone ID: LIB3584-033-P1-K1-D11
gtggatggctgacagtaacatttcgacctgtcctgcaatggcttggaacacatgctaatcctgctttgaggaaccatggtgtacgcattgagcttgcctggttttgcagtgcacctggtggttattgccagtacggacttttggtgtattctgttgaagaggaaaatggacatatatcgttgggaaataccaatggaagagtcagaactgaactacattcaagcttgaacaccacatacatgcaaaatcaatctgattatccaagagaagatgcacttttaaccctaggcaatgaaggttttgcaaagcagaagagttacggagagcttatagatgctaacagcttacaaaagcttgaggataagagatatatcttttaccttctcccgtttttagttcataatactaaacctgttggtcaccaagatctcgttggcctagtcatatcaatgctacttttagggagatttagcttagtgttgcttaca

SEQ ID NO: 47329 - DNA, 463 bp, Gossypium hirsutum
  Clone ID: LIB3584-033-P1-K1-E2
atgaaatcagccaagattctgaaaggaaggaaggaggtcaaggagaaatctacttctcccaatgttcctttgggaagttccaaagaatcagtacaaactttgaaaagaaaggacaaagatgagaaagattctgcttctcccggtttcattaagaaatgcatgaaaaaatccgcagtgagatctaaaggaatgaaggaagatactcctttgtctgcctcttctagatttgcttcaggaagctccaaaaaaccagcatcggttgtgaaagacaaggaggaaggtagcagcgattctgcccatcaggttttacctttagcgaatgcaaaaaaattacccagcactgttgaaaggaagaagggacccagtgccgatgatcctatttgttccgtgcggaagtttgatggaaaggaagcagaggattgtcttgaggataataatccaactatagcagaaatgatgagat

SEQ ID NO: 47330 - DNA, 499 bp, Gossypium hirsutum
  Clone ID: LIB3584-033-P1-K1-E9
ctggtgtttctcgtggaagagaaaatgtggtttgctctatatgtaaccgatctggtggctcatgcatacaatgcagggttgtggattgttcagttcggtttcatccttggtgtgctcaccaaaagggtctgttacaaagtgaggttgaggggcttgataatgaaagtgttggtttctatggaagatgtatgcttcacgccttacaccccatatgtgagtctgatagtgatcccaccaatggtaaactgagttttcctaggaaaggggaatcaacctgtgctcgaacagagggtttcaaaggccgcaaacaagatggcttttggcacaatccctatggtcagtcaagaagaaagaacggatgctttgttcctcaagagcagttaaatgcttggattcacattaatgggcagaagccatacatgcagaggcttccaaagctgtcaaaatcagatattgaaaatgattgccggaaagaatatgctcgctacaaacaagcaaa

SEQ ID NO: 47331 - DNA, 322 bp, Gossypium hirsutum
  unsure (1)..(322): unsure at all n locations
  Clone ID: LIB3584-033-P1-K1-F12
cccacgcgtncgnggacgcgtgtgctttcgcgtcaagattaccgcccaaatcaggggagatcgtggttgttttatagcctcacctatattaagtttaatggactttgatgtacaacgttgtgactgctaaaactatgtaaacataaagttatggtttttataatattcttcttttataaactggtataatatcaaagagagctaaagaatatactctttttaacatattgacatcttgtatggaaaatggaactcgtcatttagtgaagctattaatcgcaattggttttgatttaatgagcagggtgactgctacactata

SEQ ID NO: 47332 - DNA, 112 bp, Gossypium hirsutum
  Clone ID: LIB3584-033-P1-K1-G4
aaaacagatggtagactggttgatttatgaaaatccaccgtttaaaaatgttatttttcctgaactttgtaaaggggttgttaaattgtacttatacgttggtctttgagtg

SEQ ID NO: 47333 - DNA, 607 bp, Gossypium hirsutum
  unsure (1)..(607): unsure at all n locations
  Clone ID: LIB3584-033-P1-K1-H10
tcgattgaaacgaaaacaaggtcactcttgagaggacgtctaaccttgaatgacgttcagaggcttgagcgtaatgtaaagaatattttgcgcaaatatcctattgatcaccgtgtaagtgaagctgactgggataccttgatgatggcgttgtactttcaccctcatagagttgagaagatcggatctggagctaaggaaataaaggtagggcatcatcccgatcatgcagacagtcgttgtttctttttggttagaacagatgagacaactgtagatttctcatatcggaaatgtgttgtcggtgcactcgagatcattgctccttgtagggcacaatcctacaagtcaaaatggttacaacatggtagtttgtaaaccaaactcctcacttgtgcatgtaaatatagcaagatccataccttcctaaaactgtacatttctacagactactgagcacaagaagagtagtttgaacagaatttcatatccttttggggcctnttttttttccttttcctttttaaaaaatttttaagagtgtatttcccagcctaatagaatagggtcgccgctttcctcagcttctttttgcttcttctactgg

SEQ ID NO: 47334 - DNA, 440 bp, Gossypium hirsutum
  Clone ID: LIB3584-033-P1-K1-H5
gtgggaagatacgatatcgtaatgcatactaagcaagctataccgaaccaataactaaaacaataacaactgcattcacatgctgactaacctcctagtattatttctcctcgccagtttcccaactgtactcttcaaaatcgtaagaggccaatttggttgctgggttgcgtttcttgctgttgctttgcacctgttttttccagatacctttccagtttcgcgtttcatcctttttgtcattacgccagattggttggccgatagatttcgagatgacattgtacctggcatcctgtgtcttgtaatcacgattttagttaccctacttgaaatccgcggagtaggaggattagagaattgtgaatgcagttgttattgttttagttattggttcggtatagcttgcttagtatgcattacgatatcgtatcttgcca

SEQ ID NO: 47335 - DNA, 481 bp, Gossypium hirsutum
  unsure (1)..(481): unsure at all n locations
  Clone ID: LIB3584-033-P1-K1-H7
cccacgcgtccgcccacgcgtccgcccacgcgtccgatgccattactcttcctaatctgaaaaacgatttgaattcgtcttgtcttatcatctgccatttcttattaaagatgcttccagtttccaaggagagcttttcctccgaacctattgatttccatttcaaaactctccattcttcatcttttaccttccatttttagtctggttctctcacactatccctttctttctgtttttctacatattgggggactcttcctattaggtaaatctccttcttactcttcaacgtttcgattgcaatagagtgtgctaggttatttactgttcgtggagtgcattcaaatctgcattttctagatttaaacaagatctattgaatatcatgtatatatgcacctatcaaggacttatcttgactattcgtcttgcattnttttattattgataatgaatcaccttcgatggataatgtttt

SEQ ID NO: 47336 - DNA, 426 bp, Gossypium hirsutum
  Clone ID: LIB3584-040-P1-K1-A1
tcgcaagtctccaaatccaatcaaacaatttgactttcgccagtgtctatacgcagacaaaagttgttacaccaagcaatggcttcaataggacttcaaatgtgtctaactctagccctcatgggaatgctatgggcaggagccaatgctcaaatcttgactccgggactcaccaacttaaccccatgccttaactacattactggaaatacgtccaccccatcatctgcttgctgctcgcagctgaagacggtcgttcaatcatctcctcaatgtgtttgctccatgctcagcatgggggcttcattggggattactataaaccaaacccttgctctaaaactccctggttcttgtcaggttcaaaatccatcacttagccagtgtaatggtggaaaatctggaacacgttcaactgcaccagca

SEQ ID NO: 47337 - DNA, 257 bp, Gossypium hirsutum
  Clone ID: LIB3584-040-P1-K1-B12
cccacgcgtccgtacacacgtagtgtagttctagatatgaagcggccgctctacaggcatcaagctaaccatcgcttgcataccaaaatactaatctcctatcgagtcatgtagctgcaattgagtggacggagaacaacaagcgaatacactgggagagcactggcgatacccaagcaaagctggactgatgacagatctctcatgtcagatggccatagagagaacagggcgtggatgaacgacctgagcatgtg

SEQ ID NO: 47338 - DNA, 417 bp, Gossypium hirsutum
  Clone ID: LIB3584-040-P1-K1-B8
actacgcgtacgtccacgcgtgcggatagtgtatctctaagcttgcacacaccctcatgcgatgccttacataggagatagcatagccatattgtactacctgcgatcgcggctgatgcgtctcctttaccaccttaacattagatgggcatcaactcaatgcacagagaagcagaacgagattgttcccatgaaacaaatgaaaatggactgcgtaccatatattccactcgagaaaagagacagccaaatggatagagggacacctcatatatccatcctatgctgcactcaaagatgggtggctctcacacagatgacaatacattgtctaacgaaatacgagcattgcctgtcttatttttaccatcctttgatggaagatgagcttgatcaacgcactgaggttcaaataat

SEQ ID NO: 47339 - DNA, 427 bp, Gossypium hirsutum
  Clone ID: LIB3584-040-P1-K1-C4
cccacgcgtccggaaacaacccggaaaatacaaaaactttacagagtttcttcggctggtactatgctactgtcacgttttcagctctaattgctgtaacttcgatcgtttattttcaagataatttggggtggggaatgggtttcgggatacctgtaatgttgatgttcggctcagctgtttctttcttcttagcatcttctttttacatcaagttgaaagctatgacacgcttactcactggtctggctcaagttctagtggcttctttcagaaacaggcacattgagttaccgtcccatgccactaatgaagttcaccatatcagaaagggatcgatgctacaagtgccaagcgaaaaactaaggtttctgaataaagcttgcgtgataaaagatcctcaagaggacttaacctcgaatggaga

SEQ ID NO: 47340 - DNA, 414 bp, Gossypium hirsutum
  Clone ID: LIB3584-040-P1-K1-D2
cgccgctcaggctcaggctcacttagcacgcgctgctgagagtcgtcggaaacctgacccgccgtcggaggttgtccctcggggctgatgtccttacgtcagtcgacggagatttgactacgactgtgacaattggatccaccaccagcgattctacagcactcctaaggtgggtcctacctacggagccacgaccaacggggattactgaagctgccagatcattcaagaagaaaaacagggtctcgctgttttcgaatctgtgcatgtcgagatccgagaaatttaattgggatcctaacgttcgttatcggctgtactggtcagatgaaccgtactcgtcctcgtcatctgcgtcttgggtctaggaattctctgctgttcgtcgaaagaagcagcaattttcgaggacat

SEQ ID NO: 47341 - DNA, 429 bp, Gossypium hirsutum
  Clone ID: LIB3584-040-P1-K1-D7
cccacgcgtccgggtgtcgctcgggtcgctcctaccatacgcatgcacatgacccacgcgggctctcttcctgtgtggtaagctagttcattagatgccacgcccttttcccccttgaagcatgggggacacctacctgaaccaatcttctcttacaggatttacattcctactattagcttataaaatctgcagttctattctttattcagcgacttgctgaatatcgcattatcgaaatatactatggtgcctcaattagtgattgcctatgcgacagatgtggtgttgctgttccaaacataccttcatcttcgcttgacatccaaaactcacacatgaaaaatgcaatcagacccatatcttatatgcggaatagagttgttcgtagtatgctatagatggccaacgtagaggattggagcaagt

SEQ ID NO: 47342 - DNA, 360 bp, Gossypium hirsutum
  Clone ID: LIB3584-040-P1-K1-E2
gatagtgttggctaggtcgacctagtccatcggctcagcgactgacggatgtttgcgtgtttagtatgcgttaattgatacatgtggaaacgcttcattgagatcagtttggcgaatgctgaaatatagaatataattgtgaatacaatgctatgggattgttcgaccgagatatgtcactgataccgtacgggatgaaccttgtgaatagacagggtacacatgtcatgacatgagggtgaccgagatctcgtgtaagaccatatctgggatatggcatcatatgaggcttctggtcagaccatgtatgagacatacacatctatgtgtgatactgcgtcagaccatggctgggctatt

SEQ ID NO: 47343 - DNA, 427 bp, Gossypium hirsutum
  Clone ID: LIB3584-040-P1-K1-E3
gctaaagaacaagatagaaatgaacttctccatcaacagtttggtattaactacaatgatactcttgcattgtttcgtcaaggaacttgtattttcaagactgaggtactgttctacacttttgtatagaacatggtctaaggtattctaaaagctcattgtttagtcctaagttatttggccttaatcagaatgcccttacagagcatgttccagtcttatctgaatcaatgatcatgtattttgaaagggcatgcctggatgtggaaataaccaaagtacttgtagctttcggtagcattttgagatatagatcaacaaaatgatgctattagcttgggactggcttgagatgttatgcctcttaagacaaaaccttacagtatagcaatgtcttttgtctgaaaatttgcatcaagttttctag

SEQ ID NO: 47344 - DNA, 395 bp, Gossypium hirsutum
  Clone ID: LIB3584-040-P1-K1-F2
ctagtatatctctacgtcgctgactgtgcacatatggggataccatgcacaatctgtagccgtgctgcacaggtcattcatcgccatccagcgcaaccaatcatatgacattgcttcctgccaccatccaatcccttgcggatggtatttacctggcagacacagaaggaactgactacattacttcttgagctgccatcgatcacattaccgatgctacacaccggggagacatccataaataccctgctaattacatcgtcaactatatcaacggcggtgatcatgacactacaccattgtctacctgatgtggcatcacgggctatgtgaactactgagagatgcaggactcactgcccaaccgaatgctgacccatctaagactcgatgct

SEQ ID NO: 47345 - DNA, 320 bp, Gossypium hirsutum
  Clone ID: LIB3584-040-P1-K1-F8
gttgaggagttccaccctggaagatgctctggatacttcatgcctaatccgggaacaaacttggcgtatatgccatttggtgctgtaagaagaattagacctgttattggagtacggatactccgaagtcgaggtaccactcgcgagtggagctgtaccatggcagatgtgggagcctccaaaagggacgaagtgacgtagatctacaaacgactgaactatgtggctcaactgcaccatgaaaagattatttgctctcaatacccggaccgtattgaacatggaaattacgaagatgcactactgctaggaggcattat

SEQ ID NO: 47346 - DNA, 461 bp, Gossypium hirsutum
  Clone ID: LIB3584-040-P1-K1-G10
cccacgcgtccgcaaatgcatggacgctgaaagcaattccagaggaaggctatatatcgtgtctggtagcgggcccttgcggcaactggtttgtttcagggtcttctaggggtgtccttaccctttgggatttgaggttccgtattccggtgaactcatggcagtattctcttgtatgcccggtagaaaagatgtgtctctttgtccctccttcaagtgtctcagtttctacaactgctaggcctcttatttatgttgctgctggctgcaatgaagtctcactttggaatgcagagaatgggacctgccaccaggtatttagggctgcaaattatgatagtgatgcagaaatgtctgatttaccatgggcattggctaggccatctgctaaaacaagctctaaatctgatccgacgaggaatgcatatccaaggtatcgagtggatgaattaaatgaacca

SEQ ID NO: 47347 - DNA, 234 bp, Gossypium hirsutum
  Clone ID: LIB3584-040-P1-K1-H6
ccaccgggtcctttatgcgacattagatcctgatcatgaaaagctgattgagctgacttgattatggattccaccactggcggttttgacgctgctatatccaacgatggtcagactcgtgagcatgctgtgcttgcttctaccctcggagtcacacaaatgatatggtgctccaacaagaaggatgccactaccccttaatattggcaagactagatgaatgctaatatgaac

SEQ ID NO: 47348 - DNA, 305 bp, Gossypium hirsutum
  Clone ID: LIB3584-041-P1-K1-A11
tcaatacagagctttatattatctttgttagggccgacacaagacaccgacgacaatccaccatctgcactctggctctttacgctgaatactatactatgttggcgggagaaaaatgctcggagtatctagcaaggcgatagtgtctctcgccggacgagcaggaggcagccggatgccgaactacatcacctaagataacagaggatgctctggtgaaacagattcttgcgacgaactgctccggcgtgtccatgcgaatcggagaccatgtccgaagtcgttattgtgaccataaagagtat

SEQ ID NO: 47349 - DNA, 445 bp, Gossypium hirsutum
  Clone ID: LIB3584-041-P1-K1-A3
gtttccttttacttcgggttcataatccttataatatccctgtacacagactctcgcgagctataaaagtgcacccatattgccatatttacttctagtaaccgttaattcatcgttcatggctccgactgatctggcgctgctacctcttagatctctcgctgaagcattcaatcttgagaatggatgttaatggtgaaaaagaggaacctatcccacgtggcaatgaatgggaagttgagtccgtaactgcatcgggatatgctgccgctcctggtacaaagcaagttgaaacaaatgatgacaccaagggtgatcgatatgcagtacgggacgctgaaactcgttatgcttgattcatgactggccactctggcttcccccctagcgagcatgagaattggctgatggaacccgctaatagtagtgaacgtgtaggcaagga

SEQ ID NO: 47350 - DNA, 222 bp, Gossypium hirsutum
  Clone ID: LIB3584-041-P1-K1-A4
gtccgcgaaccggtgcgtacatccctacagttcagctgaatgggccccaagcttaatatcagcccagatcaggtggcagctggccgcaaaccattactgggcttaagcttagcttacaaggcaacacgcagaatagactagcaattcatttgcagcacctagtgtcccttacaaaaatccttcaaccccactgggatgtgcacaaggccatgagtgcaccca

SEQ ID NO: 47351 - DNA, 251 bp, Gossypium hirsutum
  Clone ID: LIB3584-041-P1-K1-A5
cacgcgtccgctaaaaaagaacccgtaatacgctctgttagggatggttcagcacactgccgccaaaccaccatcggttcgatcgatcgtcaagttagatactatactatgtcgacggaggtcgcaactaccgggaggaacagcaattgcggctatccctttctttaactaaaaaaaaaattcaaatcgtaattcactctttcaaaaaaaaaagagcctaacttcaaagtggaacatccgaccctggcccg

SEQ ID NO: 47352 - DNA, 228 bp, Gossypium hirsutum
  unsure (1)..(228): unsure at all n locations
  Clone ID: LIB3584-041-P1-K1-B2
acgcgtgagcaccacggaaacatgaaattttgctgccagtcgtttaccagccaatgtacagacacctgcaaagtcagtactccccatagctaccacaacctccgacatacctcatatacctctctgttattcggcatagaagcagcgcctccgtttgaccacgtngatcaacagcatcagaaagggatgctagtgcatacgacttaccaacagcaacagatcgagcat

SEQ ID NO: 47353 - DNA, 478 bp, Gossypium hirsutum
  Clone ID: LIB3584-041-P1-K1-B3
cgaccatcaccaccgtcacagtcgaatctgccgccagtggttcaccagccaatggacagtcacctgcaaagcgaatacaccccatgcccacctcaacctcccacattcgccattacccctcctttatccgacacagcaacagagcctcctttccaccacctccttcaacaacaacagaaacggctccaaatgtttaggtcataccaacgccaagaaatcgagcatgttaacgattttaagaaccaccaactcccattagctcgcattaagaggataatgaaagccgacgaagacgtgcgtatgatctccggcgaggctcccattctcttcggcaaagcttgtgagctttgcattctggaactcactatccgttcttggcttcacgccgaggaaaacaagcgacggacacttgagaaaaacgacatctctgcggctattacgaggaccgacattttcgatttcttggtagatattgggc

SEQ ID NO: 47354 - DNA, 459 bp, Gossypium hirsutum
  Clone ID: LIB3584-041-P1-K1-C11
cccacgcgtccgggccctaatcctagatctgagccatctatatattctcgcgataaatttggccgttgaggggttttgcttctttgcttcaattattttttaagtgattgaatccttaaaatgcgcatcatatcctgggttttcagtgcatactactatgcaagaagggactgtatcatctgtcagaatggctcaatcccctcatcataacatgctgccttgtgcaactgctatacgccgtctagtgataggacacatcacatcgaccacatgcttcggagattgcgacagtttatagcagaacagtggccactatccgacgaaatactctcaggcctttctcgtaaagccaaattcacagtattgatcatgcattctcgactcctaaaagcgctgaggtgccatactgctatcaatattagcatactacaatcgacgtgaattctcaggctatgacat

SEQ ID NO: 47355 - DNA, 406 bp, Gossypium hirsutum
  Clone ID: LIB3584-041-P1-K1-D11
cccacgcgtccgctagctcttgagctggcgatgacgatgacacaagcgcacgtactcatgcatgtgggttcgttgctatcatgaacagcatacgctatgtaaatcacatggactgctttgctcaaagcctactatgagaacaccaatgcggtgcctagcgataacttttcggacatgccaccatttttattaaatggcgctgtcatatttagtgcccttgcaccattagaacattcccgaacacgaggcgacacgactgagatgggtgactggaatatagcactcaagctgcacattgatctcgaagggacgtggatggaacgcccagattgatcattacatttacctgcgtggtaacaactgctacattggctgatttgcgttacggaatcgccacatacacaag

SEQ ID NO: 47356 - DNA, 189 bp, Gossypium hirsutum
  Clone ID: LIB3584-041-P1-K1-D2
accacgcgtgcggccactcgtactgccacgcgtgggggcaagtgttctctttattgggcttcagcttgcgattatcctgactggtgtactcgagctacgatggcatgtggttaccattgacgacttattgcgtagccagcacatttgacatataagaggccttgcataccatctgtgtgccgtcactca

SEQ ID NO: 47357 - DNA, 440 bp, Gossypium hirsutum
  Clone ID: LIB3584-041-P1-K1-D3
agcacgcgtgcttccactcttcctctgaacacatctgaggcaacatgatcatctagtagttgacgcgtttgtacttggccagaacaccagattgctggctgtcgagctccgattatgtggtgacatcattgaagacttatggtgtatcgcgcaagtgccaacaatctgtggcatttacaaacatatatctaccgacagtcaagggtcactgacgaaccttgctgcattggacaccaacatgcactggccgtgtcacgcatcgagtaatgcagatgctggcgtgctgtacactagtgaaatggactacacgtgttaatccctaccaacaacactatcttatcgtcaacactgatgcgtgaaagaacagcattgatgtgatgctctgaacctatggatctaagcgaaccgaccgctcttcggtaacatgctcattctcacac

SEQ ID NO: 47358 - DNA, 552 bp, Gossypium hirsutum
  Clone ID: LIB3584-041-P1-K1-D7
cccacgcgtccgctgtatgaatctttactcactatacatgagattatgttctgtctcgaggagcggtaatggtgaacatgtggatcaaaacaaagcggaccaatacggatgcagcgggtgtttgcgatacaaggtttccaaagcaaccatgttctacagcactgtagcaagccttcttagatgatcaacgctgacatgacctatatgctcaaaaacggcctaatatagggcatgtgattgatatactcgctgctgatgactgactgattagagatgacctctgagctaaaacgtaaaacatgctgtcactacaagatcgcctgaaagatagattgacagataaacctgtctatgaatcatgtgacagctaccgatatgaaagctgcgctcatactaattgatcaatattgagaaaacaagactctgaagagccatatctctgcaaacataagttaaggcgaattggcacattttcttcaaattattacttacatccagagcttagcttagccatttacacaagttttttttccctgcacatgtataaacatg

SEQ ID NO: 47359 - DNA, 421 bp, Gossypium hirsutum
  Clone ID: LIB3584-041-P1-K1-D8
cccacgcgtacgatgtatgaatctctactaaatatacactgagattatagccggtctcgaggagcggtaaatctgaacaagtggctcaaaacataacgtggccagtcgtgatgcagagtgtgttttcgatacaaggtcaccggagaaaccatcttctacagcactgaaccaagcactcttagatgctctacgcttagatgacctaaatgctcaaaaaccgcctaagatgcggcatgtgattgatatgctcgacgctgatgactgccctgttagcgatgaccgcagaggtggagcggaaaacttgctttcactacgagatggactcaaagatagattggcagatagccctgtaaatgaataatgagacagctgcggatatgaaaaccgcgctcatactaacttatcaatatggagaaaacaa

SEQ ID NO: 47360 - DNA, 346 bp, Gossypium hirsutum
  Clone ID: LIB3584-041-P1-K1-E4
tacttgatagcttatctatagagctacctacaatcaactgaccggccgtcgacaaccaacggactgactgaacaatccctggacccacctaacttaattggcaggacatacatctttcttcagccagctggctaactaacaaggaggcaccgaccgatcgtcctaacaaacagtcacgctgactggatggcgaatcgcacgctccctgtagccattcatcacgcgcggcgtgtggggtgctcacacgcagagcgaccgatacactagccagcgacctagcgctcgttcctgtagctttctttcctttcttgctaggcacgttcgctgtctttgccaggctagctat

SEQ ID NO: 47361 - DNA, 439 bp, Gossypium hirsutum
  Clone ID: LIB3584-041-P1-K1-E5
aaggggttcacttaacctcccaggtcatgttaatgtacctccaaccatgcacatccgtacccttgcatgatcttcttctccagttaatgcaaattctgctgttactaaggaagaaactgcagcttctggacagactcccaggtggtactgccgaggagcggatatctgctccatggggaaaagcagatgatactccatcaccagctacgggtgatgccatggttgcagctgacaatcatgatgcatccaatgctcaaagaagcatacacaatggccactgctaaagctctcagataaggatgattcaacgccagcagagccacccaaggactatatccacgttagggcatgaacgtgtcatgcttctgctagctatagtcttgctccaagcgctagtacagagaaactgactgactggatgaatttcctacaggatctt

SEQ ID NO: 47362 - DNA, 236 bp, Gossypium hirsutum
  Clone ID: LIB3584-041-P1-K1-E8
aaagtatgcctaagcctttagggcacttggcatggtgaagagactgagatgtgggttccaggccaatgaaccatgctacaagttttggtttccatacaagcattgattctgaatgctaaaccctattttaacgagcctgtgttcaagattgtgtatgtggctgccgagagtgaaaagaggtccaggaagtacaatgaggatgcataagctctatccttagagacgatgatttacac

SEQ ID NO: 47363 - DNA, 477 bp, Gossypium hirsutum
  Clone ID: LIB3584-041-P1-K1-F11
gggccgcgatgttgcaatcgctactattatgatgttgatgcaccaaagtaatagtatgtctagatgcaaagtctgtacctgcgacctttcctttattgagattgatgacatatataaaaagagcaactgccgtatgatcataatgtcgtttgcaacaaactggctttttcaataggcactcgttgggatggctgtctctattcacgactcacatattgattgatttcaactggatgcttggctatcattggatctgcaagctactgttatcgaccctgcagatgtggatcggctacaggctgaactccgcataaacaaaccctatgtggtgtttactgaatatacaaccagtgctttcctgagctgtctagtccttgagagagtttcagagatgagtgacaacgaaggaacactcgcctgcattgatagtaccttgtgttcacctactaccgagcatgccgtggtccttgaaggtta

SEQ ID NO: 47364 - DNA, 116 bp, Gossypium hirsutum
  Clone ID: LIB3584-041-P1-K1-F3
cccacgcgtccgatgggatagaacacagagttgtgcatcgtgctgctaaatgaaacaatatgggcggcggctttgtaggttcaacgctcagtttcccttgcatgcatcgacagagg

SEQ ID NO: 47365 - DNA, 417 bp, Gossypium hirsutum
  Clone ID: LIB3584-041-P1-K1-G3
cccacgcgtccggccacgaaaccatctatattgcttgagctctaagcgacaagaacaatggctggctcgcagaaagccactgctttgattctcacaatggctcagctagagaatctcgatttaacggttgatgctaacggtgatgatgataagacgatgccagtcacgaaacataacggcgagaaggagagtctacaaaggtgggaatgttcctactggtcgaaatattgacgcaaccaaacgatcaaagatgtctcacacggttatcaatatgaggacctgtctgctaaaaggaattcaccgctggctcatgctggtggactctcagattaccattctctcatgtcggctgcttacatccatgagccttagctgtttgggactactggtggtaagcatatgcaaatgaacgaagtc

SEQ ID NO: 47366 - DNA, 507 bp, Gossypium hirsutum
  Clone ID: LIB3584-041-P1-K1-H1
cccacgcgtccgtgcatttaaacctaagaattcctgccaggatggttcaaaatgtaggttgagtggaaagaagtggaaaaatataaactggacgtcctgctattttcctatgatatctattaaatacgagatacgttaatcatatcagtcatgataataattgatgccttttgctgtcgaggtagaggtcttggtggcctgaggtcctgaagaagtgaaacgggtaaagagggtacccaagtttggtttttggggcaggttctgatgcttaagtcagcaccaaagttcaatatatttgttgacctgtatcgaggtggagatcttggtggctggagtttgatctccaagacatgctccggtgataaaattgaaatgttatttgttgctggcaggtaattgaggctggagctaatgcattagttgctggttcagctgtgtttggagccaaagactacgcggaaggtatggacatgggaattgttattattttttttgcatttaatggaa

SEQ ID NO: 47367 - DNA, 333 bp, Gossypium hirsutum
  Clone ID: LIB3584-041-P1-K1-H4
gcttcagataggatatagggcgccctgtggaggtctcctgagcacggtctcggttcttgcacatgcagaacctcttataatggctcgctaaggatgggggacagatgacaaggcactactttcagagttgggtcacagatatgcagaccaaaggaagcagatcaggcttgcttatgaagaccttcacctggaagatctcatcaagcgtcttgaatcatagctctctggtgctttcgagcaagctgtgtatcgtatgatattggctccagcacaccgcgatgcccgcttagctaatgttgccatcacgcaattaagccctgatcaccatgtgat

SEQ ID NO: 47368 - DNA, 485 bp, Gossypium hirsutum
  unsure (1)..(485): unsure at all n locations
  Clone ID: LIB3584-042-P1-K1-A12
gcactcgaaaccatcgacaagacgctggcactttgctggcacactcatgagtattgtgttgtttatatattctatgttgtttaactggtggttcttggtgtttgtgccaatatgtggttatggatttgcctggtacagtcatttctttgtggaagggaatgttcctgccacttttgggcatcccttttggtcacttttatgtgacttcaggatgtttgggttgatgcttactgggaaaatggatagagagatcaagaggcttggaaagagacctatcttacagggcttctgagggttcttatgtaaaaaccttcccccccccttctttctgtttaattcatgatacaattacttgtatttcatctgttttctaggatgctgtcagctctagttgaactcttgttttacatcttgcctctgacaatgtttaatcacgtttctgttnaaaaaacaaaaataattatgatttcgatatatgaaaaata

SEQ ID NO: 47369 - DNA, 467 bp, Gossypium hirsutum
  Clone ID: LIB3584-042-P1-K1-A5
agaagatcggggttgctttgaaggatgacgtcgctacgagtgccttgaggaggatattaaggctagatttgtagccacaaccaaaaaacaaataataacggtgtgggtggtgattgactgaatttgttgttagatagctaatctcttgtttgggttctctaatcttcgatcgtcccttattttttcaaggggatagatcgaaatagctaactcaaaaaagtaggtttagttttcctaatcaattgttctttttactgctgtatagctttgcgagtgtttagtttaatatgaaactgtctactgtctagttcgtccctttagggtttatcttagtttcgttctaaattgtgtttgtatttaatctagtgttagtgtggtaggtcgatcttgtaattgggtttgtgtatcctctttgtttatcaagtattatatattagacagtgaagttctatatgtttcgtagcgtt

SEQ ID NO: 47370 - DNA, 522 bp, Gossypium hirsutum
  Clone ID: LIB3584-042-P1-K1-A8
gtaaaaatgttacgggatgtaataactataacaatagtttggttagatggaatgaaataaacatgtaacaacattactttgtttggttgagtaaactaatatggcataatgtcaaatttaactcttaatgtttacatcttttatcaatttgacccttattctttttatttagctaaatttggccttcaactttttaaaaagaatcaaatttgactatcaacattttgaaaagagtcgaaatgatttgtttttaaacaaaaatactaactaaaattttaaaattttaaacatagattgcaccatttttaaaatttttttatggaacttttatatattttgatattaattttataatttttgaattatttgttgatgtgacatatatgacaaatgatgttatgttagcatgatgtgtacatgaactgtcatgcaagttgtcaagccaataacattaaaaattaaagtttgttataatttcccttaaaaaaatgcaatttgacttttttttaaaggttaagggtc

SEQ ID NO: 47371 - DNA, 524 bp, Gossypium hirsutum
  Clone ID: LIB3584-042-P1-K1-B12
accatttttctaaaaaaaacccccgaaattcctaaccctttcaactagggtttcagtcaataaacttgcagcagcgaaccaccactagatccggtggccgacagcgcagacgatggcctgaacctgccaacgatggagaactttcagccttgagatctcttttcaacttcgattgcaacgaagtgagaagaaccttccgcatatctgcaagataaggtctcctctctctttttctttaaacaaaattgatttctttgtatttgatttgccctcccctttattcgttttttttatgcggtagataaatcaaagaaaacagaaactaaatcaaaagaaaaacgagattaaaatcaccttgtggagacttttttcttttcaagcttttcggtattgattttttttgttgtgtgtgtctgtgtaaacattacattatattttctttgcttttttagccgaaaaacaaaataaaggaaaaaaatgaaaaatatacaaaaatcagctcggtctttttctgtctctatttt

SEQ ID NO: 47372 - DNA, 540 bp, Gossypium hirsutum
  unsure (1)..(540): unsure at all n locations
  Clone ID: LIB3584-042-P1-K1-C12
ggggtaatctaaaacccgattacttgcaaaagagaggctttgtcgaggcccatgttgatgatggtatactagaaatttttggcttaaagcaaggatggcatgcatcgtttgtaatggttgagctcatatctgcaaaacacatcgcacaggcgtcatcgattcgattggagttaagtggtggagattggagagatgcatttttgcaaatggatggggagccatggaaacaacccatgagcaaagagtattccaccattgtggaaattaaaagggtgccatttccgtcagtaatggtcaatggagagtgacattgggctaatcccttttctttctctcgtgttttgtaaatcattacggttggctagtggttaagccttttgttggcagcatcatcaccgaagtgtgttgtaaattattgttcttttaccccccagtgaataggagctaatcggtgaacttcattcatagaatacgccgtgttctattttttttaataggaatgntaattaacaaatatttcctacttctattttcaaaatg

SEQ ID NO: 47373 - DNA, 277 bp, Gossypium hirsutum
  Clone ID: LIB3584-042-P1-K1-C3
agaaggtatgggaaagcgcgtcggtatgagacggaataacgtgctgggattgaaaaggaatacggtggacggtgacattattaacattcagatcttaaatatttagtctcaatacggatgtaatgttccgttggtactaatgaactaattcaacacccatgatgacacattaaaggttgattggggcggccgttttaatggatcaaaaattcggcggcgtggattggaggccatactaataatgggtagtggatgcaatgggaattatgtcctgcat

SEQ ID NO: 47374 - DNA, 544 bp, Gossypium hirsutum
  Clone ID: LIB3584-042-P1-K1-C4
cccacgcgtccgcccacgcgttcgcccacgcgtacggtgggaagctcaagaaggatcttcagtaccaggcagatgaaactttcatgatgcatgatgatcctgtactttgtgttgattttagcagagactcagagatgattgcatctgggtcacaagatggaaagataaaggtttggcgcataaggacaggtcaatgcttgcgccgtcttgaacgtgcacactctcaaggtgtgacaagtcttgtcttctctcgtgatggaagccaggtactaagtacatcttttgatagcactgcaagagtccatggattgaaatcaggaaagttgctcaaagaatttcgtgggcatacatcttatgtgaatgatgccatttttacagctgatggaagtcgtgttattactgcctccagtgactgcactgtcaaggtgtgggatgtaaaaacaacagactgcctacaaacatttaaaccaccacctacgttaaggggtggtgatgcgtcagtgaattcagttcatgttttcccgaaagatacagatcatattat

SEQ ID NO: 47375 - DNA, 526 bp, Gossypium hirsutum
  Clone ID: LIB3584-042-P1-K1-D10
ccctgttcttttttgacgaagagtatgaagtagttcataggctatcaatatattatctgatattagtcttcctgggacgaaagcactctgagcattatcaatacatctgccaataaactcttgaagacgattctcaattgttttggctataattttgtatataactgtgcataggctgataggtctgaaatgaccaagatttgtaggtttggatgtcttcggtataagtatgatctcagttaggtttaaacctttaaaatcctttccattattcaaaactcccaaacaaaagtcgccaatatctttaccaactatatgccaatatttctgaaagaataatgccgggaaactatcgaatcctggtgctttagtagatcccattcctttgagtgctgcaaaaatttcttctgacaataaatctaggttgatttctgaagatatactattattgatacctgttaaaagatgggatagatctcctgcgacatgagtcgaaaaaaggttctggaaatagctcgttgcagtc

SEQ ID NO: 47376 - DNA, 539 bp, Gossypium hirsutum
  Clone ID: LIB3584-042-P1-K1-D8
gggatatgtcaaaacacctcgtggtcttcgtactttgggctctgtgtgggctcagcatctgagtgaaaggtgaaacgaaggttctataagcactggtgcaagtctaagaagaaggcttttaccaagtactcaaagaagtttgaaactgaagatggtaaaaatgacattcaattgcagctggaaaattgaaaaaatattgcactgtaattcgtgttttggccaacactcaggtatttccccctcaagcagatctatattttgtagttatgttttagtccttccaattctggatgattgaatgctttaactactatgtttttcttttttttcctgatttcttttatgtcctttattgcatatttctgtagataagaaagatgaagggcttgaagcagaagaaggcccatttaatggagattcaagtaaatggtggaactattgctcagaaagttgactttgcttacggttttttttgagaaacatattccagttgatgctgtgttccagaaagatgagatgatcgatatcattggggtgac

SEQ ID NO: 47377 - DNA, 252 bp, Gossypium hirsutum
  Clone ID: LIB3584-042-P1-K1-G6
acggtacgcataaagactcgcctatcggacgcgtaatttgacctgcactactagccggtccatctcgacaaactgcgagggttcttatcatggcacctataagcacttcgtcatccctccgtgaatagatgcacttcaagcttattcaataaatcccatatacgactatagggttgctatccattaattcttaatggtcatatcgctctgctaaatactcgctctcctaatggaacaaatggtcatgcactt

SEQ ID NO: 47378 - DNA, 388 bp, Gossypium hirsutum
  Clone ID: LIB3584-042-P1-K1-H3
ggagctgctaaggctgatggaaaagtgctaactgtcttgaatggaaaattaactgtaaatggacttaacgtgttcccacctggtgatagatcagagggtgacctgacagaaagactagtgaaagctgcctcttatgatgaactcaaagctgatgttaatgccgtgtgcgagggtgaattgaagggaattttgagctacactgatgaagatacggtttccactgactccaagggggacagcacggcgagtctattggatgccatagacataatagctctgaatgagcttgatgccaagcttgtatcttggggcgacaatgaatgtggctacagcgctcgtatggatgacattatgatgcacgaggatgctgttttggaagctaatgaag

SEQ ID NO: 47379 - DNA, 214 bp, Gossypium hirsutum
  unsure (1)..(214): unsure at all n locations
  Clone ID: LIB3584-042-P1-K1-H5
gcaaaacagaggcttaaacgaccggcagagaaataaaaatgggaggctgtcaatcgcagtgcatggnngngggggggttttcctaaatagtgcgtaaagaatggcttatagttagctttatgactttcttattcgttgccttgatattggaatctcttggaaaaaatggctttggcgaactcctgaatggcccaatctatataaaggaattttt

SEQ ID NO: 47380 - DNA, 313 bp, Gossypium hirsutum
  Clone ID: LIB3584-043-P1-K1-A11
gttactgataagagaaggtaggatctcaccagaaagtaaattatgagacaaccccaactcagatattttggtgagattagacaatgacaatggtaattccccagtaagtttattctcagctaaggccagaaaagtgagattagaacaagaaccaagctcaaaaggaattctggaattcaatctattggaatgaagatcaagtttctggagctttgttaattggcctaaagaagatggaatcttgttttcaaatgaattttcacacaattccaaggtttcaagatctgaaaggaacccaatactctcagggatt

SEQ ID NO: 47381 - DNA, 316 bp, Gossypium hirsutum
  Clone ID: LIB3584-043-P1-K1-A4
cccacgcgtccgcccacgcgtccgcccacgcgtccgaagaggtttctatctgctaataaggatatatttgatgatatggaaaagaatgacggcaaggcttcactaatggtaagacctaaggctgtaaatgcggaaggcagtgaaaaccaggtaaagaaaagaagggctgaaggggaatggagaaggtcagaagcaaaacaagctctgagagatagaatagtgaatctgctgaaagcagctggttggaaaattgattacaagcctaggaataataaagagtacaatgatgcagtgtatgttaatcctgaaggaaaga

SEQ ID NO: 47382 - DNA, 310 bp, Gossypium hirsutum
  Clone ID: LIB3584-043-P1-K1-B9
cccacgcgtccgcccacgcgtccgcccacgcgtccgctggcacaagaatttccaacatggcagtttgttttggtagacttgcggtgccacggtgactcagcatcaatcaagaagagaggtccacatactgttgcttcaactgctttagacgtgctaaaactaattgcacaacttagaataacaccccgtgtcctaattggccatagttttggaggaaaagttgtcctgagcatggtcgaacaagcagcaaagccacttccacgaccagttagagcttgggttctggatgccactcctggaaaagttcgag

SEQ ID NO: 47383 - DNA, 311 bp, Gossypium hirsutum
  Clone ID: LIB3584-043-P1-K1-C1
aaaaaactagagaaccccaaatcccctttcataaacaaaaaaggaacatttttgctttcttcatcgtttagaatcaataaagttgcttttaaaaagggttcaaaaaccatggagagaagttcatcatcactatcaccaaatgaagaacagttgctttcttgttggggtcgtctcaagctaaagcttccttggacgaagaggaaaataaggagtttggggcatagcataacagcagcttttagggcaaagcgacccagacctgttggtggctttaagtatgaccctttaagctatgctcaaaactttgatga

SEQ ID NO: 47384 - DNA, 234 bp, Gossypium hirsutum
  Clone ID: LIB3584-043-P1-K1-C2
tggtaaaggctaacagctttgcagaactgttattttgcctgtcaggtttcctcagttttttactggaaaggagaaaggccatgggagaggcttttctgttgtatggggccaacctggggaacttgggaagttcataactttggccaaggctgttgcaactgaagctgactctacattttttagtgtttcttcctcaaaccttgtatcaaagtggatggggggaaagtgaaaagc

SEQ ID NO: 47385 - DNA, 297 bp, Gossypium hirsutum
  Clone ID: LIB3584-043-P1-K1-C6
tcttaattggtggtggtgatatcggacagttcggactgatggacctgcgtaacgtacttgggatggtaccacatgcacccgttcttttctctgtaactgtgagatataatctgaatcctttcactgaacacaatgatgctgacctttggcaagctttagagatagcacacctgaaagatggcattcggaggaatcttgtaggtgtgaatgctgtggtttcagaggctggcgaaaacagtactgtcgttcaaaggctattgctaagtcttgatcgtgcattattggggagatcaaaga

SEQ ID NO: 47386 - DNA, 314 bp, Gossypium hirsutum
  Clone ID: LIB3584-043-P1-K1-D10
gtgtatcgttttgccttggcgagtaaggagtgcaattttatctacattgtagtcttatgatgccgaaagggtggaattgcactgaaaccttttgtgcctaagctgcaaacaacatttatcaagtgtctgcaagataatacatggactgtgcgctcaagtgctgccctagcactgtgtaagcatagtgcactaagtatcagggttgacccattagtcattgatctcctatcttgtttgtaggcatctgccttctggagtaagggaggccatattgagtgctttaaaaggtgcggtaaagtatgctggtaagagtg

SEQ ID NO: 47387 - DNA, 309 bp, Gossypium hirsutum
  Clone ID: LIB3584-043-P1-K1-D7
gtgcgtggaagctggcaaagttagattctactgatgctatgagagcagcagccagagcaagagcatcctcatctgttctacggcctgttgataatcgtcgtatgggagatcctgaacatagttccagtggcaacatgagcattagaagtagtgttagcacagatacgggtttaaataaagaggtaaagcatgaccagcgattatcgccactaggaaactcttttgctccgagtcaaggtagccgtgatgagtacaatacaggaactcaaagcataagtagcttcagcagtccaagccatattcacgagt

SEQ ID NO: 47388 - DNA, 292 bp, Gossypium hirsutum
  Clone ID: LIB3584-043-P1-K1-E1
cctgaaattggcatctcaattttatttcatacctgctccccctccagaatcacttagaggtgtgccatttgttgctccaatgcgcccagtgcttttccctgctccagagcctccagaccgccagttgcatgctaacatagtgaatcagatcgattattacttcaggttatgcttttttttgcatgttgacttaggccagcttggttaattctatggcaacatcttggtatttatgtcagataagaggctaactgcctgtatctttatggtagtgatgaaaatcttatcaagg

SEQ ID NO: 47389 - DNA, 312 bp, Gossypium hirsutum
  Clone ID: LIB3584-043-P1-K1-E10
cccacgcgtccgcccacgcgtccggaagtttaggtggcaaaacagatgttgtgttcttcatcggcagcaatcaaaaggatatcagtatcgtggctgattatcgctaacaattctaacttcaaatcccaccgcctctctcgttctgagagctccactaaaagacctagaactatgagcacccattcctccctcaaggacgccttttcttcctacgctgatcacctcaatgccctcaatgaaaaacgcgaaaggattgtaaaagccagtcgtgatgtaactatgaatagtaaaaaagtcatatttcaggtgcac

SEQ ID NO: 47390 - DNA, 313 bp, Gossypium hirsutum
  Clone ID: LIB3584-043-P1-K1-E6
caaccagcatgacccataagcatcataaaaagcataaaataataaaattctcactcacaactatgaaaaactaatgaagcttaaaaattcaccatggttgaagataagtgggtcataagccttgggttggtggttcgagtcaccttgcactcaagtaatttcataatattctcacgtctttggttttgcaagtccatcaactgaggtgcttctagttttgtgaactaggcctttcgggcaactgctcatggcatgctggttcttgatagaatataggagacaaaactcaaacagagggacaataccttctatt

SEQ ID NO: 47391 - DNA, 312 bp, Gossypium hirsutum
  Clone ID: LIB3584-043-P1-K1-E8
cccacgcgtccgcaatcatctgataaaagcaagttcaagttattatattttgagctagaagaaaatggtggattaagccttgcactgcaggaggacagtgctaaaacaggaaaagttacatctgctggaatgtattttcttggcttccctgtctattgcttggatcaaacaaccaactcagtagctgccgcaaaggatccagatgcagctttcttcaaaaaactggatggatttcaaccatgtgaaataactgaattaaaaccaggcaaacatgtatttgccgtttatggtgacaactttttcaaaagtgtc

SEQ ID NO: 47392 - DNA, 315 bp, Gossypium hirsutum
  Clone ID: LIB3584-043-P1-K1-F4
cccacgcgtccgatctgatgaaagctgaattggattgctcaatgataagccttgaatgctgcaaggaagaaaaagagaaacttgaagcttttttgcaagaatgcaaggaggaaaaatctagaatctcagttgaacttagcatagtgaaagaattgctcgaggcatccacatcaaccatgaatgttcagaaggaaaaagatagcaaactgaaagatggttgcttctctgatgagctggttgtcaataatgctcaaactagggacattgatcttaaatatttggaccaagatactccaaaaaactccaaagatgcat

SEQ ID NO: 47393 - DNA, 298 bp, Gossypium hirsutum
  Clone ID: LIB3584-043-P1-K1-H10
cttcctcatcttcttctaactcatcttcttgttcccaatcttcgcaacgagaggtatgttcttcaatattataccataagcaatattcaatccattaatttggtttgatgataaaagattttgtgtttgtatataacaatgacctctcattcaccttattcaaaacgtaagctttcaacgataaggttttgcttggatgggtgggcaccaaaaaatatatatatatatatatatacataaattttgaaataagagattttttttttctatatgcaagggtgaaaaaggatcatttttt

SEQ ID NO: 47394 - DNA, 313 bp, Gossypium hirsutum
  Clone ID: LIB3584-043-P1-K1-H6
tcgctgttgtgagtgtaagctaatccacgctagctgtagaatgatgggaagcgaaaaatgagaggggtgcgaggaaaccactttctgaaagcaactaacaaactgaaggcttcatgagtgctaattccaaggatggaagttgagaactgcgagttgatgtttaccaagttgtcccttggtatgttaaggtctatttacattctttgcgggtgtttgttgatcaacaacctagggctgtttcagattttattgagaagatacacgtttcaccttccaaagataaaatgtctcctggtgtgatggaggtggttct

SEQ ID NO: 47395 - DNA, 310 bp, Gossypium hirsutum
  Clone ID: LIB3584-043-P1-K1-H7
gtggtgcaccatggtactctattttctcttgaggcattcttaagctccaacgggtttaccgtccctcctcagctcaacgccctcgagtatgcaatggaaatattaaaccagctgcatgctaacaaaccgattacaccgccatcactccctccatcacaacaagaatctgttataagtcccgacaataaagaagcaagtgatgtcaggtatagaagctcaagacttgatgaaatctgctctctatataacaggttttggaagattatatacagaacacggcagcttcttttaaccaatgcattagaagctc

SEQ ID NO: 47396 - DNA, 482 bp, Gossypium hirsutum
  Clone ID: LIB3584-044-P1-K1-B12
ctcgctgctggaaaaggagttgctgttgctacaacattggaggaggcctacaaagccgttgattcaatgcttgtagagggcatttttggttccgcaggctaccgggttattgtcgaggaatttgtcgaaggagaagaagcatcattctttgccctggttgatggggagaatgctataccactagagtctgcacaagactataaacgggttggagatggtgacacaggtccaaatactgggggaatgggggcatactcccctgcaccagtcttaactaaagaacttcaaaatgtggtcatggaatccattattctccctacagttaagggcatgtcaatggaaggatgcaaattcgttggggttttatatgccggactaatgatcgacaagaagtctggcttacctaaactaattgagtacaacgtccgctttggagacccggagtgtcaggtcacgggctggtttatatgcatcttttaagc

SEQ ID NO: 47397 - DNA, 483 bp, Gossypium hirsutum
  Clone ID: LIB3584-044-P1-K1-B9
gctggcacgaggaggcccttccgtttcgacctcaacctgtaaacgctccgatctgaggttgttgcttggagtcttgggtgcaccgctcgcgccagtgcacgttagcgctttggactctttctctcacctcaccattaaagacaccccaattgaatcatcatctgctcaatacatattacagcagtatactgctgcttcaggtgggcaaaagcttcaaaactccatccacaatgcttatgctatgggtagggtgagaatgatagcttccgagttccagacggctaacaaggtcaccaagaatcggaattctaccaaagttgccgaatctggtgggtttgtgttgtggcaaatgaatcccgacatgtggtacgtggagctcgcacttggtgctagcaaggttcatgctggctgcaacgggaagcttgtgtggaggcatactccttggcttggtgcacatgctactagaggccctgttcgccccct

SEQ ID NO: 47398 - DNA, 489 bp, Gossypium hirsutum
  Clone ID: LIB3584-044-P1-K1-C1
aagaagaagaagaagaaacacaaagaagacaaattaacattcattgatcatttgataatcaagtgtaaaggcggatgaacttaattgcttttccttttgacagttctttaactgaagctttttgtatagccatattggaggctgcaagttgtggactattaactgtcagcacacgtgtaggaggtgtcccagaggttttacccgatgacatgatagtacttgctgaaccagatcctagtgacatggtacatgcaattaggaaggcaatatctatccttcctaatattgatccacaggttatgcatgatcgagtaagtaattttcattgacttcatatagtaattttgaactgcgtgaggtggacaaatgcatatttctctttttgtggcaagatgaagagactttataattggaacgatgttgctgaaaggactgagattgtatataatcgtgccttgaaatgttctgatcagagtcttctagaacgac

SEQ ID NO: 47399 - DNA, 571 bp, Gossypium hirsutum
  Clone ID: LIB3584-044-P1-K1-C2
attgccttctccaaatagaaggttcggtctgtatatctattcatcaaagtctgatgaatgggattcttcttggattagttttcgggccaacgagtatataaggtttgaccatggtgttttctgtaatggggtctttcattggaacagtaacggtaggaaatctttgcggtttgatttggagaataaagtgttgaagaaaatgccaatgttggctcctatgtttcaagctccgcaaggctcggaggatgaggatagtcgatattttggggagtctaggggccatttgcatcttggagttacatacatgccactttgttttaaatttaatattttcgagatggcggctgattattctcattggtttcttaaatactgtctgaacctggatgatactatgaaagctttccctgacttgaggttacctgttgttgatatctattatggattccatgttttatctgttatccgatctgaaggtgaggaagtcaaaagtgtgattctcgtggataataaagcaattgctatgagcttaagaatggggttttgctaaatgtttacgagctaaagcagt

SEQ ID NO: 47400 - DNA, 454 bp, Gossypium hirsutum
  Clone ID: LIB3584-044-P1-K1-D1
cggtacgccatgacaatgtcaaccgtagagctttgggggacagtacacctacacgttatggtcgtgaggctcctagacaaggtacgagaccaaaggttggatctgaaaacagcatagagaaatcaccactccatcaccaggctcgggtcacagggagaggtaccatggcatcacctgcatatgaagcaaagacttcgtacgataatagccacggcactcccgggagatccaagatgaggccgaatactcgaggcgatgaaagtcctgatgaaagtgctgctgttccgaaattcggcgattgggacgagaataacccggcatcagccgatggttatactcacattttcaataaggtgcgagaagagaggaacaatgggggcaagacaccaggcatgccaggtgagcaatctccataccgtaccactcggaaccggaaacaagctaacagcaacgc

SEQ ID NO: 47401 - DNA, 315 bp, Gossypium hirsutum
  Clone ID: LIB3584-044-P1-K1-D10
ggaaggaggtggcacggtgtgcaagtcaagaaagctctggagcttataagcttttactgccaaaaatacttgtttccataaaagataattggaatcatcaagaagaacactgaccttcttggtagaaaagaacctgctatcaacaacactgctggtaaggttagacgccatcgtgggagttgcggactgagtatcagatggacttgacagagaatccatgcaaccaacaaaactcaaaaaccaccaacccaggatgagatgacctctgataccatgttgtattatactcaagactaacaacagaatgaatacttc

SEQ ID NO: 47402 - DNA, 440 bp, Gossypium hirsutum
  unsure (1)..(440): unsure at all n locations
  Clone ID: LIB3584-044-P1-K1-D2
cccacgcgtncgcccacgcgtccgcaagaaaccctaaagacgtaactctctcatttcatttcttttgctgcgccgctgaaattctttttatcgatggacctgttaaatcacatcctctgttcttcgtcttggctttgtttccccgatctgtcatcttctaagttactcagagctttgttacctgtcttcttctccagacttagtccaacaaacctcggcacactttctctaatcaagtctcctttggtttttaataacgatgggttgaacctccaacggagtttcttccacccaaaaagtcaaaaaataacttcctcagccccatgtggccatcgcatgcgccgttccattggctttttacatccccttcgatgataacatcactgaatctcatttcttcagcanaaatgactcattagagggcgccaatgtcactgtta

SEQ ID NO: 47403 - DNA, 484 bp, Gossypium hirsutum
  Clone ID: LIB3584-044-P1-K1-D5
ggcaaattcaccggaagaaacccatggaggatccgtttctcccaatgggagcattcagaattctgggtttttgagttctacaactacaagcctaagcgatgatcgcaactcggctgactcttcagagaagaagagtcgtgtgggtggggagccatcgaatacatcggtcaccaccgagactaatccaagccaaggcggttgtcccgataccccaacttcaaagaaaggcagcgaagctcgagaggagaaagagtcgaaatattcgagcaaacaagtgttttcagctccattggggaacatgaatttggaggcagaacagtcggcaatgcaacaacaaatagtagacatgtacatgaggagcatgcaacagtttacagagtcattggctaagatgaaactcccaatggatcttgacaaacccgaacacgaagatcgtggtgatctgattcaaaacaatagcaagaaaatagaacacgagaaaaag

SEQ ID NO: 47404 - DNA, 519 bp, Gossypium hirsutum
  unsure (1)..(519): unsure at all n locations
  Clone ID: LIB3584-044-P1-K1-D6
cggacgcgtgggtttccaagaagatgatctggaaaatttgtttgaagtggttaaaacttgtgttaatcctgatccaaaagagagaccaacaatgaaagaagttgcagccaagttaaaagagatcacagcaatgggacctgatggagcaactccaaaactctctcccctttggtgggctgagcttgaaatattgtctacagaatcaagttaatcagtgaaattggaatttaacgctaataaatttgcattctgttttccctgtttctatcgntgggctccgaagcagcggaagtctgagtagattctgttttctctaatcaaaatattggaaagagaaatgaatctttgtatataattcttagagaaaaatatatgatgtgagccttgatttgctgctgcttctccattctttgcttgcttttgtttcctttccttttactcatttgttcattctgattttaaagttgattgtataaattctagtacagcaacttgggaaatgaatatantgttatatct

SEQ ID NO: 47405 - DNA, 508 bp, Gossypium hirsutum
  Clone ID: LIB3584-044-P1-K1-E4
ggcatcaacaatttcaacaggtagcatggcacttcaaacagccttttttagaattttaagtcatgaggtttttgactatttgtatgttgcagacagattgagcgctaacaagtttgtgctgcaagttttagattttctttgcagcattggtggttgttatttaacttgaagagtgacagctttgtggtattggttttgatcttgtaatgatattgcacctctgaaattttggttgtcgatttccttatttgccttatatattaatttcttgaatgatgtctgcaacttttattcaattcctctcaatattatttttgcccaattcgttctatctatctgtcgttactattcagatctgagtttttgttctttatatggacaagcttgaaggtgtgatgtctggatgcttgtaattttatctggagcatttattaaagtcgtcaaaatgcttctttttcttaaaaaaatcatgtttagaaagtcaaatatttgattaaaaggactcatg

SEQ ID NO: 47406 - DNA, 599 bp, Gossypium hirsutum
  Clone ID: LIB3584-044-P1-K1-F10
ctgcactgctattggatacaccaaataaagttgatgacatgcaacttcatgatgcaactgatgggattgatgcctcacacttttgtgatccatgtaatgaggctgacaactcgaatatgcttaattccattggagaaagtgatttgcaaactgccaaaacagtagaggaggttattccacagtcatttgagctacctgatgcaaccaacggtaacaccgatttagaaattcataatgaaactaacaagcctgaagactcacaaggttgtaatgctactaatgggatcaatggtccccaaacactagtggccactgatgttaataaagcacaaattcatggtgcaaccgataaggtcagcgagtcacaaccctcggatgttgttcacagtgatcaacgaatggtaaaagaggaagtagaggttgttccacagttgtctcacgaaaacactgaggatcttgcacagcaaggtgataatagtgttatagcataaaagtgggacccatgtcatgtatttcgtggagtaattctctgacaattggctaaatgtgtttgcctataaaatagatagatacatgtacacatacatgcaccaaaaact

SEQ ID NO: 47407 - DNA, 482 bp, Gossypium hirsutum
  Clone ID: LIB3584-044-P1-K1-F12
cccacgcgtccggacaacgcagctcccccgccggtttccttagtcacctcacatcggaaaacggtttttctgttacaatgggcaacagaaattatagctctcaaggcagtggtaatggtggccatggagtgtcaaggttgaagtcccagttgagtttcactaggcaagattttctttctcagatctctgaagtgagtgagaatcttgtggatggtgttagctctaacagtaaccaccaaaatcctgcacattcgtttgctgctgctggctttggaatggattcatgggataatacaaactccattgtgttttctgccccatcaagcaagagagctaaaaatcttgatggcgatatttataactgtttcaatgccttggaaactcagtttagcttgccccaaacgacactcgagatggccacagttgaaaagctgctacatattcctgaagattccgtgccctgcaaaatccgagccaaacgt

SEQ ID NO: 47408 - DNA, 473 bp, Gossypium hirsutum
  unsure (1)..(473): unsure at all n locations
  Clone ID: LIB3584-044-P1-K1-F2
gacgagagagaaaaaaaatggtgaatcttgtagcagcacaaaagccattgatgaatgggttaatgaagatggcggnggttcagccttactcggtggagatcgagccaggcacggtgatgaacttttgggttccttgtgaaacagtcaagaaacccggaaagggtgaaaaaaaggtcacccatttggagaaaccgacaaaaccagtggtggtcttagtgcatggctttgcagcagaaggcattgtcacatggcaattccaagtgggtgctttgacgaagaagtactcggtttatgtacccgatcttctctttttcggtggctccattactgacaaaccagaccggtcaccgactttccatgccgagtacttggttcagggtttaaggaaacttggtgtggagaagtgtgtggttgtggggttcagctatggtgggatggtggcattcaagatggctcagatgtaccctcacatg

SEQ ID NO: 47409 - DNA, 508 bp, Gossypium hirsutum
  Clone ID: LIB3584-044-P1-K1-F7
ctctgttgaagagtgctattgttcaagtcgatgctgctgtatgcaagcagtggtatctgcagcattgcggggttgacattggtcgcaagagcagcagcagccaagaaagaaggagaggaaggtgaaagcggtactgaggaggcgaagaagagtaaccatgtaatgaggaagccggaaaagcagcaactgtatcgaggatcttttgttggcttgcatctcttcgcggcctggtcagtgtggacatgccgacgggtacgtcatgtctcgaaattctttttttatacataagataagcctgaactgaatatcatatttattctaaaatatgatgtcaaatggggtttgacatctatatcttggaggacaaggagcttgagttctacatgaagaagatccagagaaagaaggggaaaggagctgcccaaaaaagcagctacttgagatttcatcttttttatatcaaaatggagtcttctctcttattttttggccccagtttcaacttttc

SEQ ID NO: 47410 - DNA, 454 bp, Gossypium hirsutum
  Clone ID: LIB3584-044-P1-K1-F9
acgaccacgcgtgcgaccacagcgtgcggccacgcgtccgagcagtcagacgaggactacaacagtggtggtgaaggtgtatgggccaacctgtgcttctgcaatgcgagagatctgcatgtcttattgaaaaggagatcgaatcatacactgcccctgttgattcgcttaaaggagagcacaaagaccctgaattcatcaagctgcagactgtcggaacagattctgttactcatgatggagattatgattcatatgaataccgtgcgatcatgatatactatgcagagaaatacacatgacatgggactgatctactggcaaagacacgacatgaatggggtcaagtggcaaaatggctagaggctgacgcacacaatctcaacccaccaatttacgccttgaccgtacatatgatgatcgcttacaagatggtgttccctgctgatgaaaa

SEQ ID NO: 47411 - DNA, 405 bp, Gossypium hirsutum
  Clone ID: LIB3584-044-P1-K1-G2
gccacgcgttcgctaatcattagttcttgagttcccaccgcattagcaccgtctttcaggtctcattggctgtaagagagggattataaaggcgaagaataggatgcgcgccgttcaatacagagaatataacggaggctccggtgatctcaagcatgtagaagctccggatgccagtgcataaatggatgaagatttgtcactgtgaggcagtagtattaacccaatcgactggaaagcacaggagggggtagcgcgcccatccatacctcgtaacattcgacacattcctggtaccgatgcagcaggagaaatcggacatgtaggatcaggcgtgcagagtttcaaagtcggcgatacagttgatgacgtactgggtaatggaggtgcactagctgaatatgc

SEQ ID NO: 47412 - DNA, 571 bp, Gossypium hirsutum
  unsure (1)..(571): unsure at all n locations
  Clone ID: LIB3584-044-P1-K1-G3
cccacgcgtccggcagcctatactcatacaacatggtgtccttgtggatggaatgacatggctcctgaattcaccacaacaaaatctaccaatgattttggccgataatggattcgatgtctggattgccaacaccagaggcaccagattctgcaggaaacatgtttcccttgattccgcccaggcggagttctggaattggtcgtgggatgaactggtgagtttcgatctaccagctgtttttgattttgtcttcaaccagacgcagcagaagattcattacattggtcattccctgggaactcttataggtctggcatcattctcagaggggcatcaggcagacacgctgaaatccgcagcgtttctaagcccgattgcatacttgagccacatgaatactgcacttggcatggttgctgctaaagcctttgttggtgagatcactacttggttcggagtagccgaattcaatccaaaaggacagaagggcatcagctttttctcaagcgttnatgcaattaccctggagttgactgctatgacctattaactgctattactggaaaaa

SEQ ID NO: 47413 - DNA, 486 bp, Gossypium hirsutum
  Clone ID: LIB3584-044-P1-K1-G6
caatgctgtaccaccaaatattgctccttacttaaatattgagcctagtacaggaaattactacccgaccatcttcttcaacgaattttggttacttagagataaattgattgcaattaatgagtcggtcacagagttgccattaaatttggaggttggccccataagcatgatgaagtggcaactattcctgcaaattgaccaatcattccaaattcatcgtagttatggaagcatgcttgaaggcgaggcagatgaactaaagagggtcttcttagaaggaaatccgtacttgctagtgatcaccatggttgtttctctgcttcattccgtgtttgatttcctggctttcaaaaatgatatccaattttggaacaaaaataagtctatggaaggactgtctgcaaagtctgttgtagtgagctttctgtgtcagcttgttggtttcctctatttacttgataatgacacctcatggatgatact

SEQ ID NO: 47414 - DNA, 474 bp, Gossypium hirsutum
  Clone ID: LIB3584-044-P1-K1-H12
gtgtttttgaattgcttatgtgcatgaattgatgcttttttcttgatttcttaaaagcttggaactactattttttttttgaagtttataggatactgttaaacgttaatgatccttgctatagctgcttcgtaagtgcttgttgctatattgttcttttttatattcatgcactcttcagcttgattcacttgtagggttctttcatttaacccttcatcagcttaggctgtttatgattgtattatgttttcaattaaaaggtcagcatatctatgtaaagtgttgcatagttggtcaacgtccagttcaagattggatccgaaggtatattatatatatatattctcacagatgcccattttttagacaaataaaaactgttgatatgttttaaactctactgtttgggattattgctttagttctctggttgatacactggaaattctaaaatctggagaaagattagct

SEQ ID NO: 47415 - DNA, 579 bp, Gossypium hirsutum
  Clone ID: LIB3584-044-P1-K1-H3
atcacattttgaggctagcgaactgacaaataaatcgccaagtttggatgacattgctgacactgtggctaatgatttcttaaagatgctggaaattgaacatgatccatttagcttcaattctgacagtgctcttgaatctcctagagagcgtctgttgagagagtttgaaaatgaagccctagcttccggtgatttcatcctagatattggcacagcaggggaagaggaggaatttgattccaccattcctggtctttgttgtggggatagttctgaagattttactttcttgtctgttgttctgcccagcaaggagcagaagatggaaagtttgtcgctgaaagacagaaagacggttgaaatggttgaagacttggagactgaagctttaatgcatgagtggagcttagatgagacactgtttcaaagttctcatgttcaaagtgatggttttggaagttcaattgtgctttcacctggatgagatcaattttcttcacttggagggggaattttggcatttcatccccggaaaggatggatttgttttgcgagctacgaaatccaggctttcag

SEQ ID NO: 47416 - DNA, 416 bp, Gossypium hirsutum
  Clone ID: LIB3584-044-P1-K1-H6
gtcgccgagtaccgtcgattcaccacgctcgcggtcatatacgttaaatgctgttaacattttaagagctaaagccttataccattactttacgtgacagctgggtattgaaaggcattaacttttattcaagttgctacatgctaaacataggtttttagtaattgactaagatctatccaatattgaaacaaagtattgattacatcatgggatggaatgagtcatagaatatatattatatatcagattcgctgtaaatatgagtatttaaaggagtttgaaaattatttatatctaaatattattgagcctgtttaaaaaattatcttaacggttaatttatacttgattacataatagtccttgttttgcaccaagatttatccaccggcattgaaattaatgggtattac

SEQ ID NO: 47417 - DNA, 404 bp, Gossypium hirsutum
  Clone ID: LIB3584-061-P1-K1-A4
acgccaacatatatgcgtcaaaatcaacaggctgatacatcagatctctggatgcagaacccaagggaggtaccaagcttgcaatctgctgcatactacaatatgccacaaacaccacatggttatatgccatctcacacgggccatggttcttttaacgctgctgctacacaatctactcacatgcaattcttgggtttggaccatcctccttagcctgctgcaatggcaaacccacatcatctaaaccctgcaatgggtgccaatggtgggtttgggggtgctccaacaacttctggggctcaagtaggtgcttaccaacaagcctaattgggtcatcttaactggacaacaaacttctgaatggtatcaagctaaccctttgtcttgtaagggagtgaagt

SEQ ID NO: 47418 - DNA, 511 bp, Gossypium hirsutum
  Clone ID: LIB3584-061-P1-K1-B10
gttgaaaataggaagcatcaaaatttgtctgctcttcaactgctttacctaaaccaaaagttcaatttgaatctcggcaccggaaaaaatggcatttccggctaagaaatttataacctcttctttctttgggtttacacttctggtcgctctagtggcttttctcctaaaatttaactcttcacagaaattgttcactgttgaagagctggcgctatataatggaactggtgattcattacccatactcttaggaattttgggatctgtatttgacgttacgaagggaaaatctcactatggtgctggaggaggttacaatcatttcgctggaagagatgcctctcgtgcatttgtttctggaaattttacaggagatggacttacagattcattgcgaggtttatccagcaccgaggttcatagtgtagttggatggcgagacttctacttcagaagctacaaatttgttggaaggcttgtgggtcgctactatgatagccaaggaaat

SEQ ID NO: 47419 - DNA, 272 bp, Gossypium hirsutum
  Clone ID: LIB3584-061-P1-K1-B11
cccacgcgtccgcgttttatttggatttgctgaaaaacaaaggaactgacatcgcttcatcgaataaacagattcaaattttagattgttacagtgatccacttggttggaaggatcaattagcagggagtagaaacttcacggctctttccaatgaagttttggtttcgagtactgctattgtttttagggaagtgaaacatatggataagttgtacaattcaattattgaactggcaaaagactggtaggaaggggaaaaaatccggttt

SEQ ID NO: 47420 - DNA, 331 bp, Gossypium hirsutum
  Clone ID: LIB3584-061-P1-K1-C11
atttgtttaggacataatatcaatcattgtagaaagtgtagctgaatggagaaatctttcttgcttagactcaattatgaatgaagttaaggatttctgttcgatattggaccaatgaacttttcctttattttcctcattaataggaattatagcacccatttacgtcttcaagtgcctgagatctgtattatatgggtacttaaaagggaagaaaggaccttggcaacttttggaccataaaagaacttttcatcctgaacccagtatttttctggctggatcaatataagaaactggcccagttttgtattagttataatgtgaacta

SEQ ID NO: 47421 - DNA, 408 bp, Gossypium hirsutum
  unsure (1)..(408): unsure at all n locations
  Clone ID: LIB3584-061-P1-K1-C6
naaaaaaaaaaaaaaaaaaaaaaaaaaaaaaaaaaaaaaaaaaaaaaaaaaaaaaaaaaaaagaaaaaggagaaaggggaaacaaggaaaaaaaaacaggcaaacaaaaaaaaaaatacaaacaaagaaaacaggggggggcggttcagaggaacccaggtttaccaccccgggccgggaaaaacatgcctgttaacggggaaactaaaaataaactacgggccccttattaaaaatgccgtgattgggaaaaccccggactctcccaacttaaccaccctggcaacaaacccccttttgacagggaggcgtaatacaaagggggccgaaccggtgcgcctttccaaaatgctgccaaccaaaaagggaaaagggccccccccctatcgcgccccataaagggggggg

SEQ ID NO: 47422 - DNA, 286 bp, Gossypium hirsutum
  Clone ID: LIB3584-061-P1-K1-C7
ggaacatttggatacgtggcgcctgaatatgcaaatactggccttttgaacgaaaagagtgatgtctatagctttggggttgtactattggaagccataactggtagagatcccgtggattatggtcgtcctgcccatgaggttaatctggtagattggctgaaaatgatggttggaagcaggagatcagaggaagtggtagatccaaatatcgaggttagaccgtcgacacgagctctaaaacgtgcccttctaactgctttgagatgtgttgatccggattctg

SEQ ID NO: 47423 - DNA, 536 bp, Gossypium hirsutum
  unsure (1)..(536): unsure at all n locations
  Clone ID: LIB3584-061-P1-K1-D5
gcagattctcaaattgttcgttgtttatcgtgcaaaacggtttcatcctttttaaagaactttgatgacaaatctatatacgccataaagctgattattgactgtgatatttatccactcttactggactgtcgggtaaatggtgatgaacaagttgcaactgctgcgattgatgctatcaagaatttagctcagtttcctgaagccatgggcattatcttcccatctaatttcaatgaagctacacaccttgngaacgtagcatctcgatgttcctcgctggggcgtgtccgtgttttatcattgatagtgaagttattctctatttccagctccatagcatctgtaatatataattcaaatctgctcagtttattggagaccgagatcaagaattcaaatgacacccttgtaaccctaagtgctttagagctcttgtatgagttgactgaagtccagcatggtgcacagttcttggcaaggaccacctttcaattacttcattctataatcagcaactcatcgatggaatcaat

SEQ ID NO: 47424 - DNA, 406 bp, Gossypium hirsutum
  Clone ID: LIB3584-061-P1-K1-E2
cccacgcgtccgctcatcttttgcagttaaataggtcttatgaatatgagaagtgtggattgaatatcttgtcggtatattgacaaatggaagttattttgtccttcatactgcattattctggttatcgcttcatctgcgtcatctttgatatcattctatggatctgagctggcagttcaatctaagatactaaatctacattgcttgaaggctgcttccagattgcttttttttttggggggggggggggttaagtgcatgtattgtgaaagaaaagagaatgcttgtttgtgatatgtgagttgattacttaaatgtaaaccccttttttattgttgcttattgggtgcagtaagagatagaaactatattttacatgatatactttacttatataaatata

SEQ ID NO: 47425 - DNA, 400 bp, Gossypium hirsutum
  unsure (1)..(400): unsure at all n locations
  Clone ID: LIB3584-061-P1-K1-E4
ctggatgtgatagcaaaggaaaatctgttgataaccagtgttcaccagctgagctcagagtagctgactcgttggaaggtattgagaaggaatacgttctagtcaattctcgttccgcatcgatggagactttctcttattacctggagacgtccctccaagattattcaactttgaagtgccaagcaaagaagagtgaccaggaaccagcagtttctctggagaaggagaccgctgaaagttctgtcgcttctgcaaaatctccacagtttcagggatcagatttgcaaacatcatctgaatcagctatgctaagggaagtacagagacttaacatattgcatccctcaactaggctgcagttattgcatcagtatgcactggctatngcagaaatagc

SEQ ID NO: 47426 - DNA, 279 bp, Gossypium hirsutum
  unsure (1)..(279): unsure at all n locations
  Clone ID: LIB3584-061-P1-K1-E5
caccgcggcgcgtggtggtctagtatattcataaagaggacttgttcgagatattggtgtatcgttagcgctaagacggcttagataattgaccaagagagtgcgctctagtcatggatcatttgtgatagctatggacttggcgcgagcctgtctcattgacattcatacatactgtatgcggtgaagcattatgagcgtgcaagtgctgcgctggatatgtgagagaaatggagcggaactgtgacttgtcngaagcatcaattactctagaatcgg

SEQ ID NO: 47427 - DNA, 288 bp, Gossypium hirsutum
  Clone ID: LIB3584-061-P1-K1-E9
cccacgcgtccgtgtgttttgtgattgctatatgtagcttcttattatacaggcaccgactccaaaattataagaagcttttagaaaataaaagttcagtattaaccgagcagtttacgctacgatcattcactttcgatgagctagatgaagcaacacatggttttcaagatgagttaggtaaaggttcatttgggacagtttataaaggaattttgccaggggatggtaaaagtaaaactattgccgttaaaagactggagaaaagtaacgaaggagaaacagatc

SEQ ID NO: 47428 - DNA, 442 bp, Gossypium hirsutum
  Clone ID: LIB3584-061-P1-K1-G10
aggttactctatgttgttttctcattgtgcataattttagtaacttaccaaaatcccagaagtcttccacgccttataccacaactaagtatgttagatctctatactttcccattggaggacgttaattgataagttctcattgatcttccagccaactgctgcatagataagacatatacatggaaggtctacctattcctgtttttattgtattttgtagttctagattacaaggaaaccttagaaggtggctgagttcagattattgtaattatgaagttagtattgatgaactttgtagacctagaaggacttctagtatcatattcaatgtgtagagttctgaccacaactactgatagtccaacaatatgctcttctttttatttatcctttttacagattaaaaacttgcagcagttatgattaaaatattttt

SEQ ID NO: 47429 - DNA, 467 bp, Gossypium hirsutum
  unsure (1)..(467): unsure at all n locations
  Clone ID: LIB3584-061-P1-K1-G5
cccacgcgtccgtccacgcgttcggaaaaggaactagtggtaagcaaggaagaaccaccagaggaagatgcagaatcagatgaagatgaaggtgatgaaaacagtaagacagcacgccgtattaaaccacatagaatgtctgatatcataccgtcacgagtggaagacgaaagagagacatgcgatcatcgagatgacaaacgactgctctgtagattcgacatatacatgggaggtgtacctattactgccaatagagagcatggaaggaatagaatacaaggaaacctgagaaggtggctagagacagattatgcttaggtggaatctaataatggtgacttttcagtcaaattgatgtatgttcatggcatagtttgtgtaagcttggagtgtctctacagcatatngagaaagtgtgtctctagttactttttcatgaaaatactgggagagtaaacagaact

SEQ ID NO: 47430 - DNA, 322 bp, Gossypium hirsutum
  Clone ID: LIB3584-061-P1-K1-G9
cggacgcgtggggtttcaagttggggaacattgaggaggccattaaaacatttaagaaggtaggaacgaagcctggatccaagccttttgccatggacgtggctggttataataatattattacaaggttttgtgaacatgggatgctatctgaggcggagaagtttttccaagaattgtgtggtaagtctttgacaccagatgttccaatgtatagaaccatgattgacgcatacttgaaagcagggcgggttgatgatgctctgcggtcttttaccaagatggtcgagactggtttgagggtggttgccagttttggaac

SEQ ID NO: 47431 - DNA, 372 bp, Gossypium hirsutum
  Clone ID: LIB3584-061-P1-K1-H4
tcgacggatccatccgcacgtccgcctacatgtagagattgctggcaaactcgacagaatcatcacagagcatgagctaacggagcgtagacaactggagcaggatctgcacttcgatgatgctggaatgaaagaagtcagtaactcacttactacaaatgccgcagtttatgatgaaaataaattgccggtgatgacgattcttgcagacatttaccctgagaagtttgaggatgcaaagggtcttactcctgatgaatctagcagatttatcaaccgacgatgcaaatgctgtgaatactatgagtgtgctcgcaccattatcagagtacaaaaaaggttcaggcagttccttttctttgaagtctgata

SEQ ID NO: 47432 - DNA, 516 bp, Gossypium hirsutum
  Clone ID: LIB3585-040-P1-K1-A2
cgacggacgcgtgcgcccacgcgtccggtggactgcaatcttgctgttcctactggctatcttaggagcttgctccattatcaacagtgttacacgtctggctggggagttgtttggccttcttattgcaatgctcttcatgcaggaagctattaagggacttgttgatgagtttcgcatacctgaaagagagaatccaaagttgctagagtttcaaccttcatggagatttgcaaatggaatgtttgctttggttttgtcctttggccttctgtttactgcattaagaagccgaaaagcacgatcttggagatatggatctggatctttgcgaggcttcatagcagactatggtgtgccattaatgattctggtatggacggctgtttcttatataccagcacgaagtactccaaaagggattccaaggcggcttttcagtcctaatccatggtccccaggtgcatacgaaaattggaccgtcatgaaggacatgttaaaagttccagtgctcta

SEQ ID NO: 47433 - DNA, 491 bp, Gossypium hirsutum
  unsure (1)..(491): unsure at all n locations
  Clone ID: LIB3585-040-P1-K1-A3
tcgacccactcgtgcgaccacgcatacactcttctctcttttctctttnagctcaggctcttctactacttttancccttgtgttccctgttgcacctcaacttgctctgttctaatcacatcccttttgagggtgtttgcttctatatcctatatttttacttgttgaactccactctatacctctaaaatctataccaaaaatccattaagtcaaaactcttatcttccatcaagaagagaaagacatatcttggtttttctttttttcgctgtaaatcttgatgctacataaattgttcacgatcatgcttgatactcatctctacagttgtcagggaaatcctccactccggttttatgataaatacctccctcatacacaggacccatctcatacaatctttctcagctgtcttactctactgcatctatgttttttcataaataacaatcttatttattttactactatatatatatacaattat

SEQ ID NO: 47434 - DNA, 197 bp, Gossypium hirsutum
  unsure (1)..(197): unsure at all n locations
  Clone ID: LIB3585-040-P1-K1-A6
gacccagcgtgcggcacgcgtacagtttgaagagagaccagttgctcatggctgtactcattcaaatgcttattctatgtcttctgctttctcaatgagcaatatcctgacnataccaaataaatttcaaatgccaattgcacgattatttatcatataaaaaaaaaagaaaggaaaaagaataaaaataaaaatat

SEQ ID NO: 47435 - DNA, 512 bp, Gossypium hirsutum
  Clone ID: LIB3585-040-P1-K1-B12
cgaagatacagagcttaatgagtagatgtgaggatgaatcgtggcgcatcagctggagcgatcggtgtgaaaaagggagcctccttcaccatcgactgtacgaagccatcatgatgataatatcatggacatcgcttctttggagaacttccttcaagaaaggatcaatgttggcgccaaagctaacgctctaggtgactcacacactgtcacccactgacaagacccatatcactgttacctctgactccaacttctctaagcatgcccttaaatacttcactaataagtacttaaagaagcacaatgtccggcatcggctacgcttgattgcttccaacaaggaccataatcattatgaactcctctacttcaatattgctgagaatgaaggtgaagaggaagaatgagcaatcatcacagatacttttctctgttacctatctggttaatcagacatgatgaaacttgaaagtgtcaaatcgctggacttgttttggcttgctttttga

SEQ ID NO: 47436 - DNA, 484 bp, Gossypium hirsutum
  unsure (1)..(484): unsure at all n locations
  Clone ID: LIB3585-040-P1-K1-B3
gcgtgcgaccagcnaacaaagaagaaaaacaaaaagaaaaatcgtaataaaaaagcaaaaagactaaggtggaccctggtctcaaatctatttcgctcaataaaangatataatatatatatatctcatatatacatagatacacaaagaataaaattacatataatttaataaaaacagctattttccttcaaattcaacatcatctcatattgctttgaaattcatctcaccattatctccaaaatgccacccccttttttacataagcttattctctacactacccttcaacacgataaacttagaatccactataactttattaataaattcaatgactaactttctgttactactactctcactgttcctgatcatcatgtttaacttataggaataacgaaatccaacaacaaattttgttttcacaaagattaacaggaatttataaaaccataccatatccaccttaactacttac

SEQ ID NO: 47437 - DNA, 506 bp, Gossypium hirsutum
  unsure (1)..(506): unsure at all n locations
  Clone ID: LIB3585-040-P1-K1-B4
gcgcaaaaagcgaaaatttattcttcgaaacgatgtcgtgttcttcgtctttcaagaaatcatcatgccggtcncgggggttatcgagatcgttgagatcnnataccaaatcggcgtcgtcaggaacaatttcgacggcggcgagtcaaccggaatttaatttggcttcggcagaagaggaagaggatggaggagaatcgtggtcgacgatgctgccggagttgttaagcgatatactagagcgcgtacaggcgagtgaagatcagtggccttcaaggcaaaacgtcttcacgtccgcttgcgtgtgtaacaagtggagagaagttgcgagagaaatcgctaacgcttctcctgctagtggaaaaatcactttcccttcttgtcttaaacagcctggtccgcgtaatttaccaaaccagtgtattataacccgaaacataaagaactcaacgttctacctttaccttgctctttcaccatcatttaccgacaaggggaagtttctg

SEQ ID NO: 47438 - DNA, 401 bp, Gossypium hirsutum
  unsure (1)..(401): unsure at all n locations
  Clone ID: LIB3585-040-P1-K1-B5
gcgcagtaatgcaaantaaccctcatctatgatggctaagtgctatccactccatgaaaagatcatcgcgtgctgtgtgatataccgaaggagggatccccaacgacatcaatgctgcaatcaactacattaacaccaagcacaccattcaatttgtctattgctgtcctactagattcaaatgcggtatcaactaccaaccacccactgctgtccctggtggtgatctctccaatatccagagagctgtctacataatatctaactccaccaatgttactcaagtcttctctcgcattcaccataaatatgatcttatgtgtgccaaacgtaccttcattcactggtatgttagtgaagatatggaagaacgagaattctcaaaacctcctgaggatctt

SEQ ID NO: 47439 - DNA, 523 bp, Gossypium hirsutum
  Clone ID: LIB3585-040-P1-K1-C12
aggttgagcagcaaatttagaaaggaaaagagaagagcatgggtttgttgaagatatgcgggttgtgggtgcatggggtgttgaggctagctgggattagccctaaaaagatagagatccagccaggaacggtagtcaacttttgggtcccaacacagaccaccacaaagccagccgtagtcttcctacatggctttgcctttgacggtatcctaacatggcagtttcatgcgttagctttggccaaacactactccgtttacgtccccgatttcgtcttcttcggcgattccatcaccgacaagagtgagaggtcggtggagttccaagctgagtgcatagccaaagggttgaagaaactgggtgtccaaaaatgtaccctggtcggttttagttatggaggaatggttggtttcaagatggctgagatataccctgagttggtccactctatggtggtcacctgctccactatggccttgactgagtccatcagcaaagcccgactccaccgtcttgggtt

SEQ ID NO: 47440 - DNA, 516 bp, Gossypium hirsutum
  unsure (1)..(516): unsure at all n locations
  Clone ID: LIB3585-040-P1-K1-C6
gcgcacgcgtgcgatggagtttactcacggagatagaaaaaaggaagcaggcagaataagctctaaacaagatgcaatcgagatggtgganaatcgggcaagagtgtggtaatatgacattgtcactgcctgtggatcctcttgttgtgacagaggatgaactagtgaatccagctgaagaactgctgcagcaaatgggtattgcacggctcgtatcattatccatgggaaggggcatcgcataagcagagcttgagacagagatggaagctcaaatcaaatcgaagaactttgaaattgctcgactattgaaccggctgcactactatgaggccgtgaatcgagaaatgtctcagaggaaccaagaggctgtagagatggcacggcgtgaaagacaacgtaagaaactgaaacaaagatgggtctggggttcggttgccactgcaattaccctcgtggcagcagccttggcatggtcttacctcccaacaggaaaagaatcatcttctgctaaca

SEQ ID NO: 47441 - DNA, 462 bp, Gossypium hirsutum
  Clone ID: LIB3585-040-P1-K1-C9
caagaagagatgaattaggcctatgttatgatgaccaaacaaatatttaatacgctcggggcggggtgaacctaagttaagcgacaatcaaaacgaacagttaacctctgcctcttcttcaaatgcttataccagttcactaaataatgcaaattcatatcagacatcctcttcttgcattagttctaccccaaatctacatctgaataaactgaataaggcttctcaagtaatcaatacaaaactgaatgcatatgtattgacctcttcatttgacacattatctaaacataaagatattactaattccgagaagcagaactagtttatccagaagctaaacctgtgtcgtatcttgtctgacttcactgacccaacaaaaaacctcaaataaaatgatatcaagcgacaaactttgctacagctattagatcatgtctcatctactaatggtaaattccc

SEQ ID NO: 47442 - DNA, 493 bp, Gossypium hirsutum
  unsure (1)..(493): unsure at all n locations
  Clone ID: LIB3585-040-P1-K1-D2
gcgaccacacgtccgagcgagtcggttcggaccaactggtttttaagagatctagctccttcnatgactggaagacggtcccaaacaatttcaagattgataangttacaatttttaggcgcggagagtccttggattcgaagatcaatagcaacaactgcggtagaaaggaagacagtttggtcgccactgctacggatctgatacactccagatccatatatggtttccaaacagatcacatttgtgtatatcaagtctcctgttaccataaaatactacgtatactctcaatcagctctcgctgtctctccgaaaccgatttctcttcctttgccttttttctcgaagaacaatcatgttcctatcgatgattcactcactactgatctcaggcgtatactcctacttgacatctgagatctgattatcatcatcccagtacatatattatggatccagaataagatcagtttcactctatttagaactc

SEQ ID NO: 47443 - DNA, 472 bp, Gossypium hirsutum
  Clone ID: LIB3585-040-P1-K1-D4
gcgagagcctacaaaaatcgatgaagtcaggactgaaacataccgccagttattccaccctgagcaactgatcagtgggaaataagatactggcgacaatctccctcgtgcccattatacaattcgcaaacagattgttgatctctgctcggatcgtataccaaagcttgctgataactgtactgtgctccaaagcttctctactatcaatactatcggtggtaatactgatactggtcttgcatctctcctcttggaacgtctctctgttgactatggaaagacatcaaacctcgatttcaccgactatacttcacctgaaggctctacatcatttgtagagccttacaacagtatgctgaccactcattcactccttgagcacactgatgccgctgttcttctgaataacaaatcaatatatcacatctgcaagcattctttgcacattgaaccacccacttatacgaat

SEQ ID NO: 47444 - DNA, 409 bp, Gossypium hirsutum
  Clone ID: LIB3585-040-P1-K1-D8
atatccaagagctgtcttttctttccctaatgattctctctgtttctttcaaacaatgggtttgatgtctaacagtgatactgagtactacaccttcttcttcttctttcttcatcttcatcttcatcttcatttcattgtttttgttttgtttttttccttattttaattgtatatctttttttcagattgaaacactcctttgctatatatgtaatttttctaaaattgaattgttgaaaaaaaaaaccataaaaataataacaaactaatataatacaaaaaaaataaaataatacataaaaaggagtacaagaagttgataaataaagggcctgcccttttaaataatccaattttacttacccttgcttgcaactatatacacttttctatatcgtcacctaaa

SEQ ID NO: 47445 - DNA, 505 bp, Gossypium hirsutum
  unsure (1)..(505): unsure at all n locations
  Clone ID: LIB3585-040-P1-K1-E1
cagcagcagagcaaaccaaaaccaaatggctcaacccagtccacagccatngcgggcgaacgtttaccattctactgctgcgccncanccnccaccacttctccggaaaaccggcaccgttcgatattcgacctccctgtcaacttcttcgattcgtgtcgtttgctttgtccttctttaacttcagtcttcgagcccctctcaatctccgaaaactattcttcagaaaaccctcatagcaccgatgacagggaagaaaagagcaccaaaaccggcgtcttttttcctagatggacttgcaacacctgcaaggctgagtttgactctctccaggaccagcgctcccacttcaaatccgacattcatcgtttcaacgtaaaactaagcattgctggtaaggatattgtaaaggaggaagattttgatgagttgactacggattctttcaaagactatgatgtctcgagtatttcaaggtctgaagatgaaacttataaaggatctt

SEQ ID NO: 47446 - DNA, 486 bp, Gossypium hirsutum
  Clone ID: LIB3585-040-P1-K1-E5
gcggagatgtctatagtttcggagttgagctgctggagatgtcatctgggcgcacagcaataacaagagtcaagggtgcacttaacacaagcgggcggaatgcaccaaaccatacctggccaacaaacgcaaaatattccagtgtcctatataaccgtcttcaacgccaatattcaatggaagctgccttcaaagccgcaacccttgctttgcaatacttgtctgctgaagccaaattcacaccgagaatgaactacttcctaacagcattggagcatctacaggactctggtgaatgtggaaacaatccaaacaacattatgcagcaaaccccaaatacacatgcaaagtactggtgatactaacaatgaaatgagcactgctacatacccttggacatatgcttcccctctttatgcctgataatagcaaagtccgcaccatgaaagctgctttcttttgaggtatattcacgaggatctttac

SEQ ID NO: 47447 - DNA, 480 bp, Gossypium hirsutum
  Clone ID: LIB3585-040-P1-K1-H10
aaaagtcttgctttttttcttttcacaggtgaaagttcattagaaaatgaaaaacaatgggagcaagactaagctaatcctccttcatccctatatccaaaaacaaggaagttctaacaaattatggcttcttgctttcatttccttcttcaccatagcttttcttctcactcttgtatacacccgagagtcgactactggtaaaccaactgccgtcgggatcatagccgagacaggcggtggtgttggtgatgctgcaccattgccgaccaccgttgtcaacacccttctccattatgcttcgaaatccaacgacagcttccacatgtcatattccgagctgaagccgatctccgatgtgctccggaaaagctcctcgccgtgtaatttccttgttttcgggctaactccaaaaacccttctctggaaatcactgaaccacaacggccgcacggttttcatcgaagaaaaccgatacta

SEQ ID NO: 47448 - DNA, 516 bp, Gossypium hirsutum
  Clone ID: LIB3585-040-P1-K1-H11
aacacgcgtccgcatgattcttgtcctttaaccgtttacactgctacatcaataaactggggaggggatcatatggctaggagctcaaggaaataatggatttatagctgctgatattgaacgatcttcacttattttatgcggcaaagcatttgctgatataaatggaactaaattagcattaactgctttatctgagccagttatatttgcccgtgggggccttccactatctgctaggttcctagtatcttgcgattccgtagttcttttgtttgctcccgagaatgccattcagagttattccgatctattggtatctgcagatgccagtgtagtcctttctcctcaaggggttgcacctttgtttcaaaccaaaaaactaggtggcataaatccgtataggataccatctgctgtcatccttgcaacatctgatagttctggaaccatcccttatatatcaaagctctctccaggccaagctgcttatcactttttggctggctatcaaaa

SEQ ID NO: 47449 - DNA, 516 bp, Gossypium hirsutum
  Clone ID: LIB3585-040-P1-K1-H2
gcgaaactagataaggaggaaaagcctcgcagcaaagaagatggacaggaagtatggtgttctctgtcgggcttcatcatcttttgagcatcaacagagcatgcgcttgaagaagaactaaaaggtaatgatgctagccatgttgagacacgatatttttggttctctttatatgtattgcccagatatgtatccgagccacttaaataaggtatatgcttaggaagaaaaccattcccgaaggtagaactacctctatcactcagcagaccaggcttgaaataattgtccgcaggtaaactcttacctatactggtttgtcttacatccttagatggctcggaatcatctgtagatgcttgaaactgttgagagccaagggaagttccaatagatttatccttactctggattaaaggagataatgctgtcctatttctagctgatgaaggcaatctgtcagaagaaccgggtgaaggtggccttgatttttcagcagtattttgaatacctgat

SEQ ID NO: 47450 - DNA, 513 bp, Gossypium hirsutum
  Clone ID: LIB3585-040-P1-K1-H3
gcgaaacgacatatcttttctttgcatggcaaggttgctgttaggtttcggtgtgggaataatctcttgcgctctggctgtatatatagctgagatagcacccgcaaacttgagagccaacttgtgttctgtcaatcaattgtctgacacaactggaacaatggtagcctatttgctgggactttttgtggagcgaaccatactaacaattttatgaatacttacttgtacaattctgattccaagtctatcctttattacacaatctactagactgctaacaaaaatgggaatgacccaatatcccaaaccttctcttcaagcactcagagatttctatacctatatttctatcgcattcaacgaaatcaagacgtctgtagcatcaacaaatataataacaactatccatttcgcagaactcacaaaaacgatatattgctttccattgatatgtggaataggacttcttatattgcaacaacttattggcattaatggtgttatattcta

SEQ ID NO: 47451 - DNA, 470 bp, Gossypium hirsutum
  unsure (1)..(470): unsure at all n locations
  Clone ID: LIB3585-040-P1-K1-H9
accacgcgtccggaagataatcgagataatagtataccttttgagttgtacaaaatcgcgcatggtgttgatttacaagggaatgtttcttanatgttggttcccacgctctttaccaatataaatatttcgatccaatcaagatgacttacttgattttaacatgcataatatcacagatgaatgcatctataacctgtctattttctaccactagtacttgcaacaaatctactttgtcttctttgctaactactaagttacggaattactactgtaatttcaactgactctattcgtcacatgatgaggtgttttgtatatataaactaaaattcattactttggtcttcaacctaccattctggggagtacttacatcctcttgcattttcacaagctaaggctaaaaacaaagcaaaatatttttcatgctctgcacaatcattctctaatggtgagcgagctta

SEQ ID NO: 47452 - DNA, 290 bp, Gossypium hirsutum
  Clone ID: LIB3585-061-P1-K1-A11
cccacgcgtccggattcatgtttgtaaaccatggctggcaagccttacattctcttgctgttgatcttcttgcctcttgcctatttcattcactttataatcccttggattaccaactatcgtgattctaattctgacgctggggagcttatttttgtcggtatcgagcgccttgagccatctcatgggcaaagtaacctaataacactctctgagtgatctagggatggtcgtgtaatcatatattctatcatggatgcatgggatgtgccatacccaaatgcttacgt

SEQ ID NO: 47453 - DNA, 243 bp, Gossypium hirsutum
  Clone ID: LIB3585-061-P1-K1-A12
cctacgcggtccaatactcgactggtgacgacctctgacatgactgacgcttcatatgaggagaggaagaaagcattggcctttttcaatcactcctgcttatcttgtaagcccaagtacattcttagaactcctgccacaggtgaacgcactcatgcctgtattaatcaggcttatgccctctcatgggcaaatgaactttcatacactattaggaccacaccgatatcgcttgctaacaat

SEQ ID NO: 47454 - DNA, 499 bp, Gossypium hirsutum
  Clone ID: LIB3585-061-P1-K1-B7
gtacgcgtacgtccacgcgtccgctgaggcttcttcggaccctttatcggtcacgtcgtctgtcgcgttagtcgctgtgcactgaactactgatacacgctatcgtaccagccatcctttcatcaagatcaaaagaaccgagttagagttctctttaatggagccgcaggacaaattcaaaattctattgaacccatgatcgctaagcgagtaatcttgactgcttaccatcccgtgattcactacatgctcgatatcccacctaatgcggacgcttaaaatggtggcaaaatggaattgatggattctgcttctactattctaaaaggtgttgttgctacaactgaaaattttgaggcatgcactgtatccaatgttcctgtcacggatagaaaattgccaaggaaggaaataatggagaggaaagatgttatgtcaaataatgtgtatattcacacttgttagcgcttttgatatggaacaacatgcagctcctaac

SEQ ID NO: 47455 - DNA, 478 bp, Gossypium hirsutum
  Clone ID: LIB3585-061-P1-K1-B9
ctcactctgctggttaactaatcgacttctatgggcgtaggaaagatggtggatttttgtgtgagtgataaagaggaggatctgccctgcagctcaaccgaaacagtttcaagtgcaacatacaggaaatgatcttggcttcaagcatcacatacaatggatctgccactacctcagcctgcaatggaatcgatggcctaggcgtcacaagttgctctctcctattgttttgcctatcaactctactgcttgagcttaccttctaatgagaacaaagaacatggatgcttgtctaacagaagaaattgctggttcaacgtgtgtttcaagttcaactacaactggtactgctcctccagttatggacaaccttacaccgatgattcctgagaacctgcagcatggacctgaagcatatattggcagagaaaacgaatatgacactaaaagcaccagtggaaaaacaacactcgatgaa

SEQ ID NO: 47456 - DNA, 487 bp, Gossypium hirsutum
  Clone ID: LIB3585-061-P1-K1-C10
ggattgttaaggatactttagggttgtctcattgttgagcgcagctctcggttctaatggatgacattgcggatgatgctcgatatcctacaaatccttttggcgttagccatcaacaggggtatggttcttcaaatcgccaaaagcttcctctaagaaatattccgagttctagaccaattaggaatcaatatgttgacgatgatgaagatggggaggacgaattggaggatttgggagaagaagaggaaactcttaaccgaagtaatggtgtccggtatgtaagaaaaggcatggatgacgacaatgaagatgatgatgacgaggacgaagatgatgacttgcttgatgatgatgatgatgacgaggatgattataatgaacgtggtgatgatcgaaagaatgttgttgccaacttggggaggcacccaaaaaagaggaaattgaagagtttggtgtcaagttatgaatttgctcctcgagtacc

SEQ ID NO: 47457 - DNA, 373 bp, Gossypium hirsutum
  Clone ID: LIB3585-061-P1-K1-C9
atttggcaatccaacaattttatcagcatgttttgtcttctatttatgaaaaaccagtccaaggttgcgttgctcatcttgacaaataatatgaatggctaaccctcgaagaacgacatgctcccaaacgcgagaacatgtgcatgtgcttgtaccgcagccagcaatactgatcatttcttatgcatgggaattccaacattgtatgcttgcgttacactcacctagtcttatctaattggaatcatctttaaagaaatctcacttgcaatattggactttatacatatcttgcttgtatccatggaccgtccttttggcaaagcgggtcaactggatattatgtcccaccctgatattgcacattcaatgc

SEQ ID NO: 47458 - DNA, 471 bp, Gossypium hirsutum
  Clone ID: LIB3585-061-P1-K1-D10
gcaaggagaatcatttattgacctggttgaggaagctctcctcaagggggtcctgtcctgagtctggcggtgggagtcaggaatctggagaacacttttgattcttggtgagctgataaacattcctagatagtctagtgaagatcctgatgaggcagacataatgcctttcaggctgtctgtgtgcatcttatggaaactggatcacaggacttgtcaccagatgatggctacgaccaaggaggagaagatcctggagcccacatgatgaggcctacattcactattgaactcctggactactccactctatctgagatgaaaacaacaatcaattatggacagatcaatgatgtcactctagatgatcccagattgttggcaaatcttcacaaacttgtacttgagaactggctacacatcgggttaaaagccgcagaactccttgatctggaatgttttgtcaccatt

SEQ ID NO: 47459 - DNA, 478 bp, Gossypium hirsutum
  Clone ID: LIB3585-061-P1-K1-E10
agggcctcacccttgccctatgaatggttcccaggccaggggtcaaacaggagatgtagccactggcctacaccacagccacagcaatgccagatctgagctgcatccatgacctacaccacagctcatggcaacgctgcatcctcaacccactgagcaaggccagggatcgaacctgcatccttatggatactagtcagattcgtttcccctgagccacgacaagaactcccctgagcaaacattcttattaatttttttctcctcctctgacttggttataattatcaaaatgataatgacgataccaatgaaatagtaattcttgaagttttggcagatatgtataccaaaatttaaaaaaatatttctgtcatcaagagcttcctgccagacctgtttgttatatttcacatttcttgtttgaaagttttcctatagggagaagtattaacaagaagaaaaatggtcaaaagtt

SEQ ID NO: 47460 - DNA, 562 bp, Gossypium hirsutum
  Clone ID: LIB3585-061-P1-K1-E2
cacccctattgtaattcagaccaacatgacaattcttcaagctctagcaatggatcgtcacctcggcccaaatttcaagatccccgccggttcaatcacggtcgtggttttaatctcctcagccatctttatcgccctgtttgaccagtttctttactccacctggcagtccctgaccggccgctcattaacacccttacaaagaatcggagcaggccatgttttcaacatcctaagcatggcaatctccgccctggtggagtcaaagaggctaaatgtagcccatgataaccacctccaagaccagcagggcggcgccgccgccgtggtgccaatgctcgccttatggctgtttccacaactcatcgtagttgggatgggtgaagctttccattttccgggaaacgtttcattgtactatcaagaattccctgtctcaatgaaaagcacagcaacttccatgatttccgtagtcatcggcgtcgctttctatgtcagcactgctgtggttgatctgataaggaacgttaccggatggtttgccgatgatataaacgatgga

SEQ ID NO: 47461 - DNA, 482 bp, Gossypium hirsutum
  Clone ID: LIB3585-061-P1-K1-E6
gccccgcttacggtgccttttagccttgttgctattgtgggtaggttcatgcagaggtttaaccagctggatcaccaaaacgaggccacggccttggctgagtctatgccggaatctaatccccccagagttgtaaatgggacgcctgctatcaatcctaacattgcttttaagcccaatgccgcccacatgaccacccagctcactctaggtggcaaacttgctctcagctcgaagcttgtatcacctcttgtgacacctcctgctaattaggatgcagatgacgatgatgcggaccagcttgctggcaggctagatgacaagccagtttagaagcgatcatagtgttgttcacatgcttctgaacaagctgttaaacaagcagctgttgcaccaactctcactatcgatctcactgtcaacaaagttgctagcaaacttgctagttatggtgcccaaaatggacagcttactgaacatat

SEQ ID NO: 47462 - DNA, 379 bp, Gossypium hirsutum
  Clone ID: LIB3585-061-P1-K1-F10
gttgttttactgagggaagcatttatctaatcttaaatcgcgcatttttatctgttaatattggactattaataagagcttgagtttgtccatctgtaatctagactaaaatgattcttggttaaaaaaggaaggtgcctgcaaaaggcaatgtcatggctcttctttaatgttcgagaacacaatcattactgtcctttggaacttgcgccagggaggctgtgtactccacaatggatgccattatcctgcagaatggaaaggctagagccctaatggacttggattgcactctttctgtgcagaacgacttctccaggagacagagttgagagataaagttggggcattgggatgagtgatggtggtgcattgcgaa

SEQ ID NO: 47463 - DNA, 535 bp, Gossypium hirsutum
  Clone ID: LIB3585-061-P1-K1-F2
gtcaatttacattagcagtagtgaaatgcctcctgaaaaagtgatgcagactgctgtagttggtacaaatggatcattaacttaccgcttgaacttagatggttttcccggttttggctgggcgttcacgtactttgctgaaattgaagacttggctccagatgagtccagaaaatttaggctggtgctaccaggccaacctgatttgagcaaagctgttgttaatatccaagaaaatgcccaaggaaaataccgtgtctatgaaccaggatatcctaacatatcccttccctttgtattatcatttagatttgggaagacatctgattcttccaaggggccactgttgaatgctattgagataaacaggtatctggagaaaaatgatggttctgtggatggtaagtaaggttaagtttcattcaataaatatggattagtggaatgcactctttgatttgattcttgggattatgacttggtttttcgtctagattattaattagactttgctgtctcatttcgattcattatg

SEQ ID NO: 47464 - DNA, 556 bp, Gossypium hirsutum
  Clone ID: LIB3585-061-P1-K1-F4
ggaagtttataatttacatcaacaaaagatatgagatcttagtgaaaatttaattttcgtaaatctctccttttctggtactcgcttcttcttcttcttcttcttcttctgctattatccaaagctcagattttaattttacttcaacaatgaccgatgaacctttgccctctcgctggtcttttctggtactcgatctctttctttcatttttcctgtttgtttgcagtaacgaatttgaaaatgaaaactcactgaactgaactgcatgaagtttatttgacttgcttcgattgactttactcttttaataaaattttactcatttctttagcttaaattgctttggattttataaacttttttttgttgttgttgtttccttttcttttctttatgctctttgaatttttgaaccgtgatctatctgtatgaagcaatgtggagaagaataaggggaaaaaagagagagagagtaaagttcaaagcattttattgaagtgataatatgattatttactggattttaaaaatgtctacgatgccaagtttggga

SEQ ID NO: 47465 - DNA, 559 bp, Gossypium hirsutum
  unsure (1)..(559): unsure at all n locations
  Clone ID: LIB3585-061-P1-K1-F5
gttttgctttgtagcaaattaagcttcttctattttctagtacaaactaaatcaccaggtttgaagcagtagtttagtttaggtttcacgaagctgcttccattcatcaaagtatatcagaaatgttgtctcaagatgggctttcgattccctcaactgtcaaaggtttagctcaagctcaacagccaaatccaaaccctaaccctaatccagtgaagaagaaaagaaattttcctggaacaccagatccagatgcagaggttatagctttgtccccaaaatctctcatggcgaccaacagattcctctgtgaaatttgcaacaaaggtttccaaagggaccagaatttacaactccataggagaggtcacaatctgccatggaagctgaagcaaagaacaaacaaagaagttagaaagaaagtttacatctgccctgaaaagacctgcgttcaccatgacccatccagagctctaggagacctcactggcatcaagaagcacttcagcccgaaacacggcgagaagaaatggaagtgtgagaaatgtnccaagaaata

SEQ ID NO: 47466 - DNA, 495 bp, Gossypium hirsutum
  Clone ID: LIB3585-061-P1-K1-F8
tctcacctaccctaaacgcgcaaactaccctgtcaagatataatgcaaaatcttatgttatatgccgtttcttacatcagttcgtcaactatgccactgcagcttcctgtatgttgatcgacgtgacgacactcctgtggaaggtttcagagactcacatgagatacatcaatcaaaatcgactccataaaaaagtctttctcacaaatccttgtaagctattggtctggctataatgatctgaatctcgtagatcggactcctcgtctatctaattgaagcatggaacgaataatcagcggcaaattcaagctcggtcgtaagatcagcagaggatccttcggtgaaatatatgctcgctacgcatatcgatacttttgagatcgtcgctgttaagatcgagaacagtagaacaaagcatccgcagctgctgtacgaagccaaattgtacaatattcttcaaggaggaagtggagattcaagcatataatggtc

SEQ ID NO: 47467 - DNA, 507 bp, Gossypium hirsutum
  Clone ID: LIB3585-061-P1-K1-G10
gcttttcaggtttgtgggtatcatattgatagtgtacttgctgactccagtcaaatatcgtcagtgagcaaattacagagtaaacctatggctgcttctggttctagagttgtaatcggtggatatcttgttgatacatcaaagctaaagcatgagcacctttcatcatcaaaaagtagtaccaacatcttttacagcaataaaagtttgaatagctgcatacaagctagaatgagtttgaaaaaccctgagaaacctaacaattcaccaatatatggatatttcatgtatagtgttggaaaaaggtggtgcaattttgatagtctgttaggttcaggttccagtgctttccatagctcattgcattgtttatcagcggggactttgcctgatgtttcctttgataattccagaagtgaggaacagggtaacaattcctccgtgtcatcagaagagaaagattctgctggcaaaactctgaagctgctttcgggatcatggtatctt

SEQ ID NO: 47468 - DNA, 419 bp, Gossypium hirsutum
  Clone ID: LIB3585-061-P1-K1-G8
gtccggaactagtggagggttccaaaattcacggaacaaatggatctgcaactgcaattacaagagaggacgatctcgactgccatcagtttttgcatctcttgagattgtctagtgatgggcaggaaataaaccgaggccgtaccgaatggagaaaaaaaccaacttgatgaggctgctgagtcttcgaattcagtcgataaatcgcatggggatcgataccattaattataaattctggactgtgaattattaaaaaaaaaacagaattgtggtctgctatttcgccctatttgaaaaatcttgaacttcaaatttttggatcgagtttgaaagacaattaaattaggtcaggttttgcatgagaaaaaaaatgagacttgtaacccattgatataatgatgatagtcagaaacctg

SEQ ID NO: 47469 - DNA, 518 bp, Gossypium hirsutum
  Clone ID: LIB3585-061-P1-K1-H2
cccacgcgtacggaaaatgtgtggcctcgatcaagctacgtctttatgtttaatatttgagattgttaagaaggagatccctgatgctactcttcagtcctcaaacaatcaattttatttccaatttctaacatattaccagcatagcaccgccgaaatgaggcttcgtgttacaagtctttcaagaagatgggttgctggacccggaagcatacaggacttgattgctggatttgaccaagaagcagcagctgtggtgatggcacgcttagtgtctttcaaaatggaaattgaggctgaatttgaccctataagatggttggataaagcattgatacatatgtgttcccgttttggggattaccaaaaggatagcccatcttctttcagcctgtctccgaggttctcaatatttcctcagttcttgtttcatttgcgacgttcacaatttgtccaggttttcaataacagccctgatgagacagcatacttcagaatgatcctgaaccgggaaaatg

SEQ ID NO: 47470 - DNA, 519 bp, Gossypium hirsutum
  unsure (1)..(519): unsure at all n locations
  Clone ID: LIB3493-034-P1-M1-A11
cgnntccgcggacgccccgtgggttcgngnntagctgcgcgcgcggttcngnngttcttagctgcgcgcaagcgccgnngtggcagcttccaaagttccttccgacccaacctgatnngccttttaaactttaatnnaccctcnncgtaatgngnnaataacgngnncgtcgcngnngatgaaatcatannaaggacncnntcatcanacngnnccgacnncacnngtcngacnngagngtcntnncccttngnnttgatanaccgcgnnnacaaccgcncnngccgccattcgtcctttccaacagaaattggtcattagtnnttcgccgaaggggannagttcaagaaaaaagcgacactgtnntttgatgttnngcactgtgcgtatcaaagccgttaaagaaaatcaatccaggcctacgtaacacgtgctggtggctccgtcgtcgaggtacggctaccgttcccggtaaattcagaggaagaaatcatttccgagttcaaaaaatcaatcacg

SEQ ID NO: 47471 - DNA, 580 bp, Gossypium hirsutum
  unsure (1)..(580): unsure at all n locations
  Clone ID: LIB3493-034-P1-M1-A12
cgtnnccgattcaaagttctggtgccgnntcatacgacgagcgcagaggcggcnccaactnnntggagttnnntcttgcncacgnnngttaatgggcnnattctcttttanntgggcattnnggatcagnntgactggcttatcncnnacttgcatnncagctgctnnngttcgggtgggcttcttttaagacnntgtgnngagaannnatgacnnttgngtangcntcttttaaagggtnnngcatgcnncctanatnntgtgggnnngaggagggtatnnnttgcatttttgtgnnnaatcagannaaaattcaatggggttcnncccccagaaagaggcagannttgtcatgnntctgtgattgggcactttctagagtnnttcgtgccaaagaaactgagcannatctgtattctttagacttggnnngagaaagtggggtattatgggggtcgtatatattcnntcgtctcaacgaaaaagggtaagaagtcggaggggtgggatgtgaagcctttcttgcaatgccgtaccacanacgtaacttgttaaataagaaagcacccgattcttttct

SEQ ID NO: 47472 - DNA, 368 bp, Gossypium hirsutum
  Clone ID: LIB3493-034-P1-M1-A7
ggaaattcgagggggaaatgctcgcggcctgtggtaaggatcccgaacgttgcatgaaagctgtgtgtgctctctaccggcaacaaacatcaggggagaaactttccaaggcagccttgtgccaaaatcagagaggttttaataaaatcgacgcctacaggggctgtacgttggcagagtttctgactgatggtgatccgcaaggtgatttaatgaaatccgtgaaggaattggaagcatatgatcggaatgcagtcgagttgtgtagaaatttggcaacaaaatattctaagcaattgtttgagatctacaaaagcaaagaggatccgtattttcttcctccttaaagttctctgcaagtaattgat

SEQ ID NO: 47473 - DNA, 266 bp, Gossypium hirsutum
  unsure (1)..(266): unsure at all n locations
  Clone ID: LIB3493-034-P1-M1-B5
gtaaagtcaatgtcatggtgtggtgagaacagatgtgtaggtattagaaaggaagacatgatattaaatgccacaaatggtgcgttgtcagaggtgttttcttcggngaagatagcaccacctttggtcgttgctcttccctctggggaacttattcttgggaaggaaaatattggtgtctttggggatcaaaatggaaagcttcttcaagctgataggatatgttggtcagaaactcctgctgttgttgtcattcaaaaaccata

SEQ ID NO: 47474 - DNA, 351 bp, Gossypium hirsutum
  unsure (1)..(351): unsure at all n locations
  Clone ID: LIB3493-034-P1-M1-B8
gggaaaaagaaaaagagagatcaagagtgttgattttcctattttaatgatgaggagaaagtgtanaacaattggagaaattgcagttatggaactagctgacgtcggagttcaaacgcgagccgtggcaacaaccggaagagttcagacctatctcaaaagattaaactaccgcgacaaagaacaggaatgtaaaaaaactacttcttctacgacctcaactacatcttatatccagttaagaagtcggacatttctgacggatcgccatggtggtgagggcaactctatcttgagccttaacttcgaccatgatgatggccggtgatgagaaaacacatttgaatccta

SEQ ID NO: 47475 - DNA, 138 bp, Gossypium hirsutum
  unsure (1)..(138): unsure at all n locations
  Clone ID: LIB3493-034-P1-M1-C3
gttcttataattttgaccttgaggatttattgagnggttcagctgaagttctgggaaagggtanttatggcacagcatacaaagctgttctggaggaatcaacaacggtggtagtgaaaaggttgaaggaagtggttg

SEQ ID NO: 47476 - DNA, 450 bp, Gossypium hirsutum
  Clone ID: LIB3493-034-P1-M1-C7
cccacgcgtccgaagatgttcaactgtgggggggacgaaacagtgggatctgcactatctatacactgttgaaccatattgcttcaaatctaccttcatactcatctcaaaacctgggatcaaaataagtcccttagatctcttgataccaacaaaacctcagattttcttactacaacactttccatacagggacgagatgacaaaatagtgtggaaagcccaccacaatggggtctttacgcttaaaaatgcttattcctgtcttttccaggggagctgctccattactcccccctcaatctcagcaaatcgcctaagttaatctttggcaacttaaaattccttacaaaatcatcggtctcctgtggaagatttgtcataattacctacccactaaagacctcctctcgagatgcctttctactaatgataatctctgtcctctatg

SEQ ID NO: 47477 - DNA, 440 bp, Gossypium hirsutum
  Clone ID: LIB3493-034-P1-M1-C9
ccgtgctctaacctggacagttgtgtggactttaatggtaagcatagcgtcgttcgtaccagagatggccttcgtatctgcagtatccccatcatcatccttctcgcgctcctgcaacagtgaaggatttgttaggattcctttggacttccccagggagaaactgtgtttgcctgctcatacggtgaagaggtctaagatcgatttctttgtgcccaccatctttgctgctcttgttgttgctgcttctgcttgtgttgttcgatctctgggcttatgggggactgaaactggttaatttatgtctctgtatgtatgtatttgatgattgttttacagtcttctttctttttaaatcatgattcctgaagaaatatccaaattcatatagttaataaaagatcagtccatgttttctgttcgctggctgatgtttgctt

SEQ ID NO: 47478 - DNA, 408 bp, Gossypium hirsutum
  Clone ID: LIB3493-034-P1-M1-D10
cgttacagcatatcaaattgatctgagggagcgtagatgaacagctcgagatgcatcttaacagggtttggagctaacgaaaacaacactaagaaagatgacggctgtggcgatggtgattgtgatcattattatcaagatgtcaaagcagactggaaatccaatcgaagagaaccgcaagaagatttggcttgtagactcaaaggggttgattgtcgactctcgtaagcattcacttcaacacttcatgaaaccttgagctcatgagcatgaacctgtcagcaaactcgtagatgctgtcaaggcaatcaaaccaacggtcttgatcgggacatctggggtctgaaaacaatttacaagggaggttgttgaggctatggcatccatcaatgaaaaacctcttattat

SEQ ID NO: 47479 - DNA, 548 bp, Gossypium hirsutum
  unsure (1)..(548): unsure at all n locations
  Clone ID: LIB3493-034-P1-M1-D5
cggacgcgtgggttcgttttctccnattcccgctctgatggtttatgggaactgcttnnaccnancattgtcttccaaacagagaaatggttacgcttctgtgctcttttatgctgcctggtgcccgctctcacacagtttgtatccaaagttcgacattctcagttccatgtttcctcaaattgaacatctggcagttgaagagtcttcagcttcaccaagcatattttcaagatatggaattcatagcttgccctcaattttaattgtgaaccagacgttaagggtacaatatcgtggtttaaaatatctctcctcaatcataacaatttatgagaaaacaacatgattttaaccatttcaatatattgttggaaactaattatttgtattaggagaccacaatatatacattatacaattttcaaataaaatcccctatattagatattaaaatcttatctactaatttttattttgtatctttatttatattcttatatttaatgctctgtttaattttttttttatttaaataaattattttt

SEQ ID NO: 47480 - DNA, 420 bp, Gossypium hirsutum
  Clone ID: LIB3493-034-P1-M1-D9
ttatgaatggcttagctttggtcgacatgttcatggattccaacgaatgggtggagctatttcccaccattgtgtcaattgccaaaacaatcgaagtgatttcacctgggatgttgggtacacatagtggttctttgcaattgatgtatgaagaactacaggtcttgtctccattagtaccaacacgagaattttatacacttcgatattgtcaacaaattgaacaagggttatgggctattgtcaatgtttcatatgatttgccacaatttgcttctgaatgtcgatctcatagactcccttctggttgtttgattcaagacatgcctaatggttactccaaggttacttggttagaacattttaatattgaataccaaacccctcttctgcgatagtatacgatacctttgttcataa

SEQ ID NO: 47481 - DNA, 423 bp, Gossypium hirsutum
  Clone ID: LIB3493-034-P1-M1-E1
gaggatttaggtgaacctttatgttagcatgtgtacgccatcttcccctctcttgatctccttttctcattattttccaattgctttatgttgttaacaaaaaagggtaaatattagtgtgttccaagaacgtgaaaacctaagatagcacgcaaaacatttttcccccctttcagtggggggggataatcattttttatgggggagtttgtttccattgcaaagtggggaagaattgacattcggaggctgtaacctctcccatggcagtgaggaccaatggatggtatcccttcggccttgcaggcgaggttttagttgaaactgaaccgattctatgtcctgtactaactcctaagtcctaactaatttggttgaaaactcttttaatcattacaagtgcactctgtaacctaaactaaa

SEQ ID NO: 47482 - DNA, 205 bp, Gossypium hirsutum
  unsure (1)..(205): unsure at all n locations
  Clone ID: LIB3493-034-P1-M1-E4
gtctcaagcaactcaaaccaaaccaaccccttagcnctggtccatctctcgtgaaagaggatggctaccatctcagctaacagctgtcgtctagtgaccagcatcagctagagaaccttggcttcattacaagaggcttgaggctgtccaaactgtcaaattcctcttccgtttggaaccaattaaagcactggggcctttgtcc

SEQ ID NO: 47483 - DNA, 288 bp, Gossypium hirsutum
  Clone ID: LIB3493-034-P1-M1-E9
gactacttgtggtgaacaaaagacaccttcgagcgcattgtgaccatgcttacagatggcagtaccgattatacaaatggatctgtagacagtggtgatagcactttaagctgcaacaagtagagatgaagaactatgcccagaatgttacctttgatgattataccaatacctatgacaaaccgactacgattgctgcacaacgctggaagattcacactggcgtggtggtgcattctcatggtagcatttacagatggacgggtgacatgctaggaatgatggtcg

SEQ ID NO: 47484 - DNA, 451 bp, Gossypium hirsutum
  Clone ID: LIB3493-034-P1-M1-F11
gggtgctttcacaagctgcttgtggagtaggcaccagtcagccaaagaaacatcgattattggttattgtttcggttacagttgctgcaatggttttcctgaagatagctatcatctgttacctgcaaaagaaaatattcaaatcacaagggctttggtgtgcattgaaaatgttggtttcttggataagaaccaaaatatcagctgaaaaaaggcatgaaaacgatgatcctaatctccaagttttcagtttctatagcattaaagctgccactaataacttttcaaagtaagctcggagaaggtggatatggacctgtttacaagggaaagttaccaaacgggcaggaaatagcggtgaagaggctctcgaaaagctcgaatcaagggtttgaggagttcaagaatgaggtcactcttacagctaggcttcaacatgtgaatctagttc

SEQ ID NO: 47485 - DNA, 399 bp, Gossypium hirsutum
  unsure (1)..(399): unsure at all n locations
  Clone ID: LIB3493-034-P1-M1-F3
gtatttttcagccaaaattgctgattttggacgagcagggttgaaatcagaggaaattaaactggaaattgctgaggatcatggatctatagcggaaacagagagtgtagctacaggatttgaggattatggatctattgcggagaattcggaaggtggtacagttgccgtttctccgccggcagttgcaacatctcctgaaattatggagaaaggaagcgtgtcggtctcggaggggaatttcgatagagcaagtgttgagaatggaaaagaattggtcaatggtggcgggaagcagagtggcggctccagcagcgattggtggtggaagcaagatatgggcgcaatgggagagagtgggaaagtgaangattatgtgatggaatggataggaagtga

SEQ ID NO: 47486 - DNA, 458 bp, Gossypium hirsutum
  Clone ID: LIB3493-034-P1-M1-F4
ccgccttcgacggttgctttaactttcattggtccgcgaaaaaaataaaaaaacgaactccaaatatctatggcgatgatgacttgttcaaggatttttctctgttattcaactccaagatcccaattccctacagtcatttcttctccttctcacttccttactccaaagaaagctacctataaatccaccaaacatattactttgaacgccaacggtggtaactctcgtttcatggcccgagtctcttcttcctctgccgctgaattccccaccaacatcggcgatatgctcagcgaagttaccattttcaccgcttcgggtcaacccgttctgttcaaagacctctgggaccaaaccgagggagtagcggttgttgcatttttgaggcatttcggatgctattgctgttgggaacttgcttcagctttgaaagaagcaaagccaaaattcgactc

SEQ ID NO: 47487 - DNA, 459 bp, Gossypium hirsutum
  Clone ID: LIB3493-034-P1-M1-F7
atcttattgctgggcttgccaacatgagggcgaggaactatagtattcctgaggtggataagcttaaagccaagttcattgcagggagaatcataccagcaattgccacatccaccgctatggcgactggtctcgtctgcctcgagctatacaaggttctggacggagcacataaagtggaagactatcgaaacacattcgcaaacttagcattgcctttattctctatggccgagccagttccacccaaggtcatgaaacaccgtgacatgagctggacagtatgggaccgatggatcttgaaagataatccgacactgagggaactcattcaatggcttaaagataagggtttgaatgcttacagtatatcatatggaagttgcctgctcttcaacagcatgttcccgagacacaaagagagattggacaagaaagtagttgacgtggctcgggaaa

SEQ ID NO: 47488 - DNA, 484 bp, Gossypium hirsutum
  unsure (1)..(484): unsure at all n locations
  Clone ID: LIB3493-034-P1-M1-G5
gcttcacgtaaaagaagaaaaccctccctcgggtaagaccctcttccgacttggactaaaccatnncnncccaacccaagcgaggcggtgttcacctgcccgctaggcgatctgcctccaactccgaccccagcatcctcaccaagatcacttcctccgccatcgtttctcgtggtaagcaggccgcctgcgacgccgctttcgtctccaagaagctcctccgtagcaccggcaaagccgcctggatcgccgggacaaccttcttgatcttatttgtccctttgatcatcgaaatggaccgcgagcagcagttcaatgagctcgagatccagcaagctagtctcctcggtgccccgcccactggaccaccccataagtaatcgggtcggaggttagagcttagttgtttatccctgtttcaagccattgtccctcttggttattctagtaaaaccattcagttgtaggtttatattttttcttt

SEQ ID NO: 47489 - DNA, 123 bp, Gossypium hirsutum
  unsure (1)..(123): unsure at all n locations
  Clone ID: LIB3493-034-P1-M1-G9
agaaaaccctagctttacctttttgtgctttgttaaacatcaaatcggggagatggatctttcatanatttcacctcanatctctttctctttgtaccagaaaataaagttcacctctttatt

SEQ ID NO: 47490 - DNA, 419 bp, Gossypium hirsutum
  Clone ID: LIB3493-034-P1-M1-H4
agtctttgtatacaccataacagcatggtgggtaatgggagagattcccaatctgtgtgatacttccttgttaccacatgacagtccatggacttgtccaatggaccgcgtgttttttgacgcatccgttatatggggacttgtcggacctcgtagaatatttggaacagaaggtgagtacgggaatgtcaattggttctttctcggtggagctctagctcctttcctagtatggctggcacacaaagcattcccagataaagaatggattcgcctcatgcacatgccggttctcttaagcgcaacatctatgatgcctccggctagtgcagtaaacttcacgagttggcttctagttggcttactttccggatttggtgttttcaatacagaccaaaatggtggaaacgttacaatta

SEQ ID NO: 47491 - DNA, 411 bp, Gossypium hirsutum
  unsure (1)..(411): unsure at all n locations
  Clone ID: LIB3493-034-P1-M1-H8
atcagagccttgataaatggcttcagtggaatgaaaggtcatttccccgtggtgttttggattggccgacgaggttgaaaattgctattggagccgcacagggattgtgttacatgcaccatgaatgtcctacgccgatcatccaccgtgacgtgaagtcgagcaatattctgttggacaaggagttcaaggccaaaattgcagactttggacttgcaaaaatgctaataaggnatgnattttacacaatgtcaacggttgcagggtnttttggntaccgnggggnaaagtatgcntacacaacnaaagtcaatacaaaggttgatgtttacagntttggagtggtactacttgaattggttattgggaagagaagtttatggnangtatgatagtttgtttttaatgtaa

SEQ ID NO: 47492 - DNA, 418 bp, Gossypium hirsutum
  unsure (1)..(418): unsure at all n locations
  Clone ID: LIB3493-034-P1-M1-H9
gtattgatctagagtatggcatagttgatgctgtgaagttgcccgaaaagtgctaagaagtgacgagaagtcatagatgacagaaaccttccagcagctcttcagagaagattcagaaggggattaggcaacccataccccaaatccataaatgaaaacaagacctacccaccgaggtcttgccaaaggaggtgtcaaccggcccatncngtctgctggacccatcctgaggaggagggctccttattaattcagatgatgcagataatgaaccaaaatactccgtgacatggaatcctctaggtgaccatggtcaagacctgagccaacacagagaaagtctatgtgatttgatctgaaccaagaagtctgtctgatatacggaacatgcattgacttccatattcactcccatttt

SEQ ID NO: 47493 - DNA, 475 bp, Gossypium hirsutum
  Clone ID: LIB3493-035-P1-M1-A1
tgataattgcgtcatcctcggagctgcttctgttactaagaacgtaaatttgcaagtagcggagtgtgggaatgatgggttttgccccaataataacatcgccaacggtttaaatgtcggtaacggcgatgacaatgggagtattcccgagtcgttttataccaacggagggttgaaattaagggttgtttggacgattagctcgttgatcgcagcatcagcgaggcattatttacttcaaccgataatcgcagagcataagacgctagatagcttggttctaaccgattcggatggtcaaggggtgctttgtatgaatagagatcagcttgaggagttaagagtgaagccattatctgcttcttctgcatcgaaaaggacattggtgccggcactgaatatgaggctttggtatgcccctcagttggaattgcctgatggggttgttttaaaaggtgctactttggttgctatt

SEQ ID NO: 47494 - DNA, 237 bp, Gossypium hirsutum
  unsure (1)..(237): unsure at all n locations
  Clone ID: LIB3493-035-P1-M1-A10
cagacgcgtgggcngacccgtgggcaaaaggaagaagggaggaagacagagcgtagaaatcgtgatgagttccgcaagttggtggaaggacatgttgctgcagcaacacttactgccaaaacccattggcgtgattattgcatgatggttaaagattcgcctccctttctagcagttgcatccaacacctcaggtccaactccaaaagatttgtttgnnnatgtatccgaggagctt

SEQ ID NO: 47495 - DNA, 472 bp, Gossypium hirsutum
  Clone ID: LIB3493-035-P1-M1-A3
tggcgactctctgattcaatgacgaccgtgacgaataacgtgatgctaaactgtataacgtcaccctctctcctgttggaggtgctgaacgggttatagcagtgaatggagctactcctggacctgctgttaatgtcacacctcatcacaatgagaatattaaggctcacaatcagttggacgaaaatcttttgatgacttgaccaggaatgcaaatgcagagaaattcatggcaggatggagctctcggcaccaactgtgcaattgatcccaagaagaattttacttaccgatttcaagtcaaggatcaaattgggagcttttgctacttcccctccctcaatattcaaagagcatcgggtggctttggtcccattattattaataaccggaatattatagcaattccttttgctcatccggatgctgacattgtcctcttggtgggtgattggtataccaaaaaccacac

SEQ ID NO: 47496 - DNA, 481 bp, Gossypium hirsutum
  unsure (1)..(481): unsure at all n locations
  Clone ID: LIB3493-035-P1-M1-A6
aaaagaagctgagcttctaaagattgaaacactaagcgatggaaaatggaggagaccgtgtgacataaagagagaaagtgaagtactaagggagagacttttttattattattatttctttaattaatgatatggcatgctggagttacaacaagctttgcattgaaggtgtttgctcaatttccttataaagagcgtttccagaattggataatttaattcatccttgaacaaaatatagaacgaaaaggcaatgaaaattctgcgagtttcgctattcttcttcatctttcttgctccatttgcatttgtgactgtgcaagctttcaccggaacgtatggtattaattatggaagaattgccaataacctcccatcaccagatgaagttgtcacgcttcttaaggcagcaaaaataaggaatgttcgaatttatgatgctnatcaaagtgtcctcaaagaatttagtgggacagggctg

SEQ ID NO: 47497 - DNA, 143 bp, Gossypium hirsutum
  Clone ID: LIB3493-035-P1-M1-B3
ctcaattttcgacccacacctccccttccacgttatttcacagtacattcatacctatcgggcttgtgctgataataataatgaggccttaccctcttcttctcctattaactttcccttcactgcaactcctctgcttctcc

SEQ ID NO: 47498 - DNA, 478 bp, Gossypium hirsutum
  Clone ID: LIB3493-035-P1-M1-B6
ctttgacaacttcgaaaagactttagagttctgtactgcccttaaggattgcctcgagcatgttcgaaacaatcacggaattattgagtcggcgcttaaatgttatgatgaagaggataaattagaagtccggaccgtcgaggaaaattctgttaaggccttgggggaactgaggaagttcaaagaagctgaagaacctttcgttaagcagttccttgtactaaaaaaaatggcccataggcggtacgaatcgatgcaagggaaggtgcgtgctcggaagaaaacgctcaaaaagaaattggaatcatgggaaacatggaggagggtgacaatggccttttttgttgccgcttttatttccgtgttggttttttccgtggcggaggcaaccaaatccgcaaagcctgtaataacagctttggcaggtgcgtcgacggctgctatagttccgctgggaacatggtgcaataagtggtgg

SEQ ID NO: 47499 - DNA, 247 bp, Gossypium hirsutum
  Clone ID: LIB3493-035-P1-M1-C1
cttttattttattttttccttgtaaatcctcttgaatcatcgagatgtcttcgatcgtggttaagaaattagtgggattggaattataaggatgatagtctttacatatccctttcacgtggattttgggtttaaaaagtagtttaaatatgattgagctttcttgctttgttatggtagatgttacataatgtatggtaatacatattttggtgactttgtgatttcaattgctgatctaaaagac

SEQ ID NO: 47500 - DNA, 470 bp, Gossypium hirsutum
  unsure (1)..(470): unsure at all n locations
  Clone ID: LIB3493-035-P1-M1-C10
cccatccaaaaccaaaccctttccaccgatcaggatggacttttagctaaaaccctcgccgacctcctacgcttttccgacatgaccgacccttccatcccactctctgcccttaacctctctcacggttccattatattcctctactaccacggcgaacgcaccgtccgcggtggccccaccgtttcacccgccggatcgttcggccgtaagatgaccatggatgacctcatcgctaaacaaacacggatcacccgccaggaatcccctcactgtgactctgtttcctttgaccgcgattcggccaacgctttccaacgtttcgtcagcgaaacgctggcgtttgcttcgaaacgcggcgggttcatgtacggcaccgtcacggatgaaggtagagtggaagttgattntatttacgagccgcctcagcaaggcttggaagatgatttggtccttttgagggatcctga

SEQ ID NO: 47501 - DNA, 481 bp, Gossypium hirsutum
  Clone ID: LIB3493-035-P1-M1-C2
cttaaaaagtacttgacggaaacaagcaaagtacccaatagcgtagccaaagtagtggtgcttttaatctgcgtatatgtgaacggatttgcatggtcatggggtcctttggggtggctaatatctagcgaagtcttcccattggaaacacgaacttcaggctatttctttgcggtcgccaccaacatgctttgcacattcatcatagctcaagcattcctcagcatgctttgccacatgcgagcctacatttacttcttcttcgccgcctggctcatcgtcatgtccattttcgtaatggcgatgctccctgagaccaaaggagtcccccttgatgaaatggttgaaaaagtatggaagaaacactggttctggaaaagctttttcaaatctagcgacattgaaagaccgaaagctatggtccagcttgagcatcaggaaaaaccaaaccattaaaaacacctttgtacatctctttgga

SEQ ID NO: 47502 - DNA, 480 bp, Gossypium hirsutum
  Clone ID: LIB3493-035-P1-M1-C5
ttttggagttgagctaaccaacatttttacgttatgcggaaggtgtgttcacagattctttgatttttccaaagctaccgcaaagagagccttcagagttatccaggtttttcttggatatttttacactgtttcaatcatgttttctgatctaagctgattttaatgtaattatgacatcatagtaaattttgtttgaatgatgacttaggatactcacaacgtacgatctgtatctttccatccatctggtgatttccttctagcaggaactgatcatccaatagcacatttatacgatgttaataccttccaatgttatctatctgcaaattcccctgagattggtgttaatggagccataaaccaggtataaaatatcaccatcttcaaaacataaggatctttcttccatttgttaaaagataaatcaagacaatgtagtccgtaaatcaatctgtttcatgcacaggtaagata

SEQ ID NO: 47503 - DNA, 167 bp, Gossypium hirsutum
  Clone ID: LIB3493-035-P1-M1-D2
cggacgcgtgggtttcttttggctttagttttagtaatgtttgtctctgaactaaccttctttatcaatttagttttgtgtgaatcgttatctctgtaaaccttgatacttttcagtgtttatcatggagaaagctcaatattgcttggaataataatttatgctcc

SEQ ID NO: 47504 - DNA, 185 bp, Gossypium hirsutum
  Clone ID: LIB3493-035-P1-M1-D7
gacccgctctaactgactatgctcaatccctagccatggatcatgactgtgatgactgtccccgatatcctaaacccacctcgtctgatccaccattccacctgcggagaccgggctttcacaactccacctacgttctaacggagcttactgcgaatctagccttcaacatcttctaccttttg

SEQ ID NO: 47505 - DNA, 470 bp, Gossypium hirsutum
  Clone ID: LIB3493-035-P1-M1-E12
gacacttcgagagcaaatgttcaggccctcactgtcgacaataattgcagacaatccaaagattgtaatagtttcaccagatgacacagttttaacgactacaaaaaagatgcaagaatgtcgtataaactctgcagttgtgcttgttgaaaataaaccccgggggattctaacatcaaaggatatattaatgcgggtaatagcacaaaatctgcctccagagaccacttcagtggaacaggttatgactcctaacccagaatgtgcaacactcgacacaccaattgtttctgctttgcataccatgcatgatggcaactttttacacctacctgtgctagatagagatggagaactagtttctattgttgatgtgatcgaagttactcatgccggtgttgctacagttgggaaaaattttggagtcaataatgaggcttgctcaacaatggtgcaaaaatttttgggat

SEQ ID NO: 47506 - DNA, 318 bp, Gossypium hirsutum
  Clone ID: LIB3493-035-P1-M1-E6
gaaaaaccttaagtgtttttttctttttctttttcttgtttgccctcagaaagagatctcttcttcaatttcttataaacgcttccaagttggaatttttggctggaaattcttcgcctctttctctccgccgccgcttcaaaagggaaaattttctgttcttttttttcccttaatcgtttaactttatttttgttcattaaaactttttcctttcacttacatgtcacttttccccttgtctcttccatatttctcaaattagggtttatgaaattggtatgacttccaggttttttttcgtttttatattggata

SEQ ID NO: 47507 - DNA, 315 bp, Gossypium hirsutum
  Clone ID: LIB3493-035-P1-M1-E8
tagaaagggtagggattttaattcagggaataggggagcaagttgtaataacttgagtgcattatataagaaattgatattgatgttgaggtccttatacgtgactgtcaggcttttacctgcatacaacatttttcgtgatctgaattcatctggtctaattcgttcctttaagcttgttcctagggtatcttcttttgttgaacccttgactcgtaaagaagaggtagatatgcagagattttggtttacccctgtggacacttcttgtggaaggctttgcctttcagttttggaatattcaataatctcaga

SEQ ID NO: 47508 - DNA, 326 bp, Gossypium hirsutum
  Clone ID: LIB3493-035-P1-M1-F12
atgacgaagcaaaggataaggcctttgaacttgagatgagttgggtctgtgacgagtccaagcaacaacatcaaaaggttcccgatgaccttttggaggaggctaaggctgcggctaggattgccctagaagagatggatgccgattaaacatgagtggagccagaatactgttgcaatggtattttgatcttcactaatttctcatctgtcataaacttgatgtttgatttatgatctaagtcattgactggttaaacatgtttccttgtattatttcatcaagaagatctgccggcttttttattagggccttcgatttcgaac

SEQ ID NO: 47509 - DNA, 410 bp, Gossypium hirsutum
  Clone ID: LIB3493-035-P1-M1-F7
ctactcttgctcttttttgtcttgtttcattgttctgactttctgtaatgaggaacaaaaagggttaccatatcattcacccaattcctaatgaagaacgatttagcagttactattgctattacctcttctgggttgcggttggttactatctctggaaaaaaattctcaccataacgggctacaggttccacccgacagatttcgagctcctccattactatctactaaacaaaaatctcggccgtgattctctggtccaagctatcgctgaattggaagatatttgtggattagagccttggcaattacctggacattcgaatatacactctggcgatcacgtttggtatttcttttaccggccaaagttcaagtaccagaacggttcaaggatcaacaggacaacc

SEQ ID NO: 47510 - DNA, 472 bp, Gossypium hirsutum
  Clone ID: LIB3493-035-P1-M1-G12
tggatggatggtatgaacattaacatgaatatgggagactggctgataagcttggtttccttcctgctgatgataaaatgttcagatttgtcttactccttcagcattctatgccaacatctgtcctttctggtgctgttgctaatttaagaggttacggaaaggaggcagcagcttcgttgttctgggttcatatatttgcagttttctccatggcaggatggattattctctatctcaacatactcttttaaaactagcaatcaccagtccttctggtcactaacagcctgagagagcgagtacattacatggatggtttgtcacgccctgcaaccatgaatactgctgatagtattttattttatctcttgataccatttctgtatcagctgattgttacatattcatgttaatgttcataccatcaaacatgggaatggatggatggacctaaatttaattttttatg

SEQ ID NO: 47511 - DNA, 240 bp, Gossypium hirsutum
  unsure (1)..(240): unsure at all n locations
  Clone ID: LIB3493-035-P1-M1-G8
ataaacgaagtgtagaaagagcggaaatggaaggttcgaaaaaaaggttattggtgtcgaanagaanaaaatccgttgtttctatagaattacaggaactggcgttagcttcaccggcggacgttgagttggacaacgctataactgctgcttctgctacttccgacgtagtattcgccggtgaaaagtgttgcagacttagctccgacgagttttctttttctagttgttttagcaatg

SEQ ID NO: 47512 - DNA, 483 bp, Gossypium hirsutum
  Clone ID: LIB3493-036-P1-M1-B11
gttcatataatagatctcaatgcagctgaacctgcgcagtgggttgcacttattcaagctttgagtgcaaggcctgaagggccgcctcatttgaggattactggcattcatcaacagaaagaagtgttggatcaaatggctcatagattgattgaagaagctgaaaaattggacatcccctttcagttcaatccggttgtttgcaaattagagaatctcgatgttgataaattgcgtgttaaaactggggaggcactggcaatcagttctgttctccaactgcattcatttttgacttctgatgatgaacttcttcggaagaaatcgccattgggatcgaagaatttgaatggaattcacttgcaaagagccctgcagatgaaccagagcactttaggcgagttgcttgaaaaagatatggttaatggatacagccctagcccggattcggcctcatcatcaccgctattttcaactggatca

SEQ ID NO: 47513 - DNA, 472 bp, Gossypium hirsutum
  unsure (1)..(472): unsure at all n locations
  Clone ID: LIB3493-036-P1-M1-B3
tataaacatgtattttaatatactaaattacacataagtattaatgttgtatctgtttattgtaacctataattgaataatagctatatatattaatacttataaaatatattatttcattgtataatattgtatcacatacaaacagagtagtacataatatattagtaatttatatatattaataattaaacgttataatatcatgtaatatnaattttatgttattctataatataatagtaacacattatatatattaattattatcatatattattggttagatattaaactggttgaaatatgctntaattccttatatttttcatatatttgaaagttagctctcctattatattatataatgatatatcatatcatatagtttataaaatattaataagttatgtatgtgcatcaatgattaaacattataatataatggaataatatatcttttattataata

SEQ ID NO: 47514 - DNA, 399 bp, Gossypium hirsutum
  Clone ID: LIB3493-036-P1-M1-B4
ctggagaccccattccgactaacaaaagatggagacggtgacaagatctttagccaccctgacgtggttgcagaggagccatggtacggcattgagcaagagtacacactttttcaaaaggacactaaatggcctcttggatggcctgtcggagggtttcccgcaccacagggaccgtactattgtggagtgggttctgacaaagccttcggccgagacattgtggatgcacattacaaagcttgcctttttgctggcattaacattagtggaatcaatggcgaagttatgcctggccagtgggaattccaagcaggtccagttactgggatttcttcgggggatcaagtatggatggctcgatacatactcgagcgaataactgaaatcgcaggagct

SEQ ID NO: 47515 - DNA, 260 bp, Gossypium hirsutum
  Clone ID: LIB3493-036-P1-M1-C11
attcatgactatgagatggagctgggcaagggttatatgaaaaactggggtctgttgcaaatattcggatctatggtccaaaaccttctgatgacgttcaccgtgctgctctctggtctttcaatatcgagaatattcatcctacagatattgcaacttttctagaccaacagcatggagtgggtatcagatcagggcatcattgggctcagcctcttcatcaccatctaggggtcaatgcaagcgcacgtgcgagcctt

SEQ ID NO: 47516 - DNA, 262 bp, Gossypium hirsutum
  Clone ID: LIB3493-036-P1-M1-C2
aaaatggtgaaaagttgatgcactgatcattaccgatgatactctggcaatcgcagtttcatatttactagcctacattattatctgtggtctgatcggacatattattacatgtctgagctagcttttcattgatggggaacacaataaagatgtggtcgaactagtaactagataagagtgttaatatatacatgaaaaaagtttcggattcgtatctgaaatgaaagaacatttgggtctggagaggagagagggacgg

SEQ ID NO: 47517 - DNA, 384 bp, Gossypium hirsutum
  Clone ID: LIB3493-036-P1-M1-C3
cgcctactcacccaccaacccaccaacatgaggaccggcctcacccttaccctgagccccattctcattcacccactaaacccccaaaccccaactcctcttcatttattcaacaaccaaggcgccagggcaacccccaaccaagccaccaattcacccaccacccaaaccaccagttcaacctccaactaaaccaccaaccaaaccttcaacttaacccccgactaaaccaccaactcagacccccactaaaccaccaaccaagccttccacttaacccccgacgaagccaccaacacacccaccatcttatacttcggccaagccacctaaatcgagccaagtggcagtgcaaggcgttgtttattgcaagtcatgcaagta

SEQ ID NO: 47518 - DNA, 444 bp, Gossypium hirsutum
  Clone ID: LIB3493-036-P1-M1-D10
cttgttttgatcaaagaaaatttagggtgaggaaaaatgccgatgaatagaattgcggttgggacagcgggagaggccagccatccgactgtgataaaagcggctttggctgaattcttttacatgcttatttttgtatttgccggagaagggtccgggatggcttataacaagctaacgaataatgggtcaagcacaccagcggggctggtagctgcatcattgtcacatgcctttgccttgtttgtggcggtttcggttggtgcaagcatttcaggtggtcatgttaaccctgctgtcacctttggggcattcatcggtggccacattactttgttacgaagcttttggtactggattgcgcaattgctaggctccgttgtcgcttgcttgcttctcaaggttgccaccggtggaatggaaacattagctttcgcgctattc

SEQ ID NO: 47519 - DNA, 423 bp, Gossypium hirsutum
  unsure (1)..(423): unsure at all n locations
  Clone ID: LIB3493-036-P1-M1-D8
catctttgaaatacaagaaccctaaataatgtgaagccatgaatcccacactggccacgttatcatcaccatccctctcttttcttcccttgaaatcactttcttccccttcattcctcacttttccttttcccaaacccctcaggcttagggcttcttctgcaaattttgatgccattcccgtttctaaacctaacaacaatggccaatccctctcccaaaagcttcaatcatttgccaaaaccgctgttttggtcggtgccacaagtttgatgatcgggaaattctccaacttccctgccaaagccgattctctaccggcaacgactgaacaagaacctgcagttctccaagaaaacgaacaactgaaaacccaaagcccaaaagaaacttcnaccgtttctgaagttctgggatctaatg

SEQ ID NO: 47520 - DNA, 174 bp, Gossypium hirsutum
  unsure (1)..(174): unsure at all n locations
  Clone ID: LIB3493-036-P1-M1-E10
gcttataatgcaatttggtgttggcggagaggggattgatatggatgggggtacaaancatnnnataaaanttgccaaaattcctggtgatgctactggaaatgctggatcttgtggtgaaatggctatatatctaacgttgggccttcttgggaaacagaaagaaatgcaaat

SEQ ID NO: 47521 - DNA, 156 bp, Gossypium hirsutum
  unsure (1)..(156): unsure at all n locations
  Clone ID: LIB3493-036-P1-M1-E3
gctaaagtgtttgcgcagcatgganccaaaggtttgattgctgatatccaagaggatttangtcatcnagtttntnangacatangcccttcaaactgttccttacagcatagcaacgtcactgatgaagaccaatttaaaaatgctgtgaacaaa

SEQ ID NO: 47522 - DNA, 443 bp, Gossypium hirsutum
  Clone ID: LIB3493-036-P1-M1-F1
ggtttattgctttatctctttggtgtttttggtttcacagaaataagttggttcatgaggggattaagctttctatgccacaactattgggatttatcaggggctatgagcgagatttatggcttgttcgtgagaatctatgtgtttctactgcttttatgagaaatgaagtctggaggcctcctgactatggttttattaaaattaattttgatgcgtcgtatattccaggaaataattgcgacaatagcaatcttagccagaaatcacagaggggaagttatagaagcagttacttatctggtggaaggtgtggacaatgcattcgtggcggaagcacgagcttgtgaaagagcgctgatcctcgcaaaattgaagggctttcgacggttgattgtgaaaagggactccctgacagtcattaaaaaactgattaaaaatga

SEQ ID NO: 47523 - DNA, 472 bp, Gossypium hirsutum
  Clone ID: LIB3493-036-P1-M1-F2
gaaaatttaaccaaaatgtttgattttctttaacggtgtcgttcgcaacgttcttttcacagtttacctccgccggcaatccatccatcttccatcgcgtccccccccccccaaatgcaagcttcgccggcagcgcttcaatggccagctgctgcactgctaaattccgattctcaatctcatcttgccgcgccgcccggtcccctcggccgtttcccggcagtttaatacattcatttccgctctttcactctcctttcgctcgcccaatgaaacccacaaatctccgttctgtctcagcttcaaccgaagtttctgccggcgccgcctcttccactcccactttctcttggaacgacgtcgttcgcgtctctcaaccggagtttaatcccaacgattcttccaatctccgaggcttcttcgataaaatcaaagcttgcaaccgtggcgctgaattgcaatctgagttcct

SEQ ID NO: 47524 - DNA, 436 bp, Gossypium hirsutum
  Clone ID: LIB3493-036-P1-M1-F3
ctcttatcctttgtctatttccccgggggacagttgggggttgtggacttgccattttaagacaaagtgtgtaaacagagaatagataagtgacttttgtagatattgtaacaaatactttaggttttctttcttttctagtttcttcctctataatacaggagccgtcattttaaagtgcttcacaggtgtgtctccagctatgttcccatgtttggagaaaccgagtacgatccagtccgacaattttcatctggcccaattgaaggagaacttgatgctcttggcaaagctgttgatgctggtaagatcaaatatattggactcagtaacgaaacgccatatggtgtgatgaagttcctttattttgtataaaacaatgttcactaccctaagaatataagcgtgcataatttttatgggttggtttgccgaa

SEQ ID NO: 47525 - DNA, 118 bp, Gossypium hirsutum
  unsure (1)..(118): unsure at all n locations
  Clone ID: LIB3493-036-P1-M1-F6
agagagaacaccgaaggcgagtactcttgccgcgaacgcgangtcgtcccgggagtcctccaaagtcttaagttgataaccaaagtcttgtcggagcgcattgcaaaatattcatttg

SEQ ID NO: 47526 - DNA, 434 bp, Gossypium hirsutum
  Clone ID: LIB3493-036-P1-M1-G2
cagcaatgccaagtggaaccggcgatccagaggctggacccccagtgataaagaaccgttgaataatgtgcgagaaattcaccagaaagcgttagatgaccttgtgaacgtgaactcgctcttcacgctggccgtcttcgtggggttatcgatggcacgtcaaggcgagcgtagcctcgagaaccgcactgaatgcgacgcggatgtggggaacgcgaggcggctggtggtgaacgaagtggtgtcgttcgcttgcttcctgttgtcgagcctggtagccaaggcacttaaaatccatgtcaccatttgccaagaagaggacttcaaggatacccgtaaccagattgtgagattctcaatgctgatgctgtcggtgggcgtcggttttcggatgcatattccttacggtatccatggtggatgtgatccaaatc

SEQ ID NO: 47527 - DNA, 366 bp, Gossypium hirsutum
  Clone ID: LIB3493-036-P1-M1-H10
gttttcccaacttacaaacccaaggatattgggcaagacattaaacaggagtttggcatacaactgaactactttcaggcttggcgtggcaaagaaattgctagagagcagcttcagggttcatacaaggatgcatatagtcagttaccacttttctgcgagaggataatggagaccaatccaggcagttgtgctacattctccactaaggaagactctagttttcatcggctctttatcggattccatgcttctctgtccggctttctacaagggtgcagacctctccttttcttgatagcatacccttgaattccacaaattaagggaccttggtggcagaaccggttgcggatgggaatagtg

SEQ ID NO: 47528 - DNA, 300 bp, Gossypium hirsutum
  Clone ID: LIB3493-036-P1-M1-H11
ataaataagaacgcgtcagaaatacaaaccagggatctacatatctgtccgagtgccatccgagaccatctcatggattgcactgggaaagaggtcaccagacagggacagcctccatatctagggctctacagataacagtgaggcactcaaccctactgaggctaatgcaacgactgacatcttaccagatgctcatgcagatcaaaaaagtctgaagattgatactgtaaaactgaatgctgctggtgcagcttacaaatcaagtgaccgatcaaagagcaatttggatcaaaagat

SEQ ID NO: 47529 - DNA, 349 bp, Gossypium hirsutum
  Clone ID: LIB3493-036-P1-M1-H2
caacatcaaatatcttacaagcagtaaattgatgggcttagagttaaaagatccaagtttcaggcgccacattcttttgcagtgcctcatactatttgattatcttaaggccccaggaaagaatgataaagattcatctgaaagcatgaaagaagaaattaattcttgtgaagatcgagtgaagaaactactcgaagtgactcctccgaaggggaaagattttcttcatagtattgagcatatattggatcgtgaaaagaattgggtctggtggaaacgcgatggctgtcaaccatttgaaaagcaaccaatagagaaaaaaacagttcatgatggaactaagaaacgt

SEQ ID NO: 47530 - DNA, 248 bp, Gossypium hirsutum
  unsure (1)..(248): unsure at all n locations
  Clone ID: LIB3493-036-P1-M1-H7
cggacgcgtgggtgctcactctctttggctgggattcatatgcgggattggttcanatcgtaaaatcaaaaccaaattttcgtttaatttatacatataaacacccaaaaaacaaaaagggcataaaaaaggagattcaatggggatcttctccttcaatgccataggtttggccttgttattagacattatctccggggcacgtaatgcttgccctcatttcgaccgataagaatttgtagctttaa

SEQ ID NO: 47531 - DNA, 361 bp, Gossypium hirsutum
  Clone ID: LIB3493-036-P1-M1-H8
gaaatatttgcagttatggaagaaaacccacaacagcgttctcatctcaagcgccaattcttcgaagaccaacactccaacaagcctcccgcgcaaaagagggttaggtttcccaagggaaagaaggtaaagcctggagaagaagcaccgaacagagttgatattgaagacggttcaggtgacttgaaggatcctcgtctcgccgctaaggagcgggccaaacgccgcagtcaaattactacggagctatttgctgaagatgggagaggaatgcttaatgatgtatcagctgctgaaatttcatatgaggataatgagaactttcgtgatgatggagttcaaatagaacctttcaatctta

SEQ ID NO: 47532 - DNA, 475 bp, Gossypium hirsutum
  Clone ID: LIB3493-037-P1-M1-A12
gatcaatccaaaacctctgacccccaaaagaagatccgaaacccaaataattttccgactccatttctctaaattctgctatcgaaacatcatgagttttctcgcgggaaggctagcaggaaaagaaggcgccttctttttccaggaatccaaacaagccgtcaaccgtttggtcgagaaaacccccaaaaacctcccatcaaacccaccgtcgcttgggcaacaaactcaagctgacgtccttcctgaggtcctcaagcattctttgccttctaagatcttcaggcaaccctccgatgcttcgtctctatcgaggtcctccaagtgggccctccatcctcatccaaccaatgcctccagttcttcccctgatgccttgaaccctctcagggcttatgtttctctaccccaggttacttttggccccaaaaggtgggagttcccaacaacggaacattcaaccatggcatcgacg

SEQ ID NO: 47533 - DNA, 470 bp, Gossypium hirsutum
  unsure (1)..(470): unsure at all n locations
  Clone ID: LIB3493-037-P1-M1-B11
gaagcttcaaggaacgggattgagttcggattcgggtgtaggaaaccggaaccttggttagggttaggttcaagcacanaggaggaagagcagtgtaattggctgtggtccttacaccctcatgcttaccagtaagcctttcttatgctaccaatgcaaccaggacctttaacgtaacgatatccccatcctgttgtgacaccccttgtaccattagcaacgacggttcccttgtacaatacgacaacccaaaccctaataaaggttcccgatctgtaccacgtaagagttcgtgatccagaggatccctgctcctgacggttgtcgtggacctttgccttcttaaggcggtagatcttgcgatcttctttttcttgatggaagcggtgttgtgtttttaagtgccattagttgcgttaggttatttgtactataaaaaaaaggaagaaaaattatttttctggaaactt

SEQ ID NO: 47534 - DNA, 435 bp, Gossypium hirsutum
  Clone ID: LIB3493-037-P1-M1-B6
tatcagaacttgatattaacgaagatgaagcgttagccatcaactttgttggcacattacattccatcacagccgttgataatcgtagggatcttgtgatatcgaatttcaggagattgcaaccaaggataatcacggtgatcgaagaagaagctgatcttgacgttggggttgacgggttcgagttcgttaaaggttttcacgaatgtttaagatggtttagggtttactttgaagccttagatgattgttttgagagaacaagcaatgtaaggttgatgctggaacaagcagctggtcgagccataattgatttggtggcttgttcgccgtccatgtccattgagatgcgggagccagcgacccgctggtcctggcgggttaaagcaggtggatttaaccccggggttctgagtgatgaagtgtgcgatgatg

SEQ ID NO: 47535 - DNA, 470 bp, Gossypium hirsutum
  unsure (1)..(470): unsure at all n locations
  Clone ID: LIB3493-037-P1-M1-B7
cggacgcgtgggtggctgttggaggtcttccagaaaagatactaactgcataccaatctgtgctcgaggacaatccaagtgaggatactgttttaaacaagtgtaatgctgctgtacaaaatttgagtaaactagaggaaaatgctgaaagtnnnttagctcaagggaatcagaatggatctgctttgctagatgagctacagntgnaagaaaatgctctccgccaatgtgttgaacaacttgaaagcattgaaacaaccagggctgccttgatttttcaacttaaagaagcacttcaggaacaagaatcaaagctggagcttatttgtagtcagcttcaggttgctcgtggtcagattgagcaaggaagcaatttaaggaagaggctgactttaccctctgtgcatggccatgtaactactacatctatccctacaggtgaggctgtagctgtgagtgaacggaacctt

SEQ ID NO: 47536 - DNA, 459 bp, Gossypium hirsutum
  unsure (1)..(459): unsure at all n locations
  Clone ID: LIB3493-037-P1-M1-B8
gtaccaaaagggtgtgtgtgtatatatatatgttgcgtgtatgtgtgcattattatatatattgggtttttgtttctttcatagtttatatatatattatctttctgctaattttaactccatttcagcctccattgaaaagactcctgacaatgttcttggggtaaaaacaaggctaatggtgattcttttggcatttncaattatggtatgattgaaccaagttgaatttgaatgataggaagcttagtctttgaatctagttggattgaatctgcttcaagaattaatcgagttcaattaaatttatttatcgatttttatacttaaacttaaatttaaattcgactaaactcattcatattatataataaaagaaaaaatataatttcattataaatatatattaaaatgaacagctcgattaggattttaagctgtccaaaacgaatattatag

SEQ ID NO: 47537 - DNA, 407 bp, Gossypium hirsutum
  Clone ID: LIB3493-037-P1-M1-C11
cgatttcattccccttcccttcctctcgtttgcgcaggagcggacccgccggtgaccgcagaccaaggagagaataacaacgttgatgaagaggaggaagaagaagaagatgacgacgatgaagagggagacgaagaacccgaatcgtactcggccgaaacgggtcgaaacacgcaacaagtcccgacagaaaacactctggcagtagtggcggcggaggagccgagcgagttaatgcaattggatatgtcggaagatatcaagctcgggtcacctgacgatgcatcgaataacttggactcggatttcaatatgttggcggtgagtcaaagcgggaacccaaccgtcaatcaacggggagctgcgttgtttacagatgagtctaatcgggggcggctagtggtaca

SEQ ID NO: 47538 - DNA, 478 bp, Gossypium hirsutum
  Clone ID: LIB3493-037-P1-M1-C2
ctcggcttgctggaatatttgttggtgctgctcggaacaaacgcagacctgagattttaaagattgttaaggaaggcattgggtatgcttttgaagacactccaagacacctgtcttttctggaagcttctgtgctacattttgcgtcaagacttcctgcacctgacatacgagacattctgaaagatgtccagaagaggacagagaatgtaaatgcagaagaggatccaagtgggtggcgcccttataatacattttacgagagtttgctggaaaagtgtgcaaagaatgaagggatccaagatgagaaggaatggacaactacaagacaaaggggtcgtcctaggaagcggcaaaatattgaggggaggagactttttaatgagcatggttcaagtgatgaagaggattcaattaacacattagaccaggaagatgctcaggttgagggagatgaggaagatgataatgctcctct

SEQ ID NO: 47539 - DNA, 480 bp, Gossypium hirsutum
  Clone ID: LIB3493-037-P1-M1-D10
aaaaaaaaacgaaacgaaaaagaaaaaaggccggcgggtgtttcttcttctccctctctctctctccctcacagtctccttcataattaagaaaccactgtagctgagctattgtaagagatactgagtgaatcggtgagtcagccagtgagcaaacgagcgagcgagtgagtgagtgagggagggagggaaggaaggaagaaaaaaaatgccacctacaaacatgaatccaaaccataatcaatcccaagccacagaaacgcgttcatccaccgctaacggtgaccaccaccaccaccccaacggccactccatcaccgctcaaccactccagcgccaccatacttactaccctcgttcttcctcttcctccgcctcgtttaaaggctgttgttgttgccttttcctccttttttccttcttagcacttcttgtactagccatcgtcctcatcattgtcctcgccgttaaacccaaaaa

SEQ ID NO: 47540 - DNA, 477 bp, Gossypium hirsutum
  Clone ID: LIB3493-037-P1-M1-E1
cggacgcgtgggtaaagctacaatgcctactggtggcgtaggtgccataaaggtgctttcatctggttctcatcagggggagaaagagtttcacacagaggtttgtctactaggaaggctgcatcatcggaatcttgtgaacttgataggatattgcgtggataaaggacaatacatgttaatttatgagttcatgagcaacggaagcttggcaaccatactatatgatgaggaggagcagggtctgagttgggacgaaagacttcaaattgctcttgatgtttcacatggcgtagaatatcttcatgaaggggcagtccctccggtaatacatcgtgatttgaagtcagctaatatattgttggaccaatcaatgagagccaaggtcgctgattttgggttgtcaaaggaggaggcttttgatggccgaaactctggcattaaaggtacatacgggtatatagaccctgagtatat

SEQ ID NO: 47541 - DNA, 233 bp, Gossypium hirsutum
  unsure (1)..(233): unsure at all n locations
  Clone ID: LIB3493-037-P1-M1-E10
gaaaaaaactaaaaaaaatctctctnaaanaaagagaggggaanggagctctgggctttngcctccnttngtcacacttcgcccacgcgcccacacgccgncctatgaccaccgtatactgtagccagggttcgaaaaacctctcctttttcgtgccatccgtcaggtatcctaatgatctcggcgttaacagtggtaccaacgctagaggggaggcctgagatcgcggtgct

SEQ ID NO: 47542 - DNA, 136 bp, Gossypium hirsutum
  Clone ID: LIB3493-037-P1-M1-E12
agaaataccactacttttaacgttattttacttgttaggtgaatcaaaagcggggcgcggcccctcttttttgacccaatgccgacttcggccaatctatccattcagaaaacattttcatttgtagagtttggct

SEQ ID NO: 47543 - DNA, 460 bp, Gossypium hirsutum
  Clone ID: LIB3493-037-P1-M1-G3
cccacgcgtccgcataaaccctataccttgtataatctgaagcggactttgaagaagaaataagaaacattgcttttgccctgtcattgttcacttgccaagtgtgatattttacagtactgcttaatataaatttgtgcaaattagctactagttctgtgtttgtttatgtcaagtcgtcactctattggaaggtagagcagtagacctctgaatcttcattctatccatcaattatcacaaaagttgaatgtttttcaacattgtttaaattcataaatgaaactgaaaatgttgatatatgttgcttgaattcaaaatgctaatgttcagttgcattgtaagataaacttcctggtttacttgtcagcattctttcttttacaattaaatggattgtccttgtttttccaattattgcttctttcttttggctgaatggttttcttttttttctgat

SEQ ID NO: 47544 - DNA, 452 bp, Gossypium hirsutum
  Clone ID: LIB3493-037-P1-M1-H10
gccgagaagcccctgctgttttcaagtaccaggggacgtactacatgataacatcggcttgcactggatgggcaccgaatgaagcaaaggtagatgcagccgagtcgatcatgggaccttgggagacgattggtgacccgtgcatcggagggaaggaaatgtttcgacttacaacatttttgtcacagagtacatttgtgcttcctctgctaggccttccaggttcatatatttttatggcagatcgatggaatccggctgaattaaacgattcgaggtatgtatggttacctttagcgatcggtggccggtctcttgagtcgaatagttctggatctcaatcaccatggccaagagtgtcaatacattggcataagaagtggagacttcccttgagctggaggctatagaaattaatatgaatgcttcgttagtttttttttttttttctt

SEQ ID NO: 47545 - DNA, 413 bp, Gossypium hirsutum
  Clone ID: LIB3493-037-P1-M1-H6
ctataaggtcagcacggcgatatatgcacctgaggagaaggctcgctttgaaagagcgaccactatgcttcactcatccagagcgtatcccttcctttgtcgcccttaattaccgtcttcttatcgggaaccatcctgggaagcgcgttagcgtcatccgcactaacgcaattagccatgaacatggacatcaaagagatcccatcacccaaagagtgatggatcctgaaaacagcgcatttgtgcgccgtcaagacgtgtaattcccacaagggtttgtgcgtactcaaaggactgttcactgacaaatccgtcacgtactgattcactgccgcttcatcgtcttcttcggtgggggtgggaccttgtgtttggtcgatgaaattggccgatttattgagccggttgttgag

SEQ ID NO: 47546 - DNA, 473 bp, Gossypium hirsutum
  Clone ID: LIB3493-037-P1-M1-H8
cgattccctccgaatccagtttttaagccattttgtttgtattgaaacagttgaatttctaagatttcattgttttgttatatctagggttggggttttgaaatcattgagagattcattgaacttcactatatggcattgatcgactgatcaaccgtagctaaaattgaatcaccgccttttctccgtttttcatatttgagtgaaggttgttgtatcaatggcttccactaaagaaagtgataacacttccgatactccttcctcgcccaaaaacgtgtacaaggatccagacgatgggcggcaacgattcttactcgaattggagttcgtgcagtgccttgccaaccctacttatatccactatttggctcaaaaccgctattttgaagatgaggcattcattggatacttgaaatatcttcaatactggcaacgaccggagtacataaaatttatcatgtatcctcatt

SEQ ID NO: 47547 - DNA, 435 bp, Gossypium hirsutum
  Clone ID: LIB3493-038-P1-M1-B11
gttaaaaaaaaaatcctcaacagaaaaaaggaaaaaaaacaccccgaaaaaagattgacaatggcgttgcagtggatgattctaacgtacgtggttgcagctgaggcagcactggctctcctcttgacgcttccctctcccaagctcttgaagaaccgtttggtctctctcatctctctcattctgcaacctgcccttttcattgttccctttgccggattccagctcttagatatttactggaagaacgagcaccgcttgatgtgtacctctgagatctgcaccgctgctgagagagatcgttacgagaaatctttctacaaatctcaaagaaacgtgattctgtgcgtaaccgcatgcctgctttattggtgcatccaacgcatttgcaagtataacaaggaaattcagagcttggaggaaatagagaagaga

SEQ ID NO: 47548 - DNA, 445 bp, Gossypium hirsutum
  Clone ID: LIB3493-038-P1-M1-B3
ccatggaggagccacaattgctgcagcagcaggaagaagaacaatcacaatcagtatctcttcaagattgcttgaagttactaaaaggcgagcgagacgagcaacgcctcgctggcttgcttctcgtcaccaaattctgcaaaagcgacgatctcgtttcccttagggctatctacgacgccgttggacctcacttcttggaccgtctctcaaggactgggttgggtaaaggtgtattgagcagtggtagtggtgaaaaccgggatgcgtatttgcagctgtcagtgacggttctgtctgcgttttgtcgagtttctgagattgcttcttcgaaagaaatggtttccaaggttccaatgatttttgaagtaatgtcaatgaaatcaggcatgcctgtgcttgaagaatgctatgaatttttatacttggtgtcaactgcttctga

SEQ ID NO: 47549 - DNA, 317 bp, Gossypium hirsutum
  Clone ID: LIB3493-038-P1-M1-B8
cttatctgtcgttcattttaagcgacagattttaattttccggccaaatttccggtcggtttaaaatggatttttcaagcagaagaatatagtgaagcctacgcgctttaagtctatgaacctcttcctcttcttctttttttggttaagatctctttctttccttagaacagaaaaaaaaaagaaaaaggtttcccactaaatcggttgctttcattctaaagttacaaggcaacctcctgtgtatgaaaatcctgttactcttgcttcacaaactgcttttaatgttagtgaggttgtagcactttttgcgctat

SEQ ID NO: 47550 - DNA, 446 bp, Gossypium hirsutum
  Clone ID: LIB3493-038-P1-M1-C1
atttgagtcatgaaatcaatttgcagccttaagatctctccgcgtgttttctatttcaacgaaacaaagaagatccatggcgaatttgcaaaacccggccgtacagaggaaacgtgcgaaggaagccgtgcaaggattcactcgtgggagcctcaactttctaaccgattccagaagcttctggtgccctcctctgctgcactctctcttggtgttttgggcctcgggtatgggtttaggattattgggtcatgggttagggattttagaatttgggttgaaattatatttgggctggtaaaatttgtaaaaggacattgatatttggattttttgtttgtgtgtttttttttattttctattttttattctaatgggcccgggcgaaatgggcctattacaagtaaagttttagaattgtgattgattgaagaattagagtcaag

SEQ ID NO: 47551 - DNA, 363 bp, Gossypium hirsutum
  Clone ID: LIB3493-038-P1-M1-C11
ctcaaaattttaaacccacattcggtctatatctgggtggcgctcttttttccccagcaaataattactccattggaggagcttagggattgatggtgctgtcacatacagtatggatcaaacataaactgaatagttgcccaacaccagcaccatgcgaagattcgacgagcgaggactccattcagatgttcgccctaggcctatccgaaccttagatggataacaactgctatcagactgagatagctgattcaaaaactggcgcagagcttattgatataatcctcccccagggagggtatggggcctaaaataccaccgaccaaatggctttattagcaccgtatatgtgtggatcac

SEQ ID NO: 47552 - DNA, 447 bp, Gossypium hirsutum
  Clone ID: LIB3493-038-P1-M1-C4
ctgcagtaaacaacattgaaggaaatgagtttgagaaaacttgacaggaccaattgaagaaagactcgatacattcaccatcatttgctgagcctatgggtcgaatttctggtgctgttgatgatagccatacaggagagtccggagtggatgcttccgggactagcacactaagtttgcaaggggaggctgataatggctctattaagcctcaactcgatgcacccgtaggtgatgttttgaaatcaagcagtcacaatgatagtttggctggtcagtggggatctgtttcggtttcctcgatgcaatcagataacccggctgcaatcaacactgaaaatttatcaccaactggctcacatccgttgttggaaccagagaaagccaacataaacaaaccatcagcggtattgggagaaaaacatttcgataaatctgatgaattcg

SEQ ID NO: 47553 - DNA, 442 bp, Gossypium hirsutum
  Clone ID: LIB3493-038-P1-M1-D10
gctttgtgttgggatacgtttatatagacagatgggccgataagcatcccgattcactcctcgtatccttgaacgtgcaccgattgctagtcacctgtgtcatggttgcttccaaggttcttgatgatgtgcactataacaatgcgttctatgctcgggttggaggagtgagcaatgctgagctgaacaggctagaattagaactgcttttccttttggattttggagtggcggtgagctcacaggtttttgagacctattgtttccacttggaacaggagatgttaattaatggcgttgatcagaaagttgaaagggggataagccccgttgctgttgatgagattgtgactgacatcggttgattgtttcgccgtctctcaagccatgggattggccccaagttcctatctccgtctctctcgtcttaaaatggggtctt

SEQ ID NO: 47554 - DNA, 445 bp, Gossypium hirsutum
  Clone ID: LIB3493-038-P1-M1-F2
tgaaaaccaaggtcttaagagattaaatggagggttccttggtgacaacaatagaggtctatgtggaacaggctttccaacattgagagtctgttcacgttttgacaatatgaacatcaaccagcttgaacctttccaatctgatctgaatgacacggttccaagggttaactcgcatatagtacataaccaaggacattgcaaccacactcattgctcgaatccgctgagattcccgaaattacctattattacagggattattacagtcggtttcgtttttatgttttctgtatttcttgcaattttccactaccgtaggaagaaacaaaagattggaaacacatgtgaatcttctgatgggcgccttagcactgaccaccaagcaaaggaacttcaaaggaatggaagtgtttctccgcttgtaacactcgaatattcatat

SEQ ID NO: 47555 - DNA, 331 bp, Gossypium hirsutum
  Clone ID: LIB3493-038-P1-M1-G1
cggacgcgtgggctgatgttgagagtttgcttggaaagggtcttgagaatgagtcctttactatggtggagctgggtctaacaggctccaaagacaaagacttgagggagtattcatacggaaacggtcaagtgaagattgaagacgaagagagttttgaaggtggcatggggagagaaccctttgagtttagctttaactatgactctccaccaagctgtggaggggtggatgagatcataaaggaagaggactcaatttatattaaagaggctggtgaatgccatgtgaatcctgcgaaaattaagaacccgtggacactaccgagctt

SEQ ID NO: 47556 - DNA, 432 bp, Gossypium hirsutum
  Clone ID: LIB3493-038-P1-M1-G4
ctttcccgaagacggctagccatggcaatatcttaatcgctaaggtatacattcaaggttgtactccatactccgctgagaataaccgggcactacagacactgctagtgctgtgacgcaatcttgtcgtaccaaagatgttccctaagaggaccagcatggtgcaatgctacatgcagggcgaagatacaagtagggtagttccaagggggaacaaagagtcactagcgagagctgatactgaaccacctgctaactcttgaccacgtgaacacagggaccgaaacagtggtgaggtgtgagatccgtacaccgattcgaacgaccagaataaggcgaggcacgcaacatcactctctgactgagtatattgatggtgaccaacatggaagcgcaggaaccatacgctgcctgaggcaacgatatgcatga

SEQ ID NO: 47557 - DNA, 201 bp, Gossypium hirsutum
  unsure (1)..(201): unsure at all n locations
  Clone ID: LIB3493-038-P1-M1-G5
cggacgcgtgggcatgtacccctaaaggatgcataganctgttncatagatatggtggtgatattaaaggaaananggctnttntnatttgtcggagtaatatngttggaatgcctgcagatttgttactgcaaagggaagattctactttaactattgttcattctagaaccaaaaattctgaggaaattatcatgaaag

SEQ ID NO: 47558 - DNA, 445 bp, Gossypium hirsutum
  Clone ID: LIB3493-038-P1-M1-H3
cccacgcgtccgatcgaaatgctgcgcaagaagttaatgggatttggttctataatccgcgtgaatgtgaggatgttgcaaacctctttagtagaatacttaatgcatatacaaaagttcctgcaaagccaaagacatctgcaagcaaaagtgaatttgaggaactagaagctgttcctagcatgtctgtaatagaaggtcccttggagccaccagcaactgcctctcgtgctactgatgctcctcaagattcatcatttgttaacttctttagtgctgctatgaatcttggaagtaatgctccaaatggtacaaaaccaacacagccttaccattctatctcgaccacccctctgtcttctcatgctccaactgccatacccactcctactcctgctccatcagtgtcatcccttccactttctgctgcacctttggttgattc

SEQ ID NO: 47559 - DNA, 258 bp, Gossypium hirsutum
  Clone ID: LIB3493-038-P1-M1-H6
tttgttttcgccggtaagaagcgaggaacaggaaccgaggactttgactgggatgatagttttcgttccaacaaattaatgttggcaagacttggtaactgaaggcgacacttcttgtaggttagacaactctggccatgaattcggtgaccatggtggtgattagaattgttcaatagccttggtgggatatatcgctagccaaagtgggatatatctgattaacaaagaggtcaaagttatgggatacacattact

SEQ ID NO: 47560 - DNA, 442 bp, Gossypium hirsutum
  Clone ID: LIB3493-038-P1-M1-H9
ttcaggccctgaaccttctgctgtgacatatcaaataatacttaaaatactagttgaggggaacaaatttaaggaagccgaagaagtttttgagacacttttggagaaggaaaaatatcctttgaagcctgaccaaaaaatgtttcacatgatgatttatatgtataagaaggctgggagttatgagaaggcccgtaaactatttgcgctgatggctgaacgaggagttaagcaatccacagtcacttacaatagtcttatgtcatttgaaactaattacaaggaagtgtcaaagatatatgatcagatgcaaagagctggtcttcaccctgacgtggtgagttatgccttgctcattaatgcttatggcaaagccaggaaggaagaagaagcattggctgtttttgaggaaatgttggatgctggaatcaagcctacccat

SEQ ID NO: 47561 - DNA, 217 bp, Gossypium hirsutum
  Clone ID: LIB3493-039-P1-M1-A11
caaatacttcaatggaactatatggagatgctgctgaattgagtcgagatctttttgataatacacaaattactttcactatggatgaagatgattgtgttgatcctatattgtctgtccttgtaactgaatacagtactgctaatcactcaaatgatccggcattatattaacttggagatgatgaacaactggccgatactagttgatgtatatt

SEQ ID NO: 47562 - DNA, 447 bp, Gossypium hirsutum
  Clone ID: LIB3493-039-P1-M1-A12
aacatattgaatacacgcactaacttattctgtgctttcaacgggatcgaattctgtaagttgccttggaaagcacgattcggcatgtatgtgccggccaagcagcaaccactacttagatgcatctagtctcatcaagtcctgctgcaccttgtacatgttaaatactggtctaagtggagaccttttaactggtaagtaaagctgattctactcgcattgattgattaagtgggaagacttgaaggctaattgtgtttgattactttgctgctggtttctgcaaagtttgttttttttttttttcaaactcagtgaataccattgccaaccactgtctcacacattctaacccaatatgatgaacatcaatttgtaccttatgactctcgtatgtaatatatatttatattggtatgaatatacacgtgtccaaaagatgggact

SEQ ID NO: 47563 - DNA, 429 bp, Gossypium hirsutum
  Clone ID: LIB3493-039-P1-M1-A3
ctgttacggttgcaggtaccaattccgaattcgagccacgagtcacgcgtatttggaaagattggatttttagtttcgagagttgatgtacaaagcgatgatattgagctcgtttctgtttacgatatgttatgatattgtgaatgcatgatatacatgttttagtacgatagtgtgtcacggtgaatggtagcattatgagcttaaggtgaaggacttatagaccattttctttggtgaaatggatgtcacagttttaggcatgctaaagcttgcatggatacatattttgtggattcacctgggcttgtcgctaagtttccagacgtgcgatgagacttgtttttgtggagatgggtgttggttatgatcaacatgggcgagataatacattagcagcttttgagggcttgcagggatgctatttat

SEQ ID NO: 47564 - DNA, 383 bp, Gossypium hirsutum
  Clone ID: LIB3493-039-P1-M1-A9
cagggactctttgcgagagatctgatggtactaaaaatggcaaccaacaacttttagaggatagtcaagatccttttgcatttgatgatgatgattttgtgccttcgaagtgggatgtactatatggggaaaaaaagaaatccagaaccaaaaaacatgggaaactcgggctaagaaagagagaaatccaagatgagcatcatttccaatttaaaatgagccaacaagaatcaagtaatggggaaatttgccagagagaaaatgaagaatatcatcattctaatgcaacttcttgttctcaaagtactgaagaagaatattccagtcttctgtcagactgccttcttgctgctgtcaaggttttgatgaacttaacaaatgac

SEQ ID NO: 47565 - DNA, 288 bp, Gossypium hirsutum
  Clone ID: LIB3493-039-P1-M1-B2
cggacgcggggcagcaacaggtgagaggcagccaagggtatcattgtgggagattgagcctttaacaacatttccaatgtatccatctctatttcccctcaaattgaaacgcccttggcatccgggttcctcatctttgtttgataacagagatgatatatcttatgggttaacctggctaaagggaggatcttgagagcaaggactacaatctctgaaatttcaggccttctgctcatattcatggatgccgcagaaactaaatttgagtttccctgggaatgatta

SEQ ID NO: 47566 - DNA, 471 bp, Gossypium hirsutum
  unsure (1)..(471): unsure at all n locations
  Clone ID: LIB3493-039-P1-M1-C2
aggtcactcatctccatctgatgctcctaaagtgtacaggttatgtatagtgttccttacttttagctgtattggatatgccatgccattcatactatgtgcaacaatttgttgctgcttgccctgcatagtttctatccttggtatccaagaggatttttcaccaaccagaggagcctccagggaaattataaatgcattgccgacattcaaatttaaatccaagaaaaccggaaatgtaaacaatcaggaaatttcagctagtgaagatggggtcctggctgcagggacggcaaaggaacgtgttatatccggggaagatgcagtttgttgtatttgcttggctaaatttgcagatgatgatgagctgagggagctgccgtgcctncatgtcttccatgtggagtgtgtagataaatggttaaaaatcaatgcgtcttgtcccctatgtaaaaccgaaattagtgagag

SEQ ID NO: 47567 - DNA, 446 bp, Gossypium hirsutum
  Clone ID: LIB3493-039-P1-M1-C4
caattatgtaaatttagtgccttatactctgatccatcgtctttaactttctttgctcattttcctggaaaaaaaaaacgaaaaagaagttgttcaacatgaacatcttctatcttcgctaaacctttttatctttactttgaaactcacaaaatcatgtaatttacatgatcgcaggttcaaaactctcgtttgtttccaatagctgatattcttgatcattttcagtctttttttcttttacctcacttagaagattattgaaggaagagggaactaaagccagttgtttagagtttcgataaaaactaaccatggaggagacctttgtgcctttacgaggcatcaaaaatgacctcagaggcagattgatgtgttacaaacaagactggactggtggctttaaagcaggcttcaggattctggctcccaccacttacattttc

SEQ ID NO: 47568 - DNA, 480 bp, Gossypium hirsutum
  Clone ID: LIB3493-039-P1-M1-C5
caaattaccactccagttcccattacctttcgctgtgggatattccctccctgtcaaatttatttccaaaactggatcaagaaattccccactgcccctactttccattagactgttgacatttgccccctattatgcctttccccattacttcctctcccttgtccctcactttcttcttgcaaccaaacacttgtcattgtttgagctcgatgagattgcgccctaagtgataaatcccaccccatctctttagcttccacacctagctccatccttgcttcacaaaaggaatcactatggcccaaactaccacaataaaagcaaaaaagtgagtctttcatatctaaatcgaacatatgagcattttccatagcacattatttgttttttcctttttaatggacgccttatatcaattctcacacgaatcctcatgaagtttttaccttctttccccatatttgatccatcatattc

SEQ ID NO: 47569 - DNA, 507 bp, Gossypium hirsutum
  Clone ID: LIB3493-039-P1-M1-C9
ctaaacccctgcgcgctccggtaccaattcccattccacccacacctacgcttccgattcaatatataagaaaacttacgctggaccggctcacaataaggtgaacaatctccctcaactctaccttctaaatcttcaatatcacttgcccattcacgttctacatactgatctaagtctaaactccaatgctaccattccaaatactaatattcataaagagtattttgcccagcaacatcacaacacacctagagctcatctagattacgaatcctcatattgcaagttacatccaaacgacactattctcaatcttcagaccacaataccttactacatgaaaaacctagcacatatttccactatctatgtccggcgtgaatgtacaataggtactgactgcccttataaccatgagatgccctaaactgccgacttgtcccatcaaaatataaaacaccgtcacttatccgtgaatgatccaattgcactaaacctacttaa

SEQ ID NO: 47570 - DNA, 344 bp, Gossypium hirsutum
  Clone ID: LIB3493-039-P1-M1-D10
aaccacctttctgagttaatagacagtgggcatagttttccatgttccctttttatcgttaatttcttatgtcctttatatatcctattggtattttattttaattcttttgctcatctttagtccaagatgattgtctcttattaccatatacttttgctttataccaagtgaacaaaacagaaagaaacaatataatacaagaagtttgatattaccttttctaaaattatgagtccataggagtttgacatcatcaaacatgcaattttatggtttctggtagaaatgattttttgtggtttattggtagaatgagaaaatggcttgctaggtgtttttta

SEQ ID NO: 47571 - DNA, 575 bp, Gossypium hirsutum
  unsure (1)..(575): unsure at all n locations
  Clone ID: LIB3493-039-P1-M1-D5
taatacganctcactatagnggaaagcctggtaccgcgctgcgaggtaccccggtccggaaattccccgaggtcgaccccacgcccgtcccgcccaccgcgtcccgcttaaattccccttttgcaggcgagactcggagattgggaattgtgtgcccatatagtnnccccttggtcaatgnngtttctttgcccnnngtaaagcgaaggggaggataccccgtctaagtagttctctttgcggagtcgtgtcccaaggggtgttcaaggggagaaaaccttcggagccacaaataaggatccctatatctcgaaacggtagagagagttgagctggaaagctatggatgtaccaccggcaccaacttgcactgtgcctgggttcttcatcaagggggatgatgnttnntctcctattcccggaacaacccaagagttaaaaatctagaacagcaaccattgaatcagtcgaaagtaaaagctgacanaaagaagatttgaaaggaaattacagaatgcgatcccaatccatgaggttgcagggggtacttatcctgaagggttaaagcaattcac

SEQ ID NO: 47572 - DNA, 188 bp, Gossypium hirsutum
  Clone ID: LIB3493-039-P1-M1-D7
cggacgcgtggtcggacgcgtggggagggaaggagagatggcggctgtaataaaatctgcaatcttaattctgtcagtgtttttatgtgtacgcttcagttcggttgttaagctgctctaagaacagactaatgagaaccctataaacatagaggctgttattaagattgatgcactcagccctaccg

SEQ ID NO: 47573 - DNA, 280 bp, Gossypium hirsutum
  Clone ID: LIB3493-039-P1-M1-D8
ctagagattgtcatctctctcacctatggcttggggtgttcaagaaagacgggagctaaaacctaaaacacatatgatatctcttattgccatactgcaggactcgatttcttctacgtccatcttatgtctgcatatggtgcatcatacaaatataatgctgatcgatgtgatataaaagagctttaataatctcatggaagcgggagcatccgcagtgctccatcttcaatgataaagctcgagatctaaccctgccacaccctaatgctaatgcagc

SEQ ID NO: 47574 - DNA, 327 bp, Gossypium hirsutum
  Clone ID: LIB3493-039-P1-M1-E5
caggattactaccctggctttgcttacagctgggcgaggatccattggtgggcccagcttcaccactccagcaacagcaccacaaagcctgctctgttgctgccaacattgcgatttggagtcgagcagaatcattggatgaattagctactgtgttcatggcttactctggaggtgagattacaagcattgagaatctcctggcctgcgtctcaccaatgatgagcgaagaatggcagcctatgcactcacctataactactggacactagaaacagttactggagagaggcccattttaatatcaactacttaaaatgctaatgc

SEQ ID NO: 47575 - DNA, 447 bp, Gossypium hirsutum
  Clone ID: LIB3493-039-P1-M1-F2
cagcatatgacattgtggatctccttttgccttgagtctggaagaaaccatcagcttatcgaggccagcatatgtgcactcataaagtgggcaaagaccgcacgccactcaaatcagacatggtcaaagctggagttattgataactgtcttgaggtactccctcttgcgtccagttcattgtcatcctcaatcgcagagttgttccggattttgacaaatagtagcgccattgctagaagttcagatgctgcgaaaataatagagcctcttttcatggttttacttcgaccagatttcggtttgtggggacagcacagtgccttgcaagcacttgtaaatatcttggagaagccacaaagccttgcagctctgaaattgactcccagtcaagtcattgagcctctgatttcatttttggaatctccatctcaagctatttagcagc

SEQ ID NO: 47576 - DNA, 286 bp, Gossypium hirsutum
  Clone ID: LIB3493-039-P1-M1-F3
acgcccacgcgtacggtttctgaaaaataccataggtgatagggtgtttcttttcacttttttaataataagaatatatagtaatggggagaggaagagtggacttgaacaggatttacaacatgcatggtcaacagttgacttatgcatatatgattaatggtactctaactagggattatgagattgtaatgcttaatcatacagttgttgcttattttgacatatagtatcgcggttgttagaagcacacatgctgcgataataatatagtttatatacatgg

SEQ ID NO: 47577 - DNA, 296 bp, Gossypium hirsutum
  Clone ID: LIB3493-039-P1-M1-F7
ctaactttgttgttaattgtgggtgtttggagagaacgatttgaaggaaggaaagtctaacaagatgcaggttctcttctattattctcaaatcaccttgtatttgcccacagcgcatacggaacaggcgcactcatgaacaacaggccctgcaagctcatattgacaaacgcctgataagaacccacaaacttacatttcaaccaccagctgatgaggctccacatacaatatccggggacatcttttttgtcatggaacaaacacaacaccccccacttgctgcgtcctttttt

SEQ ID NO: 47578 - DNA, 448 bp, Gossypium hirsutum
  Clone ID: LIB3493-039-P1-M1-F8
attttataaacaacactgatctctacttgaggggacttctctactccaatgtcctttgcacttcttcaaagaacaacgaatgttcaggcaaagtcgacatcaagtattacaaggtgccaggttacaacatgaccggaccggctatcatgaacggaaagaaaaccggaaatctctatccggctttcaccagagtcaaccatggtaaatatgcggcgagtgacgtacgtggtcacattagcaccagcaatctgatatgggattatttctacacaacagccggtgttagcttcggaacgtataatccggccattgttgctcagcttcaagaaatcttcgatgcagattggaattctccatatgctgttccagttgaggggttgagtgatggtcatgcttgttctagttgatctagttccctcaaaacactgaaatcaatggctttgtaata

SEQ ID NO: 47579 - DNA, 442 bp, Gossypium hirsutum
  Clone ID: LIB3493-039-P1-M1-G4
cgatatttctggctctgaggtctcctgaagtggaggtggtcggactcaccactatttatggcaatgtctacactactttggccacgaggaatgccttacatttgctagaggttgcagacaggactgatatccctgtggcggaaggatcacatgttaccatcactaaaggtacaaaacttcgtgttgctgattttgtccatggtgctgatgggcttggcaatcaaaatttccctcccccggaaggaaagcctattgacatgtcagctactgatttccttgttgagcaagcaaacctctatcctgggaaggtcactgtggtggcattggggcccctaacaaatattgcactggctattcaacaagatccatcgtttgttaaaaacattgggcagattgttcttcttggtggtgcttttgcagtaaatggaaatgtgaatccagc

SEQ ID NO: 47580 - DNA, 236 bp, Gossypium hirsutum
  Clone ID: LIB3493-039-P1-M1-H11
tccccacctcgtggggttctggttctggttgttggaatggcttttctctttgtgcatttaaatcacactatctttgattcatgcatgatctcaaattgtatgcctctgaaaggactctactgaagcttaaaacattgcctactttataacaccaccgttacaatgtcactactgtccctcatctaaactaaggacctgtttcatggtcaaagcgaaattattgcttctaacattat

SEQ ID NO: 47581 - DNA, 422 bp, Gossypium hirsutum
  Clone ID: LIB3493-039-P1-M1-H4
gccagtgccaacttttttccgaatttataagagcaagggagttgatgagtttcagccatacccgtatttgtgcacagttctgaactgtattttctggatgttttatggtcttcccattgttaaaaaagacaacattctagtcttgaccatcaacagcgttggccttgtcattgagttgctctacttaaccgtatacgtggtttatgctaatgatcggaagaaaaggcttcgtgttgctcatatcctcttggctgaagcagcattgacagtagccgttgttctcattgcaatgctctgcttcgacaaacacagatctcttttcgttggaattatagctgatgtttttaacatcattatgtatgctgcacctctaggcatctggaaaaaagttatcactacaaaaagtgtggagtatatgccat

SEQ ID NO: 47582 - DNA, 288 bp, Gossypium hirsutum
  unsure (1)..(288): unsure at all n locations
  Clone ID: LIB3493-039-P1-M1-H8
tataacctactattctcaacactataaggcggagggtttatttgtatgtcgggaatataaaaacccatcacnaacattgttgactttttattgattttcaaacctataatcaccccatttactttacctattaaggaagagcacaagatcttcttcgacagaatcatcattcctcttaacaagccaaaacctctagaaaattattctcaacaattgtctaatcgaatctctcacttcattgataatgaaccgaattcatatactacattaatacaggggttgttgaat

SEQ ID NO: 47583 - DNA, 346 bp, Gossypium hirsutum
  Clone ID: LIB3493-039-P1-M1-H9
gtggcctctccgacatttccacgtggggcgcggcacagcggcttatctacaccgacggtgtcactaattcacgagcacgcgtgttgggcggcagaagctgactgaatgcggggctttatacacgcgcttctactgaatatatcaggcaagcggagtgggatggaagattatggaaccgatcgtacaagtgggttgacaaatcagtggaattcgctccacagtgggcgcattgctcatctgctgggaagcacggtttgtataatgaaccgtcagaagaaaaagccaaggatatggaaagtgggagtttatattgctgtaagtggggtagtaattgggactatcattg

SEQ ID NO: 47584 - DNA, 539 bp, Gossypium hirsutum
  unsure (1)..(539): unsure at all n locations
  Clone ID: LIB3585-029-P1-K1-A10
cccacgcgtccgactttaccaaagtttcaggcaaaaaaagtaaagagaggtaataatataggccaatgggatttctaaatatcttcattgtagcactgatgccagttcttaaggtaatattgatgactgggattggcttcttcattgctttggatcgcataaagctcttggggcctgaagcaaaccaccatttgaacaatattgtattctatgtgttaagtcctgcaattgccgtctccagcttagctgaatcgatcactttccaaagtttcattacattgtggttcatgccattgaatattctgctcacattcgtcttcggttcaatactggcttggcttctcatcaaaatcactaaaactcctaaacattttcggngcattgtcattggttgctgttctgccggaaatctagggaatctgcctttgattatggttccagcagtgtgcgaggagccaaataatccatttggagatccatctgtttgttccttacttgctaggccatatgcttcactatctttaagcgatggagggata

SEQ ID NO: 47585 - DNA, 518 bp, Gossypium hirsutum
  Clone ID: LIB3585-029-P1-K1-A11
cggacgcgtgggaaagttttcatctttacccttctcatttctttctcatctgagcattttcttctttttttttaaacctctgattcccatttccttccaaccttctccctctttttcacgtccgaagcatcatttccaaccctatctaagcttgaacctagattcaacttcaaatcaaaagccaccaaatttttacctaccagcgaacagtcctcttagcctccacaaattcatcctcgtgctccggctaaaatcagggtcaacagtttcaattttctctcaacaaaaacacagcttgaaatccagatttctcagttttctcaagaaaatccgacttcggtatgaaaggaaagggctaacaatccaacacccagatgttaaatcggtgctgaatcgagtgaagcagttcactgacaaggttcttccattcagccttcttctgtgttggttcttccgtagtttcctcaagaccgaaggttggcaatcacacagcagtattgggaagagctgattgagct

SEQ ID NO: 47586 - DNA, 549 bp, Gossypium hirsutum
  unsure (1)..(549): unsure at all n locations
  Clone ID: LIB3585-029-P1-K1-A4
gaattatggagtacatgagatgaaatccggaccacaggcgttcccgggttcatcatctcaaccattggattatgctcttaaagagacaagtccatttcttggaggaggacgaattgttggaggccgagtcatacgaggagacagaccaaccagcacctatgaccttgttgagcagataagattcctttttgtccgagtggtgaaagcccgagatcttccttcaaaagatgcgacaggcagcctcaatccgtatgttgaagtgaaagtaggaaattacaaaggaatcacgaagcattatgaaaagaaacaaaatccagaatggaatcaggtgtttgccttttcaagggaaacagtgcagtcatctgtgctagaagttgttgtgaaggataaggatttagtgaaagatgactctgttgggttcgtgcgcatngatctccacgaggtttctacaaagggttcacctgatagtccgttggcttcggaatggtatcggttagaagattagaaaggagagaaaaagaaagagaactgatgcttgcagtttggtat

SEQ ID NO: 47587 - DNA, 471 bp, Gossypium hirsutum
  Clone ID: LIB3585-029-P1-K1-B3
aaagagggccgatattgcaattcagcttcggctatgtaacagcacctactacgcacattccatgaaaatgtctgctatagtctatggggcttgtaaatagcaacgccttgagctgatcatgcttgaattgacgctcgtaatgtgtcgaactcaagagttcttgaaaagaaaagatcagtttggcgatgatcctatggcctattgaagtttgtgctctgtctctcaaattaaggggccatgcttgtgagttgcaatgcaatttgttatggcagtgtgtttgtgataaagaggaaatcagagccaaagatttcggtcaacctatatgattgggtaatacgtatagatcgacatcaatgctatgcaccaactccggacgttctctgctatatcggaaaagagagatgatactctgaacttgtagcatggcatggatatatatatacgcccatatacggagaggaccattcactt

SEQ ID NO: 47588 - DNA, 564 bp, Gossypium hirsutum
  Clone ID: LIB3585-029-P1-K1-B6
cactctcttcttgctttgcttactactctctgctctatggctgttttctattcactttacccaacttctattactcatttttctccccatttttttggctcactcgcagccttttttttttttgttccctgaaccttttctttgaacccaaacacaaaaccccaaagaaacccactttcccatttaacccagggtcaataactccacgatccaactctaacccaagtgcctaattggacaaagggggaattattgttgtactttaaaatggtggatttgtcatggttgagtgccatcctagttggggcgggctgccttgcactagggtactgcattggtaggcaccgtcctacatgtttatttctctcatcaagaggagctaaagatactacagtctctaaagtaaataagaagatcaaagaacccttggaaatcgaaaagttggcaggcattctagaggattttaaaatggtactggttgtaagaaacgatcttaagatgggtaaagggaaaaatgctgcccaatgcagtcatgcaacttttggtctttacaaaaaactccta

SEQ ID NO: 47589 - DNA, 445 bp, Gossypium hirsutum
  unsure (1)..(445): unsure at all n locations
  Clone ID: LIB3585-029-P1-K1-C9
cccacgcgtccgcccacgcgtccgcccacgcgtccgattatctgtttagttggtgagattaagtttctttttcaaattaatttgattactttcctctggttagccatttaggctttgtggtcttttctagggttgtttcagaaagaaagggaaattgcatatatttgtttattgtaaggtgccaaggattgataatatttgttcaaatgaaaaaccgccattgaggaagagggagagaaatggaggttagatctgagaatagtatacaagtgaggtccgacaagttccctagtacagtgattcctaagacttggcttcaaggttggttctttagaagttggtccaacattttggtttggacttgtttggtacacatcgtcgccgntgctgagctatggcatcctcgtttgcttaccggttttaccagccggatttcctggatcac

SEQ ID NO: 47590 - DNA, 475 bp, Gossypium hirsutum
  Clone ID: LIB3585-029-P1-K1-D1
cccacgcgtccggtctctttttgaattagtttgtcattcatcaagtagggaaaggatggaagttcttttcattgataaaaatcttctcaccggagaaattccagattgctggaatcaattagaaagtttgacatttttgaatttggggaacaacaatttgaccggaaaaatcccaccttctttgggacgtacaggtcttgactggctaaaccttcgaaataatagcatgtttggagaattaccatccacattgcaaaatttaacgaaattgcgcattcttgatcttagtgaaaatcatttcagtggaaatattccgacatggattggtgacaagctctcaacacttatgattctaagccttcgatcaaataattttgacggccagattcctcataaaatttgtgatcttcaatatcttcagaatttggacctttctcgtaacaacattttaggagctattccaaaatgttttagt

SEQ ID NO: 47591 - DNA, 615 bp, Gossypium hirsutum
  unsure (1)..(615): unsure at all n locations
  Clone ID: LIB3585-029-P1-K1-D7
cccacgcgtccggcatggagctgcagttgttcaagacaagatgtatatatatggtggaaaccacagtggtcgttacctaagtgaccttaatgttctagatttgagaagttggacttggtcaaaagttgaagctagtattgaatctaagtcagaggaatcaccttctccagtaaatatagccccatgtgctggtcattcattgatcccttgggagaacaagcttctgtcaattgctggccacacaaaggatccttctgaaaccatccagattaaggcatttgatctgcaaactggtacttggtcaatattgaagacttatggcaaagcaccggtctctcgtggaggtcaatctgtgacccttgttggatcaaccttagttatatttggtggacaggatgcaaagcgaacacttttgaatgatctacatatacttgacctagaaaccatgacctgngatgattttgatgctgtgggggtacctccatcacctcgatctgatcatgctgctgcggtacatgcagagcggtaccttcttaattttggtgggggttcacattgcacatgcttcaatgatttgcatgtcctagatttgcaagctatggaatggtcaaggcc

SEQ ID NO: 47592 - DNA, 514 bp, Gossypium hirsutum
  unsure (1)..(514): unsure at all n locations
  Clone ID: LIB3585-029-P1-K1-D9
cccacgcgtccgtcagaatctttcagattactccctgatcctcctcctcctgagtttccattggcaccaggtaactggaaaggaacaaaaacacagttcgggaattgtggaaagggcaagtttggcagtccaccaggaatggcaaactgttgatgtccaatggatgggctttccccactatgttccaccttcatggtgtcagccaatggcgcataagaccctggaagtacagcgtttcctggagaccaaactaatgtgtttgcagaaggatagacgtaggatttctcatatattgatgctgcagcagcagcagcctgcagcctcgcctgatgaggggtcaaatcatcagtggccatctcaacaccaggaccttgtgtagctgaactcgtgctggacccttgtcgaggagcatctgaccaagttccatgttgccctccagatgaactngttccgttttcaggtggtacaacaagtgctctgcaggttggacaggtatgctgnctctccagccatg

SEQ ID NO: 47593 - DNA, 527 bp, Gossypium hirsutum
  unsure (1)..(527): unsure at all n locations
  Clone ID: LIB3585-029-P1-K1-E5
acgcgtccgcccacgcgtccgacagtgtcacatggtctgggattggtttaaaaatggaaaaaaggtgagctcttttccatgatcggatcgctcatatgtatgcttatggccttggtttttttattattttagaggaggaagaggcctagttagctaagattaatggatcaagagaaacggggtgttcgcatagggactagtatgaacttgagtcaagttggggaatgtgtcggtggaaattcaaagaattcggttaatggggttgtgtctggaaccgccattgtggaaaattctgaagaaaaattgtgttctaatggagaaaattcggatttgagattgcaaaatgatggctttgaatcgtgtaagaatcaggagatggattttgggagaggaattggtcagaatgatctgggaactaacgggaattcaaatagtttaattgatgcaaatgtagtggtatcatcaagtgaggngttggttgaagaaagaaatgaatcgatttacgaggagatgaatgaaattagagg

SEQ ID NO: 47594 - DNA, 537 bp, Gossypium hirsutum
  Clone ID: LIB3585-029-P1-K1-E7
gcctaaactcctaggttttttcccatgtctgtcaccctctcctcttctttgagtggagccgggttgctgccctttctcctctcctttagttgctgtttttgcagtaaattcattgttatttctggcctccaaaatcattccttttgttgccaaaagttcctcttttgttctgccctaatcagatctcttctgtcatcacctgtagtggtgttctgccctttgatcaccacttttggggtcgccatttttccttcttttactgcactatctgatatcttattccatcatttattcctctgttataacagccccaaaattttcaattgagtgtgcatacgatctctgttaggttgttgattcaaatctaggaaatgatatctgtaaatgcgaattataccgtttaaaatttgatgttacgggtcgattgttctagggccttagattgatttttacgtactgacttttaataatatcttggcattagttatagattttaacaccccggttcagcagtgaagtcagatcttagccgcacta

SEQ ID NO: 47595 - DNA, 419 bp, Gossypium hirsutum
  Clone ID: LIB3585-029-P1-K1-F11
cccacgcgtccgcccacgcgtccgataaaaaaaaaaaaaaaaaaaaaaaaaaaaaaaaaaaggggaagaaataaaaaaaaaaaagaaaaaaaaaaaaaaaaaaaaaaaaaggggcggccgttttggggggtccatttttacgtcccacgttcttgcaacgcgaaatccttcgtataaggccacctaaatgcaatccaatggccatttttttacaccgtgtttactgagaaaaccctggggaaacccatcttaatccccttgcaaaacatccccctttccacacctgttttaatagcgaggaggcccgcaccgagcccctttccgaacatttgttcaacctgaatggcaaatggaacgccccctgtaacgccccattaagcgccgcattaatggcggttactctcatggttacccctaca

SEQ ID NO: 47596 - DNA, 497 bp, Gossypium hirsutum
  unsure (1)..(497): unsure at all n locations
  Clone ID: LIB3585-029-P1-K1-H10
gatcagggatgggattatatgcataaggggatcaaaaagctaaggaggattttggaaggacttccagagcctccgtttacctcagaagaatatatgatgctttacactaccatatacaacatgtgtacccaaaagccgccttatgattattctcagcagctctatgataagtaccgagaggcatttgaagagtatattacttcaacggttttgccgtctttaagagagaagcatgatgaattcatgctgagggaacttgttaaaagatgggggaaccataaagtaatggtcaggtggctatcacgcttcttccattaccttgatcgctacttcattgctaggagatcactccctgcacttaatgaagttggtctgacgtgcttccgcgatctggtatatcangaagtgcatgccaaagtcaaagatgctgtaattgcccttattgataaagaacgtgagggagatcagatagaccgtgcgttattgaagaaatgtgt

SEQ ID NO: 47597 - DNA, 645 bp, Gossypium hirsutum
  unsure (1)..(645): unsure at all n locations
  Clone ID: LIB3585-029-P1-K1-H5
acgacatgcggagaaggtaatatttcctaaactgagtgtttagagaaatcgtgagtttttaagagtatcgcggctcttacaaggtcacgtcgtctagtaaaagaaatttaggggttcacgtacacaaatatgcccacacctctgctttgtgccgagtacaccacatatattttaaaaggatattacagtatttacagaacaccacattccacactcttcattctttttcggaattgcattaacaatatttccaagtacacaaccagtgacattctcttttttttccattgacttttttntgcnncacaaaaacnacccccaattattattttttccattcttcctcaacatttaaagtttttgggggaagcaggaaaacaaagaacatttggannaaggtaggaaattgcttttgtaaaacttgctttttattnnnaaaacctctttttctttaccttgagaaaaatatgttgtattactccaactattttaattttctgctttcaaaactgtcttttcaaaggtttgaaaaaggccaatttctttaatttctttcccaccatattttcgataatcccagatgnttttctttgggcccagtcgagcaacaaaacatgaaggaagcctgaaccacccaagtttttt

SEQ ID NO: 47598 - DNA, 523 bp, Gossypium hirsutum
  Clone ID: LIB3585-035-P1-K1-A11
gcatactatcaggtatggaagtgatggagtgcaggttacggcaggcagtcaggtgtttgaaggtgatatggcactatgtactgtgcctcttggagttttaaagagtgggtcaataaagtttgttcctgagttgcctgagaggaaacttgatgggataaagaggctgggatttgagttgttgaataaggtcgctatgcttttcacttatgtattttggggcacagatcttgatacctttgggcatcttactgaagatccaagtcgccgagggaagctatttctattttatagctatgcaacagttgctggtggacctctattgcttgctacagtaccatgagaagctgcacataggtttgagactctgcctactacacatgcagcaacccaagttctgcacattctcaagggtatatatgaaccgcagggaatcactgtccctgaacccctccaaacagtctgtactagactgggtggtgatccctttagcctacgatcgcactctaatgttgctgtgggagca

SEQ ID NO: 47599 - DNA, 262 bp, Gossypium hirsutum
  unsure (1)..(262): unsure at all n locations
  Clone ID: LIB3585-035-P1-K1-A2
accccgacagcaaaancagcaggagaggaccaggangaagagcangcngaccggcacacagccaaacggacanccacaanganaccaccgancacgaacaggaggggcaaccgaagagcaaaagcaggcgggcgcagccgaacagacaacagnggnancccacacaggaggcgncgacaagggggagcangcagcagcngcgggggacaggcgcaacacgacccaaaggcaaaacggcngaagggaagaagaggaaggacac

SEQ ID NO: 47600 - DNA, 419 bp, Gossypium hirsutum
  Clone ID: LIB3585-035-P1-K1-A3
gacgccttaacatcaatatcaggaggcgaagactcgaatcactagcctgctgatacaacgtagtgacagggacatccttaacgataccaccgatcactatcatgatggacaacttaatatcaatagcaggcgggttcaggcgaacaatctacagggtcgtccttcacagcagtcgtctactaggaagagctaatgttacgctgccgtgtatctggctcaataagtatccttttgctaaagggctcatggaaagaagacgatggacacgtacgatcgctagcgtctggtcaggtcttatgggcatcaccatatccctgcacgggggtggaatcaatccgtcatgcactactaaccagactggatgatcattccagatcccttgattgaacattccttatgttaaaggagcaacactaggg

SEQ ID NO: 47601 - DNA, 551 bp, Gossypium hirsutum
  Clone ID: LIB3585-035-P1-K1-A4
gaattgaccaaagcaatcgaaagggctggccttgacatgcgtgtagcagctggggtcaatgatacagtcggcacattggctggtggtagatacaacaacccagatgttgctgctgccgtgatattaggtactggcacaaatgcagcttatgtagagcgcgcccatgcaatccccaaatggcacggtcttctacctaaatcgggggagatggttatcaacatggaatggggtaactttcggtcttcacaccttccactaacagaatatgaccaagcacttgatgctgggagtctaaaccctggagaacagattttcgagaaaatgatatctggtatgtatttgggagagattgtacgtagagttttgtgcaagatggctgaagaagctgccatttttggtgatgctgtcccaccaaagttgaaaattcctttcatacttagaacccctcacacatctgcaatgcatcatgacacatctccagatttgaaagtggtcgccaccaaacttaaagatatattggaggtagaatatttatcaaatacctttttgga

SEQ ID NO: 47602 - DNA, 430 bp, Gossypium hirsutum
  unsure (1)..(430): unsure at all n locations
  Clone ID: LIB3585-035-P1-K1-A8
cccacgcgnccggnnggggnngcncnncgagaancnnagaagaaaaaaaagagagggaaaaacaacggcggccgaggaggagagcggagagggggaccnccgnnacaacgnacggcanaaagggaaannngggcacgaanannnggagnncgagcncaggccggacgggaagcnccganangcnaacaacnccaacnacaaaaacgacaccanganccgcaaagaggncnnccncaccccngccgnncncaaggaangccgccgcaacaacaccgagagcgagaacangaaggaagaagacaacaacnggccagaacccgaccgngncggacggcaggagcccgagaaagnganggggaangagcaaagnncnancacnacaacgaagagngggncccnngnngangnncagagcagcaaggaacccgaa

SEQ ID NO: 47603 - DNA, 469 bp, Gossypium hirsutum
  Clone ID: LIB3585-035-P1-K1-A9
cccacgcgtccgattggatgtcattgatcgagttgacacactccggagttcgtaattacatgttgaattgacattccttggcaaaagaagaggactttcgcttgtgtaaagagtccatctgctgctccattttcccatttggcgtcctaaacgctaagcggttcgcggttggctatatttctggcgagttaccagcagtgggcgctgcgtggcacaagctgataactattttatctttgtgcatttgaaaagataagggggtgattaaacgaatagctcaagcctcgaaatcaagtgaaactaaactgcttcagacttaaactgaattcaaggctagcgttagatttctctgtagatctatgtgtacagaatatttacatcacaataagtgacaattgctgctctttagactttcctggatcccaaagggcttcgtatattttattatctggttcaagacttgaagtgc

SEQ ID NO: 47604 - DNA, 513 bp, Gossypium hirsutum
  unsure (1)..(513): unsure at all n locations
  Clone ID: LIB3585-035-P1-K1-B11
tccagcgtacaagctcaaacgacccaactaatatagntatgattggggaccaactttcgcagagatctttcctgctcattaggaaggtggaatattctctctttaaaatccgctcgcacgcaaaagattcatttggcactgctctgctttgctatttgtttatccccctcgttgcttcaaagagaacatgtaactgaagaaatgtattatttttcgtatactagaaaagttgttctaatggcctggcgagctagaatagctaatnataaaaaatagcagatataagatgggaatcatctggattggtcattgggatttatataggagtggtgattgaagtgcttagagctatatttgctctgttttgtataaggtattatttaaagagatcccagatagggaacagcagttccagtaaagctgcatctattcctataagggctaatggtacaagttttttgtaacatgttattccgattcaactaatgggttctgagtcacctgtttaatgtg

SEQ ID NO: 47605 - DNA, 525 bp, Gossypium hirsutum
  Clone ID: LIB3585-035-P1-K1-B12
cagaaaaccagagacgatgaaagaagaacaaagcagaaagcggagaagggggaaaaacaagaaacctcaaaaaacccaaccatctttgctacctaaacactcaacaaagcttcacaaaaagacccatcaacaaaaaaaccctgcccatcaatcttcttcttcttcttcttccttaaaatcctctagttttcttgacaagatgaaagcaaggctagctggtgggcattttaggatgatcaatgaaaagctttacacttgcactggtaaagaagcactggactatttcaaagaagacccagaattgtttgacatgtaccatacaggatatcaagagcaaatgtcacattggcctgagctgccagtcaatataatcataaaatggctgaaggaacgtagttcttctttgattgtagctgattttggatgtggtgacgcacgccttgcaaaaaatgtgaagaataaagttttctcgatcgatcttgtctcaaacgatccttcagtaatttcttgtgatatggcaaacac

SEQ ID NO: 47606 - DNA, 514 bp, Gossypium hirsutum
  Clone ID: LIB3585-035-P1-K1-B5
ctagcttggacacatgaggaccaacaagcactgccccaagtatggacaagatgcagaaacgcatgttgaagctactgaattggaaaaaactgcagggaaatcaactacgctagaaccctctggtcagacccaattgaagatgatgaaaaagaagctcataactaaaagtgcgacaaagatagcagttgtagaagcttcagagggtgaaaaatgtagtacaaacacaaaagctcttacgttgaaattcaaatgctctactgataggccgtctgataaactcacttctggagggacacaaagttctgaccatccagtcacttctgatccagaaaatggagccaagtctgctgccaaggttagtaaaataattatttccaacagggctaagcctgatgaaatgcaggttgagtctaataagctgcctgttgttatacggcatcaagtggataccgatagaggccaagctgaatcccataagaaatctattgttataaagccaccggcaaacatggag

SEQ ID NO: 47607 - DNA, 513 bp, Gossypium hirsutum
  Clone ID: LIB3585-035-P1-K1-B6
cttcttcttcttcttcttcttcttcttcttcttctttactgtcttgaatttatgatgatcggattcttatttcttctttctttttttattgaattgggaattaaaggatatcttaacttgaatttgaattgttgtcctactttaaagtttgcggtttttgtctacggtaaggtctaaaaatagggtatcagttgactttacatcctgatggttctgcagtgatatatcagccgatatgactaaaagcagcttcaagattgagcatgattttgagaaaaggcgtgctgaggctgccagaatcaggggaaaataccctgatagaattccagtgattgtggagaaggcacaaagaagtgatattcctaacattgacaagaagaaatacttggtccctgccgacctcacagttggtcagttcatctatgtaatccggaagagaattaaactgatcgctgaaaaggctatcttcatatttgtggacggtgtcctcccaccgaccggagcaattatgtc

SEQ ID NO: 47608 - DNA, 516 bp, Gossypium hirsutum
  Clone ID: LIB3585-035-P1-K1-C12
cccacgcgtccgtgaagcttctcgaagaagaagagaaggaaaagcgtgaagaagaagaacaaagggagaggaaaagaacaaaagaacgagagaaaaagctcaggagaaaggagagactgaaaggaaaagaaagagagagagagaaaaaatgtgcggactcaagcgttactcctgatttctcaaaggaagtatcttcacccaatactaaggttgaagaaaatatttctattaattgcagagactcggtgtgcgagacgagtgatataattgtgtctacacttggttctccagatgatcaaggagaacagtttttagatgggcatttggcatcaagtttgcaaaatcactcatttgatggtcctgatggagaaggtacaaaggtaaaagatgggaatggctcttttccaacagaacaatcaaaattttctcgacggagattgaaattttgcaaggatggtcaatttgatacatctctgaaatggtccgatcggcgtcgatttcctgttgtgtcagaaa

SEQ ID NO: 47609 - DNA, 481 bp, Gossypium hirsutum
  Clone ID: LIB3585-035-P1-K1-C7
ccactgaccagctcgtcaaaaccctcaatgtccactccgttctctccaacaacccctacaggaaccttgacttgcctgtgctgaacatgactggcaccaattctagggtcatcgaggtgcgccacggaatccggatcaagctctggctccatcccgacccagctgaggtcatgaacgcgcaccgcatcatagatatagctcaaacggagcacagacacaatacggcgatgagaatgctatgaccgttctctagttcactccgacgcatgaactcactttctaagcgctgcatatgaccgacgtgatgcactcgctaatgctggttcactacgatctcatatgcatcgtggtggaagctcttggtgtccgcaacaaaaccgcgttacttattgcgaaatcaggaatgaaaactatccacatcggattcatttacccgatgccgaatcactgtgtagaacgacattgattcaatttcaacatg

SEQ ID NO: 47610 - DNA, 537 bp, Gossypium hirsutum
  Clone ID: LIB3585-035-P1-K1-C8
cccacgcgtacggaagaaaccgagtatgtgtctcgatggctgattgttgctaccggggaaaatgctgaggaagtggtgcccaaaattgaaggaatggatgattttggtggccctatacttcacacaagctcatacaaaagtggccggttgttccgagggaaagatgttttggtggttggatgtggcaattcaagcatggaggtctgtttggatctctgcaactgtgaagctcgtacatccctggtcgttagagcttcagtgcacgttttgcctcaagagatgctaggcagatcaacttttggattgtccatgtggttgctcaagtggttaccggtgcgcatcgaggatcgcttattacttctgctgtcgcgatttacgattggagacactggaaaattcggcctccatcggtcccagctcggtcctattgagctcaagagcagatctggcaagacacctgttttggatgttgggacattagacaagatcaagaatggaaacattaaggtctacccaaggattaagggtattacattc

SEQ ID NO: 47611 - DNA, 511 bp, Gossypium hirsutum
  Clone ID: LIB3585-035-P1-K1-D1
ggaaccaatgatagttggacgaaactttatggtcaaagtaaatgcaaatattggaaactcatccgctgcaagtgcaattgaggaggaagtttacaaggtccaatgggcaacaatgtggggtgctgatactgctatggatctctaaactggacgccacattcatgaaacccgtgaatggatcctacgtaactatgctgtgcctgttgggaccgtgccaatctatcaagcacttgaaaaagtcaatggaattgctgaagatctttgttgggaagtcttcagggacaccctgattgagcaagctgagcagggtgtagattacttcacaatccatgctggggtactgctgcggtacattcccttaacagcaaaacggatgacaggaatagtttttcgtggaggatctattcatgcaaaatggtgcctggcgtaccataaggagaattttgcttatgagcattgggatgacatacttgatatctgcaaccaatatgatgtggcgcttttaatcggg

SEQ ID NO: 47612 - DNA, 515 bp, Gossypium hirsutum
  Clone ID: LIB3585-035-P1-K1-D12
cccacgcgtccgcaaaaagaggtgagttgttgtatttaaaatgaaaatactgactaaaatgttaattttttttaaagatgacagcttgcatggcaattcgcgtgtatcccatgttattttttttaatttttaattttttttatattttttaaattattttcaatgttatatataagacaaatagtgtcatatcatcattaagtacatatggactgccatgtggattgctacactaacatcgttaaaaaattagagttttagtcatcatttctgttaaaaaagaagaagagagattcgactttcttttgaaaggttaataaccaaaattagcttgaaaaacaaaaaatccgggtcaaattaacaaaaaatatacatattgagggataaatttatcattatgccaattttaaatgaatttttaaactttaaaatgttctaattaaacccttaaagtatcagtatcatatcaaacaaatctcttttattaatttagcgtcaacttaagcgttaaatgc

SEQ ID NO: 47613 - DNA, 510 bp, Gossypium hirsutum
  unsure (1)..(510): unsure at all n locations
  Clone ID: LIB3585-035-P1-K1-D3
gcctcatgtnatggagaatccaaanctgggtagattagcagaaccgcagtgctctgcccttgcaaaaatatggttttccagaactcataaaacaaaaccacggcctaataacctggacattctgtctattgctcgctcttcttgttgcaaagtgagccttaaagcctcattggaagaaaagtatggcatgttacctgaatgtttgtaccttaaggcagcgaagctttgcagtgagcataacgttcaagttgagtggcatcaagagaaatttgtgtgcataaatggatgtaaacctgccaaggatccagattttctgtccccattgattcctctccctaatggttttgagggttgccaatcagcagattccttggatgatgcagatgaggagttggaactggatgaatgtcactatatcatcgattcacaacatttcagaaaagggcccatgcagaaggccagtatcttgtgtgatgatttaagctttgggaaagaatcagttcctgtagc

SEQ ID NO: 47614 - DNA, 345 bp, Gossypium hirsutum
  Clone ID: LIB3585-035-P1-K1-D4
caccgtcgccacctcgttagaggccccgttgtcatctccctactaattttcatctgggacagaactgtggtaaaggttagtctggtaggcatgatatgcctgagggttatgccaatgaactgtggttgcctacagtgctatgacagcattcagaacggatgaatttgtatgggctaggaccggatgcacttgtgactttcagttaccttcacacagcgacattgttcagtaaaaattctctgaaggctggctggggccctgctatattctgagcaactaagatttcagcgctgaatgaaagaatgttgtgctaagatgaatctcagcttcatcacaagatgccta

SEQ ID NO: 47615 - DNA, 284 bp, Gossypium hirsutum
  unsure (1)..(284): unsure at all n locations
  Clone ID: LIB3585-035-P1-K1-D5
gcaacacggnccagaaaagaaaaacggccaccagagaagaaccagagcaggaaacngcgcnagcagaggcagaagcacacagaaaggcgngaaaaggacgggggacagangagaaggcaanaagggcaggggcggggcacagaaaggcagagcaaaggaagcaaaccaagcgggcgaacgaagaccnnnaccaggaagagcgcaacaagcgacacgaaacacagcgaacnggngaagacaagaaagcaanggaacgacagagacaggagccagcagaccgagag

SEQ ID NO: 47616 - DNA, 161 bp, Gossypium hirsutum
  unsure (1)..(161): unsure at all n locations
  Clone ID: LIB3585-035-P1-K1-D7
caaanccngcccgacaacnggccaggcacggaagngaccaaccaaggaggcgacgggggacggagaacaaggggacgcaggcgcagagggagcccgagaacacggcaccacaaccaaggcaggcaacaggcgcccaaaagacccaanccagacacacagag

SEQ ID NO: 47617 - DNA, 302 bp, Gossypium hirsutum
  unsure (1)..(302): unsure at all n locations
  Clone ID: LIB3585-035-P1-K1-D8
cagacgcgtgggcggacgcgngggcggacgcgngggcagccangggagagnnanaaaaggggaaagggagccacccgcaaagacgcggaccgncangangcaccccccaaggaccaacccaggaaagccggagcccgggccacccncaancaccgaccaccacagacaaagccgacagaaaacagaacgcaacaccgaaangagagaacaaaggggcacccccccngggacgaaaaaccaaagacgggaagaaacgagnggagaanaccagcggacggccaaggagaaagcaacagccccac

SEQ ID NO: 47618 - DNA, 523 bp, Gossypium hirsutum
  Clone ID: LIB3585-035-P1-K1-E10
cccacgcgtgcggtcattactcgttcaagttatgtgccaaattcaccaatttcgctccatttatcaaatcattctaggtcccattctttgcaacataatgaagctattggtgccgttaatatgaatgctgatactctcttggtagatgataaagcacgtgacaattcatgtcatcagggagctaatgtttcttctttgtctaatggataccttgacaagtacgtaagcagtagtattggttctgatattacaatagaaggtccccctctgctttcaaatgaagagaaagggaagcagttgggaagaatccttgccaagtctcagagcaacgatgctaatgatactggagagagcaacataatttcaaacatattgtcactagattttgatacatgggatgagtccttgacttctcctcagaacttggcaaaattgttgggagacagtgacaagcaggtcaatcctctcaaactatctagttcgtggaaagcaccaaatcacaatcaatccagattctcatttg

SEQ ID NO: 47619 - DNA, 524 bp, Gossypium hirsutum
  unsure (1)..(524): unsure at all n locations
  Clone ID: LIB3585-035-P1-K1-E12
cggacgcgtgggtgcatgggatgtttagatctaatggagggtgtggttatgtgaaaaaacctgattttctgatgaacgtgaatccagatggttcggtgtttaatccaaaagcagacttgcctgtcaagaaaactctgaaggtgaaagtctatatgggagatgggtggcatttagattttaaacaaacacattttgacttgtattctccacctgatttctacaccagggttggcattgcaggagtgccagctgatgaaataatgaagaaaacaaagaaaaaagaagatgactggacacctgtttgggacgaagaatttgcatttccattgagagttcctgaattggctttactccgagttgaggtccatgaatatgacaggtctgagaaagatgactttgcaggtcaaacatgtttgccagtctccgaactgaagcctgngattcgggcagttcccctcttcaatcgaaagggagaaaagttcaactctgttagacttcttatgcgattcgagttcttttgagac

SEQ ID NO: 47620 - DNA, 531 bp, Gossypium hirsutum
  Clone ID: LIB3585-035-P1-K1-E2
cccactcgtacgggtgttgattatcagatgttcaggtataatgactgatgtctccgccgctgcttggcgtggaggacgaagggatccagagcaatgttactttactcggttcttcaagctcaatggaacgagagtgccataatagtgctgtcttgcccgaacggaactacatgggcttgtctgattgatcttcagaggatagctctgttctgtcaccttcctcctaagaaagaaaggctagttcgtatttaaaggcaactgatcttaggctcggacttgctgtattgcaaacgactgaaagaaatccagagcttagtttggcaagttcttatcaagtcgatgagaatccattcctacctatgcatccttcaagtgcatggacactgctttacatcacataagactgtcgttttaggaaataaaagacggatctctgatgcaatggatgggttacttagatggcaagtttctttctgattcacataatgacgttctgctttcacctaagccatcattaaactttgggggcta

SEQ ID NO: 47621 - DNA, 485 bp, Gossypium hirsutum
  Clone ID: LIB3585-035-P1-K1-E4
gccacacatccggagcagccaatcgagagggctcactcgcacttactcaaacggccaccaaaacggcgatgttgcaaagatacctacttttattctactggccgagtatctgcaacttcatgactgggggagctaatggagatcacaactgaggctggtaaactgacacatgccatcttgtacggtggtgctgatgctaccaggacaatggggggagcttgtgcgaatggaagcctgtccagataggggtatggaacgagcacagaaccgctcatcactggccttttcaacaatggctacagccacggtgactgctacacgctccagtgcaacaatgatccttaatggcgcattattcgaaccatatctcggacaggtaccaaattttgcccccctaactatacattatgtagtgactatgggggttggagcaatcgctcaccagaacactttgattaagacgcaccattatggttgcagatcgc

SEQ ID NO: 47622 - DNA, 521 bp, Gossypium hirsutum
  unsure (1)..(521): unsure at all n locations
  Clone ID: LIB3585-035-P1-K1-H4
cccacgcgtccgatgaaaatgacgtacaagtcaataccgtatcaaattcaaacggaagaccagcgaggatcacttttaccttttcggcctctgaaacgacagatctagaggcttcaagtagggcacaggtgttctgaatcttggcgatgaactcggtaacagccaacgcgtctttctttagtgaatacaactcatgcttgattcttgagattttagcacagattgaggcaacaaacaaccgattggcagtagtctagatatcacacgctgntttagcagctgtaaatgaagacaacagagacatattaacagtagaatagtagccaattggctatagagcttatcttattgaagaaaggcaaccgcatctggatttggagttcaatgaactatccgttctgatgagggttttgtcgctgacatatcaccaccaattgatcaaacctttggcttttctaaagggtcatatcgagagtacactttttgcacaaggttagattccattagtattcctatggagc

SEQ ID NO: 47623 - DNA, 533 bp, Gossypium hirsutum
  Clone ID: LIB3585-035-P1-K1-H7
aggagctggatatttgatcaccgccaccacctctcctcttcactaacttccaacttcccaacacaaagcggccacctgcgatatgggaaaacatccacttggttgcgtcttaatgttctctgtccttgcctccctcggccttgtctccttcgccgcatgtctggttgctgaggcaaagagatccaaggttgatttgaagttggatggaaagatgtgtttcttgcctagaaagagtgatgcctttgaactgggtgtggctgcatcggtctctctctgcaccgctcaaatcatagggaacgtactactctgtgcaagttactggtggagagcaaacacaagaaagcctacaaaaccaactcttactgcaattttgctggcgatttcctggatcagctttggagttgcagcaatcctaataagtgcagcgacgagcatgagcagagcacaaccctacggagaaggatggttggacggtgaatgttacctagtcaaagacggagtgtacttaagcttcggggtcttaagtctacttg

SEQ ID NO: 47624 - DNA, 546 bp, Gossypium hirsutum
  Clone ID: LIB3585-035-P1-K1-H9
cccacgcgtacggacgcatcgaagttggcaagcgagtggaaagcacggatgaaactgaatgcagacaattctatggaaatattgggttttttgcagtttattgctgcttttggattagtgtcctcttttaatagagatgaaatcttcaaacttcttggcactactgctcaacaccagcaggctcgaaatgtatgccaggtccttggttttacagatatgattcctggattcattcaaagtctaatagaaaggaagcagtatatcgaagctgttagatttgtttgtgcgtttgattgcaaggataagtgccaaccaaaacagctcttaaccttattcttgcaggatgtaaacagagtggcttgtcattgctgcaagattgggaagaattcgcctgaagtgtggcaaaaggctacagatgaacagattgctgctttgaaatccgtaattgaatgcattaaagattgtaagcttgaatcgtgtatgccagttgaggtcattgggaagtacatcgctgagttagaaatgccaaagatgaacatgacattt

SEQ ID NO: 47625 - DNA, 493 bp, Gossypium hirsutum
  unsure (1)..(493): unsure at all n locations
  Clone ID: LIB3585-036-P1-K1-A1
cccagtcacaacttggacagcgtccacctgtcttggctcgttcagctgcaaataaggtctcagtctgaaagtcactgtcagctggccaaaacttattggtaaaatcaagagtaccacaaaagaaatatgccaatgggcatggaatgaaacagtcaaccattggtcgaatgccatctaagggttctgcaagacaaagactacatcccgggatgctgtccattcaggatcgtgccactgctcattatggtgccgtaactggtttaaaagtaactgatgatggcatgtaccttctaagtgcaggctctgattctagaataaagttgtgggatcttgaatctggctacaatacacttgtaaacttcggaaaggtgcacctncaagcaagcaaggcaattcagttagccgtatctcaagattcagctcaagtttttgtcccatgcatggcagtcgtgaaagcatttgacatatggtctggtaaaatgtcccttacatt

SEQ ID NO: 47626 - DNA, 411 bp, Gossypium hirsutum
  Clone ID: LIB3585-036-P1-K1-A6
gcggtattgtcactagcgcagctcactacaacggcgttctagactatgatgctcacagcctttactgctatctacaggccataatcacacacatggtactcctacgacttgagggaaaacggacgggtatattgtcactagctacatatgttgcatcaagaaaatatgctgcttattagacaggtgactataatggctcttggaaagatctgaattattctataactacagcgttgaactattatatattggccgttccaatggaaggcgcagatatatgtcagctctatactgacccaactgaacagttgtgtaacctattgatcgaatgcgccactttttaccctctctctatggatcacgcaacttactagtttccgaagatagagctctatcatttgaagactgtga

SEQ ID NO: 47627 - DNA, 499 bp, Gossypium hirsutum
  Clone ID: LIB3585-036-P1-K1-B2
tcgaccacgcgtccgcccacgcgtccgcccacgcgtccgggagagaatcgtctttcccctgctccaaagagcagatccaggactatgtaaagctgcaaacgaggaacatgcaagggacctaccggttatgaatggcatcaaagaagacatgaaatccatcggagttatggattatgggacccctgccagcaaggaaggcctctccaatctttcgacccgcctcaaatcattacagaaacactgtaaagaacattttgatgaggaggagaaagatgtactgccattgttagaggcaacggagctgagtggagaagaagaaaagagggtatttgaagattgcattgaggcgatgaaggtaactcattcacatttatttaactttttcctggaaggcctactaccatcagaagctatggactatgtggacttgatcatgaaatgcggtgacaaacaactaagagcctctatgattcagattatttccaatgccaagtaacac

SEQ ID NO: 47628 - DNA, 515 bp, Gossypium hirsutum
  Clone ID: LIB3585-036-P1-K1-C10
ctcttcctagccatgcccgagccatggatgatggcctctaccgtgccattgacacttatctcaaagtaagttcatattattcccaattctttcttgtttatgatatcagtagttaaatcagcttcagctattaaatcccatgttttggaagttggttcattctttcactgtctttcaacaagtccaagaatcaaattccagtgacataattggacaaggaaataccagggacataacaaggccatatgggcccgtagagaaattgaggttgttgatgactagttcaccgactcaccagtaaaaagatcgttcatgatcagaatttaaagtgttaggttctacagtaaaagattcttcatgatctctagtcctgtagtctcgtgaagcctattatgtaattgcaaaacatatctaggttttggagtctttcggtacgcaatttaggggcagcgattcatgggacgacgaccttgtcttgttttaaataattaagaaaacagtatattaattaatgc

SEQ ID NO: 47629 - DNA, 476 bp, Gossypium hirsutum
  Clone ID: LIB3585-036-P1-K1-C11
ggaacaagaagctttggtgacaaatcttcgtctttcacttcatatatctaatgatgaacatttgatggagctaagaaacttaatttcctctgatagtaacattcctataagataaccaggagtctctctggttttttttttctttatttttttccgttctctattttttcccttaggaatagacttggataaataattacactggtgactccctcaattgtatgaagcttgatgaaatatgctatcaattttcctcatttaggtatagagcatatagtgatatattttgaaatgaatgtaacgcaacagaaactgaagaccattaaatgtttctgagctaagcattgtgtatcagttattctatcccttcttgtctccctattttgtatgtttattttagcgaaccaaatctttgagaaatagcataccgggaatttgctaacaattgagcagaaatcaagaatgcattttttctg

SEQ ID NO: 47630 - DNA, 488 bp, Gossypium hirsutum
  Clone ID: LIB3585-036-P1-K1-C3
cccacgcgtccgcccacgcgtccgggaaagggctcatggaaatggtctgaatttcccagcaaggtagctgtacaactgaatgatactcatcctacgcttgcaattcctgaactgatgcgcttgctaatagatgatgaaggacttgggtgggatgaggcttgggatgtaacaacaaggacaattgcatatacgaatcatactgtccttcctgaagcacttgagaagtggtcacaatctgtaatgtggaagcttcttcctcgccacatggaaatcatagaagaaattgacaaaaggtttcttgcaatgatcaatgccacccgtcctgaccttgagcataagcttcctaccatgcgcgtcttggatcataatccccaaaaacctgttgtgaggatggcgaacttatgtgtggtatctgcacatacagtgaatggtgtagcccagctgcacagtgacatcttaaaggctgagttgtttgcagattacatttc

SEQ ID NO: 47631 - DNA, 207 bp, Gossypium hirsutum
  Clone ID: LIB3585-036-P1-K1-E3
cgcgtcgcacgcgtcgcacctcgtaaaataaaaagcatccatgagcactgcggagggtcttgaaagtggtgcatgagcgaagcatttataaaagggagggacacccaaaacatgaacgataagattttatgttattaactgagtacatggaggagggacatcttgttctcgatctgtcagaactagatctgaaggggtaggttatat

SEQ ID NO: 47632 - DNA, 169 bp, Gossypium hirsutum
  Clone ID: LIB3585-036-P1-K1-F1
aaatctcaagctcttcgtagatctcaaaacaaagctttttattaggtgtctatcgctcgcaagctaggcaacttcacgccgggaatcacggtgagtgagggaacataacgataaggtgggcgattctacgggctcactgaattacagcttgatgaagaggagtcatacc

SEQ ID NO: 47633 - DNA, 427 bp, Gossypium hirsutum
  Clone ID: LIB3585-036-P1-K1-F12
ggaaaagaagcttaagctaaaagagctctttatcaatttccatggcgtcgcgttctctctttcttagtctcagacggagaagcagccaacggtgcatgtcgaggccgttgtcctcgggctccgtcagcaccgaatacacggacgattatataaaaaattcggaaaccgatgatctgagaagccgcattttccagttgcgccttccgaaacggagcgccaccaccgttatagagaaatgggtgggtgagggcaaccgggtttccatctctgacctccgccaaatttctaaagaccttagaaaatctcagcgtttcaagcatgctctcgagatatcagaatggatggttagtcatgaagaatacaagttatcagacactgactatgctgttcgcattgacttgatgacaaaagttttggtattgatgct

SEQ ID NO: 47634 - DNA, 435 bp, Gossypium hirsutum
  unsure (1)..(435): unsure at all n locations
  Clone ID: LIB3585-036-P1-K1-F4
ggtgaaatgagaacttttaccccaacccaaattttgggaatggttttgttgaatttgaaaagcatagctgagaagaatttgaatgcagcagtagtggattgctgtattggaattcctgtgtacttcactgatcttcaaagaagagcagttttagatgcagccacaattgcaggcttgcaccctcttcgcctgattcatgaaactactgcaacagcattggcttatggtatntataaaactgatttacctgaaaatgaccaattaaatgttgcctttgttgatattggacatgctagcatgcaagtctgtattgctggcttcaagaaagggcaactcacgatcttggctcattcatttgaccgctctttgggtggtagggattttgatgaagttctttttcagcattttgctgcanaattaaagaggaatacaaga

SEQ ID NO: 47635 - DNA, 415 bp, Gossypium hirsutum
  Clone ID: LIB3585-036-P1-K1-F6
ggaaattttgaagtgttttgaaaaaaaaaaaacagttctcttcgttgctagatttttgaaaagcggaggtcgttgggtgggagtagttgagtgtgatggtaagaaatggtgcacgtggtgccggcggaccctcaggcggtagtggcggtgaagaagaaggcgcagtcttctcgaagttgggtccttcttgatagcacgggggagactaccgtgcttgacgtcgacaagtatgctatcatgcatcgagtaaacattcatgcccgagatttacgcatactcgaccctctcttgtcttacccttccaccattctcggtcgcgatggagctattgtcttaaatttagagcatatcaaggcaattattacttctgaggaggttttgcttcgagatccatctgatgaaaatgttgtccctg

SEQ ID NO: 47636 - DNA, 500 bp, Gossypium hirsutum
  Clone ID: LIB3585-036-P1-K1-H3
gaaaaaaaaagggtttgaagcagtaggtaagagccttttgggggggcaaaacgaagagggatatcatgctggccagaaggttggtttctttcttcaagaattctccatcttccaagctttccagcaatggaacttctgtgaatgacgaaaagaacaagtcgtttgctggtaaagcggtttcttttatcttgattacggtaacaggcggtgttgctttgagtgctgttgatgaccttgccatctaccatggctgtagcagaaaggcaatggagaaagctggtaagaatcaagcaatcataaatgctattggggaaccgattaagaagggaccatggtacaatgcttctcttgctgtagctcacaagaggcattctgtatcttgcacattccctgtatctggaccacaaggcaatggagtattacaattgaaggcagttcgtaatggagatgataattggtattcatatgtcctacctcgggactgggagatcctaataatg

SEQ ID NO: 47637 - DNA, 463 bp, Gossypium hirsutum
  unsure (1)..(463): unsure at all n locations
  Clone ID: LIB3585-037-P1-K1-A1
aaaaccatgaattgactgttggaaaagagttcactgatgtccacagctgtaggagggccctgagagatgcagctattgctcttcgctttgagatgcaaacaataaagtcggacaagactcgttttacagttaaatgcgcgagtgaggggtgcccttggagaatacatgctgcaaagctccctggtgttcctacttttaccattaggaccatccatgatcaacatacttgtggagggattacacatcttggtcatcaacaagcctcggttcagtgggttgcagatgcagtagcagaaagcatcaaggaaaatcctcattataaacccaaggagatattggaagagattcaccgtgttcacggaatcacgttgtcatacaagcaagcttggaggggcaaaggaacgcatcatgggncagtgtgcgtgggctcttttgaggaaagattttcgccttcttcccgcaa

SEQ ID NO: 47638 - DNA, 575 bp, Gossypium hirsutum
  Clone ID: LIB3585-037-P1-K1-A2
accacgcgtacgggtaagtgtaagcattctggagctagaagaacagacacagatcgttaattgctgtttgattttggtattcactatgataagaagaatgttgatttaggttgtcagaagtagctatatccctcagctaatggaggaaagtgtcagcaaggtaccaccgtcactaaggctagggagctttaagtccagtctttctggaagatctactccaaagagttctcctacatttcggcgactgcattcaagccgaactccaagaagagaagcaacaagtggagctggtggcattcaatggtttaggagcaatcgattagtttattggttgcttttgattactctatgggcttaccttggattttatgtacaatccacgtgggctcatggtcataaaaaggaggaatttttgggcttcactggtgatccaagagataaacttttggatgctgaaaagaatgcacgactagatttgcttgctgatgacagtttggtagcagtgaattactggaactgataaaactcaggtgtctagtgatagaaagtttaatgtgattttggccaagaaaggg

SEQ ID NO: 47639 - DNA, 369 bp, Gossypium hirsutum
  unsure (1)..(369): unsure at all n locations
  Clone ID: LIB3585-037-P1-K1-A3
cccacgcgtncgcccacgcgtacgcccacgcgttcgtccacgccttcggcaaatgcattcgggggcttggcgtaaaagttggtttcttatcaaggcatcgtgaagagctgcacgagaagtacactaacattgaagctttaactgaacagcttaagaaagaattgcgagagaaaaatgagctgggtaaaaccctgtacactaagcatcaacttgagaagcacgcaagctaggaaaagatatcatttatccgcttgcaagtccatgagatagctgcatttgtactaaattcatctgggcattacgaggcaatcacccgaaactgctccaactactacttgtctgctgaatctgtggctttgtttaccgatc

SEQ ID NO: 47640 - DNA, 389 bp, Gossypium hirsutum
  Clone ID: LIB3585-037-P1-K1-A5
gtacacttcaaggatagaagtacatttggagaacatgacggtggtgaggataattgaacagaatgggcactgatagtgcacgcatagatcaagactcaccgtacaactgcttgagttacaagcaagctatgcaggtaatgctatatcacgcatcaaccgatagctggcagtgaagatgctcaattaagatgacttttacgattagaagctagagcatatgctctaataattgacatgtacagcagattacaactatatgacatggaacgaggcaggatcaccagacgcacatatagagctgcttattacaatagaagaatggtccatgctttatgcactatgtttcgagaagatggatgactagcatagcctaaagaaaacatggcttg

SEQ ID NO: 47641 - DNA, 392 bp, Gossypium hirsutum
  Clone ID: LIB3585-037-P1-K1-A6
caagacttgatggataggtgcatattcgtgcaacaggaagtgcacaagcagatgaccacagtagtgtctgttactgttcacacagaggggaaaagattgcaagcatcctcgtgtgggaccatcgagaaagctggggaggcctatactgacgctaagtgggcccgtgtccatggatgataaatgcactagcatgatatgttacgactgagaccgtatgccatatattacaatcttggtcacgaactgttcaaataatgactagacagccatgtgcgaaaactccttacagaacgaaatagcttccttatgacctgtagtggatggtgctattagtatctattgtggagaaaagaatatcgttctgctatcacagagtcatgccagaatggatt

SEQ ID NO: 47642 - DNA, 347 bp, Gossypium hirsutum
  Clone ID: LIB3585-037-P1-K1-A8
cccacgcgtccgtttagctgcacaaatacgtgtttacttacacattcgattaaaatcggcccttccatcattgagaatcacgcggatataatgctttatggtgcaaggattggagcgggaaaaggaatagagggaagggtgcccagcagtggtaaatatatattacgaaaattgtatctagaaaaatacagcattgggtatgccaaggaaactgcaaatacagcagtaagaggttaggattggtataccttaggaccggttggaagtcttcttgtaagggatgggtggattttcgtgaacagagtaaacggaagaagagaagctgaaggctagaactgaggccaatg

SEQ ID NO: 47643 - DNA, 501 bp, Gossypium hirsutum
  Clone ID: LIB3585-037-P1-K1-B12
cggacgcgtgggaggagatattggaaggccaatttctaagttctacagccatgatgttggcaggcatagcgaacaatatagtggcaagattgcctctaatatggtgcttcacaatgaggaaccacacactccaaagcttagatgtcgggttattggagcgtactttgagaaactgaaatcaaaaccattcgcagtttattcaattgctgtgacagatgcggaaaacagaacttggtttgtcaagagaagatacagtaactttgaacggctgcatagacatcttaaagaaattcctaattatacattgcatttacctcccaaaacgatattttcatcaagcactgaggacgctatagttcatcagcgctgcattcagcttgacaaatatctacaagatctgttgtctaaagccaatgtggctgaacagcatgaagtgtgggattctttaaatgtgttcttaaagaattactcgtttgggaaatcttcttcggtgatgagaac

SEQ ID NO: 47644 - DNA, 265 bp, Gossypium hirsutum
  unsure (1)..(265): unsure at all n locations
  Clone ID: LIB3585-037-P1-K1-B8
ggaagaaagaggaagggagagangagagagannannagcgnccacannggccaagcnggganncagggggggaaancaagccgggagccnnaccggcnngaacaagaaaaccaccccggaggaacaangccgagcgacaccccnaagggcggcgcacacgangccnccaacaccnnccncaacgaaacggggncgggaaagcaagggcccagagccggccnnggggaaccggaacccacacggaacgaagagggccggaccggcc

SEQ ID NO: 47645 - DNA, 459 bp, Gossypium hirsutum
  Clone ID: LIB3585-037-P1-K1-C6
cccacgcgttcgtccacgcgtacgcccactcgtcctcccacgcgtgcgatgaacttttataagtataaatgggatcaaaacacatctcctgaatggtcgctgattctgcaatgagtgacttaagcatgagtgagctgcgtcgctgaagtcattatatacacggatttgattctttctatagcaatgtcgcgataatagtcatctattatcggccatccttatgctggatcagcatctgtcaaatgtcaacgaggatgtttacagagctctcgactcatttattacgtgcgaactagaggcccctcatagttacagcggaagaggcattgaagatcctacatatcgaccaagagtgcaaggacaattattcatgtaatcattttctcttcagttttatggcttgtttaggcttattacacttagaagagttaactctagggaagggcacttggtttgcaa

SEQ ID NO: 47646 - DNA, 393 bp, Gossypium hirsutum
  unsure (1)..(393): unsure at all n locations
  Clone ID: LIB3585-037-P1-K1-C9
cccacgcgnccgcngaggcagcnacnacagangagngggcaggcnnccagacagcggcgggaggggccnncacaacagacgaacccaanccaccaaaaccagcngaaagnaanaccaagncnaccagaggacaggagganacaaagagngangaaccaccangaacaaccaaccaagacccagagaagccgcaaaaagaagcgaaaaacgagangangagccccnccgaaaagcccaagaaggcgncacccagcgcnacgcagcaacaacaacgagcgangcaagcacagcaacagncccaacacaaggccgcagcagcnaaancagcaccaggaaacgcgcaacagccaccagcnaacggcacaaacanacccncgcaagcgnggccaaaca

SEQ ID NO: 47647 - DNA, 418 bp, Gossypium hirsutum
  Clone ID: LIB3585-037-P1-K1-D10
gcacgcgttcacccagcgtacgtccacacgtacgtcacgcgttcggtacagataggggggatagtaactgtccatgttgactcatgttaaaactggtcggctaaaacacgagatggttgttacttttggacctactgatctgaccactgaagttaagtttgtggagatacaccatgaatccctcctggaagctgtccctggagacaatgtcggattcaacgttgagaacgttactgataaggatcttaaacgtatatttgatgatagaaactccaaagatgatccggccatggaagctgccaattctatcttacaagtcatgatgatgaatcactcttgcctaatggtaaataggtatgtccaagttctctactgacacacctattcacattgctttcaaaatttctaggctgttgac

SEQ ID NO: 47648 - DNA, 483 bp, Gossypium hirsutum
  Clone ID: LIB3585-037-P1-K1-D2
aggaatcgacatagggaatactgctgattacttttcgctttcatcgcgaacaaactctgacattcatgttgccacctgtattgctcagtatgaagggtatcttcatacatttgtggatgagcttatgcatagcaagatctctcactgggataggagctggagagagcttgccacagaggcacttgctgctcttgtcagatatgatgccgcatactttgcggactttgttctggaaaagttaattccttttactctgtcatctgatttatgcacacgccatggtgcaaccttagcggctggagaacttgttctggctctacatcagtgcggatatgatcttcccaatgataaacagaaacaagtttctggtatcgtttcagctatagagaaagcacgcctctatcgggggaagggtggagaaataatgcggatagctgtttcccggtttattgaatgcatctcattttctcgagttcctttacc

SEQ ID NO: 47649 - DNA, 420 bp, Gossypium hirsutum
  unsure (1)..(420): unsure at all n locations
  Clone ID: LIB3585-037-P1-K1-D7
gaaaacacnnnaagnaccgggcgagcagannnnaggggcaaaaaanggccgaggagcanaccagcaaggccccngagnnggagagcaacgnnagcggngaaggagcagnggagagcaaggagcgagggnagnncgannacanggggaagaaagaagaggagaagccncaagaggaggngancgnaaccgagnnngaaaaggnnaanancgaagagacaaaggcagaggaagaaggggaggagaagaagaagcanggncnccnggagaagcnncaccgancagaaagcagcagcnccagcncnncaagcgacgaggaagaaggggaaggagaagagaagaagaagaagaaaaagaaggagaagaagggaccggaagaaaagaaagaagagaaannagaaggggaaaagaaagaagaggaca

SEQ ID NO: 47650 - DNA, 230 bp, Gossypium hirsutum
  unsure (1)..(230): unsure at all n locations
  Clone ID: LIB3585-037-P1-K1-D9
gcgagagccacgaagcggccacccaacgaaagaccccaccggacncgacgaagccaagggcgcgaaaacnncgccggcacaacggacccggngccggacncggacccgaagccanaagggagcaggaaacaaagaggagcnagcaagaaannagaaaagaaaagcaacagaaaagcgcngaagcaggaacaanaccaagcaccaaaaagaagaaaccngaggaaggagcc

SEQ ID NO: 47651 - DNA, 408 bp, Gossypium hirsutum
  Clone ID: LIB3585-037-P1-K1-E6
atttgttatctggtgcgatcaattttattgacttttttggttgttgtgatggcggatattgagaaacagatcttggcgaagccgattcagttagcggaccaagtaacgaaagcggcggatgaagcgagttcgtttaagcaagagtgtgcggagcttaagtccaagacagagaaacttgctggcttgctccgacaagcggcagcgtgcgagttccgacctttacgttcggcccacgcgccgtataatcgacgatactgaacaagtgctggacaaagcccagtgtttggtcctcaaatgccacgccaacggcattatgaagcgcgtgttcacaattaaccctgctgccgtcttctgtaaaatgtttttttagcttcgagaactgtatgggcgatgtgtcctggcttctac

SEQ ID NO: 47652 - DNA, 488 bp, Gossypium hirsutum
  Clone ID: LIB3585-037-P1-K1-E8
ctccaatccactcctttccggccactcctaaacttagcttccgttcaaaaccacgccccatcatacgcgccgctgcgggacttgaagttgattctttcacgaagaagtcaggttaccttttccagctcagtgcctttgaggctgagtccttactcgattacagcccttcacgaatcgccgctatttatagaagaaaacctctgattttgttgcgtcggcttattcaaatcagtactacttttggaaaatggttcggaattcgatatattgataatctcatggaacgatccgatcaaatgttcaaggttcgagctgccgagcttcgaaaaattctggtggaacttgggccggcatacattaaaattgctcaagctgtttcatcacgacctgatctgatacaaccatcatatttagatgaactctcattgttgcaagatcgaataactccattttctactgaagttgcacttgatactttagaaaaagaa

SEQ ID NO: 47653 - DNA, 476 bp, Gossypium hirsutum
  Clone ID: LIB3585-037-P1-K1-F11
cccacgcgtccgcactcgtcaatcttttctttctttccatgggtgagaatgcaaccacccatcacactaactctgcaaacaatggtgctaatgataatcaaattgggtttaaatcaagggtttcagttattggtagtggcagttggggaagtgttgctgctaaactcgttgctttcaacactctcaacctcagctcttttcatgatgaagtaaagatgtgggtatttgaggagacattacaaagtggtgagaagctcacagatgccattaaccgcactaatgagaatgttaaatatctccctggtattaagctgggtaaaaatgtcattgcagatccagaccttgacaatgcagttaaagatgcaaacatgttggttgttgtcaccccccatcaatttatagacaatatatgcaagagccttgtgggtaaagtgaggagtgatgcggaggctatttctcttaataaggggatggag

SEQ ID NO: 47654 - DNA, 414 bp, Gossypium hirsutum
  Clone ID: LIB3585-037-P1-K1-F12
caacaattccctgtcccaccaccacaatatggtcagaggccaatggttccacctccgggatcaatgatgagaggacctcctggtccaccaccaccacgccctggaatgcctgctccaccacccccacgccctggaatgccgcctccccctggtgctgttcctgttttcggaccaccacgtcctgggatgccacctcctccaaaccctccaaaccagcagcagtagagtgcttttgatttggttgataggtgtttaggccttttatgactaccgcaagcaattggaagagaatgagaaggaagaaaaagcttggtttactttgccatttacaaactgttcttcaatgatgttccctaaataaaaaagataaatggtgtaccgtgctttatttttgtattattaagtactcttatc

SEQ ID NO: 47655 - DNA, 406 bp, Gossypium hirsutum
  Clone ID: LIB3585-037-P1-K1-G3
cggacgcgtggggattaattgaacctttctcgagggttgagattgcccatattgccgagctcattgaattgcctgtagaccacgtggagaagaaactttctcagatgattctggataagaagtttgcagggactttggatcagggtgcgggatgtcttgtcatatttgatgatcccaaggccgatgccatctatccggcaacattagaaaccatctccaacatcggcaaggttgttgatagcctttatgtgagatctgctaagataatgacatagggtgccacatttagcaactaggaagaaacaaattagtgttcagtgacacaagtgcattctagttattacatgtttcaacttaatcctgttttgttgtggaacatttgatttaaaacatgtggagtttattc

SEQ ID NO: 47656 - DNA, 376 bp, Gossypium hirsutum
  Clone ID: LIB3585-037-P1-K1-G4
accgcaccaattttgaagagaggcgcctctcttgaaacctatcctccaaaaatgaaaatactggaagaagtgattctggaaacgaagttcaccaccccacttttaaacataacacgatcgactaactctcgaacggatggccatcctgcaatctaccgcaaggtattgacagaagggaaaaacgtttcttcaaggcatcaagattgcagccataggtgtcttcccggagttcccgatacctagaatgaagctaatctatgccaatctgtttaccaacgaacaactctcaagaggattaacttgcaccagtctaggaaggacaatcaacaaatcgttaaaacccattcccggaaatcaaactgatgggtaatatgga

SEQ ID NO: 47657 - DNA, 521 bp, Gossypium hirsutum
  Clone ID: LIB3585-037-P1-K1-H4
cccacgcgtccggacaatcattgcaaattttggtggtatatttgtgaagagacagcattgtgtctttggactggcatcttgtatattatgtacctgaaagccaacatttcgaggccttggtggaaggatgccattatgattctgctattgatcgccttgtcgatttccataatttttctcctattgctgctgctttttcacagttatcttgttctgacaaatcagacgacttacgaactcgttaggcgccggcgtatcccatatctaaggcggattcctgaacgagtatatccttttagtaaaggaatttgcaggaatttatacaacttttgctgtgttcgaagcagtatttacagtttggaacctttgccctcgtctcaagaacttgaagaaaaggcaaggccttacacttgcttagacattttaacgtgtcgttgctgctgattttttaagatagtgtatcatttttagccaaaaacaactgtgattttaactcgaaaaatttttttgaagtgagtgtg

SEQ ID NO: 47658 - DNA, 277 bp, Gossypium hirsutum
  Clone ID: LIB3585-037-P1-K1-H8
cccacgcgttcaacagcaaatcgacaaacattttgcagctaaagtggcacacctaaggagggcaccagtgtgagccaccgtaccaccaactacaccgtatgctaaccaactacatccataccagcttttctaccatgcccactcagacaatcacacacgctccttacagcttacaaaaccgacagcaatgctgttttattaaccgactcgatgacaaacctcagtacctcgaacttcgagaaaactaaacaagactacatttactataaaaccacag

SEQ ID NO: 47659 - DNA, 154 bp, Gossypium hirsutum
  Clone ID: LIB3585-037-P1-K1-H9
tttagctttagcaacaaatcaaaattttcttgagaccgagttgttgacattgttccaggctaccaggttctttagaacctttttttttggtttcttatttggtcaaagttttagaaccccatttttgcagattttataaattggcttccttttt

SEQ ID NO: 47660 - DNA, 282 bp, Gossypium hirsutum
  Clone ID: LIB3585-038-P1-K1-A10
gcggcgcgtcagggcattgatagcgcttatggtggcatgatctttgctccagtctactgcactggtggcatttcaaggcgtgacatttacccatcactgactgtcaaactgtagctagcatggaagaaggcactgactataacagtctgttacatgatattgcaatgaatcggagccatatgtaggagcaggtgtcaacaagagctttcaaaagactcaatctcaaaagctaagcagaggtgctaacactattcgctcatgctatagcaagactagtggact

SEQ ID NO: 47661 - DNA, 522 bp, Gossypium hirsutum
  Clone ID: LIB3585-038-P1-K1-A6
cccacgcgtccgcccacgcgtccgctctgagaaaatttattcgaactgcgaatactgttctttcaatagcaacgctcagctcactcattctgctccatctttgccattgaactcattgacccagaaagatatgaataatcagataacaaatgtatacatatgggacatggatgaaacccttatattgctcaagtctttgttgaatggttcttatgctgaggctttcgcgggtttaaaagatgctcagaaaggtgttgaaattggaaagatgtgggagaaacatattcttcaaatttctgatgattttttcttctatgagcaaattgaaaactgcaataagcctttccttgaggccttgagcaaatatgatgatgggcaggatctgtctgattatgattttaatcaagatggttttagtcctccacatgatgatctcaacaaaaggaaactagcatacaggcatcgactcatagccaacaagtataaacaaggtttacacaatattttggacccggagatgat

SEQ ID NO: 47662 - DNA, 674 bp, Gossypium hirsutum
  unsure (1)..(674): unsure at all n locations
  Clone ID: LIB3585-038-P1-K1-A9
cccacgcgtccgggtaatgattgacaatgttaaggaaggagtgaagatgcatgatgttgtgagagacatggtactgtctatcaaaagaggtgaccactttatggtaaaagctggtattgaattggaggacataccaagtgagcctaaatggaaggaatctcttgagaaggtttctttgatgaataattcaatatcagaaattcctttgatatcaccgaaatgccctaatttgtcaaccttgttattgcaaaataaccttaatcttgaaaagattttaggatctttctttgagcacatgcatgggctaaaggttctagatctttctcatactggaatctgttatctgccaaattccatttccaacttgacaaagcttactgcacttatacttagatggtgctgccagttaagacacttgccctcattagcaaagcttacaacattgagaaagttggatctttgtcgtacagatattaatgcaatccctcatggtatagaaatgctagaaaacctcacatatcttaatttatattcaagaagtcttaaggactaaccaatgggaataatatcgaggttttctaaactccaagtcttgaaagcttggttgaatagcanaggagaggaagcagccaaactcagtaagctagaatatgtttaggagcttttcatgtgct

SEQ ID NO: 47663 - DNA, 497 bp, Gossypium hirsutum
  Clone ID: LIB3585-038-P1-K1-B4
cggacgcgtgggtttttctctctttttctctctttttttgtttgataaaactcatctcttttaatcctgaggactccaaatttcccagtgattaggattcttggtgtctcagaaaaattcagaaatctcttgaaacctaaagcaattagggaataattacaatgcggatagcattatgcggggagaatttgggattggtataaaaatgaagagaaaatcgaatccagggagaaatagctttatggaattggaatacccggagattgaagaagatatgcgtttgttcgttgccttcggatgccggttccgattccgatcggcattcgattcctactctgtggcttgtgaagcgttctctgaaaaacgacagcagattctctcctcttcttcttcttcgcatctaatcggtgtcaggcttcatctctaatagcgttttctgcaattttttttcttttggagtttttcttggttttcttttttttcgagggtcttctttt

SEQ ID NO: 47664 - DNA, 517 bp, Gossypium hirsutum
  Clone ID: LIB3585-038-P1-K1-C1
cccacgcgtccgagttgatgaggtagggttgtggtatggtcgtaggaagggctcgaagcagatggggcatgaggaaagaacccctgtgatgattgctgctacgtatggtagcattggtgttattaaactgatcctttcttcgtcagatgccgatgttaatcgtgtgtgtggacacgaaaaaaagcacagcccttcattgtgctgcttctggtgggaccgtcaatgctgttgatgttgtgaaactgcttttagcagctggtgctgatgcaaacatggttgatgcaaatggtcatcgtcctgttgatgttattggttttcctctgaagcttcaagctgtgaaattaactcttcaagaacttcttggaactgagagttctgttatcgagcagaacttgagggtgtcaactgcagttgcaaactctggttctctatcgccttctcgtgataatggctcgccttcttgttcaaactcgcttccaaagttgaagtcaactgccgctcctatttcaacatcgga

SEQ ID NO: 47665 - DNA, 450 bp, Gossypium hirsutum
  Clone ID: LIB3585-038-P1-K1-C5
acttgaaaactcctatatcttccgggtggaatccaataaatttaacttggaagcttaatctgtatctgagaaaacccaagactagatacctgcgactgctattgctgatgctcctgcagctgctgctgctgctactggtgctgctactacggatgcttctggtacttccactgtttattgtggatccaccactctcactctcattcgaccctgatctctttttccaccactctttatctacactcttaccagatgcatctaaaaccgttggctttggagaaagtttgcaattcttattcgcatcacaatcattcttcttcttgttcttctttttgttagtccccaaggaaattggaaacaccattttcagaagaaacccaccattatctaagcttccacttctcttaatttggggtttcggattcttttgcttcttcttcttgttctctc

SEQ ID NO: 47666 - DNA, 511 bp, Gossypium hirsutum
  unsure (1)..(511): unsure at all n locations
  Clone ID: LIB3585-038-P1-K1-C7
cggacgcgtgggtcttaaaatgcctaaatcaccatcactcttcgattttcaccttctcttacgcgggactatcttttccttagccgccgccgatgccatcgccgctgcaaggccaataacccaacaattcaaagaagccccacaattctataactctgaaatttgccctaagatagttggcgaagatgatgaatctgataatggaacctccatttttttatgctcggatcaatctgttcacgtggcaatgacccttgattcagcttacatacggngttcaatggcggctgttctttcaatacttcaacactcctcttgtccccagaatatcgtcttccatttcgtcgcctccgccaccgccaacgcgtcgtttttacacgccaccatctcttcctccttcccttacctcagcttccaagtctactccttcgacgactcttctgtttcacgtctcatttcagcctcaatccgctccgcactagactgccctttgaactacgctcgaagctac

SEQ ID NO: 47667 - DNA, 509 bp, Gossypium hirsutum
  Clone ID: LIB3585-038-P1-K1-E2
ggaatcccggtcgaggacgcgtgcgcagattcggaagaggaacatatgggaattgcaatggccaaggcagtttttgtgccgaaatctgagagagagacaatagctgagcgtaagcgattagaggaggaagaacgggctatggaggaggctgtgaagaggaagttagaacataggaaaattgagacaaggcaaattgttgtcgagaagattagagaggacactgagattcagaaaaatatggaattggaggcaaacatagaagatgtggatactgatgatgagcttaatgaggctgaggagtatgaagcttggaaggcaagagagattgcaagaattaagagagatagggaagaaagggaagcaatgattaaggagagggaggagatcgagaaggttaggaatatgacagaggaagagaggcgggaatgggagaggaagaatccaaaacctgctccaccgcctaaacagaagtggaggtttatgcagaaatactatcacaagggtgcatt

SEQ ID NO: 47668 - DNA, 511 bp, Gossypium hirsutum
  Clone ID: LIB3585-038-P1-K1-E4
cccacgcgtccgcccacgcgtccgcccattttgatcgccaacaccaccaccaaagttttcgccttgagcgcatcgcccccttttggcgtctactaaaccccttatctctaatccttgctattaccaatttgttgatttcattatggcttccacactgctctctttggcttctgccactccctctgcttcactttgttttcatgaaattaacaagggaaaattgaatcttgggtgcatcaacaaggaaaaaaccaatcctttcatcaaagcaaagtcttttggtcgagtctctatggttgtggcttccaatgtgtctcatttcgagggtattacaatggctccccctgatccaattcttggggtgtctgaagctttcaaagcagacgaccatgagttgaaactcaaccttggtgttggagcctatagaactgaagagctacagccttatgtgcttgatgtggttaaaaaggtaagtatttttttcctaaactagttgattcatatgaatgat

SEQ ID NO: 47669 - DNA, 539 bp, Gossypium hirsutum
  Clone ID: LIB3585-038-P1-K1-E5
gggtcgcggacgcgtgcggtactgtgggagggaaaactaaggcttgtgccctccaagccaaccgacttgccgttttttgacttggtgagcattgctggaaaactgagggctgggttcggggctattggcattcggcctcctcctccgggttatgaagaatcggtggaggagtttgtgcgccgtaatcttggtgctgaggtttttgaacgctttattgaaccattttgttcaggtgtttatgcaggggatccttcaaaattaagcatgaaagcagcatttggaagagtatggaagctagaagagattggtggtagcatcattggtggcactttcaagacaatccaggagagaaataagacacctaagccacccagagacccgcgtctgccaaaaccgaagggccaaacagttggatcttttaggaagggacttaccatgctgcctgaggcaattgctaacagtttgggtagcaatgtaaaattatcttggaagctctccagtattatccaaatgggtaatggagggtataacttgacatt

SEQ ID NO: 47670 - DNA, 479 bp, Gossypium hirsutum
  Clone ID: LIB3585-038-P1-K1-E6
cttcattctctcccaaaaagtatcaaaatgctaccattttctcaaaattctcactataaactgagtggcttggtattattattatgggtttctcgccttgttgattcaaagtctgggtttgagttagatgattcgttgacttatctttggcctttgccatctgagttcacttctggcaatcaaaccttgaccgtggacccaactttatctttctctgccttaggaaaaggagggaactccaagattttgattgaaggatttgagagatataagaagattatattcaaacatgtttctgggatttcactttttgataaatcgagagggataagatctgtttatgatattagtgaattgagagtcattgtgaattccgacagtgaagagcttcaattgggtgtggatgaaagttatactttgtttgtggcaaagaaagatgggaaatctattgttggagaagccacaattgaggcaaatac

SEQ ID NO: 47671 - DNA, 475 bp, Gossypium hirsutum
  unsure (1)..(475): unsure at all n locations
  Clone ID: LIB3585-038-P1-K1-E7
agatgatagnggcgccaaaagtaggacagaagcagatgacatatcagaatgcagccaagaaccgggtatggctggctgcttccagcctacacgtgatttggccaatgctgctgtgcatacaagagagcatttgcacttgactgaaatatctggtgtggaaaaggagaagaattcctgtccagcaccttgttcagaagagtattatccatctttggaagatgtcagcttctccattccagaaatacctggtgaagcagggtattctacatgtggggattaccagtttggtttaacaaacctagctaatccttcttctctggaattagggcaagaatcatctggattcaaaaatcactgtataggcactagtagatgccatgaagtgatgaatgttgcattacaaacttctgtaggattaaatacttctacatctttcataaatacagttacaacttctgacaagcaagaacatatg

SEQ ID NO: 47672 - DNA, 506 bp, Gossypium hirsutum
  unsure (1)..(506): unsure at all n locations
  Clone ID: LIB3585-038-P1-K1-F2
gcgcggacgcgtgggtgcaagnaggaggagcccaagacacgannnnggagnagnggcgggaanaccaaggggggtgccccctnnaggctgcgctttccctcacctaaactcatcttgtcccagtatctctcagacaggaccctcgccgtcgctgttggttccaaacggcctttgtctctcatttttcccttaatttactctttttttaggagttattcgtaattatacatatctttgctctacggtggtttctctcaatctcaacctacaaagaaaaaaaccaatgggaagagaaaaagagaaagaaaagctgtctgagaaagctctaaatctccttagatctcgtctctctgaccctaatttcatatttcgacccctctccgattctcctgacagtaactacagcaagttgaagtttataatttccacttcagttacggaagcatgcaataattcgattctgcttcttggtcctcgtgggtcaaggaaagtcgcggttttggaac

SEQ ID NO: 47673 - DNA, 427 bp, Gossypium hirsutum
  Clone ID: LIB3585-038-P1-K1-F4
cccacgcgtgcgtccacgcgttcgcttctctttcacctacccttatcaaatcagatcaaaaactggctagacaaagcttctgttagttgtttttttgatgaacctatctgcatacattcatggagagaaaagagggtttaaaaatagaagactatgtaatgagaaactcaatcaactcaaactcatcgttttgtgattacacgggcaatggtttcccattacaaagtgtatttgattcatgtagtgaagaagataataataagcattcattatgctttatggagtagttggatgttcaagactctacctgtcctttatttgatactgctcaacacgatccagtctcgaccaatatgggagcacctgagcacggttataatatgactgctacacctaactattactctgtttcatcaggttcaagtga

SEQ ID NO: 47674 - DNA, 501 bp, Gossypium hirsutum
  Clone ID: LIB3585-038-P1-K1-G2
cggacgcgtgggcggacgcgtgggagaaatttaaggaaacaaatctatatgttttgcaacttctgttaattctttaaaggttagaggaaatcatgcttatttctacaatggtaattgcaggaaaaagcttttccctttgctatcaggtaattttctttaagcttaaattaatcgaaaaactgggtgaattgtttagatttttcagtgtggttttaggcaatcgattttatccttttttactacaataaattaagtcgcggatcgtataaggagcaacattttttttatagaagtataaggagcaactttgatagatgaacaaggggatgtgttagtatcaaaatttctgtaaattttattataactttctgtggaatttaatgtctggaacaatttttaccttttcttttttctttcataggagaagtatttgtgaggctgaaggtgttgggttttattattctgttcagcatgctatatagaaatctttcttcttttgta

SEQ ID NO: 47675 - DNA, 196 bp, Gossypium hirsutum
  Clone ID: LIB3585-039-P1-K1-A1
tctccaaaactactataaaaagaacccttctcatggcaccatggaaagcttatacttattgttgtctacaacacacttgctagtattcctacttggagtggtgactccttaccatctcctacattttgttaccttataatgtcaccaatattattggttaaacacctctacattctgtattcatagcctaccaagg

SEQ ID NO: 47676 - DNA, 490 bp, Gossypium hirsutum
  Clone ID: LIB3585-039-P1-K1-A2
gggaagaaagggaccaatcaggatgccatgcttgtttgggagaatttcagttcgagaagtgacgcgatattctgtggtgtatttgatggtcatggtccttatggtcatatggtgccaagaaagacgagattctcttcctgttatattatgtactcaatggaaagccagtcttactgttgaccagacctgtctaaataaaacgaaaactcttctgaaagcactatgtctcaggatgctgcgtcttttagcatggattatgaatgctgtcagtcattggacattgaagaaaacgaacagcttccagagatgtatttacctcttaaacaggctatgttacaacgctttcaagttaatggataacgaatttaagttgcatccacccatctcttgtgtctgcagtgggacaactgctgttactttggtgaagcaaggcctggatcttgtaattggaaatgttggtgactcaagagcagtgctcgcaatgagagac

SEQ ID NO: 47677 - DNA, 549 bp, Gossypium hirsutum
  Clone ID: LIB3585-039-P1-K1-B11
aaataaattaagggaaaaaaaatctccaatctccagaaactctcagcggaggagaaatcacaaatggcgtcatcgtcgcaaaaaggaatagtgataacaattccagttctagttctctctgtctctgccgccgctatcttcttatttttcctcttatcttccctctcttcttctccttgcacttgccctccctcgatccccgattccacctttaccaccaccgccgccgtcgtaaccggtggtactgtggtggaggaagttgtggatcggagaatctcagtgagcagagatgatatagagtgggtgaaagatcagatccgagctaatggattacatatgcaagataatgtgcttcgtaaagggatcaatcctcgcactcgggctcagcaattggaagatctcaacaactttaagggtatttcacactatggaggatctgaggctaacaaccacactgctcttccatgcccgggtgagcttcttgttgaggagcaccatagtaattatggggagccatgggctggaggtcgggatgtcttcgagttcctt

SEQ ID NO: 47678 - DNA, 519 bp, Gossypium hirsutum
  Clone ID: LIB3585-039-P1-K1-C4
aattgaacaatacacccaattataaattcaaattacaaaatatttaatccaagtccaattcgtgaagaaaataaatcccatataggacaaggcataattttgcactatatgtaaactttaattaatacaaagcccctttaacccaaaataaaacaaaaagaagatgaaaataatccaactcaaattgaattaaggaaattcttacaaaacggggaagctggtgttgagagagagaggctctgagagacaattcaaagacagcccatagacaaataatagctcatccatagcatagctgtacatatattgaccacggtaaaggatcttcagctaccctggaggactctccgaggatcaagttgcccactgcagtaactggaaggaacagcagaaagttcttgccttcccctccattcctcaccgggtttcaatgtgataggtttctcgatggcagcagcctccacacagagcatatgtttgtattcatcatcaccaaagtcagccatagcctttgccttt

SEQ ID NO: 47679 - DNA, 547 bp, Gossypium hirsutum
  Clone ID: LIB3585-039-P1-K1-D11
aagcaatgcaagaaggcaaagtttgagatcaagtgagaggcttgctagagaagggtttgatgaaggtactggtgagctcagttcgagctatggattaaatgcagatggtgtaagcagttcaagcaggcaaagtttgagagcaaatgagaggcttcctggagctgtgctgcttgcaagagcaaggcttgttgaaagactaagaggcgtgtctgtttctgcaaacaggcgaagcaatagagctccacctaatgcttcccaccgggagcatgtaacgcgcgatgattttaggatcataagtgaactctctacagggttggcagctaggggttccccattaacctctgaagcagaaagattcgaattgttacgagaaacaaacaagaagcctcctggacttactcaggaggctctggaccgtttgccgctggaaattttccgcagccaagacatcaatgttgaaaggaagacatcaagggaatcaagagattgcagtatatgccttgaaagcttcggagaaggagatgtgcttactcagctgccgtgtggg

SEQ ID NO: 47680 - DNA, 549 bp, Gossypium hirsutum
  Clone ID: LIB3585-039-P1-K1-D12
attgaattattggaatcaatggaaaaagcttgcaattcccattaccataatcaatctctcctgcttcttcttccactgttcctttcattgcttgttgcaggtctggcatatccaacccaaaatgagcaatcccaaatcatatcgagattccaacaataccttcaaatcaacacaacccaaccttccccagactatcaaagctcgacccagttccttctatcccaagccaattccctttctttagaatcccaagtcatagaattcgtcaaaggcaaaccagtaattctcctcaaatggccaggctccgacctttcccttccttctatcctcttaaactctcacatggacgtggttccattcgaaccttcgaaatggacccatccgcctcttggggcttatatcgatgaaggaggtaatatctttggtagaggctcacaagatatgaaaagcgttgggatgcaataccttgaggccattcgtaggttgaagctttctgggtttcagccaaaacggtctctttacttatcgtttgtacctgatgaagagatt

SEQ ID NO: 47681 - DNA, 547 bp, Gossypium hirsutum
  Clone ID: LIB3585-039-P1-K1-D3
cccacgcgtccgatccagcggaaggtagtgcaatgcattttgttgcaacagatggtcaaaacccttgggttgagtctcctcaaaaggtactgagttctgatgggactgctgttccagacattgttatgcccatgttctcaaggtggatgttggtcctcattgtcaggaaactcaaaacactgtcactatgaaatcagccgtagcccctcaagacatgctaaaatttgccactgccacagaacctgttcagttgccagatcaagctttaactttaatccatgatacatctatttccagcagcaatctggaatcatatgattctagtgtcattggagtgtgggggattgaggacaaaattgttctcttggaagatgaagcaaatcatgtggcaaagatggaaaaatctgatgttccaagcatgtgcagtccagagcaaaacaaaattcctgaagatgaatctaaaatagcacctgatgagtctagcattccaatttgcttaaagcttgctgaaaagggtgatgaccaggcaaaacaggttgaaaaggat

SEQ ID NO: 47682 - DNA, 546 bp, Gossypium hirsutum
  Clone ID: LIB3585-039-P1-K1-D4
cggacgcgtgggcaacaaaatttgaaaagactgaatgaagatgtcattgattatgacttgcttgaagatttggtctgtcatgtagatgaaacgtgtgataagggtgctatactcatctttttgccaggagttgttgagattcatacactacttgataggctagctgcttcttatcgatttgctggaccatcttctgactggctcttgcctctacattcatcaatcgcagcagatgagcagaaaaaggttttcctaaatcctcctgatggcatccgtaaggttattatagcaacaaacatagctgagactagcataacaattgatgacgtagtctatgtgattgactgtggaaagcataaggagaatcgttataatcctcaaaagaaattatcaagcatggttgaagattggatatctcgagcgaatgctaagcagcgtagaggaagagctggtcgtgttaagcctggaatttgcttctgcttgtatacacgacatagatttgaaaagctcatgcgcccatatcaggttcctgagatgcttcggatg

SEQ ID NO: 47683 - DNA, 544 bp, Gossypium hirsutum
  Clone ID: LIB3585-039-P1-K1-E11
cccacgcgtccgcccacgcgtccgcccacgcgtccgcaaaaacaagagcaagcagaagctgccagcaaagtcaccccacaaggctccacccgctcccgattcactatttcaggctagtgcttcttcattttatacgcggctgatttctcttttgctagttccttctttcattgcgtatccacacggttcagattgcaagggtttcctctgcggcacatcttttcctttcttttatttaaaattgctgaatcctatggattccttttctctggttcatatctgagtttttttaaggcgatttcgctgtcaaattttggcgaagatgcttcggcatatggccggcgggaatgtccactgcgtctctcgtgagtttcgcctttttttacctgcgccgacgtgtatgctatttcttgtgaatttaattgacttcgggggcttctttctggtgaagcttctcccgttcgttctttttctctatttggtcgtataaaatcttctttttatttgaaaaaaaaatctgaaaggaatcaatggaggggctgat

SEQ ID NO: 47684 - DNA, 505 bp, Gossypium hirsutum
  Clone ID: LIB3585-039-P1-K1-F8
accacgcctacgcaagaagcaagacctgattatccagctttgtccccgccaatgtccatacagctgtgaagatggcaatgaaagaagggggggcacttggggttccataattgttgcacatgctgcttcttttgatacaccggctatggacccaactctcaaaaagaagatcatcgatgatcttgagatgaaccttatgaggaacgcgtattataaagatgtggagaaagcttgcaaaagatggtactcgctatatactcctccaggcactggtgaatccagcttggctgacgacatggctaatgatctcaaagatgatatacatgacatggggctcaccagtgctcgctctgaggctgcactaatgaggacactgctatccactaccaatcgctctatactgatgattgaagacatagatggcatttctcaggttcttggacgccaaatgagaaacctacccgataagcctccagatacaactgcgttgacactatacggtata

SEQ ID NO: 47685 - DNA, 519 bp, Gossypium hirsutum
  Clone ID: LIB3585-039-P1-K1-G6
gagagcttaaggctgttgtaataggacgaggcaacggaagaggaagagggagggaattgactataatgctggaattcgcttggagaagaggcctactccaggcttttatgatgttgccgataagatagacctgtggagccgcctaagttcccaactactattgaggaacttgagggaaaaagaagagttgatatacaagcacagttgacgaagcacgatattgcgaacaataaaatttcacagaggcaggatactccatcagcaatattgcaggcaaacaagttgaatgatccacaaagcggacagaaagagatcaaaacttattctgccatcaccccagatttgtgatcatgaattggaggagactgcgaaaatgggatatgccagtgatcttctcgcagagaatgaggaactggctggagggagtggtgcaactcttgctcttctcgcaaattattctcagacaccacgtccaggaatgacacctttacgaaccccacaagaaacaccactggaaaa

SEQ ID NO: 47686 - DNA, 547 bp, Gossypium hirsutum
  Clone ID: LIB3585-039-P1-K1-H10
ccatgatgcacatgtgcaaaaaacacatagagatacatatcctttagaaagcctaaaaggaggaagaacacgtccagtagtcttaaattgggagaaaagagggagatcttctaattatgatggacctattatgagtgtctctccgaagaatgcatcaatggcaaacatgccttctgtcaatgtgtataaacaaagaggataccctgcatctgtggaaaaagaaatgccttctgccagtgatggggatgctgttgcagatctaatggagcaacatgatcaattcattagttccatgcaatctcgtttagctaaattacaggctgttcatcggtattgggaaagaaaagacataaagggggcaattggtgcaattgaaaagatggctgatcatgctgtgcttgctgatgtgatgagcattgtcattgagaaaatggacatcgtcacattggacatttgcacttgtcttctgccacttctgtctggtctccttggtagtgatatggataggcatttgagcatctgtctggacatgctgcttaagctggtc

SEQ ID NO: 47687 - DNA, 498 bp, Gossypium hirsutum
  unsure (1)..(498): unsure at all n locations
  Clone ID: LIB3585-039-P1-K1-H2
tcggccacacctactcggacgcctgggtaaatttgaaatgttggaatgtgcataaaactaattttgaacgtgtctgtttctctttcttttgtcaatctaaggcactattacccatgctgggctgtgtttctctggtgtgccctcatcattgcatgcagaatttattaatcttagacttgctctaggtgaagatgtttatacctattaggaaagaggcaattagttgatttccttgcttttgactaaaaccagtgattaattaattcctggtatgataggcagttaggtttaaagttacccttgagaacatggatttttaagaattagctttgttagaattcatttatatattttctgctgtgacggagatagttttgtatcctctctgttagtagtggaacttgtgcctgaggcacttggagagtttctagtactctntttggctgctattgtagaatatgctgtgataaattagaagtttcttgatttgaatatgct

SEQ ID NO: 47688 - DNA, 549 bp, Gossypium hirsutum
  Clone ID: LIB3585-039-P1-K1-H4
gttatcttcagtacatcgtttttgccaaaatgttgctttcctgaagacaaagagatctactatttgaagcaagtggcatgtcctcgtttaagatcaggagcatttcttggtggctgtttagagctttacttattcatcaacaaattttggatgagcggtcttcttccctttttgagttattgcaagtatttaagggtgaaactttaggtcattttggaagttttgaaaaagtgacaagttactggggtgctcaattacaagatggggaagcatctacaattgtttcaatggttcatttagaagcaggggtgctagaatatatttatggcagacttgatccttgtaggctagatttggagtcagctgaagtggcagctggtcttcagctctctgttactggtattcttggcttacgtactgtacatcaggtagaaccaaaggcgcaaatgatattggttgcaaatacaagctcgaaatcagtaagtggtgatataaacacttccatagctcctgacacgcaattgactggtccaaatgtcagtgaagcat

SEQ ID NO: 47689 - DNA, 522 bp, Gossypium hirsutum
  Clone ID: LIB3582-027-P1-K1-A6
cccacgcgtccgcccacgcgtccgaatttggggaaaatgtcttactgatttcatttctgtaagacattttccatctcctcttcatccaggcaaattttacacgctgctgttttgtttcctatcttcccctccttctcagaatctcattcctcttcgcaaggggaaaccagatgaaattttacacactgctgctgtctttctctctttctgaggatctcattcctcttcgcaaggtatggcatcttctttaatgtaatctggtgccacattttgtttgcaaatgtgcttgattcttgtgcttgttgtttttggaaatgtttgcccaaaccttaacaagtcagggttttggtgtggatgctatttcaatgttaggaaatggttatctctatcttcattgaagttgcctgtgcttcatatcaattttgatacttgaacactataaagataatatgcacgtatgtcaattatagcttctgtaattgcaatatcatttcagatttttattttgggtttatgtttgag

SEQ ID NO: 47690 - DNA, 476 bp, Gossypium hirsutum
  Clone ID: LIB3582-027-P1-K1-B1
ctccgatcaccctccggtctgatccatgacgttgtcagacgaagaagatgagtttttggcgaatttccttgaatccgagctctccgatgaggaggagccgaaagccaagcgattgcgcgttgtgaaggaagatgaggaaaaggagaaagaaggcaaaggagatggggcttcttcgaatatgaatccgaatccgaatccgggccaagtgaagaacaataataattggaacaatcctaggaggattgagagtggtactttcagcaagattccacctgagttatttactcaaatcctcaaattcctctcatccgaggatcttgtatcgtgctcgatggtgtgtagtttcctgaattatgccgcatctgacgaatccttatggcgccgactgtattgtatgcgatggggtttgttgcctccaacaaaaatacgggaatgtccttggaagaagctttatattcagcgtgatgaagaggaca

SEQ ID NO: 47691 - DNA, 354 bp, Gossypium hirsutum
  Clone ID: LIB3582-027-P1-K1-B7
atccgtcgccagcgtcgaagtaaaacaaattcagctggaatctctcgggcacggaagcgggacactgagagttaaaagactacacattgagaagctgagtctttgagatgtgggagtgtggagccctcattgtttttacttggaaagctgtgcgctgattcatgtgtgctaactgtggatcgaagggggcttaccgagaatagcgctgaatgctgtattgagcattcatggtatatcggcacttgagaagctctttgaatgatcaagagttgtggagacaagtacgtatgccttctcaagcttgaagtatgctgcatgggagacttgaaagcgaattggcttacatggtgtgtg

SEQ ID NO: 47692 - DNA, 490 bp, Gossypium hirsutum
  Clone ID: LIB3582-027-P1-K1-C11
gttccccttcggaatcccaattcaatagctttgatgaatagagaaatccatctatgccctcatttgtcacgagcttctttcctaaccagcaaatctcaaatataccaacctcacaattccagtcttgatttctttctcaaacccatcgagcttcttccctaatgagctttttgtcttattttggaggctgtaactatcatttaacttcaaagcttgctaccggtttggctgcagatgagaatccacttggtgtggtccttggtggaattttaggacaagtgctatgcaccactgctgctgtacttgaaggaaaaaggccgacatctcagatatctgagaaaattgcaatccaaatccatatttttccttcttttccttatgcgacagcaatgttttgcatttaatttggcgagcaactagtaaaaccaagtttatatctattttgatgcagattgcactctcgtgtggagttcttttcaagtaaatactc

SEQ ID NO: 47693 - DNA, 487 bp, Gossypium hirsutum
  Clone ID: LIB3582-027-P1-K1-C2
cccacgcgtacgcccacgcgtgcggaggctcttgaccagatcaacgagcccaagaggccttcagacaagcgtctccgtttcccactgcaggatgcgtacaagattggtggtattggaactgttccagtcagacgtgctgaaaccggtgtcttgaagcctggtatggttgtgaccttcggaccgtctgggatgacaactgaagctaagtcagttgagatgcaccatgaagctcttacagaagcacttacaggcgataatgttaggctcaatgttaaaaacgctgctgctaaagatctcaagcgtggttttgttagcatgcaactacaaggatgaccctgcttacgaggctgacaacttcacttctcatgtcatgattatgaacgaccctggacaaattgccaatggatataccccaggccttgactgccacacgtcacacattgctgatgagtttgctgagctcttgaccaacattgacaggcgatct

SEQ ID NO: 47694 - DNA, 517 bp, Gossypium hirsutum
  Clone ID: LIB3582-027-P1-K1-C4
cccacgcgtccgcggacgcgtgggtcagatctcgtggaccggccaaacgcctgtaattttagctggaactacgccatattctggcaaatttcgcggtccaaatccggggattgggccctgggttggggagacgggtgttgtagggagcctaaagaaggagaagaatcggaagctactcggattctaaacctacgcctcgaagacgacactcatcagaggatgaggaaaagggttttgcagaaattgcatactttgttcggtggatcagatgaggataattatgcccttggcttggacagagttactgatactgagatgttcttcttagcttccatgtatttctctttccctcaaggagaacgcggccctgggaagtgtttcttgtctgggaaacatgtgtggctctctgatgcattgcaatcgggttcggattattgcgttaggtcatttctgacaaagtctgctggagttcaaaccattgttttggtccctactgatgctggtggtgttgaatggg

SEQ ID NO: 47695 - DNA, 437 bp, Gossypium hirsutum
  unsure (1)..(437): unsure at all n locations
  Clone ID: LIB3582-027-P1-K1-E11
ctcaacggcagcgacggcctgcaacgggtggnaagagaactggaaacagatactcggcgcaactccagacggcgacctgcggaaacggatactggaccacgaggagcaggaatccaagcctatggacgggccaaagagaaaatgcggggacgcggcatagcataagcactgctaaaaagcctgactccgttagaccatcttgtcagcgacaaatcaccgcagtctggcaaggacacagcaggtgccgcagacgatgccaaggaacacgcagtggagttggcagacaaggaatatattaataatgaagaacacgtgcggatgcataatgcggcacaagatgaataactgatacctgtgaaagaccgtgttccagcgactggcacatgtggaacgaaggcatgcactacggcaagtgcaccgcagacgaacgatcttcc

SEQ ID NO: 47696 - DNA, 501 bp, Gossypium hirsutum
  Clone ID: LIB3582-027-P1-K1-E12
ttctattctagctctaaatctctcgaaggaaactggtggatctcaaagtaatgtttgaaaagtttgctattccctagaactacaagaactcgaatgtccactggggaaggctgggccagattgtttatccgaaagatacatgcttcagacggttctcaggaaagattccaccccttttgagtcctattttttgccatatggagagaaagtgatgtcggatgctgccaattttcttcttgagccccttttaagcaactactcatttggaggactcaatacctggacttattttatcctggacattccccatggtgcagctggtggaaatctccatattcggctgacgtcagatagaaagctaaattatgaaatatatgttagaaatggcggattgccatcgcttgttaactgggactattattatgtaaacaagacaagcaacagtcatggctccatgtttttcgctttgtacagttcaagtgaagaaaaggccgattttta

SEQ ID NO: 47697 - DNA, 501 bp, Gossypium hirsutum
  Clone ID: LIB3582-027-P1-K1-E6
cagcaattgaggggtatagccagccttctctgccaacaagaggtttatacccttcaatctaataagtgctcatttagtaaccttgtgatttgcatttatttatgcaaagctacatgacttgtttttatcgagtgatagttcagtgggactaataaacaccagttactttaaattttcatgaacccatggtatcataatagagcgtacattctgaaaatgcttaaatgtgtactgttgagtttatattcagtggctttgatcactgaaccttaacaccttcaatatctgagacttcttatgtagcatagaagaattggatgatagaatttgtggtagtctaatctggtctgttataagatcaaaaactgcaattagaatgaaactgaaggaaaattttatcatagaatctaacctatgattaagaagaaaaatcaaggtaaaagcttgtgcttttttgtctttccgttccttctctatccactgtacgggtttcagaaaaag

SEQ ID NO: 47698 - DNA, 503 bp, Gossypium hirsutum
  Clone ID: LIB3582-027-P1-K1-E8
cgtaaatgtggcgattaacccttctgcgctctccctgtgccttgttagcctctccaaaggctggctagctcgcccgacctttgcgtcacaacaccaccaaaatgagtgccaaatcaataggctcctcgcctctgcaccccatacccgaattcattccgaagactgcaccaccgagtggaggaacctcaactgtcaacagctcatgagtgctggtgtatctgtaaagacgcagactatggaacctaatggccttgttaagccttcctacaccaaagctcctcagcttctctacattgtcacaaagaagaggtatgcgaggtattgtgatgcctggatgtgccggaacattccacgattcacagccacggcagcatcatagccgctgcaggtaccaggaccagcaccagaaagttcgacggttcacgcacagtgacatcattgctttgccgcagggagtggatcactggagctacaatgatagccatgcgcgtgttgctactatc

SEQ ID NO: 47699 - DNA, 124 bp, Gossypium hirsutum
  Clone ID: LIB3582-027-P1-K1-F2
tgacgcactctgtagcagctcattctgcgcggcgggtgttgtggtttcgcgcaacgtgacctgtacactgggcagtgaactagcgcccgttattttaggtcactttcgttgctttgtcgtcacg

SEQ ID NO: 47700 - DNA, 325 bp, Gossypium hirsutum
  Clone ID: LIB3582-027-P1-K1-F3
cggacgcgtgggcggacccgtgggtgcatgtcaacataccttctccttttgcagcgcaagcgatggtgtgtgttgaggccgcagatatgggcttatagttgggttttccaagagtagaaattgagggtctttttggctgtgatccgaaaactgaaagcacaaggaattgaaagatcggtgataggggcttacattttcaacataaagccaatatgtgaatgatatcaaaaatgtgttttccatcacgtaccaaaacatgcaaatggtgcaccacactctttggctacagagggattaaaaggagatgataatctcttttttggag

SEQ ID NO: 47701 - DNA, 525 bp, Gossypium hirsutum
  unsure (1)..(525): unsure at all n locations
  Clone ID: LIB3582-027-P1-K1-F7
cgtgtataaacggatcacatgcccgattataatcgataagtgttgaattagaaacgatataatgtgttatttggaatatttattatgaaattatgattatcgctataatacaaaaatcgaacttgtgagtatataactaaatctagtgaccatttgttaatattattaaatttcagtattattttatgaatggtgattaatatttaagtatgttaattgttgaaaataagtaaattatgtacaaaagttatgaaattaaactgagaattttagaggaacggaacgcagaaaatgagtacaatcattcagtgaaaaagatgaattgacggtaaattacccaagtaaaccgagatttagcatttgttgtaaattctcgtgttttctttccgtttagctcttacgagcttccgttaactcatatgagtttcagttaaccctttttgggtttcagttcagctctgatgagcttcagttagccttcgggcttncgtttagcacttatgtgcttcagttagtcttcgggct

SEQ ID NO: 47702 - DNA, 272 bp, Gossypium hirsutum
  unsure (1)..(272): unsure at all n locations
  Clone ID: LIB3582-027-P1-K1-G2
gttttcttgtagatacgttcttgtagaaacgggcgatcggattgactcaaagaatcacactatccggaaatcttntggtagtttttaaatgtttaacttgggttatatgcaatgtagtaggtgaattgattntatgttggttatttgtgaagttgttaaacttaaatggtaattgccttcagttagttcttttaggatacatgtaaatatgtgttggtgtggtatatatgtatgactggaacttaatttggtatatgtggtataagctttat

SEQ ID NO: 47703 - DNA, 494 bp, Gossypium hirsutum
  Clone ID: LIB3582-027-P1-K1-G9
cccacgcgtccgaaaaaaacaaaccctaactagggttttctttgttttctctgccgccgctctcagtcaaggccgtcccttggcctccgacgactccccggcctccgattgtgacggagaggggacaccgtgacggccccaggtgttcatggagagtacggcgcgcgtggagaaggtcgattccggatcttgcggcagctggagactgctggaggcacatgcggctagggctgttgcttctgaacatttgctttgggttatgctgaaatcgggctagggtagaacctaggttttgggccagctaatgatattgggcttgtaaaaatggactctttatttgggtctttactctctgttttggttcattgtttttagaagtgggcccaggcaaataattggtattacagatacgtcttagtgtgtgtggacaattattcaaggtacacttaagtaaggtctctaagggaaaattttgaaacgttcaagacctttag

SEQ ID NO: 47704 - DNA, 452 bp, Gossypium hirsutum
  Clone ID: LIB3582-028-P1-K1-B12
cagacacgtgggtccggggccaatcgataggcatggtctgtacacagtttgcaagacttatgggaagaccatacattttttgcaagtcaataaaggtgatactctccctctcgggttacctcaattgatgatggctctcactagagatggtcagctccatgaaaaacttggtcgagatgtggataagcgattcggggtatcatttgagaaagagagggcaaacagagctgagttgacgggtccaacacatgggattcatccattggcagatggaggtgtgaaagggctgatccctaaactcaaggaggtgtattgcacgcctactcatacagttgcactggtcttcgtatgaatcattgaatctattgcgtataccttacttaacagcacttacgaggtgacactgatgtgagcaaagaatagaatctaccatatgccctcatgtgtatctt

SEQ ID NO: 47705 - DNA, 577 bp, Gossypium hirsutum
  unsure (1)..(577): unsure at all n locations
  Clone ID: LIB3582-028-P1-K1-B2
cggacgcgtgggcggacgcgtgggttggatatgtacaaaattaggcagtcggctaagaaaagcgtcattgccttagactaatagtagtagagattcccccttaggaacttccaaactgaagggccgaccctgtttgagaaaggcgggcgactaaaccaatatctttattgttcgatcgttttgcaacttacaagtatatataaaagatcggggaagggaaggtatcaaaactcacaagcttataaacagaaaaaaaaaaaaaaagatgcagggccatgtctcacaggatactccggttggtgttccagcagctttaatatgggatgtataccgcggtctggagctggggaggcttgtggataaactagcaccggaggttcttggaagggtagaattcctagaaggtgatggaggcgtcggaaccattgtcaagctcacatttccaccaggtacgtacttgatatagtgataagtgattctattttgcaataaaatgtgaatttcattgtaggaagccctggaaggggttacatgaaagaaagattcacanagatggatgatgaaaatcgagttaaag

SEQ ID NO: 47706 - DNA, 575 bp, Gossypium hirsutum
  unsure (1)..(575): unsure at all n locations
  Clone ID: LIB3582-028-P1-K1-B3
cttaattctatctctaaaattaagttaattttttattaaataaatagatttaattattttactattaaataagtctaaattttaacaaaattaatctatttattatttaaaagatattatgatttaatccttaaaaaatcatttaaataagtataaaacttgaaaaatattcactctattaaatagtagataatacttttttaatttataaatatttactctaaatttagtcgattctttttgatagaataataattcatttaataattaaaggactaatttgataatttcgtaatcttctaagtgcttttaagtataattatatatcaacaacctatacataaatacctagatatacataagtaaataataatattctcatcttagaacattaaaaataaaccttattatttcctaggatgcttgtaattaaataattgacctacaatgttattctatcatatttatggcatataataaatttattaaatnnataatataatataaaataatattttggatttatttgtattatttattaaaataattaatattaagtttataatcataatata

SEQ ID NO: 47707 - DNA, 577 bp, Gossypium hirsutum
  unsure (1)..(577): unsure at all n locations
  Clone ID: LIB3582-028-P1-K1-B5
ttttaaggttacaataacccaaaatcttttgttatcattttcatgctaccaactctaattccttctgatttcatctctcataaatggaaacaatcaaacccaaatcagctttaacaaacagcaacaacaagagcaggctagcaaggactttcgaaaaagtcatcaacctaagaaccgccacgaaaatcgcttccagcaatggggttgggatctgtgttctcgcatctcaacgcaaattgccgcaccatggttcaactccagaccggaaaacttcttcccatgcaccaaacaactccatggttaagcaaaaagcggtattggaagcgttgcttgctaaggttttcgccagtgttacttccatcaaagccgcttatgccgagctgcaactggctcagcatccttacaacagtgacgctattcaggcttcggaccaagctgtcgtggaagagctccgagcactttcggaggtgaagcgcaagtttttgaagaaagatcttgatctttcacctcangttactttaatgctcgctgagattcaagaacagcaaagcttgatgcgaacttacggaatcacgat

SEQ ID NO: 47708 - DNA, 568 bp, Gossypium hirsutum
  Clone ID: LIB3582-028-P1-K1-C11
cccaatcatcctgctcttggtggttctgtaagtactaactctgaaggaatgatgggacatccatcagcaagtatcttggccatgaaactgtatgaagaacgtgtgaaaaaccctcagtctgtagattcagagacatcatcagcacttatagatgccaatagaatggcccttctgaaaacacaggccaatcctcatagcctgttggtgcaaagtagccgtggaaatatgtcagtagctttgcaacaaatccaatcacaaacaccactagccactgtaactgcccaggatatcaaaagtgaagttaatttgggtggaaatcagaaaagcttacctatggatccctcatccatctatgggcaggcaattttacagcctaaatcaggactaggaggattgaatcaaggtgtctctagtcttccgttaaggggttggcctctaactggcattgatcagctcagatacaaggcaaccttggaaattcagcaaactttgggaatacagacccttgtaggtttggtcaattgtctaagggcaacttgaatgcaaaagatggtcaatctgctagaaa

SEQ ID NO: 47709 - DNA, 561 bp, Gossypium hirsutum
  Clone ID: LIB3582-028-P1-K1-D1
cccacgcgtccggtaatctcatcactccggactcgctctttcgattgaaaccaagccttcaactacactgtgtcacaactctctctgttctcaagccccacgcatcatctttaccatctacaacccgaaaccaagcacattcatcttcatcatccgagttagaatagcagaactgacaatatccaaaatatgatgataaaaaaactcactacacgacccttccccaccgtcaaaatccccgactaggaattgttaaacgatcgggcggataacttttcaaccctcgactttaactgcaatgcaccttgcagcccgtcccgttgactaccttatggcccttctccgctacctctcgttgaacgatctcgagcccgacaccctttgtgacgactctgacgtacccatcgtcgatgcattctcatgcgaccattttcgtatgtatgagttcaaggtgaagaggtgtgcgcgtggaaggtcacatgactgaccgagggcccgtacgcccacccgaacgagaaggctcaatggagggattcgaggaagttccgttactctcaatcc

SEQ ID NO: 47710 - DNA, 574 bp, Gossypium hirsutum
  Clone ID: LIB3582-028-P1-K1-E1
cccacgcgtccgatctcccaaacaatcacttgtatggtgaaatcccaccagacatcttttttgccaactcttcacttcggtaccttaaccttagtaataataatttcagtggccatatcccaaatggtttcatttcgggtcttgtgattttggatctttcaaacaatatgttttccgggaaaatcccgagggaaatcggattattttccggtttaaagtttcttgaccttggtgggaatgttttacttgggaaaattcctatcttgatatccaacattaccactttgaagtacttgactttggcttccaatgaattggtcggttcaattccacatgaaataggcaaaatgaagagtttgaaatggatatacttggggtacaacaatctcagtggtgaaattccaaaagaaataggtgttttaacatgcttgaatcatcttgatcttgtttacaataacctcacaggtcaaatcccatcttccattggtaacccttaaagatcttaactatcttttcctttaccaaaataagcttacgggatcgatcccagactccattttcggccttaaaaagc

SEQ ID NO: 47711 - DNA, 576 bp, Gossypium hirsutum
  Clone ID: LIB3582-028-P1-K1-E2
attttccagcacaggaacggcctttcaactcaaacaaaacaaatatcttttcttgaaactctaccagatgatgcccaagtttctagagaggaaagagtatttcgcttctggatcaatagtctcggaaattcaacttacattgacaatgtctttgaagatctcagaaatgggtggatacttttggagacccttgacaaggtgtcgcctgggattgttaattggaagattgctaacaggcctcctattaagttgccatttaagaaagtagaaaactgtaaccaggtggttaaaatagggaaacaattaaaattttccctggttaatattgctggaaatgacattgtgcaaggaaataaaaaactaatattggcttatttgtggcaattgatgagatacaacattcttcaacttctgaagaacctaagattccattctcatggaaaagaaattactgatgttgatatcctcaggtgggctaataccaaagtaagcgattcaagaagccaaagtcgcatggacagtttcaaggacaagagtttgtcagatggtatatttttccttgagcttcttagtgct

SEQ ID NO: 47712 - DNA, 576 bp, Gossypium hirsutum
  Clone ID: LIB3582-028-P1-K1-F5
cccacgcgtccgcccacgcgtccgcaaaacctttcctaaacaaaaccctaagaacattcgtgtgtttgacagaaaaccatcatagagtaatcccatggcttcttcccaagtgacttttcagtagtcaagcaactcatccatccatccacctccattgttgtccatcatgttttaagtttgtactagttaggccctcaatagaacattttgtaaaaaggaaactgtcgaaagttatgatctttgatcttccaacacatttccactaccgattaaacgtcttctatcttaattggctgctattgtggcttttggaagggcttcttcgatccaaacccttggctccgtccattgtttcccttcctcagccagagcatgcgccgagtggttcgccttccttctgacgaaacaacagtaaaggagtccccctctattgccagatcacgaaatcctaactcttcggcgactggcaccgtttgcaagcatacaattgcctctgccgttgttgcatcggctacaaaatgattctgccatcaatcccgaccccttgcaaggtatctctggctgttgtgcattccc

SEQ ID NO: 47713 - DNA, 526 bp, Gossypium hirsutum
  Clone ID: LIB3582-028-P1-K1-F6
ccgatccggtcgccacgcgtcgcccctacttcacctgggcaccgtccgctatcgtgcgatacgctaaccgagcgcgggcgtctgaagacacgatgaacgagtgggacagtcttcacccctcacaagggctactaaccaccaaggagctcacagacacctccgtggtggcacagatgacaatgcttccactggagtaagctgatccccatctaacaatgaaagacttgacgctagcatatgtggtcgctacctacggtctctatcggtctctgacgagtgaggggattaaaactaaaatgaaaaccggctcgatagataactccgtagaacatgaacagatattgagtgctgtacgttcatgacttccattgtcagttactactgcggatgatgcaaatgagtaaaacaaggacgtattgcgcttgagatatcgataccttgatttacgccggcggccgatgtatatgaacatcatgctccgtcacatactggcgacactcattctacgatatctagaggatgtaca

SEQ ID NO: 47714 - DNA, 569 bp, Gossypium hirsutum
  Clone ID: LIB3582-028-P1-K1-G1
gtttgttaaaagttgaacaaatagtattttggggtaaaaagataataaggtttgaggagggtagtatggagcctctatgcgatttttgtcgaggggtaagagcagtagtctactgtaaatcggattcagctcggctttgtttgagatgcgatgggtgtgttcactctgcaaatctgttgtcatgtagacatgctcgttcacttttgtgtgagaaatgtaattctcagtcttccatagtccgatgcttggatgagagattgtctctttgtcaagattgtgattggaatggcaatggttgtttgagtttgggacataggcgcgagcccttgaattgttataccggttgtccttccttggccgagtttagacgaatctggtcttcagttcttgatgcttcttctcgtggcggttttgatactggtttgtcacagtctggtaatgatgattgttttgctaactgttcggatcaaagagaacaaggggcctcatttggatcggctggtaccaagttgaatgaattagattctagttctaagctaaagccatgtatggagtcatcttgtttgata

SEQ ID NO: 47715 - DNA, 398 bp, Gossypium hirsutum
  Clone ID: LIB3582-029-P1-K1-A10
cagcccttgatttcctagcccccaaatctgccaattgattattttcagtgaataacgccgtgaatcttgatccatcgggatttccttccgtaacttttgtgtgatgatttggctttctggcttggttgcgcctagatttacgctggactaccatccacgggccaaaggcctcagccatcgtcaccgaatctgcatctttgtccaccgtcacaggagcgtcttccttctccccttgcatgctccgttctgccaaaaaaaaaagacaagaattttttaaatggccatatttaccacaatgaaaatataccgtgggaaaagcttcaaattccactctttggattcacccgttgatcgagacttgtgaggaaacccagcaatcctgaaaaacggatccaggt

SEQ ID NO: 47716 - DNA, 464 bp, Gossypium hirsutum
  Clone ID: LIB3582-029-P1-K1-A5
ccctcctctctcccaaaatggggtttctctttccagcaacatttctcaaccatcacagcataggagcaacaagttgagacctatttgggaggccccatctcgtacttccaaaatgcctcgtttaaagtcctttagactaactaaagaactggttgcacaaagggcaaaagataatgtcatcatagtcacctttggtaactttgcttttatggatttcatcctgacttgggttaaacacttgaccgatcttggtgtttctaatcttctggttggtgctatggacaccaaactactgaaggctctgtattggaaaggtatcccagtctttgatatgggcagccatataagcacagatgatgttggctggggttctcccatatttcataaaatggggagacagaaagtcttacttataaatgcaatacttccttttggttttgagctattgatgtgtgatacagaca

SEQ ID NO: 47717 - DNA, 604 bp, Gossypium hirsutum
  Clone ID: LIB3582-029-P1-K1-B11
ttgcacttcataaaagttcgtggtcaaaagaagctgagatcattaaggaaccccatttttgcactgtcctgcagaatttacttctttacttccctgcatgcatctcaactgatgaaagtggcaagcgcttgttcctttctgacagcaatcatcatcggataattatatttgatggtgatgggaagattttagactgtgttttgaggatggtgaattcgagtcagcaaagctgcttcgcccagctgcttccttttatcatgaaactgaagattgcctttatattgtagattcggagaatcatgccatcaggagagctgatttggaaaggagggttttggaaacagtttatccgacatctagcatccacaagaaaagtactggtttgtggacctggataaggagtaagctgggttttaccagcgatgatgatgtgaaatttgaagagcatgattccccttcactaatgtgtccttggcatctgataaagactgaggataattttttaattatcagtcgaagctttgaaacattatggggtatggattttgaattgggagaggttaaagaagttgtcagaggattttcaaatactttggagttctgc

SEQ ID NO: 47718 - DNA, 146 bp, Gossypium hirsutum
  Clone ID: LIB3582-029-P1-K1-D9
gcacgctgactggatagtgaatcgcaccctccctgtagccattcattacgcgcggtgtgggtggtacttacacgcagaccgatccactcactagcgagctacctagcgctcgtttcgtttgctttccttcctttcttgctacgcac

SEQ ID NO: 47719 - DNA, 535 bp, Gossypium hirsutum
  Clone ID: LIB3582-029-P1-K1-E4
gtttgagtggcaatcagttgggaggaaaactgcttcatattcaaggtagactgattttacacttttcttgtttagtttaaaataaatttatgttgaaggaaaagttgttgcagtatgtgatttgattttatcatatcatgaatataactgatcaatatttgagattgaatataactgattttacagtttcagtgacttctcaattttatttttttcgataaaaaaaatactatttatagactgttctcttgacatacaaagtagtggagatgttaacttgacctcaaggacagaaacagaaccccccaaaagccgtgcaaaaagtctcacctagtgaatcacataaagatttgtggcttgctgtgcgagacgggtccttgcctgatgtagaatcagcattgacgctattgaagaagactgctggtaccgtaaactgtaggaacaggtttggcctgacttctcttcacattgcaacttggagaaaccaccttcccattattcagaggcttctagctgctggtgctgatcctgatgc

SEQ ID NO: 47720 - DNA, 556 bp, Gossypium hirsutum
  Clone ID: LIB3582-029-P1-K1-F11
cccacgcgtccgcccacgcgtccggaatttcgatttgaaaaacttgtaatcaaagatcaaattgttttgtttcgagatcaaatacaaaatctggaaaactttttttttagttaaagcaatttgggttcaggtgctcaagaaagtgaagggttttagttttgacttttgagttgaaaattatcatcaattcatcatcatcatgatttttgtggatggacttcccttctctctcaacttttcttcttcatcatcatcatcgtccaagtctcagccatcggatttattagcggcattgatggaacaccaagttttagtgtctgccacacattcgttcaagtctatccaggaaaggaaagtctcagcatccatggattccaagctaataacatcgtctaacagctctagatatgtttacttattccagagggaatacgctactgtagatccctcacttgtccattatgttggcactgatgaagccacaacctgcgtgggtgttgtcattcggaaccgaaaaaacgggatgacatccgtttcccatatggattcttcaaaa

SEQ ID NO: 47721 - DNA, 450 bp, Gossypium hirsutum
  Clone ID: LIB3582-029-P1-K1-G1
gtagattatcgtcatctactcaactccatttatactgcaacttagcttcaaagacgacccaaaagcaaaatatttatttgattttttactcaaaaatttctgcaactcatcttaattcacagttaacccaaaaaaaatgcaagtttcggtctgcagcaattcttgctcattaaaccttaatagcaacaacgttaagagtcacttgctcatgggtcgtcgcgaactcttgtctactttatgttccactggttcccataaagaagtcgtttctcacaaacccatttccattttaaggatgattagtgaacgaatggctgattttggtgaagtaataataggaaaaagtataccctttgcaaccaggagggtagttcttgctggtctttttgcctgttggacttttcatccttcaaggtacttatcagctcaagcattgggggatccttcagt

SEQ ID NO: 47722 - DNA, 441 bp, Gossypium hirsutum
  unsure (1)..(441): unsure at all n locations
  Clone ID: LIB3582-029-P1-K1-G3
cccacgcgtccgcccacgcgtacgcgccgccgtcagctcaaatcttccgccaccctccccactaataataccactacagcttcttcttcttcttcccttagtagtgtctatgcacaaggagttcttcatgcaccaaccaacttcctcttccctcatcaacaagtccttgaaatccaagctcaagaaccaaacataataagtccccatcagattggtatcttatatcccacatctncaccattcacttcctttgtgaattcaccacctagcaatgcatctctaggaaataacggtgtggaagatttggtttacatatcgaatcctatttatgacaacgatgccggaaccggcattgccgaaaactccgtcatgggatgatgatgatgatgatgatgatgatgatgatccgatgagaccttcattgagtcacatgaagaagct

SEQ ID NO: 47723 - DNA, 481 bp, Gossypium hirsutum
  unsure (1)..(481): unsure at all n locations
  Clone ID: LIB3582-030-P1-K1-A1
cccacgcgtgcgaccacgcgtncggtttatcaagtctcggtttccttcactgaggagcactcaagcacctttctcatctagttacatgagggacagtagtgaatataatttggagacactagaagaagatatgtgcgtgcgtattcgtaaagaaatgtgtgatacttcattaagctcaagccttaaaaaggatgatgtatcccctgccagtggaggttctctgggaagcagcagggatgccgactgtcacagacctgggaaatacattgcttctctttcgagcaagacaagcgaaaactctttgggttttgagaactgtaatggtgatagagagttgacagaatctgcttcaaagccttttgtttatgatgcacttggcctgttagattgtgatggaattcatctctcttcatgtggacatgctgttcatcaggattgttttgatagctatttatcatcactgaaggaaagatatgccccg

SEQ ID NO: 47724 - DNA, 478 bp, Gossypium hirsutum
  Clone ID: LIB3582-030-P1-K1-A4
cccacgcgtccgcccacgcgtccgcccacgcgtccgcccacgcgtccgcccacgcgtccggttaatgacaatgatgatgatgaaaagtgcaggtaacagccatattatcacttgcagcagcatgttcatctgcaggtgtaacagttctttattcaagagacttaggttactgcaaatcaccacaaataccatgctcccatttcaaagcttccattttatttgccttcatctcatggttcctccttgccatatcttcccatgtcacattttggcttttggctgctgtataaatccatcccatttatgttacaattcccctttttccattgaaaatagtttcaattttcttggaaacttgtcatagttggtaatcttttgtcagtttcatagattttttccttttctttttgtgcaagcatacatattgtatgttcattgaatttcaacaacttattctttccatcaaccatttaaaaag

SEQ ID NO: 47725 - DNA, 574 bp, Gossypium hirsutum
  Clone ID: LIB3582-030-P1-K1-A7
aaagaaagaaaccctttgaaatagggttggggggttcctcggaactctgttgtgcctgcgtccagaggcatacacgcgttcacgcgccaccgtcgataccgccatgtacggcggacagaagctggaaagcttctttttaacgcaaatctcacagtacgtttccctttctttttgtattttatgacatcagtacgtatttggagaaaaaaatagaataatcacctcttgcgctctacaatcgactattgatcttgtaaatctgtgtataaacgtgccttttttattgaatctatgtatataactttcataaaaagaaaacgccctaattacaaatctaaagaaaggttatatagtctttatactgagcatgttgaggagagagatcgtggatggacttacttgtctgtatgaggacatgtggtgcattatgattgcattgatggctatttatcatcactttatggctgcgattctcttttatgtgtctgttggtttgctcttactgtcttgcaaataccagaaatgttgccaaaatcgtgttgtggatgcggatcttgcctggtgaccacaggac

SEQ ID NO: 47726 - DNA, 517 bp, Gossypium hirsutum
  Clone ID: LIB3582-030-P1-K1-A8
aattggctaaggctatgtcgacggcattgggtttcaaccatgcctgtcgaatggacgattgatggaggcgatgggtttaggaaattttctacagtattccaatcgttaaatcgtgaaagagctttgcacagttgcagttttggtactgggaaaccccttgatttcatgaccccaggaatgtcgttgaaagagcgatattttcattcaacagggtctcacttctctgctaaacaagattactacgaaattcttggggtgcccgaaaatgccacccgagatgagattaaaaaggcatatcatgcacttgccaagaagtaccatcctgatgctaataaaaataatccttctgcaaagaggaagtttcaagagataacagatgcctatgagactttgcaaaatcctgaaaagaggagagaatatgatacgatgcgtgccggaagttcagaagacatgggatatggtgcaaatggtgctgaagggtttggattctatggtggaggtggtgcaaaggggttta

SEQ ID NO: 47727 - DNA, 595 bp, Gossypium hirsutum
  Clone ID: LIB3582-030-P1-K1-B12
cttgtgtatatgtatatgccgaattgaattaagcatggaaacaatatttactagcttgaattgattgagttacgacgtctgaagtcctcatatgaaccttaggaatagttaggatacatatgttatgacataggatttcgatatgtgattgcgtgtaagaccacgcctgagacgttggcatcgatttatgatttacatgtaagactatgtctgggacatcggcaacgtatatgagttcgtgtaagaccctatctgggacagtggcatcgatatgtgattacatgtaagaccacgtctgggacgttcgcgttgtacgagcttttcaactacctgagtattcttattaattctgaatggttcaacgggcaatatcgagttaagatcgaatgtgaaatcgagctaaaagggtcaagtatgtattaagttaaatgattgagtagtaaggtaagtatatactttatatgaatatatgaaatgtgcattatgaaaatgaaagttaaatatacttatcaatatatatgtatttcggcaagtggtaaaataatgctaaagtatatatattgatatatgaagttgcaagcttgataattatata

SEQ ID NO: 47728 - DNA, 526 bp, Gossypium hirsutum
  Clone ID: LIB3582-030-P1-K1-B2
ttttattaacaatcccatggctaataagtgaatttccattttctttttacctttagaacaaactaactttgagtctgtcatagtatctcaatattttatacatgggatgccactatttgtactacttttataattaggacttgggatttaatttattagcgttattccaggttatctcaatgtctaaaagtgttgaaatgaaataaaagtttacatctatgctttcctgtggttcatgacagacgaaaagattaatcatcctattcaattttagtatatggttcatattttgttcccatattcaataaaacggtgcttctagtataggccagcctctgtagtaacatttcatgcattgtaaatgatatatagattattttactatagtatatcttataaatattaatcatcctctttcttaaaaacttcctaaaaccttgctatggtatatcttataaatatttcatgcattgaagataatatatagattactttgcaggcggcaacattgatctcatggtctact

SEQ ID NO: 47729 - DNA, 641 bp, Gossypium hirsutum
  Clone ID: LIB3582-030-P1-K1-B5
attgaggcttatggacaggcagcattatatgaggaagctctagttgcctttaacacaatgaatgaagtagagagcaaaccaaccattgaaacttacaattcactgcttcagacttttgcaagaggtggattgcataaggaagctgaagcaattttgtctagaatgaatgaggctggtattgcaaagagcagggattccttcaatgctttgattgaagcatataggcaaggaggccagtttgaggatgctatcaaggcttatgtagagatggaaaaggcaagatgtgatcctgatgaacgaacccttgaagcagttttaagtgtatattgctttgcaggcctatgtgatgagagcaatgagcaattcaaggaaatcaaagctttaggagttttgcccagtgtcacaagctactgcatgatgctggctgtttatgcaaagtgtgacaggtgggatgatgcctataagttacttgatgagatgcttgcgaacaaagtgtcaaatattcatcaaagtattgggcagatgataagaggagattttgatgatgatggaaatggcagatggtagagtacatctttgacaaacttaactctgaaggatatggctttggaataaggttctataatgcacttttggaaaca

SEQ ID NO: 47730 - DNA, 493 bp, Gossypium hirsutum
  Clone ID: LIB3582-030-P1-K1-B6
ggtaggggtaaaggacgagagtggtccaagatttcccacataccttttgtgtttattcagtataaaacagtcatcccaaggcaattagattgaaatttcagcagcaaaatccggcactgatttctccactttcatacaaaaggtgtggaaccattttaaacattgatcaatatcatagcttttttagtttgatttatgtgattgtcctcaggtgcaagatgataaaagcaaccagacttgtacatattttgtattcaatttttgcaggcatttaaagctaaattggcgaaaaatagtggataaatgcaactgacatgctttagcaaccattattcagcaaattgaatgttctgttttcatccgcatgttctaatttctaagcttcctttgtaaatttgtttgaactggtctacgcagattatatatatatattcaatttttgtatctcttaattatgcaaggctttccccatgcatgagataccaatataacg

SEQ ID NO: 47731 - DNA, 490 bp, Gossypium hirsutum
  unsure (1)..(490): unsure at all n locations
  Clone ID: LIB3582-030-P1-K1-C3
cggacgcgtgggacaaaacccatttttgacattatacctttaatgaatggccattccacatggtcataggccttgctcatatctagcttaagagccatcaaacccttttgccctgttcttttgtttttgaaagagtgaagtatctcgtatgctagcaaaacattgtcagttatgagtctacccggcacaaaggcactttgagagtcatcaatacactcatccaacactttttgtagacgattagcaactgttttggcaataattttataaattaccgtacaaaggctaatcgagccaaaattcttcaaattaagaaggtttgagatttttggtattagaaccaattgtgttctatttatctcatctaaagatttgccattattcaaaatatccaaacagaacatgctagtatctntaccaataatgtgccaatacttttggtaaaaatttgctggaaacccatctggtcctgaaactttcgtaggcccta

SEQ ID NO: 47732 - DNA, 502 bp, Gossypium hirsutum
  Clone ID: LIB3582-030-P1-K1-D6
cccacgcgtccgggatggagaaggagcaacttgtttaattgaggtctgagttcttcaattctttattccctctatttatggacctacagaaggatcttttttactgagtgaaccctgatgttaggccacttcaattaataacttgttctgatattattgagtaatgcatttgaatataggcaaaaaaatctcttggtccttttttttcccttattatgggttcttgaatagtttcagccaatgctaacctagagatgcaggtcacagtaagtggtgcaaaaggggaggctgaagcaggaaatattgcgcgctctgtggctgcttcttcacttgtcaaggccgctgtatatgggagagacccgaactggggacgtattgctgctgctgctggctatgcagggatttcttttaatcaaaacaacctccagatactgcttggggatattatgctcatggatggtgggcaaccacttgaatttgacaggattgcagccagcaacta

SEQ ID NO: 47733 - DNA, 503 bp, Gossypium hirsutum
  Clone ID: LIB3582-030-P1-K1-E12
agagagctttactttcaacacataaaaactcttctgtttgcacactaaaaaatcaaccaaacaaccattctgttccaccagacacaccgaaggaaatgctttcttcctgcctatcatccaatcttgcacgaagatggtgctgtttcgaatggttttacagtgctattgattacgcttggtttgctaaaagggagtttgtggagtacttaaatcatgtcagcttggatcacattccaaggcttacccgtgttgagtggggtgtcataaggagttcccttggcaaacctcggaggctttctgaacattttttacttgaagagagggaaaaacttaaacagtatcgggagtctgtgagacaacattatactcaacttcgtgttggtactagggaagggcttgccacagatttagcacctcctttatgtgttggacaacgagtaattgccattcaccctaaaacaagggaagttcatgatggaaaagtacttactgtggatcatgat

SEQ ID NO: 47734 - DNA, 672 bp, Gossypium hirsutum
  Clone ID: LIB3582-030-P1-K1-E5
attctctcctctgcctccctaccttaaaaacccatcgccgaattgaaataaaaacgcacaactgagtcactgagtcgaatccatccagcaaccaatggctgaggatagttcaagagcttttgttaaagacgtcaagcgtatcgtcattaaggttgggactgctgttgttactcgaaatgatggacgattagcacttggaagattaggagcactatgtgagcagataaaagaattgaactctcaaggatatgagatcattttggtgtcatcaggtgctgttggcttaggtcgccaaaggcttagatacaggagactagtcaacagcagttttgctgatcttcagaagccacaagtagaacttgatgggaaggcatgtgcagccgttggacaaaatagtcttatggctttgtatgatacattgttcagtgagctggatatttcatcagctcaacttcttgtaacagacagtgattttagagatagagattttagaaagcaactaaatgagacagtggaggcttattatccgtgaaaggtattctatattaatgaaaacatgctgcagtaccagaaagctcatacgaggattctttggtatatttggacatgacagtttacagcttactcgcttgagctaaagctgatctctgtttatgagtgagtgaggtctta

SEQ ID NO: 47735 - DNA, 725 bp, Gossypium hirsutum
  Clone ID: LIB3582-030-P1-K1-E6
atatgaagcagtgttcctttacaaagggcggagaaaaatagcatccaaaggggatgcagtggctaactggcgagttcacaagcttgtgatttattgtggatttggtgttttggctggtgtacttggtgggatgcttggtcttggaggtggcttcatcttgggtcctctttttcttgagatgggaatcccccctcaggtatcaagtgcaacagccactttcgcaatgctattttcagcgtcaatgtcggtggttgagtattatcttctgaaaagatttccaattccttatgctctttaccttgctggggtggccacaattgctgcatttgttgggcaacatgtcgtgggaaaagtcatcaaaataatggggagatcatccataatcatcttcattcttgctgggatgatcttcggcagtgccatttcattaggtgggataggcattgcaaaaatgatcaaaaggattgaaagaaaggagtatatgggatttgaaaacatttgctcgtatcggccttagtagcaaaatctgatattattcaataccagaggcgacttgaattacaagtctccttcccttaattcttaagatacaagacaattcatggcacccataagttgtgtttcagaattgggttacaaagtcaaagaggacaagcctcagcatccatttccttttctatttttatttctgactaattttcattttttccccttaattgttatta

SEQ ID NO: 47736 - DNA, 508 bp, Gossypium hirsutum
  Clone ID: LIB3582-030-P1-K1-E7
cggacgcgtgggccgaattggaagccgtaagatattttcccttctcttcttccttcctctctgtccatcgtcccttctctttgttggcctcactgtcatcagcagccacagtcgagaaaagaagacccagaaggttcccttctattcgttgaagattcttgaagtgcttgtactgaaattgttcgtattgaactgcgattgtaagtgttagctaagtggcctaataaatcaagggggaaaatgaaaaagaaggttctaaatctttgattcaaatctgggttcttcatgttgtttggtggttttctagaactgggttctcttcactgggggcttgctgcaactttccagggagaattgggtgttaaattcaacatccaagaaagtaattttgagtaaagattgtgttcaaatctaagataaaatgggttgcattatttgtattgactctatctttggcatcgttggttgctcatctttcaatgacaaagttttcaagtatgaatttagt

SEQ ID NO: 47737 - DNA, 425 bp, Gossypium hirsutum
  Clone ID: LIB3582-030-P1-K1-F4
cccactcgttcggcgaactcgatgctaccctgtctagaaaggctagatcaggacctcatgtgactaagaggggatacgagctcttgccgtacatgagtctaagtgtggctcaagactgcaaccgattcggaggcctgacctttgaatgagacctgtgtgaatcacaggaaagacccgcgtagcaactcactatgatgagcatgatctgcatatcgtggcaagtcatctacagctggatcaatgtcaaggtcaaagtcaaggtctggatcaacttacatggttggctggaccaaatagtcattgtagttcatatcatacaactcataagtccatgcgttgctctcattgtatgaaagatttaagcctaatatatgttgaatgttaattgcgcacagtattaagggatagtgtctatgaggacaagt

SEQ ID NO: 47738 - DNA, 453 bp, Gossypium hirsutum
  Clone ID: LIB3582-030-P1-K1-F6
cccacgcgtccgatttgcagctactttttcatctatgagctccaccaaaatctgtttatcaaaaaaaggaaaaaaaaaaaaaaaaaaaaaaaaaaaaaaaaaaaaaaaaaaaaaaaaaaaataaaaaaaaaaaaaaaaaaaaaaaaaaaaaaaaaaaaaaaaaaaaaaaaaaaaaaaaaaaaaaaaaaaaaaaaaaaaaaaaggggcggccgttttaaagaaccaaaattaacttaccctgaattgcaaagaaaaattttttatatgggggaaccaaaattaaattaatggcccggtttttaaaaaatttgaaactgaaaaaacacggggtttacaaaaataaaaccttttgaaaaaaatccccttttccaaatttggctaaaaaaaaaaaagccccaaacaaataccctttcaaaaaatttcccaaccctaaatggcaaatggaacccccct

SEQ ID NO: 47739 - DNA, 468 bp, Gossypium hirsutum
  Clone ID: LIB3582-030-P1-K1-G1
cgaagtcaaagcagttgccaaaagctagcctgattttgagaaagcaagaacagcgcaacaatcgtcttgtttgtgggtacaatttttgtgacgcagtgtagagaaataccggatataatcttccttttggtccaaggatgaaaaatatcgacacatcatctttgtcttgtacctcttctagggcagctcatgatttgtcatttgatgggagttctaaggatgaacgggctgcaagtttacctagctattccaaacaagaaaagctttagactagtttcagggtcttgttatctcccacatcctgctaaggaagaaacaggaggagaggatgctcacttcatttgtgccaatgacgaagccataggggtagctgatggtgttggtggctgggtggaagttggcgttgatgctggtgaatttgcccgtgaacttatgtgtaattcagtggcagcaattcaagatgaacca

SEQ ID NO: 47740 - DNA, 438 bp, Gossypium hirsutum
  unsure (1)..(438): unsure at all n locations
  Clone ID: LIB3582-030-P1-K1-G2
gaagaagatcacactcaaaacagcatagatgttccactgcaactgtactcgccatgctatctgacttgaatgctatgatatggcgccagaaatattcagtagcggtgccattacaaaccatgtactcatagatctcggtgtggaccgaaatctaactaccactcgcacatgcgggtagctattgntggcgtaagaagccagaagctgaagatccagcgaaaactaacaaaatcccaaggcaaatggcaaaacaggctcgctacatgaacccagacttatccatgctaattgggggtatactcccattcggagctgtacacattgaactgtctctaatcctcacttcaatatggtcgcatcagccctattacatacgtggctcgcttttcatcgtctaggtcataattattatcactcgtgccgagatcacagtagtgc

SEQ ID NO: 47741 - DNA, 349 bp, Gossypium hirsutum
  Clone ID: LIB3582-030-P1-K1-G6
gcttattgtaatcatggtgtgtgacagagagaggatggagcttcgctctggtctttttcgttacgtgcgggttgctgcgctgtgctaaagactactgtgtatgaagatgcgagggtgatactaaactgaggtatgaagactcgcaacaagcgatgccttatgttgacacatgcactaacagtgcgcgacacgtgtgatgtctattgtgaaacgcatatgaaggaggtcactcgcttatcacgctaagatactgagaggatgaaccaggtatgtctgcatcactgtcctcaggatgagggatagatgcgctcacattgataacatagtgtgttggtacattacgagagac

SEQ ID NO: 47742 - DNA, 347 bp, Gossypium hirsutum
  Clone ID: LIB3582-030-P1-K1-G9
cccacgcgtccgatcgcgagcggccgctcgcgatctagaaccccaatgagaaagttttgcatgagagagttcagcattaatgatctcatcattataaaactctacagcttcatatcattacgctctataccaatactccatccacagctttgtcaaccggatcgataccgtatagattaattcaagtaattcttattgctgaagaaattcatccatacacattttcagtctacagatgattattattctgcagattattcttctacaacattacctccgaagaactcagcaccagagttgttggctacaaaaactgtgaacttgaacactgtgaactggaacatgct

SEQ ID NO: 47743 - DNA, 547 bp, Gossypium hirsutum
  Clone ID: LIB3582-032-P1-K1-A11
cccacgcgtccggacccatttacaggaggtattacaattattgaggacccatcaactctatgctaagcaatcgaaatgtatttttggagctgtacaggtggaatatcttgggcatgtaatatcgcaaggtacaattagtatggaccgaactaaggtaaatggtgttttggactggactattccgaaatcagttaaagagttgcggggtttcttagggctgtcggggtactataggcagttcatcagagggtatggacttctagccacatcccttactaccttactgaagaagaatgtcccttggcattggtcagaggtggagcaaacaacttttgaccaactaaaggcagctatgtgtcaagcacctgttttgactttaccgaatttccaggaacccttttgtgtcgaaacggatgcgagcggtcatggagtgggagctgtcctacaacaaaagggtaaaccggtggcatttttcagcaaggccttgggcgtcaaatatcaagctttatccatttacgataaggaaatgcttgcagtaattttggct

SEQ ID NO: 47744 - DNA, 552 bp, Gossypium hirsutum
  Clone ID: LIB3582-032-P1-K1-A2
gaatcaaagctgctgttcagccagtgagagatgagctggaaaatgagaggaggttaaggaagcgctctgaaagtatgcaccgaaagctagctcgagaactctctgaggtaagatcttcttttgctaatgctttcaaagaacttgagagggagagaaaagcacgaattctgttggagaacttgtgcgatgagtttgctagaggaataagggaatacgaacaggagttgcggttccttaagcacaagtacgagattgatcacattgacggggaaaaccctgagcggctaattctccatatttcagaggcatggctcgatgagcggatgcaaatgaagcttgctgaaggtcgaactgatcttgcagaaaagaattcgattgttgacaagttaagcctcgatatagaaacttttcttgaagccaaacgctccactgggtcaaggaaaagtgatcttaaagggaattgctcacatcaacattctttagaatcctttccattaaatgaagctgttagtgccccacaaggtgcggctgatgaagcatattccagtggca

SEQ ID NO: 47745 - DNA, 558 bp, Gossypium hirsutum
  Clone ID: LIB3582-032-P1-K1-A5
ggtaacttcggaatcagtgcctggcctagtgatggtggcactagtcgtgctggaagcgtggatgacttgagatgcgatgcagctgatacaggcagtagacatcattcttcttgtggcagttcaccaaggatgtccgatggtcctgcaaaggagctaaaagaagaaatttcagagtttggcagtgatgatgaagaagttgatgatccacccgaggtggacagtgatgaagattttgccgaccgtcacaaacagttccaagaagaggtaggctccgttgatgaaggctcaacaaagtcggatgaagagtacgatgatctggcaatggaggatatggtggagaatgatgaccggttagaggacgaagaccgtcgtggtaaggtaatagtaagttccgaggaccaagcaactcccacaaaaggggataaagctagcaagagtgatcagttatctgtgcctagggagaaaagcgagaaggggtttgctagaatgaggaaacgctcccttagcaatccagacatgaagaagcacgtatcaataatcaacgattgcatactttcc

SEQ ID NO: 47746 - DNA, 549 bp, Gossypium hirsutum
  unsure (1)..(549): unsure at all n locations
  Clone ID: LIB3582-032-P1-K1-A6
attttagaaaagaaacccccccttttgccttgctaaagatttaaccaagtttagcaccgtatctgagggtcatcggcgccacgcacctctgcctctatcggcgcttcacggagcaaaatcgggcaaggctgacgtgggagccgtgggtgcgagggagtcgggggctcgaggcgtgttggacgtgagtatcgacgtggtgcataagatccggctgctgggaactgcttgcggctgctactcctcaggctaggatttcccatttttactttattggttttgggcttgtttagtgggtttgtgtttgtattgggctaggttttgttttagtggttaatttgtttaggcctaggtttgggtttgtttaaaaatttggtcctacaatttttaaatatgagttatttgagtttattttgttaatgataatatgaaaatgtaaaataagattttaaactttaagaggatattaaattaattaattttaatattataataacgaattggttgatattatctctggataaaaaattcaacaatntatttaatttattt

SEQ ID NO: 47747 - DNA, 230 bp, Gossypium hirsutum
  Clone ID: LIB3582-032-P1-K1-A9
aagacgcgtgcgatggcgaggaataagtcaattatgcgtagatcaagatctagcttcctgcctctggacatcgagctagattggctctggcaaagactaacctagcacaagaggcgaaaatgatcgttgtaagaggtacaaggactgcaaaaggtgatgcaaatggaatacacatgtacaaaaggagcaacaatggcttgaataaagctgtaaacttcagtttgggcaaa

SEQ ID NO: 47748 - DNA, 360 bp, Gossypium hirsutum
  Clone ID: LIB3582-032-P1-K1-C3
gctcattcttctggcggagacggactcactttcatttgttcgaaaagaggcgtcaatcatggcttgcgcgttgcactccatctggctacacactggacatgaaaaacccgttggatgaaagtggaccctcaacatcattagttcttacgggagtgacactccatgatgcgggtgtcaccactcatgcagctagctggtatgtgccttacaggactgctcatagaggattgcgtatggcctctcgaattttcatgatccactacagtgggccggtacgtgctgcgagctgcatttcaggcatcataggcaaatagctgaccgccctagcatgcaatatcattttactgtcctaagagacaa

SEQ ID NO: 47749 - DNA, 509 bp, Gossypium hirsutum
  Clone ID: LIB3582-032-P1-K1-D1
cccacgcgtccgcccacgcgtccgcccacgcgtccgcccacgcgtccgaattaccgcagattgctgatagacgagaccaggagaaaagggcttactcaagaatgtttcagtagatcatggtacaccaacgatcttcatatttgctttctgattacccaaaggtattacttttctagtaaactataatttgatatgtacgctgactcttacttgaaggatcaattttgtttcctttttgcatacattatcaagtatcccgtctttcgagtttgttctcgatataatctggccggattagtaaaaaatcaggtataattttgttcttttttgtgtaatggagtcctatagacaatcactctattcttttgagctggattatttctggtcattttgagtttggattattttgggttgaattgtttcgtgtcaggttctggttacacgagtttgggttggtgacctttttgtggtcagatagatattgtcaggtttggattcgggtgattttc

SEQ ID NO: 47750 - DNA, 490 bp, Gossypium hirsutum
  Clone ID: LIB3582-032-P1-K1-D2
gagaatctctacacagtacgcacagagacgcaaaggaagcgaagaaaagcatttgtttatttgcttgcttttatgctttaatgtctccaaacccattgcgttgtcgtaattaaaaccaacaaaaagaataaaaaaaaaggcccgtcttagcttcaaaaggactatgggaattgttttccacatatgttcatcgctgattaccagcttcgctgccgatcaaagctagggttttcgaatatctttccagttttctttgtttttcgatattaaaactggatggagcagtggccgttccacgacggcaacgtgcacaatctactcgacaacaggcgcatcgactttggccacgtattttcccctcattcttcacaacaatttggtgttctcgtttgcagttctgaggatttgcggaattaatataatttctctttagttaatctgatgtgtaattgagaatttgagtaaatgctactgtgttaccggattttta

SEQ ID NO: 47751 - DNA, 340 bp, Gossypium hirsutum
  Clone ID: LIB3582-032-P1-K1-D9
gcggacactattgtgcaaagtgctgaaatggcttctcctattacaatcggcgaccggcaggcctggagtcacaaaaagccaggacctcacactggtgggaaaccagagtatggtggtgatagagatgaaaatggctaccgaactgacaccttcaaaagcccggggaactgctatggctagcagaactttagaagacactcaatgaacgagttctcatgtcaagctcgttgcaatgcggagcagaaaggacaagctcatactgacgaatattaaaacgggggacaaataggggctgctgctctacatgatgaaagcgaaaggtaaaggttttgaagattag

SEQ ID NO: 47752 - DNA, 440 bp, Gossypium hirsutum
  Clone ID: LIB3582-032-P1-K1-E10
ctgccgtccggccggaattcgggtcgcccacgcgtcgccacgcgtcgtaaagtaaactttgccaaacattggaaaatcaactggcgaggaaaaatataagcgcccaaatatttaccctatgaagcagtgaatatggatcatagataggtttgacaatgaaaggagcaggaaacaggggttgttctgaccttaaaaaggctcacttattgacatagagaacttgtcctgtgacagtaaactactcaggggcgatgactgagggcagaattctactgcagcagtatataccgcgtgaagaggcaagaaagctagaactgtgtgtactttttttcgggaatgcggctcttatttgtcccacatttttttcaataagagatgtttagtttaacacaagaattgcaattaaattttggttccccttttctttcttcttccccttt

SEQ ID NO: 47753 - DNA, 396 bp, Gossypium hirsutum
  Clone ID: LIB3582-032-P1-K1-E9
tgtacgcgttgcgcaatatgatccggaaggtcgtaaaccgtgaggatgcactcactagagtgattgttacacgagctgaaaaggacctgatagatattatagagctgtattactagagaaacaatgcgtctctagaccaagctgccgctaaggacacctcaggggattacaaggcatagctggttacatctgatgacaaaagaaaaaagcacatttttatttacgacatgttcagggcctaaatgaagggatatcctgtgtggtgactggcccttaatgatatgagtcgactgtgacttcatactggacaattatgtggagcgacaacgaacgaatacatggggaatgaacataatgtgatctgggatctgcaactcttgatacggttgagattgt

SEQ ID NO: 47754 - DNA, 361 bp, Gossypium hirsutum
  Clone ID: LIB3582-032-P1-K1-G2
cccacgcttaataacaaagagtcctacaatataccaccgggagttggagtcaaagccccagcatgaagcactgtgctctgggttgcccaagcacaacacggaaactctaatcatagaagagcttaacctccctgttaataaccgtgcacagtctgcggaatgcttaccacatggaagacaccgccctcaacatatctgacagcctttaatacagatgttaaacaccctgcatggaagacccgaagcgtgccggtgaacatcctgataggagataccaagattgccgacaacgctgccaacacgaagaatgaaggctgcatccacattgcaaacaaagctgcacgtaacaatacgagaaaca

SEQ ID NO: 47755 - DNA, 546 bp, Gossypium hirsutum
  Clone ID: LIB3582-032-P1-K1-G6
gcagagcgttctttgtcaaggacgaaaaggtccttacatacgttacactgatgaaggccttcacgcttgataagctactggagcgatctcagttgattacctgttccagatgggtgttaacgatgatcataaactctcccttcacgaaaatgggagaacgactgtgatggaagggcacagagttgatttcagagatggctcaaatcctagctcatattctatgatgatcattgaatgttcttgggacagcaaggacatggtgtgggtttatatgaggaagagaaatgataaaacaagccctaatgatttgaacacctacaagaaggtgatgagaagcataagggataacattacagcagacattttattaaaggagattgatgacattatttgcttgcctatttataaacatcctcctactcatcagttgagttttaattacttatgtatgttcatgagtatacttattgtaatatttaaatgtcataatgaaaaatggttattctggttgacgtatatatggaaaaataaatactaccattagca

SEQ ID NO: 47756 - DNA, 201 bp, Gossypium hirsutum
  Clone ID: LIB3582-032-P1-K1-G8
aacgggaagctcacacagaagagattccctatgtggacgacacgcgatgcaggggaatcactctgaagatacagttgacattccaagagactgaggatggttagaaactactgcagatttggacgaaaagtcaaaggaccttgcccggtgaactcacataatatcactgaatgatgtaaggaggtagggatgaaatatggg

SEQ ID NO: 47757 - DNA, 487 bp, Gossypium hirsutum
  Clone ID: LIB3582-033-P1-K1-A11
aataaatgttataactatatctatgatcatgatacattcggtcaatgtgtgaaagtatgtgaaagtatttgatttatttatgttatatgaattcagattaattgaaataagaatgctaaatgtgcattatgtgctgcgtatattcggccaaatggcattatacctagaaaatggcctattgagaaattgaatgatcgaagtataattgagtttatttgtttgcattgcttaaaacttactaagcttatgaaagcttactccgtttgttacgtttctctattttatagattgttgactccagtcacctgctcgggaggggatcgtcagtaactcgtcacattatctatcattttggtactattatattttggagctaggatggcatgtatagaatagacttaagtgaatgagattttgagatgttgtagtatataagcactatgaatatggcaacttttgaatgtctatataagtctgaattttgatc

SEQ ID NO: 47758 - DNA, 301 bp, Gossypium hirsutum
  Clone ID: LIB3582-033-P1-K1-A3
ccacaaatataacatttttcttattcctataacacttatccccataacccatctaacaaatctggcctcgaagatacttttaagctatttctcttgctattctttcaatcttgaacattgatgctacccaacaccatgctctaacaccctctccttcttccaccgtggacaactcctatctgattctaaacatggcagattgttaagactttgagtcgagcggaaacaaaacgtctaatccagaaggaacctgtcgtactggcttgaaaactgtgttcaaagctgaaccccaatgcttgtt

SEQ ID NO: 47759 - DNA, 538 bp, Gossypium hirsutum
  Clone ID: LIB3582-033-P1-K1-A6
gtgaaacaaatgtccgtttctgaggaacaaaacacgaagctattcaaagcacgtagaacagtagtgcaaatgctgagggataggggatattcagtccctgattcggacattaaaatgacaagacaacaattcattgagaaatatggtgagaatgtccatctcaaaagggatgatcttttaatcctttgcagcaaaggagatgctccaactgatcagatttatgtcttctttcctgcagaagtaaaggttggtgttcctatggtaagaaactgtgcaaagcgtatgaaagcagataatgtttataatgctattttggtcgttcaaagagctttgacagcccctgcaaaagcagcgataaatgaaattaattcatacttccacatggaagtttttgaggaggcagagttgttgacaaatatcacagaacatatgtttgtcccaaagcacacagtactgacaaatcaagaaaagaaggaattgctggaaaaatatagggtaaaggaaacacagctacctcggattctggttagtgatccag

SEQ ID NO: 47760 - DNA, 537 bp, Gossypium hirsutum
  Clone ID: LIB3582-033-P1-K1-C1
tgctttttgtttattagcgcagcagacaagaactgattaatgtttttttttttttttgcgtttatgttgttttttttcactgaaacagagtttggttttgtcggtttttagatgatcatgtctttgattagaacattgaagagcataatatgcctcaagagagtttaagatcaattgtttatagatcatttgttacatgtgatgatccaaaaggagttgtagagagtagaacaattagaaggtcgaaaaccggttcaaccgacacgatggtgcgtaataaaactgacgaatgccggcaaaaaacgaagaaccgatcgacaaaggggacttcttgtcaactcttggaggtttcaaggagagctcacaagctaaataatgtgattgattcatgttcgaaacggctttggtatgatacgaattcgagagatgtagctaaagatttgttgaaaggagcacttgatttgcaagattcattgcatgtgcttgggaaattgcaagaagcttctcattatatggcaaaatgggatagggtgagaa

SEQ ID NO: 47761 - DNA, 535 bp, Gossypium hirsutum
  Clone ID: LIB3582-033-P1-K1-C5
atgaactcgtgaagatgtgtcgaacaaacgaacccctttgggttcgtaacaacgaaaccgggaaggaagtgcttaacctcgacgaacattcccgaatgttccactggccactaaatctgaagcaacgctcaagtgaattcaggaccgaagctagccgtgatagttcagtggttataatgaatagcattactttggtagatgcatttgtggatgccaacaaatggatggagctgtttccttcattagtagctagagccaaatgtgttcaagttatatcacaagatgtttcgggaaccaacggttgccttcaattgatgtatgctgaattgcatgtgctgtcgccattggtgcccacgcgagaggcatatttcctacgatattgccaacaacaaaatgtagaagatgaaacgcattgggcaatcgttgatttcccactcgatggctttcataacagtttacaaacatcatttcctttatacaaaagaaggccttctggttgtttgattcaagacatgcctaatggctactcacgggt

SEQ ID NO: 47762 - DNA, 522 bp, Gossypium hirsutum
  Clone ID: LIB3582-033-P1-K1-D1
caaaatgttccgaaagattatcttctagtcattagtgattaattgattgataatgctcatgataaatcaggtatgtggatgtggttcttacaattccaaagggcaccttgttccccatgtgtggtatgaatttggctttcaaccgtgagctgattggccctgccatgtacttcggactcatgggcgatgggcagccaattggacgttacgacgatatgtgggctggctggtgcaccaaggtacttttttgtgtcacaatttactttcttccccttacaatgtatttcagaatccgaaagaaatctcaatggcctcaccggttcggtgattgtttaggtgatatgtgaccatttgggattgggagtcaaaacaggtctaccttacatctttcacagcaaagcaagcaacccatttgttaacctaaggaaggagtacaagggtatatattggcaggaagagattatcccattcttccaacaagctgtccttccaaaagactgcaccactgttcaaaagtgctat

SEQ ID NO: 47763 - DNA, 523 bp, Gossypium hirsutum
  Clone ID: LIB3582-033-P1-K1-D12
acggctttaaactttttcacctgtctttctttctaatgtgacagtccagatagcctactggtctcgtggataaaaaactgcttcctgggatatgtagtgcaaaatctataataaataaaagttgaaaccgcttatggtattggaatttttgaaaacattgtctcatttggtctcattcatctccatttttttaatttaacagatattttctctcggtatctgttctcctgtctttccatccgtccatggctcttttattgttaatcctgccgtctcccttttcattattgttttagtttcagatatatgcttctttttacttctattttcagtgtgtttttgtcatggttttttgttttcacctttagaggataaagtcattaagaaaaaaacctaaggttttaagtttttctcaaaccctaccacagtattgtgtccaattcaaaacgatgaagatagcagtggaagggtgcatgcatggagatctcgacaaggtctacgacaccattaaatacattgaaaa

SEQ ID NO: 47764 - DNA, 526 bp, Gossypium hirsutum
  Clone ID: LIB3582-033-P1-K1-D7
cccacgcgtccgcaaaacctgattggaagtggcagtaccggaagagtttaccgcctggatttgagaaaaaagggtgtcgtggtcgctgtgaagcgactatgggatggggaaggccttaaggttctggcagcagagatggaaattttgggcaaaatccgtcaccgaaacatactgaagctctatgcttgtctaatgaaaggcagatcaagctatttggcattcgaatacatggaaaatggcaacgtgtttcaagcacttcaccgagtgaaaaaagacgggaaacccgaattggactggcatcgaagacataagattgccttaggtgctgctaagggaattgcttatctgcaccatgattgctcccctcctatcattcatagggatataaaatcatgcaacattctactcgacaaggattatgagccgaaaatcgccgattttggggtcgcaaaggttgcagaaaaatctctcaagggatctgaatggaactgttttgcaggcacccatggttatatcgctcctgagc

SEQ ID NO: 47765 - DNA, 522 bp, Gossypium hirsutum
  Clone ID: LIB3582-033-P1-K1-D9
aaatccctaaaccttttctttttctctccatgaatttatatatatatgcatataacaaatgattcattgatttggggttttgtttctttctgaattaggacaaatgggttttccgatctataccaaaagaccacaaggattattctatggaattcccattatgagagaatggaagaaaattacaggaggttgaaggagataaacaagaagttgagaagggaggttaggcagagaatgggtggagacttgaatgaacttaacattaatgaactcatggagtcacaagaagtaattgatgcagaactctcagctcgtgttctgcagttgataaatgtcactgatagtggattccacagtcagttcaactagtagatgaaaaacactgggaagatctcttcatcgttattgctgtgagcaaggagtgtttagagaaagttactcaaacaatatcttttcttgctcaaccacgagaatctcacttgcttttgcttacgggtaaagcttttacttcctttccaactg

SEQ ID NO: 47766 - DNA, 533 bp, Gossypium hirsutum
  Clone ID: LIB3582-033-P1-K1-F2
aagtaacgagcctagaatgctctccccctcctcggcctgaactccggcgacgattgtcggccaccgctgcacgcgccttacgcgccaccgtacacggtggtcggaggttcaaaattcctcccctttccaggagaatcataggtctgtggcgagatctccggtggattggtgcgccgattgcgataattgcagcacgattgaaggccgtgctgggcggggctcttgtctgctgtttgcggcactaaggatcgctagggtttctgccctggtgtttcgaatttgagccttgttgggttgctgcttattgggtttgggtaggcttaggattgggttggtctagttaggtattttgggtaaagggtttaatttggttaatatttgggctattgaaatcgggttagggtaatgggtaatttagaatctgatacttgggtcaaaaggggtttaggctaaagggtattgggttagtttagggtctattgcgctggttatttattgggtttgtattttggtttgtaaaaggactgtataaa

SEQ ID NO: 47767 - DNA, 367 bp, Gossypium hirsutum
  Clone ID: LIB3582-033-P1-K1-F3
agaacacatgcgtttaaatacctgtacttggatctgcagaagctaaagagcccgggagctgtagcgtagcggctgtctagaacctataaagcaatacctctactatgccaaactcccaggaaacccatggccaagaattggtcaacaaaatatgggtcgatattgctttctcaatctactactactttcaatgctattgcttttgtccttgtgtaaaggattcactattagacaaatgagggagactgtcagagcttgaagaatccactggttaattggaggaaaacgcactatacatcaaaggatacgatcgagatcatggattataaagagccagggtccaatgataaccgcagaactggttaca

SEQ ID NO: 47768 - DNA, 454 bp, Gossypium hirsutum
  Clone ID: LIB3582-037-P1-K1-A3
acgcggacgcgtgggcccacgtaaactgtgttctggtttctttatggatgggaaattttatgtcatcgggggcatgtcgagtcatacagactgtatgtcttgtggtgaagagtacaatatgcagacaagatcatggaggaggattgaaaatatgtaccctggttgcaatgcagggggtacatttcatcccgcaatgcgttcacctcctttagttgcagtcgtaaataatcaactctactctgctgatcaagcaacaaacgaagtgaaaaaatatgacaaggttaataactcatggagcgttgtgaagacactacctgttagggccgactggaacaacggttggggactggcatttaaagcctgtggtaacagtttactcgtaataggagcttgaggacgtggaagtggtgataacggagtaatttgtctgcattcatggaatccggaggatgga

SEQ ID NO: 47769 - DNA, 532 bp, Gossypium hirsutum
  Clone ID: LIB3582-037-P1-K1-A4
cccacgcgtacgctcatccccaataactccgttataaacccatccacgccaatctcaccacccgagcagacccatctgcaaccggcgattcttcatgcgggtactgcgatggctcatgggtttacgacccagatgcgggatttgatcgatacgacagtagctgcaaggagatattcaaaggatggaattgcattttgaacaacaaatacaacggtagagacatcattaagtggcgatggaagcctcgtaactgtgatctcccaccgcacgatcccctccagtatcttcccacttacagagataccaacattgggtttattggcgattccttaaacagaaacatgtttgtatctttgatacgtactttgaaacgtgtgtacaatgatgtgaagaaatggcgtcctgctggagctgatcgcggctatactatccttcactatgatctcaccatagcttatcatagaactaatctttaggcacgctatgatgatcagctaatggaaatggagtaagttagaagctctaggatata

SEQ ID NO: 47770 - DNA, 449 bp, Gossypium hirsutum
  Clone ID: LIB3582-037-P1-K1-B1
acggcattcttgggacttatggggtggctccggtgagccattttctccctgggggaaatggcgtctcaccgtacgaaatggtcagaatccatctgcttctgctccaacagatcaggtagccactcaccagtacaaaattctaggctttgtctatgtatacaagaattgacaactgatgatgacaagcaggtgtaccaagtggattttgtgattctttgcataggaagatatagtgacttgccaaatattcctgattttccattgaacaaaggacctgaagtattcaatggcaaggtgttacattccatggattatgctgcaatggatgatgatgttgccgctgacttaatcaaagaaaaacgagtcacagtcattggatttcagaaatcagcagtggatatagcagcagaagttgctaactaaaactgagcaactcacccatgtacact

SEQ ID NO: 47771 - DNA, 501 bp, Gossypium hirsutum
  Clone ID: LIB3582-037-P1-K1-B11
cccacgcgtccgcccacgcgtccgcggacgcgtgggaggagatttccaagctcaaggatggtggtgtaggaggaggagagaagaagaagaaggttctagaacaaatcgagactgacaatgttgttaatgatgacgaagacgatgatgatatggatatggacgaagatgatgatgatgaggaagaggaggatgaagagggggaggaagaggagaaagagagaggaacggaagaagagagtgagaatgaaggagaagaaaagggtggcatagaggataaatttttgaaaatcaaggaattgcaagagtatttggaggaggatgaagctagggaatttggcttgaagaagaagaagacaaaggcggaatctaagaaggaagaagaggacacagaagaagaaggtgatgaggatgacgaaaaagatgaaaatgaacgaagtgaggatgactatgatgaggcataagaggaggaagatgaactcgggctatttgatgggaatgatg

SEQ ID NO: 47772 - DNA, 471 bp, Gossypium hirsutum
  Clone ID: LIB3582-037-P1-K1-B8
cccacgcgtccgcccacgcgtccgaccacgcgtccgcaaaactgaagttttaggtgatgacttttgatatttcgagacattacttccagctttgtcatctcactatttgctatcattatccacttctttagattacaccacaaagttttggaagaagtatagcattcacttatgttgtctttttcttcttaactcctttgttatataaggcctaagatcaagtcctcgggctaacactttcttgtaaacaaggaaaaagttgaaacaagtaggttggatgggttatagcatacatagacttggataaagggctcccatcaaacttttcttgattactactttcgtttgaatatttatggttaagtaattgtgtcatacaattgtatatgggtgtagatattaaatacattctttttggtctgaattttcaggtagactggacactcgcactccacaagaaattgtacaagc

SEQ ID NO: 47773 - DNA, 497 bp, Gossypium hirsutum
  Clone ID: LIB3582-037-P1-K1-B9
cggacgcgtgggttcacactgatcttcttcatggatggagaatggatatgaaactaggttatggtgcacagggtgttcgttcaaagaatgtaagtttgatcgcttgtgagtacatagtacattaggacatacaaagtttgagtggaatcacgtattcatcaacaaggacaatcgtaaaggttctacttcgccaccttcattcatatttttctgaactctttgctaatatattactacacttttatttattgatgtcctcgatgtaatttgctcataagcagcatagagaataggattttgcttcaaggagtctttgttaacaatgctaaacaccgagtgcctaaatccgaaattcctttcattgatagctgccaacatttgtcaaagtaaccatatcattgcctagcgggtcatccttatttgattctttgaataattgtaagcctctaattgttccatctcacttgatctgcactgagttttttctttgtatatca

SEQ ID NO: 47774 - DNA, 389 bp, Gossypium hirsutum
  Clone ID: LIB3582-037-P1-K1-C6
aagatgcaacgggtactaggaactgccggcaccatcatgagagacgggggcagactccatgtacggaactctacccacactggatgaggaagaacgtgaacgagtgccatcaggaccagcgttacctacatacgagaggtggtactcaggatcctggcctgaaagaagctgtctgctccatgacgatcaacgagaaccttgatgaccctgtacgtctcgacattaacaatcgacaagccggtcgtattcataccctgaacagtgtaaaccatcacatctttcagcgacttgagcttagcgccgagaggggtgtactgtacaacagacctgtatctataccacaatggaacgtcgacgctgacacaatactctacatgttaagatgctgt

SEQ ID NO: 47775 - DNA, 525 bp, Gossypium hirsutum
  unsure (1)..(525): unsure at all n locations
  Clone ID: LIB3582-037-P1-K1-E2
ctatggttgaatgttattagtgatatatatttttgtacgttgaaattgatttgtgggctggtagtagtttgaatgattcggccatgacacattggtaagtataaaaatatatttgatatgttacctttagttgaaatgctacgattatgacttgtaatgatagtaataacctcttttggttggcatgtatatttggttaaatgatagcaagaggtattaagtataaatgattattagatcggcacatatacatatattttttttatgtgagtaatggcagtttatattgataatggatgtgttcttatttggtcttggattaaactcatgttaagattatattctctttataaaatgtttattaagttgttatatatctcggctatataatatatgatggttgttaattgtaccaagtatatcacctactagttagatggcaagtaagatacatgcaaaaggcttattgngtaatcccatatggtttggaataatgatatgtacaaattataatttgtttatcat

SEQ ID NO: 47776 - DNA, 533 bp, Gossypium hirsutum
  Clone ID: LIB3582-037-P1-K1-E3
tacatatttacttatcatttaagtaaataatattaaaatatattattattattattattattattaactaggaataaagtaaaagaaagaaacaaagaagaaaagaaacagaatagctagaaaagaaacagagaaagagacgaaaaacagggaagaaagaaaagaaaatgggaaattgagatttttaagcttcaagttaattcgtaagctaaatttagtctttttctcttcattttgatgtttttttttagaatcctagagtgaaatactcttggatttaagttaaaaatttgaaagttaatagattttatttagggtttatgttgaataaatgatggaattgatgatttatttgatagagttctagttagagttgataaaaggattaaattgtgaactaaactataagttttgaattttagggattaaattgagagaaattcgaaattagtgaaaaatgctgaagaaattagtagataaaatttagtttggatgaaatttgaatagaaatagagtgtgaattaaattggaaa

SEQ ID NO: 47777 - DNA, 269 bp, Gossypium hirsutum
  Clone ID: LIB3582-037-P1-K1-E6
aaaaaaaaaactacaaaaaagatttaaaaaaaaaaaaaaaaaaataaagataaaacaaaaaaatggtgagggggcacactcttcaggagttaaacgtaaacacgcgtgcgtgcgcggtcatatatattgtatagagttacataaagacacattactgcatgatgctttctatagttgtacaactgaaaaacctggaatgacctaaattaaacgcattgaaacgcatacccctttatccgattatcgtaaaatagaaaagaccctaacag

SEQ ID NO: 47778 - DNA, 496 bp, Gossypium hirsutum
  Clone ID: LIB3582-037-P1-K1-F2
ggcagaaggctcatggtatgggatctcagcaggatcgatgaagaacaaacacccgaagatgccgaagatggtccacctgagttgctattcattcatgggggacacactagtaaaatatctgatttttcatggaatccatgtgaagattgggttatagctagtgtagctgaagataacatccttcaaatatggcaaatggcggagaatatctaccacgacgaggacgatgtaccgggagatgaatttgccaaaggttcttaaatctactttttttcccccaactttgaggggagaagaaccaaattgggttagcctgggaggttgacaaaatttaggagtaaatttagttatgttttatagccttgctctcaactcttttattccctgagtgaatcggtgtttgatcccatgcccttaactgtactgatattaaaatacatgtattgtatttcacgatttattagcatatcttctttcacctatatgattttttggt

SEQ ID NO: 47779 - DNA, 428 bp, Gossypium hirsutum
  unsure (1)..(428): unsure at all n locations
  Clone ID: LIB3582-037-P1-K1-F8
catgtaaggacaatatgagagctggaacagacaaaattgcactgataagtgaagctgcgggattaccaaatgtacgaggacactatcagacatggaatacacataacctaggtacagaaggactgcatgggcttgcccaaggcagatgggacctgtccaggcgagcatggacttactagatagagcttaaaggataggacagggacatagattgaccaaattgataagcctaagatgagtgaatgagcggcattataanactgcacaacaaaccgagatccatataacaacgcttaccaggttatgttagtgcacctcgatggtgacaagccgggagcttagaacatgccgagcatgggaaagggtcaagattctattaatgggcatagcatacggagatattgaacagcatatgctaagagtgactg

SEQ ID NO: 47780 - DNA, 533 bp, Gossypium hirsutum
  Clone ID: LIB3582-037-P1-K1-G1
ggcaaaggctgttcgtactgcagtttacttgtgcagtttacttgctgaatatttcttctactagagcaatcttgaaccaaacaccttttgaagcttggataggtagaaggccattgatgaagcatttgagaattcttggttgcattgcatttactctagtgaattgtcaatagtttcataagcttgataaagggtctgaaaagtgtatctttgttggatattgttcacaatccaatccaaagcttttagaccgtgtaatcccataaatgggaaaatcattaccagaagagatgtggaatttggtaaagaatcatgctggaaatgggaaagcagacaggaagtcttagaagaagatccgttgtccattcttaaaacatctcatttcaatgttaatggtaccagactcagaagattcaaatgacactccacgtgggttcagctcacttgacgaaatttatgaaatatttacttttgctctatttggttagatcctacttactttgaggaagctgcggcaaaaaagagagtggaga

SEQ ID NO: 47781 - DNA, 463 bp, Gossypium hirsutum
  Clone ID: LIB3582-037-P1-K1-G5
gggacgcatgcaataaaattcatactatgataaatatacacgggcccagcttccattgcattacgccacacggtctcttatttagtacctacataatgtttgaatcacatactctattgtgggaagcgaggaaaatctgtgtagctgtcgacagctattacggggggatgttgacctgaagcattgccaaaaggacatgctgtaatagtggtgagtcacaggaaatacaatcataacgaaaatggccattgatatatgaatgctggatatagctaacatggatgcgcagagtgatattatggcatggaacatgcaccggctcaacataagtatctgttgcattgacaaatgtggatctgacgcatgccagtgatctagcgataggttgccctattctggagcactgccgatgcacagagcctatgatgagtcacacgccatatatgatatggactaaaacaac

SEQ ID NO: 47782 - DNA, 490 bp, Gossypium hirsutum
  Clone ID: LIB3582-038-P1-K1-A12
cccacgcgtccgcattgatatacaaaaatgaagctcttcttcctccttctagttgccatcctccttatacaggctttgctgcacgcttctgcatttagcaataatgctaactctctgccaaatattgcaaatatgcatgctccaggcggtgcaggaaggcatcgaggaagaaggtttgtgagagagcatgcaaaacatgctgtaagaaatgccactgcgttcctccgggtacttacggccacaagagtgcctgcccctgctatgccaaactcaaaacccatgggaataagctcaagtgcccctgatttctaacctgtggagtttctagactctaagagtaacatatgttttagttagggcataataaaactatcccaaaaggtaaaagaggttgacaactgttatgatgttttggaatggggcatggtggctaagtgggttgtttgttgaaggggaagaccatgcatgcaagttttatcatacatgttgg

SEQ ID NO: 47783 - DNA, 613 bp, Gossypium hirsutum
  unsure (1)..(613): unsure at all n locations
  Clone ID: LIB3582-038-P1-K1-A2
caaaaaggagaaatgggtcgtgaccaggaggaggaggagacaccaccggcaaccccaacgaccaccgcaagtgccgccagaaaagaccaagaagaggagacttggaatcaccagaaacaaatccttattctggaactctctgagaaactcataactggagatcttcaggccaagattgaagctgctagagatataagaaaagttgttaggaaatcatctgttaagacacgttcaaagtttgcttctgccggtgttattcagcctctagtttttatgctcttgtctcctaatcttgatgcacgtgaagcctcccttcttgctctccttaaccttgctgttagaaatgaaagaaacaaggtcaatatcgtgacagcaggggctgtccctcctcttgttgagcttctcaaattgcaaaacagtggtttgagagagctagccacagcagcaatattaacactctcggctgctgcacctaacaaaccaacaattgcagcctctggagctgcaccccttctggttcaaatccttagctnnggcagtgttcaaggaagagtcgatgctgtcactgccttacacaatctatctacctgcaaagagaactcaacacctattt

SEQ ID NO: 47784 - DNA, 273 bp, Gossypium hirsutum
  Clone ID: LIB3582-038-P1-K1-A6
gctacggagcaggaggagttttcaacctttcattaatggaattcgagataactgacaccaaggaaaatgaaaacaaggagcgcgaactagttgttccagtattaggtgcttctaacttgaacgatggagatcattctgttagtccaccggtttaacaacattctttcttttctttccccgtgcccatggaggcttacttcattacctattacaccgggcatgccaatgcttgtaggaacattcaaacacattctaattcaagttaacacatta

SEQ ID NO: 47785 - DNA, 587 bp, Gossypium hirsutum
  unsure (1)..(587): unsure at all n locations
  Clone ID: LIB3582-038-P1-K1-A8
gagaaattctttccttgaaagtgatttgctgggttgattccggatctggatttgcatgtataaaatattatagaatgttagtttctgaaattttgatttaccagatttactcacggagttgtagttctgcttgtattttgatcgatgtatttataggcttgagttaattttggtttttcattttactctagctgttttgaaccaatcgtttttttaaatgattgttatcatgcattattttatttcgttaccgttaactttagtctctgatttgtaaattggattaataggtcgatgttaagttaatagtttaatagtggttataatttaacgagaatgacaatctgttcattatagcttctttggctttaacattttaatttatttcattttcctggacgtgcgttcctttcatgtctctccttgattttcttatataaatatggctgcctatacaaaacggttttccagtcctcatacctgcacagttctttcgaaatgataattattgtaattgtaggaattggatgaacaacttannagatgatatcaagtcgaatacttactgtgtatggaatcacctatgt

SEQ ID NO: 47786 - DNA, 501 bp, Gossypium hirsutum
  Clone ID: LIB3582-038-P1-K1-B12
taaaaaaactttcaaaacccttttttctctcaactctctcccaagcccccttcatcagaacactgattctgacgaaaaagctactgtggtggcgacggacgaaccaccaggtgagactttcactctcttttcctccattttctgtactttctttcttcttgataatgaaaataagaaaaatggtaacaaaaaagaaagaacaacagataaaggtacaaccttctttagaaactttacttttttttttttattcctttgtgagtttttattctttagcaaatattgtttcttttctttttttgtattccaaagtccctctttacattgataaatcatggctcttttatagccgattgtgttacagtttagtcactatctccttttgtttctactgctgtgtttttctctgttctgttctgtcgacttgcttctctgtttccctttttgtttcttgttttgcaggcctaggggggccaacggggcaggggcttggtcattttg

SEQ ID NO: 47787 - DNA, 402 bp, Gossypium hirsutum
  Clone ID: LIB3582-038-P1-K1-B3
gcgatgctatcggtgcttatgtgcctcactgtgtggaacaaggtgaggctgttcatggagcgggcttcccaggatgtcccgagacatatcaaccacagatgcaacataggctacaagatgagccacaccgagagctgcaacaaatgctcaaacggtttaaggatggctatgctgctgccttgcctgattgagtagctaactgtattctgaacaaagtgcggtctcaactagtggtggacgcactcgatgatgtcgacaatgatgccaaccacttcaatgagaacttcatgaaattctttcttgctggtagtgcacaaagaggtgtggtaagaggaggtcaaagcacagaccgaaaccaaacgcaaagcggaacccagagaggggaacagtcggaagaaaact

SEQ ID NO: 47788 - DNA, 387 bp, Gossypium hirsutum
  Clone ID: LIB3582-038-P1-K1-B8
gctactcgtactcacgggcaggcacagcgctgctgtcaccgttccacactgcatctctaactctcatctcagctaagccgagcgctgccaaagactttgatcgaatactaagcctggtagatactcaatacatgctcactgactgtctggagccataccaagcggagacacatggacacacgctccatgacaagtgtccagacagcagagacacgcttacaaacgaagagcagacagatctctacggagaatatgctagactgggataccgacatagtcactatcgctgcctacaaccacatagaaggatcagtccacaaagggaacaggccatttgacacggtacatggaacaacgaccactgcgtctttgcaagcagatccaggg

SEQ ID NO: 47789 - DNA, 536 bp, Gossypium hirsutum
  Clone ID: LIB3582-038-P1-K1-C1
gatgttgcaacctggagttctctaacctcaagcttgcgatatcacctatgcatgtcatgacattgtctgctttgcattagcaaaggagatggccctcaaagccataacattcgactctcaatgttgcaacactgagctctttgatgttaaggttgcgacattgatcttgtaatgttgtgacatcggccttagacctggagtgaagaaatcgagcaaggtctcgacctcaacctatcaatgtcatgacccagagctttatgatgtcaatatcgcgcaatgggtctggtatggtggcaccattaaccctaccccacccaattcaaaaaggccaccttaaaaccatttgggtggaaggtaccttaattaaatttattaaccagggtttttttggaaatgatgcattaaaaatattttgcctacaaatactacttcactaagctacttgaaaaggagattagagtagggactagagtaaagactatggcagaaaacatatttttacttttaaaatttttatttttatattttcctctttc

SEQ ID NO: 47790 - DNA, 491 bp, Gossypium hirsutum
  Clone ID: LIB3582-038-P1-K1-C8
aaagctccctaaggatgagtgttctgctacaaaagctgatatgcatcatagaagctggtctggggtggagtactaccggaatgaaataactagcctgtgacaagaatttgacgttattcgagcaggtaaatcttatacttgtctatcaaacaaccatatgcctcctgacatacaaaagcttccatgtcgtgcttgctacgaagcactctcgatttccaagaaaatagaagcaatggacgaaaaagctggttgatcgaatgagagcatatggacctttcatagctgtacatttacgatatgaaaaagacatgctagcctatagcggttgcacacatgggatatatgatgcagaaactgtagagctaaggacaatcagagaaaacactgcctactgcaaactcaaggacatcaatgcaacggaacagagatccagaggaaatggtcccttaaacacaacagaggtagagattgttgtaactggtctggcatac

SEQ ID NO: 47791 - DNA, 236 bp, Gossypium hirsutum
  Clone ID: LIB3582-038-P1-K1-D1
gcagtttaaggaggagcagcagcgcgacggagacgatcctcagaggagataccacgactgccggccacactgacgccaggaagaaagaacgctgcgtacacagtgccatcaaagcggccaggaacaatacgagagagatcatggacatgctcctggcgagcgattcaaggagtgtgaacaccaagaccaacggaaggagcaacgagccaagactgcgcatcaatgagggaaggaat

SEQ ID NO: 47792 - DNA, 493 bp, Gossypium hirsutum
  Clone ID: LIB3582-038-P1-K1-D5
caacactcaaaattatttctccagattttcgtttttaactttgggggttttcaatcttcaaacgtttttcacaattagtagtaagggttttagaactttggggttcaaaggaaaatggtggagcacgaggaatcgttgatggagaaggtagcagagaagatccacgaccatgattcatcgtctgattccgatgacgataagccatcaaaaacgtcggtctaatacaaggtctttcgtctctttgggagagaaagacccgtcccccatgttttcgtcggaggcaaaccggctgaccttttcctatggaggaacaaaaaggcatcagccggagccctcgggaattgctggaatacaaccttctccctctagtgtgtcacttgttggtgcttactcttgcattacttttcttgtggtcaaatgttactgccttcatccagaagtccccaacacgtatccctgaagttcaaatacctaaagaccctgttttagagtg

SEQ ID NO: 47793 - DNA, 483 bp, Gossypium hirsutum
  Clone ID: LIB3582-038-P1-K1-E6
gtgagccttaatgaacgcaaaggctgtgaatggggcagccgtaatggcctttcggccttgtttgcccaaaaatccaacctcttcaatccttacttttggcaaatgcttagagaaattctcaaattcaagaatgatgttattagttatcttgaattgctcgaaaataacccggatattgaccgtaatgaaacattgggacagttcataaaatcaaagggttactctgatttatttcagaaggcttatctggtgcctgtatgtggttcaatatggtcatgccctacagaaagagttatggatttttcagctttctctattctttcattttgccgcaatcatcatctacttcagatctttggacgaccacagtggatgaccgttcgatggcgttcacatcgttacgtcaataaggttagagaagagctggagagtagaggttgtcaaataagaactggttgcgaggtgcattctgttttgagtgat

SEQ ID NO: 47794 - DNA, 483 bp, Gossypium hirsutum
  Clone ID: LIB3582-038-P1-K1-F11
tcgcccacgcgtccggtgatgaaatcagttaaaatacactttaggtttctaataacatgttatggtcctagaggtattgctggtacacagtcctggtgttagaaaatcttttcatatggatctacagagggaaaccttgtgttatgtggttttgataactgtggatgcttgcaattgtaacttttaactacatgaaaactgattctatatggaaatggtaatttgatctacaactcaaacgcataatgaactattacgggttaatgtgttgtactttttctatttgatttaacgttgaggttaaactttgtcagggaaaagaaggttttgaggatgaaggttgataaaattcaggccttggaggatcagcttcgagagttgatggcacagcttgaagcagcagggaaggcagtagagcaatcgtcagtttctaatgaaaatggacgataacagtgaacaagcagcagggatgggtgaggaacg

SEQ ID NO: 47795 - DNA, 479 bp, Gossypium hirsutum
  Clone ID: LIB3582-038-P1-K1-F5
gcgaatctcccttaactctctctgcattgggatccgggtcttaaacccatcaatccgatgtcttcaactagcaactcaaacaattcacacaatcttgccgttgaatctaaacaagaccgatccaacaccgttcggatccccgaccgggtcgacctccgagggagtcccaggagtcgtcaagggtcccccagtcattcaccccgactcggccccagccggttcttgaacggtgaaaagagcggggcgtcatttgttggagctgaattgttgggaaaattatggggtgatcgaaagaagcaaccgaagaacgcgaagagaaaaggaggcaaagtttggtaccaaaagagaagggtgaaaggacttgtagtggtgactgcattggtgggtttgtttttcttggtctattggattatgctcttgcggttacaagatcaccgggtcggatccgatgaccgatcttccaggaatgcttctgtttc

SEQ ID NO: 47796 - DNA, 494 bp, Gossypium hirsutum
  unsure (1)..(494): unsure at all n locations
  Clone ID: LIB3582-038-P1-K1-F7
cagncaccaaattncaagaattaaacgaaacaaaggagtatagtagcttaaacacctcaattaccgactcagatagcttagacattaccattaacgggactccaaataatgctacaacatccctgaatgaaaccatagctcttcccttaaagcacagcagacaagttcgaaccaaattggacaaggttgaagcgggtctacaaagagctcgatcggccataagagaagctaaaaatgggagtcaattacaggatcctgactatgtcccaataggtcctatgtactgggatgcaaaggcctttcacaggagctacctggaaatggagaaacaatttaaggtgtttgtttacaaagaaggggaacctcctgtgtttcatgacggtccctgcaagagcatatattccatggaaggaaatttcatttataagttggatgttgataccaaatttcaaactaaagatccccagaaagctcatgttttttacctttcattc

SEQ ID NO: 47797 - DNA, 483 bp, Gossypium hirsutum
  Clone ID: LIB3582-038-P1-K1-F8
acgcgtgcgccaactccatcggtttctccctacggcatggcctgcattctagctttcatgatcgtggtgacggtcttagctatcttcgtaactaaccctgcgcgcactgtccttagagctcgccagaaagcctggtctattccatgctgtagacaaatactgcgactctgactgctacactggaggcttgggacaagcatctggtcaaaatgggccttctaatgggggctgttattttggccgctacactggccgttacaccgatagtcaccttatgatcgacagcatagccgagagccacgtgatggcatacctagacgcattggtggactacgtgaggactaactctagccatggcgctgactgagccactgctggatccaccatcagacctctgaacacaagtgtgcaacaaagcagcttcaggcacatctacttgtacgagcacaatgacgagcacgctgagacacatgcagggacaca

SEQ ID NO: 47798 - DNA, 609 bp, Gossypium hirsutum
  Clone ID: LIB3582-038-P1-K1-G2
ctctttctctttctctttctttggctgccttgtctttaaattaaagggtctttttttaaaaaaaatttatttattgccatttgaattcgaatgagagaagattaacaataataataaaggagagagaaaaaaaacagtagtcacaagtaagttactaagtctttgcttgtgacttttgaatttcgtttctttctttggagaggaaggccgaagagagaaccatgcagcatttaccagttaaaagcaaccttcttgattcaggttcggagacgaccaagttcggcttcggtggttacgagcagcccctttgccccaaacctcgccgtgtcggacccgtcgttcccgagtttctcaagcccctcagttgtaccaaacacaggttggtttcaatttcattgccatgttttatttaattttcattacattggctaatttggcctctcatgtaaatcatcatcagcgaactcaacactgatgggagaagtggagttctgaacataattgctgagacggtaagggatttcattcatcaaaattttaattgtatatccacttatatgtttcatagattactaatagtatcacatgatcttagacaaatgatggaag

SEQ ID NO: 47799 - DNA, 452 bp, Gossypium hirsutum
  Clone ID: LIB3582-038-P1-K1-H1
cttttctcgtggtcgctctataaaaatcatcacgagagagagagacggtaatagaacgggaacagactgatgcctacgcatcaggattgctatgaaaagaaagcaagggcaaacagcttaagaaccttgttctcaaaataagaggtacgaaacggggtaacatggtggaaacaagatctgaacttttgcatatgatataaacatatatctgataaatgagattgcgccagtgggactttgctcatatgagtgaaatgactacgatcttataggatgggtgttattcatatagcgagtgtatgaagatgaaagccaacaccagaatgtgcattatgagaagcctcatcattgacaacatacattgctttctgctaagcctcacaatgccaccaacaacgccaacaatagtaatatggtcaacaatattgtgggtgctaccgggatcactcccg

SEQ ID NO: 47800 - DNA, 404 bp, Gossypium hirsutum
  Clone ID: LIB3582-039-P1-K1-A12
ctcgctcatatctacgccttccattcggagtgtgcttgtgctcagctcgtgccatctagtgggttaaggtattttatcatttgctactttttacgctcgattacctcacgaaaagagaaaatgaccaagtgttacccaactgtgagcgaggaataccagaagtcagctgataaggctaagaggaagcttacaagtcatcatctctgtgaagaactgcgctacactcatgcttcgactagcgtggcactcagctggaactttcgatgttaagaccaatacaggaagtccattcatgaaccatgaagcatcctgttgagctcagcacatgctgctaacaacagccttgatatcgtcgacagacttctcgagccggtcaaagagcatttcactaacctcacctacac

SEQ ID NO: 47801 - DNA, 474 bp, Gossypium hirsutum
  Clone ID: LIB3582-039-P1-K1-A5
agcacacctgctcttactcttgacttgtagcttataatgaagttaaatggagccaatgttactgaaaaggcacatactgccatgagactacagtggggatgatatttttggtactacgaggcggatccatggtagcatatgactcaagtctaaagcttcagctttgaagttgggggatctatctgcagaatcacaatggtgtgcattttctatgacatagaatatacgatctcggttatttcatgacaatagcgatattaccgtacttaatcaccaagaccgtgacgtacatcaacactatagttgcagcatgatagcttcaatttgtacaactagagctagctcactaattgcaatatctgcagatgataggagcgcatctatatatgtacgaacatcatatcattaatggaggcatatatgatgagtatgagcggttaaaagctagagctgctatacaagacggtagagttg

SEQ ID NO: 47802 - DNA, 385 bp, Gossypium hirsutum
  Clone ID: LIB3582-039-P1-K1-B11
attatcgttgagactaccggtggatgcacagactcgtttgtgacacatgcaatcaaggagcgagtcaatgtactatatggagtagaattacgaattcatctatgacatactgtgtactcagccaacgaagacaactgggaaatgctgaccatcactgagctgccatctgctcttgaataacattggactattctagagatcattgcgtgctgcacaagaaaattctcatgcatacttacgaatcttcaggcttgaaatccttgatgctggcttcaatacacgaagggagcatctagtcaagctgtttgctgtgaggcaaagacatcgaatgcatcctgtactggacttgtctcttcaagtcagcccagaacaaatgagggctttg

SEQ ID NO: 47803 - DNA, 365 bp, Gossypium hirsutum
  Clone ID: LIB3582-039-P1-K1-B12
gttttggtttggacgcgagggggctgcactagagaatctaagctacctgcacatgggatgcgagagattgtctattgtgtaggggaacttaaattcaatgtatggccctgtgtatactaaggtctggcagggaaatgccctggcgtaacctaacttaattgcatgggattaaatatccttttggccaattgttgaaatacttaccaggtccgtacgaacatccttacacataagtagccatttttgattgtgaaatgcgccctgctttgtaccattcaataaagccgcttctttgcgtgctttcagctcggagggaacgctatactgggcagtatctaaaggtcatgtcttttcaattcattcct

SEQ ID NO: 47804 - DNA, 232 bp, Gossypium hirsutum
  Clone ID: LIB3582-039-P1-K1-B3
ccgacgcgtaagctattgcgaaaaggctagtgaatatttcattgattactaaatctcttgctcctgcgggcattcaacagaagggggattacaggcatcttccttacgaacactggccagctctgatcatcacccacactgatcacacacaaacggctcatatcttactcttaatcatacatagatcgatatggtcatatcacatgttgataatacattcactgatcatctt

SEQ ID NO: 47805 - DNA, 354 bp, Gossypium hirsutum
  Clone ID: LIB3582-039-P1-K1-B8
cccacgcgtacgtccacgcgtccgggagtgcagtctctcagcaggaaattgtttcattgtaccgaaggttctgccagttggatcgaaatgcaaatggattcatatctgctgatgagttactatcagatcctgagtttgcaatgaatccgctctgtcagagactgcttaagatggaggctggtttgcactttaaggactatgtcggcttcttgtgagcgataagtgctaaagcaagagtacagcacaacgttaaactcatcttcaaggtgtctgattctgacggcaatggaaaggtgtctatcaatgacatcgctaaagtggtaccagatacatctggaacatttattttcgatg

SEQ ID NO: 47806 - DNA, 396 bp, Gossypium hirsutum
  Clone ID: LIB3582-039-P1-K1-C12
cttgctcctgctgatacacatagatggtcttgtggtcccaatttatatacaactgaggactgagatgactgtgcctaatcctagatagatagcatgcttagcaggaatacttggaaactgagctatgatgagggttacgagtaccattaccaaaaacatggtcaccatataggtgcatctatacgtaaaaatgacagcaaatattactcgagaggctgacggaaatgtatggattcataaacgccatacccgaatacggaagtaggatccatgcgaactggacctggctagcatgaaggattgcacgcagtccacaccaactacaactacactgtaccaactctagcatgcagatgctagctggctttgtgcaatagaggcattgactggtgacaa

SEQ ID NO: 47807 - DNA, 451 bp, Gossypium hirsutum
  Clone ID: LIB3582-039-P1-K1-C2
cccacgcgtgcgcccacgcgtacgaccacgcgtacgaccacgcgtccgcgcagagctttccactcgccattcaaagtcgaaagttcgctacaattcggctccttccattgggggaaaaaagttggattttgaatggaaaacaaacagcccagttctgcggcaagctatgctgattcgacagcggttcctggcgatgcggtgctcgacctctcctacatgaccaaccagaccatcaagctaggtggtggtctccgtcaggattgcgacgctatttctgctacgaaggccggaacacttacgttctcgaaaccaaataaatactggattgaaagttcgcaaaaaaggtatgtgccttgcgtggaagatactattcttggtatctggcgggactgtaaagcagataattttctgattgacatcaacagacctgcaatcggttgtttgcctgtgc

SEQ ID NO: 47808 - DNA, 389 bp, Gossypium hirsutum
  Clone ID: LIB3582-039-P1-K1-C4
accacgcgtgcgaccacgcgttcgaccaaatggcagagcagctcactatgatgttttaaggggcatcagccgaagagagttagactgactttgaaccacacgcagtactattagaccatgcaacaggttatgcagaatccacagtatatgaccatagctgaacgccttggtaatgcattaatgcaagatcctgctacgtctagtgtgcttgaaagtatgtccaatactgagcaaaaagaccagactgaggaaagaatgacacgtatcaaagaggatccatcattgaaacatattctagaagatatagagacaggtggtccctcagcaatgatgatgtactgggatgatcaagtagtgcttcagaagttcggtgaagcaatgggtcttgc

SEQ ID NO: 47809 - DNA, 419 bp, Gossypium hirsutum
  Clone ID: LIB3582-039-P1-K1-C6
cccacacgttcgccctagcgtgcggacattcgtccgagcatgtcggatcaactagtcaggcggtggtgatggtgcaacagatgcaggagcttgaccaaacgtgaacaatagcaacatgttactcttattccacaacttactgactgtgatactgcctcagctttttacaatgatatcatggaacgaataaaaatcagaaacggcatttctcatggtttttgcaggataggcatcacctggatcagtgctgcccctatatgcatctttagtagatttgtcgatcttgcttgtcgcattgaaaaagggggagcgacgctcaggagcactaatatgaagcagtatagcttcatatccacaatagtgcggttcctgagatgctactagcactcatggatgaagtctatacagtttctaccatt

SEQ ID NO: 47810 - DNA, 291 bp, Gossypium hirsutum
  Clone ID: LIB3582-039-P1-K1-C7
cccacgcgtgcggccacgcgtgcaaggcacaacaatatgtgcagcgtaatagactggagactatgatgaagataagaataggcttattaactacgtttcctgagtccaacgtttaaggccgccttcttgcagatgctatctataatcatgcggagactggtatcagaatgtatgctcaagagtgattctaataatagctatacgacatcttatacatcctgcattctacagaaacaaaagctctcgcctagataaagagagtcatgattttctatgacccattgaagcact

SEQ ID NO: 47811 - DNA, 464 bp, Gossypium hirsutum
  Clone ID: LIB3582-039-P1-K1-D11
ctcactcttaacggtccatatgacggacaccgacttattcatcgagccgtgcacgatatatgtgagaaaatcaatattatctgtgatcaagagtttctcatccgagtcaactacatggaaatgtacactgaagacattaacgaccttttccatgtaaagaatcaaaaattgccaagtcatgagaataaaaagcgagggatgttcgttgcgagtcttacggcggaagttcatgccctttgttgaacatgtgatgaagctcctggagcctgtaaaggttgatcatcattatggtaaaacacatctgaatgcactaacaaacatactcattcaatattcatagcggtgatagaatgcgacgtataggatccaagctcttctggtgattattcaaccaccgatgccatacgcgtatcatttacgaagttacttgctgaagatggatatgagcggattgctcacactgg

SEQ ID NO: 47812 - DNA, 376 bp, Gossypium hirsutum
  unsure (1)..(376): unsure at all n locations
  Clone ID: LIB3582-039-P1-K1-D2
ctgtgtatctatcatggtcggcgactcgcgtgcgctcctggggctgttttcaaccctcgcatatctcttcaagatctgatctgatctgacaaactaatgttcgggagagcaccaaggaaatgcgatnctactagatcctaggctgtattgagagtgcccaaaagccgtcaccaagacgatctgaagaaggcttgcaggaaagctgcagttaagaatcatccaaagaaaggcggcgatcctgcagagattaaagagttggctcatgcttatgaggtgctcagcgacccaaacaagcgtgagatatgtgatcagcatggtgaggacgcccttaaagaaagaatgcgtggaggaggtggtgcccatgacccacaagcta

SEQ ID NO: 47813 - DNA, 423 bp, Gossypium hirsutum
  Clone ID: LIB3582-039-P1-K1-D3
cccacgcgttcgcccacgcgtccgcccacgcgtgcgcccacgcgtgcggtgcacacccaatatacaaaggctctatctattgtgctcataagcctcactctataagctttgaattttcccagacttgtaagctctatactttctggagtgagatgtgaagaatcccaattgacaaaaaggcagtcttttgcgatcgggatttcaaattatggttgaattttcaactgttgcagatctgcgtgtgtctttagaattttcaaagggcagaggatgtatgctgcggcgagactaggtagctatatatctcgcggtgtttatactgcggctggtccatttcattccttggagggtgctgtcgatataattgaaggtgaacaacctgatgggacctgtaaaacatcaccttggtatgttcggtttggt

SEQ ID NO: 47814 - DNA, 306 bp, Gossypium hirsutum
  Clone ID: LIB3582-039-P1-K1-D5
cccacgcgttcgaccacgcgtgcgttattttgcactgtgatgtgatcattgtcaaatttagctgtactgagctttctatgtttcttttttacctataagatcagcgcattctttcacagagcttgaataatcatcaaaagtgaaagctatttcaataacgaggatctgcatttagcatgtcactcgctcacttgtggctttactgttcaagaattgcgtgatctccggtctttgacttagcatcaagatgtggaactcgggggagggggtatctttcttatgaactccggtattgtgaacatacct

SEQ ID NO: 47815 - DNA, 459 bp, Gossypium hirsutum
  Clone ID: LIB3582-039-P1-K1-E1
cccacgcgtccgaaacaaaggaggaaatttctgtcctgaaaattgcactcagttgctcttggctttcattgaatctaattgcagggagaacatgagtccagttttgaagacagtccagacaactctatcattaaacaagttgagttccagcaattatcctaggaaagaaaagaagttgcttcaacatgggtcatgctcttttccaataaataacgtccaattatctttccgaggtggtttcgaggttgtaagtaatgttaacaggtcacataaagaaaaggagaattggaggccttgccacacgtacaaactcttagagagtttcctcgagaggagcttgttgcaaaagttgttatggtgagatttgattctaccattttgcttggagaaaaactggatatgagttctcagtctgcttcgaaagcactgtacaccattgagtacttacacgaatgtggg

SEQ ID NO: 47816 - DNA, 172 bp, Gossypium hirsutum
  Clone ID: LIB3582-039-P1-K1-E3
cccacaacctaacctcaacattggttatgtccatgtccaaatccgctcttgcttactcaatagcgtcaggctctttagttactgggtgatcttcaaccctaacacatgcacagctcagggatcgatccaagaggaaatcattatttgcaacatctaaacgccgcaaatatac

SEQ ID NO: 47817 - DNA, 453 bp, Gossypium hirsutum
  Clone ID: LIB3582-039-P1-K1-E5
atcaaacaagatagggtaggatatcgacaggggaaggatggctcgaaggataaaacatctgcagtaatggattctatatatcaacgccatactacaaacaacctgacacttggtttctacatgtacacatgtgaacattcattgaccagacgctaaagccgctattaccagacagaaaccaataatcaatccatgcctaacagagcattgcactgtttagacaagatcaatggatccaagcagaggaccactaacacctaggctgagcttacagaaggcttaaaaacaggcagatcacagctctttgggaaaagtcatcttctaattaagcatgaatatttcatatgactgatctcagaaaggaccctggagcaaaacagatgtacttattcatatacataaccgactatcttccacaatggactacataggacaccaggttgtgacagattg

SEQ ID NO: 47818 - DNA, 593 bp, Gossypium hirsutum
  Clone ID: LIB3582-039-P1-K1-E6
gccactcgttcaatcttcggagccaaatatcgcttactttcaaggagagcagaatgctattgaggatagtgggctctctggctttgggagatcttgacttgtccactccagaagccaagtgtggactctttgggtccacattgtcctccactgtttatctagagacctccaatggtgacagattggctgaggcacttcactccaagggacggccttatgctatatataggaataattgattctcgcggcttgcaccttggcattttcgtcaggcactgttatcaatgcttcaaagatcatgtagccatatatgggatgcattctaactatgccatgcttgttttagattgtactgtaagtcgagcacggcaatcgcctgttctgatagtaagaaacagagtgtctaagccacggcacatgtatacttgaggagcctgccaagatcgatgtttctcaaccccagttagatatgcaaaatgaaagatgctatctggaaaatcttcctgccatttagatatatgataagcatgtgactatgaggttactggtttcgagatcaccacgcctattggatgcattcatattgggatctc

SEQ ID NO: 47819 - DNA, 443 bp, Gossypium hirsutum
  unsure (1)..(443): unsure at all n locations
  Clone ID: LIB3582-039-P1-K1-E8
gccaggcgttcgtgcacgcgtncgtttggttgcactcgcattatgatcattgtccaacctagcgtcactcagcttgactacgttactatcttacctataacagcagctgcattttttcacagagattcactagggatcatgagacaaaactactccagtggagcggatctagatcgaacacatgactgcctctattgaggctgcactcttcacaaagctcgtcatcagcgccctctgctatggcatcgaagtatggaacgcggatgacggtggctctgtcttatgacctgaggtgtgggagcatacctaggatgacctgatagtctatattgctagtggtgtattcaaggttactgcattgtcgtttgccatgtcatacccgacagtggcaactgtgacagacatgtccatcagtgctttcaagattttctacgctgtggcag

SEQ ID NO: 47820 - DNA, 338 bp, Gossypium hirsutum
  Clone ID: LIB3582-039-P1-K1-F12
caaaaacacagcttctagtaatcagggcgaggaacaagcaagtttccggagatgggctatatgctatctgcattagatacagctagcaacgctctggcaaatactgccccggcaaaagaagcgaggatgcatcctcacacaaaggtgcaatgaactgcgccaagcaataccaattgtacacaattatacaaaccgcacacgacaagtgagaagacaggtatgaaactcactaaaaagacgaacaactgcgtgacggaaaagatcctcagcggagatgccactattgctgacaacactgccgacaggaagaatgaagggagcgtccacattgaaaacaa

SEQ ID NO: 47821 - DNA, 479 bp, Gossypium hirsutum
  Clone ID: LIB3582-039-P1-K1-F3
gctctttcaaggatgcagagattgctcccaattaatttggtctttccaccagcttatgcaatatttgcatttatgatatggaagccattcatcttgaacagtaacactgcaagaagtgaagatattcatcaattgtatcagtctttaacaatggccattggtgatgccataaaacacagaccttttcgagatgtttgtatgagggatactcgtggtttttatgatattgtagctgcagatacaattgatgctgagtttgctgccatgctagagttgaatggtttggacatgcatttgaaatccatggcctttgtccctcttcgtgcaaggctctttctaaatgctataattgattgtaaaatgcctaattctgcttttacacaggatgatgggaatagggtttctggacatagtgagtctaaagctcttcgtgcagagacatctaagcttttggataagcttgtttgtgcactggacac

SEQ ID NO: 47822 - DNA, 381 bp, Gossypium hirsutum
  Clone ID: LIB3582-039-P1-K1-F4
cctacgcgtaggaggcatagaagcctcctacacattttttacgctagaaccatatattctatggtggtagaggtaaacgagaagggttaaacatcaaaggtgaacacgatgctgatagtagcgagattgcaccatagcgtatctgaagtgtgggacgggcaatggccgatgctacatctaacaaaccatgaagatccaggtcatgcctacctgagtgttcgatgactgcgagacgtaccgttacaattgaaggacagctaccaatattgactcacgttcacggtcatgtcacacatatgatgccacatgacattggccccactatggatacgctatgactaaaggttctagataggctgaggtgcgcgccaatgattcttt

SEQ ID NO: 47823 - DNA, 460 bp, Gossypium hirsutum
  Clone ID: LIB3582-039-P1-K1-F6
cggacgcgtggggccggtgtagcaagtggcaatcggtggccacgtcaagagactcttgctctcctcaagattagatcagatatggatgctactttccgtgatgccaccgtcaagggccccctttgggaagatgtttccaggaagctggcggagctgggttacaaaaggagtgctaaaaagtgtagggaaaaattcgagaacgtccacaaatactacaagcgaacgaaagaaactcgtgctgggcgtctagatggtgagagttataagtttttcagccagctagaggcgcttcaaacaacttccggcgccgctcctggcaacgtgtcaataccggtgattcctgctactgtcgccgttaccgccgccagcttggacgtggctcctgtttcggttgggatcccaatgcctatttcttctgctgccagaattgttccacctacaacagctgtaccaatgtctt

SEQ ID NO: 47824 - DNA, 462 bp, Gossypium hirsutum
  Clone ID: LIB3582-039-P1-K1-G12
cccagactaagcactctagaggcatagatatacacagtaggcctcagatctatcctgatgctcgatttgcagcttacgaaataccgtccgggagtcacgctagatctacacctctgtcaagcgctgatgtaaaccaagttgctactcataaagacacgccaccgcttctgcatcaaaggcggatgccggttgttcaaagcggcatggaaatcaaatcactgacttgagccaaccggaccaaccaaactttctacacagagacgatcaacaggacattcgtagaacaagtgttacgtgcatatcagaccgtgtctggaccgactacagatgactatctgtcaatcgccgatatagcaagtacctgacagcatggaagagattacgtgaaacacgccacactgtagtctttattatagagggcggttcaccccgacagagaacatagttcgcatgctcatacac

SEQ ID NO: 47825 - DNA, 594 bp, Gossypium hirsutum
  Clone ID: LIB3582-039-P1-K1-G6
cccacgcgtccgacaaaatcaaacttcttagcaaagaagcaaaccagaaaacctttataccttacaacagaggaacctgttggttctgatttctcttcaggggccattcttgccacttctggagatatcctgaacacttccatcgctatccaagctaatgcttgtgggaggcctagccatactgatgtactcgtagatggtaactcatctgtgcctgattataatcgagagaaaactgaagaactatcgtcagggaagggtcttctttctaaatttgggaggaggacaactgcacttgatgataatcgtcgtgcaacatataacatatctaatcaaccggtggttagatcggattcgatatttacgacctttgaggctgaaatcaagcagctggttgctgttgggcttcaagcagaactttcgtatgctaggagtcttgctcgctttgctgcaacgcttggacctgttgcatggaaagttgcatccggcaggattgagcaagcactgcctgtttgctgtaagtttggttgtgggtgggtcggagagtatgaaccacttccaacaccggtattaaccttcgagactcgtgctcct

SEQ ID NO: 47826 - DNA, 142 bp, Gossypium hirsutum
  Clone ID: LIB3582-039-P1-K1-H1
ttattgtctctacctcatcctacaaaagagaatgaccaggtcccaactggagcgaggatacagagtcagttgaaaggctaagaggagctcagaagtctcatcgctgagaaaaactgggctccactcatgctccgtctagcgt

SEQ ID NO: 47827 - DNA, 488 bp, Gossypium hirsutum
  Clone ID: LIB3582-039-P1-K1-H4
aactctcaataggtttcactgcaaggactcgtattgaaatctataactttactcgttctaaacatgcaggagcctctgctgcaaaaggagaagaaacatatctgtgaataactattcataacgctcttaagactccactcgagtaccaacctacaaagccgaacactgaactggaggtattactgtcttactctgcatcaaaatgagatccatgtctatcggtaaaaccatatccaccataccgcatatcaaaagagaaaagcaatgttcattgtttcccctctcagaatacccaaggcattctcgaaagatgtgcttgctgtcttcgaactcagagctgcaccgagaacatctctaatttgaaaccactctccttatactgagattaacaaaatttggaatcaagtcccaagagatccgccagatagtaaacgtaactttagattgaatctgtaggctccataacttttttatcaaaaatctttgat

SEQ ID NO: 47828 - DNA, 447 bp, Gossypium hirsutum
  unsure (1)..(447): unsure at all n locations
  Clone ID: LIB3582-039-P1-K1-H6
cccacgcgnccggaaggagcaagaggaccgngnaactaggccaggagagcaaccaganaannagcagaaggaaccccaggcgagggaaagaacgcaaaagccgccgaaagaagaggccnggagaanggagcaagacagcangcaagcagnagcnaacgcnggagcaaacaaggaccgngagcacaagaaacnngaggaagagagcncgcccaagaanngngaaaagagnaacaagcnanaaaccgncaaggangaagaaanaaccaaacngaaagaagaaaccaggaagagggcagcgcaccggaagcnnaaaaccaaagaacnggaancacagnnagagaaacagcggccagcngancaagaacngaaaaagagggngnngaagnnggaannnngncnccaggaagcncgnncncagacacgaaaacnccaaaggaagggagagcg

SEQ ID NO: 47829 - DNA, 197 bp, Gossypium hirsutum
  Clone ID: LIB3582-041-P1-K1-A11
atcaagcttacccctagattgctaccttcctcattaatacaccaacattaacgtacaggtgcgcgttataacttaaaagtagtgttttttcacccttgataccttatctggacttcgatttcaccaacctaactggaaacactggctaacttacaatgttcattgcgtgtgctaacattaagctttagggtggtgtt

SEQ ID NO: 47830 - DNA, 497 bp, Gossypium hirsutum
  Clone ID: LIB3582-041-P1-K1-A5
gttcctctgagtttgatcttgatgtggaacccgattctgctcgggaccatcatgaggagttcaactttagtgaggtttttgtgcaccaaatgatacactccatcgagtttgttctaggtgctgtctcgaacacagcatcatatcttcgactttgggctttgagcttggcacactcagaattatcaaccgttttctatgagaaagtcctactactcgcttgggggtacgacaacatcatcattcggttaatagggctagccgtgtttgctttcgcaactgctttcatactactcatgatggagaccctcagtgctttccttcacgctttacgtcttcactgggtggaattccaaaacaaattctaccacggtgatgggtacaagttcaaacctttctcatttgccttgataacagatgacgatgattagttaaaaccataatccttgcctattgacttttcggatgcaagagaataagagtcgtacacaaaaaatgga

SEQ ID NO: 47831 - DNA, 453 bp, Gossypium hirsutum
  Clone ID: LIB3582-041-P1-K1-B2
cggacgcgtgggcgactgtcgttcatctcacaccgttttgcctctctcattctacaagccgcggcacctccacctcaccattcgatctccctctttcagattcactaaggtatttcttgatttaggattgaacctcattgatttttgcggttgttgattgctatttgcgttctttgtgattgattaccacttaattgttgcgggtaatctttttttaaaaaagttttcaaaactttcagagattaaaataaataaaacttctcattaatttttgtgattaatgtgcttgggaaaaaagaaagaagaagcagaagaagaatggttcatagattttcaactagattattgaatgtttgcatagcttccctatgtaaggcccataaattggagaaagctgaatcagttattatcgatggtataagattgggagtgctccctgatgtttgaacttac

SEQ ID NO: 47832 - DNA, 403 bp, Gossypium hirsutum
  Clone ID: LIB3582-041-P1-K1-B3
accggacctgcaggaccgactcaggccacgcgtcatgcaacagctactacgacgcgtccgcccactcgtccgccttagtggcacactccatgacggggcagtgtccgaaaaagtggctgaaagttttggagtagcgccatcctgaccaaccttacctccatactagagctacttcacaagacaatggcataaaagaaactttcttctccagtatcatatgacgtttaccattgcgaccctgtacagttcaacattttcaacccacaggccggaactctttctactcgttacagaagggaccctctctttatcgaacaaccttttattaaactctgttggacttgaatttcagatgtgtcaactgtttgagtatttggcaactcggacactgtcacaatactct

SEQ ID NO: 47833 - DNA, 521 bp, Gossypium hirsutum
  unsure (1)..(521): unsure at all n locations
  Clone ID: LIB3582-041-P1-K1-C3
cccacgcgtccggcctagcaaaaatatatgtatcagctccatcccacagcttgattttgcagtaacagtatcgtcactgcttggtgtcccctttccgtttggaaggtgccgtcatcgggcgtgttaatcctgagttatatgctttagctgtttgtacatggaacttggatgacgataagacatggaacaaccaggatcaaacaaagttggaagaatggttgcaaaattatgctaatgtcctctgcatcaattcatggcaggtgaaaagatatattgatgtttattcagcttcatcagtcatcggattttcctctgaagacctattccgtatatcagatttatactctaaagcagatgagaattggtcatatactaagaatttatcgtcgtacaaaaatggaagttccaacacatcattgccagttctcaaaaggcaaatagttgcctattctaattttctttcttatngtgctgaactggctcgtttcaagtggacttgagttaatttaaagatgatgggc

SEQ ID NO: 47834 - DNA, 480 bp, Gossypium hirsutum
  Clone ID: LIB3582-041-P1-K1-D2
gaggtactgacggtgcccaaacctcatctctctttagctacttaaacatgaagcaacaacatctaccccattacaaaccttgggtcgctcatctctttaccccaagatcaacatcagtgcgggtcagtctgaaaaaacagccattagatcttaaaagattaaatgctgccaggataacccgagtagggcttgaaagcaatgtgaatgatcaaggagcaggtgtagtatacctaaagaattatcttgatactcaatattatggagaaattggcataggttcaccttctcagagcttctctgttgtctttgacactgctagctctaatctttgggttccatcttcaaaatgccttttttctattccttgtcatttgcattccaagtttcgagcaaggtggtccagtacttataccaagattgggataccttgcacaatcagctatgactatggagatgtttctggcttctttagcgtggatc

SEQ ID NO: 47835 - DNA, 506 bp, Gossypium hirsutum
  unsure (1)..(506): unsure at all n locations
  Clone ID: LIB3582-041-P1-K1-D5
cagaagcttacaacaagttgctttgcatgtgtaaggcgcagatggcatattttgctgttaacttgctgaatgttgttactgaactgctcgataactctaagcaagatgctatgcggatccttggatgcgaaaccttgactacgttcatctatagtcaggtggatggaacttacacacatagcatcgaaaaatttgttcataaagtgtgtaagttggcacatgaggacggggaagaacatcagagacgttgcttgaaagcatctagcttgcagtgcctttctgccatggtctggttcatggctcaatattcctatatctttgctgctcttgatgagatggtatatgccactttagataactatgagctagacactcgtattgatgatgataatgagagagaaccccatcataattgggtagatgaagtggttcggtgtgagggtagaggtgccattgtggcctgtgattccagtcctagcaacatgattatncggcctcaaccagag

SEQ ID NO: 47836 - DNA, 594 bp, Gossypium hirsutum
  Clone ID: LIB3582-041-P1-K1-E11
cggacgcgtgggtggcgttcaaacttttccacaagaagtagacccagtagtatttctatgtagcaattgtacacagagaacaaacctagatggcaaagaggatcctgaaaactctaacctgcaattagatcctgttgatgagtccgattctggtgacaaaaccaagaagcaagtcccgaaggcagtggagaaggttttggctggatctatcaggacagaaatggctcttgaagagttctgtgccaagcaagcttctgaaataatgcaattaaaccgtttggtgcaacagtacaaacatgagcgagagtgcaatgctattatagggcagacaagggaggataaaattcttcaccttgagagccttatggatggtgttttacctactgaggaattcatggaagaagagcttgtttccctcacccatgagcacaaggtatatttttgttcttttctttttctttttcagttaaacatttgtatgtatatccaatttttaacctattgcctacagcttctgaaggagaaatatgagaatcatcctgaggttttaagaataaaagatgagctgaaaagagctcaagatgagctggagcg

SEQ ID NO: 47837 - DNA, 350 bp, Gossypium hirsutum
  unsure (1)..(350): unsure at all n locations
  Clone ID: LIB3582-041-P1-K1-F4
cccacgcgtccgttaagatggtgacaaaaggctcactctatattggttcttttctttagatgggatggtagtttttaggtattgagaagagagaagtgagtctaaactgtaacatacacagcggcaagtcgttctgcataatgtattgtttctaaagtaggatgtttaggttgatttatgttctcatttcaaaggcactttgaatttattcattctaaaatgcaggtctttaggtagaaagcactgttttatatggttttgcatgtgacagattggacccatttttgttcagttataataatgcttttgatttcatactgncccaggaataaaacctgaaaacatacaca

SEQ ID NO: 47838 - DNA, 456 bp, Gossypium hirsutum
  Clone ID: LIB3582-041-P1-K1-G10
cttatgctgttctcttcttaatcggttagctcaacgttgatgctactaagcataggtctgtctgtagctcgaggcgcgatctctataacataatccatgtaccagctatcctaccttggtggcaaagcttatcaacctcagacaaatcaccaatcataatgccaactccagcacttacatgctcttgagactaaccaccgatacacgtcaaaagctggtgaaactcagttctgagaccaaaattaagatcaatttcactgtgctgctgttgctttactacgtcataacatccagcacataccacttttatcgccttcatttaccactgctcctatgcttttctatgtccaacaaaaacaaagtattcatgaaccgtacttgccacatcatccccagacatatgaatcacaattcaaacaaattatacctgataggccacaaaaagatcagcaccaa

SEQ ID NO: 47839 - DNA, 466 bp, Gossypium hirsutum
  Clone ID: LIB3582-041-P1-K1-G4
cccacgcgtccggaagagctggatcaaaagtctcaagcccatgatgatgtgttaggtgttttagcccaaataaagatggataaggattctattgagtccttggtgggacctgttgaaactgctgacaggatctttcaagaaattcagggtttgcaagcaaaagttgaaggtttggaatataagtttgacattagagggcaaggtggtgctagaactgtggaagatattcaatcggagctaaacgatttgcaaagcaaaagggacgttttacttaaggaagtggatgacttaaggacagaacagagatacatggaaaaggatttgcaaagtgttaagacgcgttggcacgatataagggagaaaaaagtcgaggtggctaacacattgcgtgattttaaaaaggcggaagaagagttggagcacttgtcagaggagaaacgtcaacttgatcttgaggagaagcatt

SEQ ID NO: 47840 - DNA, 426 bp, Gossypium hirsutum
  Clone ID: LIB3582-041-P1-K1-G7
ctttggaaaccctaaaccctaacccgccactcccttccctttcaattgcttcgatatttgcgtataattgttattattattgaaataaaacaataaatatttttttttttgaatttagagtgttgatttgaactcaaaatatggattctgaacaaaacatctacaggcctccacctgaattcgaagaaaattcatcacaacaactcgtcgatttcacagtatcaggttccacggagcttttccttattcaatggcctattcatcaacatcctgaaattaatgaccaagtagttacgcttcagctcggtcctgatggaaaattgggctgttttacggattctactggaaaaacttatgattttgttagccctgcttctcaagggccagatgctacagttatcttatctttcgaatcggagtctaaaa

SEQ ID NO: 47841 - DNA, 121 bp, Gossypium hirsutum
  Clone ID: LIB3582-042-P1-K1-A3
ggtcgcccagcgtcgttgacttcatgaacttctgactaccaacacctcaccagcttcttatgcctcgacttcatcgacatatgactcggcctcaactaccatcaaaacactcgttttcatg

SEQ ID NO: 47842 - DNA, 188 bp, Gossypium hirsutum
  Clone ID: LIB3582-042-P1-K1-A4
cgatccggcgccacgcgtcgtgttggcaaacattgcttttcaccagcctgtccaaaagtgatgggacacgcctaggaagctttgtctgtgcttcatcatacggactgtttgcttgaactgataatatgatctgctactgtggcaactagcactaaagtgtccttatttgtcggcgagtaatgggggta

SEQ ID NO: 47843 - DNA, 285 bp, Gossypium hirsutum
  Clone ID: LIB3582-042-P1-K1-A6
tccggtcgccacgcgtcgtttttatttttttttaagaaaaaacctcgtactattactttattagtgactggatacaaaacattggtccgacatatataatcatgcagttgagagtaaaactagagtgcatgcctgttaggcatgttgatttattatatatatttattgcaagtcaaattggatctgggttattgatatgcagacgacgtacgtacactagatagggtcgacactgtgcagcttgcttggctaaaccaccctctgatgtatctcaactatggctct

SEQ ID NO: 47844 - DNA, 267 bp, Gossypium hirsutum
  Clone ID: LIB3582-042-P1-K1-A7
acgaccacgcgttcgcatcgataccggcaagattggaactgacaataacattcaattgagctggtgttttctacccttccctctgcagaaccctagcgttacccgctacttcaaaagataccctaattggatcgagttgactcagttcgagtgtccatagatggactcgcacttaaccgcgccgaaccgctctcgtagctgccagaccccatccacatctcactctgcctcagcctctgctacttcctacctacacaagcgcaaact

SEQ ID NO: 47845 - DNA, 344 bp, Gossypium hirsutum
  unsure (1)..(344): unsure at all n locations
  Clone ID: LIB3582-042-P1-K1-A8
ctctcttctcagatccaaccctnntatctgtctccccacctgtatggtgagactgggcgtgaatggagtggagcttcaacatgaatcataatcgtgaagtataaaattcgtggttatcaacacaaatgggtgggctttgctcgaggagatccactgtagataatgctcccgttggaggctntccccatgttaatggccattttgctcgagggtcgagattggttttagcccggaactgccgcaagatagcccaattactctctgtgggcaggcaatatgacggtgggtaagaacctttattccgagacagcggtctatgatgatcactgtttgtgacgatctcg

SEQ ID NO: 47846 - DNA, 199 bp, Gossypium hirsutum
  Clone ID: LIB3582-042-P1-K1-B2
gcgggcctagaatggctatgcctcagctaatgttcctggatatactctctctccgtcaaaatagagcctcgctcagttcggacatggacaatcgaatccgacgtatttgatggaagtggaaacgggaagtggaactgtaaaacgctacgtttaaggaagaaacctctggaagctgttaatctgtcatgctgtgaagaga

SEQ ID NO: 47847 - DNA, 230 bp, Gossypium hirsutum
  unsure (1)..(230): unsure at all n locations
  Clone ID: LIB3582-042-P1-K1-B5
atncatncggctaaaccagaggcatcgctcaaccaccccttcgcctccatatcatcaaatcgagagccgcgaatcctcatcaaagctgcgattttaacgaagcagacaaggattcaaaggctccttcaacaacagataagtgctccttcccccttatagagtcatgctttcatgcaaagaaaagaatgtgaaatnaaacacaataaggagacgcgacaaacacctaaaca

SEQ ID NO: 47848 - DNA, 401 bp, Gossypium hirsutum
  unsure (1)..(401): unsure at all n locations
  Clone ID: LIB3582-042-P1-K1-B6
gcagtacttgatctcaaatcggctcctataccaaatagttgggacggccagcagactaatgtaggtgtcagcctttcagtctctcccgttgttccctctaacgacttactgaagaagcagatatcgcggcctgcaccccgttcttttgctactgatacatcaccaccctaggaagagtctaaaacatacgagaatgcaagtgcgttgtcactggcaacattcacttcactttcgatagaattcgttgccaggctagaaaatgttgttgactcgtttgaagagttgagtgagaaagcacactntaaggaacccgaagagctaccagcagcagcaagagagcccattggcttgtggtcaagattgattagatgggaatgggtatcgcctgaagcctaaatcag

SEQ ID NO: 47849 - DNA, 301 bp, Gossypium hirsutum
  Clone ID: LIB3582-042-P1-K1-B7
ctacaacctattcctcagatgcaagccacaatgacagctaccctatatccttgttagacacagaactgaacgaagaccatgacctagaatatgaatctgaagaacatgatagaaatgatgaggaagatgaagaagatgatgatggtggatatgggagtgagaacggagaatagggaagtactatagattaggattctgacgttgtcgacgaaaataccgaggttaagaatgtgaaggtacccaatctagctgttaacgaaaagaaagagctggcttgttacgctcataggatagggaagaa

SEQ ID NO: 47850 - DNA, 365 bp, Gossypium hirsutum
  unsure (1)..(365): unsure at all n locations
  Clone ID: LIB3582-042-P1-K1-B8
acgcttactttcttaaccaattctatgaaatgatctaacacaaagaacataacctcagaatattgcttacagtaattcatgctctggaaccctctatttctcccaccatgtctcgatcgctctccctcaaacgctctctcaaaacccacctcacaacactcatacattgacctaaccacccacagtcgccgacgtcgtcgtcggcagtcctattctattcaattcgcgctctatcaaccgcctctgcacctccttgctattcctacgactacgaactgcgcangtacctctgttacacctgcctgctcgacttgtgcggagtcaacacttactactccttaccgttctgcggaaacgccaagcac

SEQ ID NO: 47851 - DNA, 359 bp, Gossypium hirsutum
  unsure (1)..(359): unsure at all n locations
  Clone ID: LIB3582-042-P1-K1-B9
acgcggacgcgtgngctntatcttctntgngatntaatctgtaattttctctgttgttgccgatgcattgaagaaaacccatatntatgcaaagcttgttttggagggtaatataaaaagctntgattatctatgaagacatttaaatactttatatgaattgggaaaaattggatttaaaatgaagcagcttccatttatggnggttatatgtatagttatgttgttcattgtgtatagaaccacaatttatcaatatcataagactgagatggaaatgaaattgtatcgattcgaaatggtgaaggattatcagcagccttcagggaaattgagaagttngcctcgtggtatcatgc

SEQ ID NO: 47852 - DNA, 401 bp, Gossypium hirsutum
  Clone ID: LIB3582-042-P1-K1-C2
caagttctgaagtatggtccattatagccacagatccaccttctatcttcgattacgacgaagtgataggggaccgacagcccagaagcgaggtaagtcctatctattccctcctttattttattatgatatgaagaacgaaaaagaaaaataaaaatagcagatcaagagataataaacgtaataaaacccgagattcatagcaggaaatcaccttgctctctattgtgctttctattgcttctgtatgcgtgtgttcataaccccttacaaggatcaaaagcttggctctgtatagccgtaaagaaagaaacataaatcaaaaatatacaaacgttctttgtttctattcgctgctgattttgtttcctttcgcaggtacggtgtccactggcatgcgt

SEQ ID NO: 47853 - DNA, 341 bp, Gossypium hirsutum
  unsure (1)..(341): unsure at all n locations
  Clone ID: LIB3582-042-P1-K1-C6
ngagtgtagagangagggaaaatcatgggtgccaaagttctcttcttctttgctctgctttgcttgtcagctgtgtcggcatctgcacaggatgaggaagaccaaggtcttgttatgaacttctacaaggattcttgtcctaggctgaaacattataaggacaagttagctactgacagcgacacaaaacactgtttctggtgaaacattcatgatgctgcagcattatgctatgtgtgatcaagaggactgtaaggaaacgactggtagattagcataacataaactaaagatgcgatgttgctaatctgtgtgtaagattttgagctatcttaatgaaa

SEQ ID NO: 47854 - DNA, 131 bp, Gossypium hirsutum
  unsure (1)..(131): unsure at all n locations
  Clone ID: LIB3582-042-P1-K1-C8
cacgccagaccgnnncgncacagcagncccaaaaggagngncaaanncaaaggcnccgcgccncngcaccccagacccgaanncgcnccgaagccggcaccaccgagnggnggaaccccaacngncaacag

SEQ ID NO: 47855 - DNA, 442 bp, Gossypium hirsutum
  unsure (1)..(442): unsure at all n locations
  Clone ID: LIB3582-042-P1-K1-D1
actctcaacaattggtggatttttctcttcagatttttcgtctatttcccttcagcgacttgccagttcaagcgaaaccagtcgattcaagttccaaactcaattgtcaaaatagacggtgagacaattaactatgggaaataatgagaaattgagaacggttctggaattatatgatttgtttgcttgcttcttagcaaaatgtaataacatttttgttttcatatatttgtttttccctctggttgttccccaataataattgaaaagaaacctttttgaatcgatgtgagattaaagtaggtagttntaattaattcctacgcttcaatagatctattaagttggcaatttggtttgtttgtatattttttaaaatggaatttattttttgtggaatggattagatgggatcttgattaggttcaatttgtgatggagt

SEQ ID NO: 47856 - DNA, 388 bp, Gossypium hirsutum
  Clone ID: LIB3582-042-P1-K1-D3
gccgatccgtcgccacgcgcgcacgcgtcggacggatgttctaagcagcgacaataagcatggccagagctactcaccaagggaaggtacagggatcccttcaacttatggccaaccctcctactcaaccaaaacggcgcttctatagctgccctcgaatttccagcagcaactccaagagggattcctccgtgtgccttcaaataaacaaaggatcgatcttcgaccgcactacatcaaggctacatcgggcctgtaccgcggaacggcactcgaaatggctgcctcaccttctaggcgactacactgtctccggacaagagaacagagacagagaacagagagaggagagggcatcagagagggagcagtataccgggcaattgag

SEQ ID NO: 47857 - DNA, 167 bp, Gossypium hirsutum
  Clone ID: LIB3582-042-P1-K1-D4
ggcgaaagacaccaggcgcgtcctcgttactggagctgcaggacaaatcgggatgctcttgacccagactgcaggggagcatgttggggctgccagccggacctcaagctgaatcaccgcgcgagcttaagggcaaagagtgggagcgattcttcaaggggggacac

SEQ ID NO: 47858 - DNA, 321 bp, Gossypium hirsutum
  Clone ID: LIB3582-042-P1-K1-E10
cacggaatctctaacattcacaggacaagcctaggtcagcctagacactgatgtaactgacagcattgatgggattgcaatactacatcagcgtgtgtatcactttcattctcttgcatcacattgtcatagatgtacctgaatagggaagcggctctttgatgttgatctaagatgcctaatgtatcctctagtgaatcaatgatataaattgaatatgaccatgtatgaatttatgcctgatacacactgaacccttataagtgtagaacaagcaacttaatcaagagatccattatatcatggcactatatgcgatag

SEQ ID NO: 47859 - DNA, 166 bp, Gossypium hirsutum
  unsure (1)..(166): unsure at all n locations
  Clone ID: LIB3582-042-P1-K1-E6
ctatagcaatcatggcgaggaacaagtcagngctcgtagtattgctctcttcttattcgcttccttggccgctgtgcttgccaaagactccacgcagaagagcaggatgatcctaacagagacgggactgcgaagcagccatgagacctggcaacggacagacagg

SEQ ID NO: 47860 - DNA, 390 bp, Gossypium hirsutum
  unsure (1)..(390): unsure at all n locations
  Clone ID: LIB3582-042-P1-K1-F4
gccgantccggtcgcccacgcgtcgacaacaaggacaccctactcttcatcgaatcgtccagacgttacggggacatggcattcagagtctcagagttgctgcaacatcattactaggggctaacgagttcgattgcatctagagcaacccacacttcgtctcacacattggaccgggaaattacgtgcactaacggagagacagtacgttcggccatgaaacaagagcatacatgtagtctgagtngagtagaatccacaggaagcctgtgtcttggcaaccagacacagggacagctaaccatagcagtgctccaccgacctgcaataaccctggacaattccagaaattcttccctgctggacagganaatcctcagtcatacttac

SEQ ID NO: 47861 - DNA, 253 bp, Gossypium hirsutum
  Clone ID: LIB3582-042-P1-K1-F5
gaatcccggtcgcccacgcgtcggtcacaaaagaaaacatgtggcataattatcaggaggaagggtatggcctggacattcggatattcgggtcttcccaagtaaatgtcatgcatatgactgcaagttatgcaatgttataactgaaattgcgaagagttaaaataacagcagtgtaactaaatgtaactgtgacgggacatgaagacgggcgtacaaaatggtgaaagatgtgggtaaatctggctgttaa

SEQ ID NO: 47862 - DNA, 292 bp, Gossypium hirsutum
  Clone ID: LIB3582-042-P1-K1-F6
acgccgatccggtcgccacgcgtccgctaagctatgtaccagcactactatgctactccgaaccttcaggaccacgtgtcacacgttgcatctcacaacctcgcgaaggtcgccggattagccgcgttacagatctctcgaacatcatagatcataatgcccccgaaagcagaggtcaaatcaatggaactggccacgaaatgataccttgtcaaccataaagatgtgcaaccgaacttttgcggatcggatacatggagatcacacaataagactggaaacctggaactgc

SEQ ID NO: 47863 - DNA, 481 bp, Gossypium hirsutum
  Clone ID: LIB3582-042-P1-K1-G3
cacgcgtacgagaatggtgataagatgatggttgggttgagttgagctagagttgggtcagaggcaccttgttatataggaagtctcatgtttttagcttctaaccccttgcaaaatcttcagcggaacacaacttggaaccgactgtgtctgtcttctgatgggcacatggatacacgatcatttcttcgaggaatcgatgtgaaccgagcaccggcagcaacagtcgattgcgaggaagacggtgtgggggtgtcctcgcccaacagcactatttgcaccataagtgggaagacaaacgagagagatcatgttgctgaagaaaccgaagccgagagagattcttgctctcctgccaccgatgacgaagatggcggtcgcatgtgctggtggtggcgatgcctcgaggaagaagcttacgctttcaaaggaacaatacatggtgcttgaagaaactgtcactgaacatagtacgtctgat

SEQ ID NO: 47864 - DNA, 634 bp, Gossypium hirsutum
  unsure (1)..(634): unsure at all n locations
  Clone ID: LIB3582-058-P1-K1-E11
ccccgcgtccgaatcttgagcgtggaacttgattacattattcattccaaggaaaccatctgaaaaagagtgaaccatgggacgctggtggttttcaaccttgattcttctgtttcatccgataaacttcaacaaatatttggtgcttttggagaaattaaagaaatccatgaaactctgcagaagcataatcccaaattcattgagttttatgatgttagagctgcagaagctgcttttcaagcactgaatagcagtgacattgctgggaagcagatcaaaattgaaccaagccatctatggggcattggatgctttacacaacagcctgagtcagagcaagatgaacctaacctatgcaaaagcccttttgatgagttatcatcgggaaactgtggattgactgcatctggctgcatggataatgggtctacccaggttgttgcacctgtgagtacatttgctgaaactcatcaaagttctactgtgccaattaacttagcctctccagcaagagtgtcaccgataggaaaacccttaagctttcgggagcccgaccacgctctagatgaaatgaagtttgctaaccaaggtgtaccaagtttccatccncattctttacctgagtatcatg

SEQ ID NO: 47865 - DNA, 560 bp, Gossypium hirsutum
  unsure (1)..(560): unsure at all n locations
  Clone ID: LIB3582-059-P1-K1-B10
tgtatacaagnacatgtatattcggccatatggatagttcatgtacgtgatgttatattacgattttttagcttgtgcatatgagtgtatgtacatttagttatatattgacagcttgattttaaaggttggaagataattatttattttaattatatgagcattcggtcaaggaggaattgttcaatgaaattatatgttatatatgtatggaattaaaagcttgaaattaaatgtgataacaaatgtataagttgaattatttgattgaaatgatttagtattgagatgatattatgcattaattgtttaatttgcttaaggcttactaagctaagttagcttactttgtgtattttcgtttaccctgttttatagattttagattcaagttacaagctcggggatcgtcagcaaagttcatcacactatccagtgcttcggtatttttatagttgaacttgaactacggcatgtataggctggaatatactttttaaatgttggattttggtttgtatgtatataagccatgcgaaaatggcttgtttattcatgat

SEQ ID NO: 47866 - DNA, 601 bp, Gossypium hirsutum
  Clone ID: LIB3582-059-P1-K1-F11
ccccgcgtccgtaaccataacgcagggtggggttttgtttgttctttgggattttcatggcttcagcttgtgttaacaatatcggcgtttcgccggagagtttccagcccaagacgagttacccatcgttcggctggttgagtccacggatttcgttcagtcgagaggaagaatcgtgggggaggtggaagtctaaaacggatcctgacacgacggagatccaggatgttcccccgggtgagtttgagttcaggcttgaagatcccgtcgccatgttaccggccgatgagcttttctccgatggtaaactagtgcctctacatttatcgactgttaaacaactgcagcaacaacaacaacaacgacaagaacaagaacaacatcgtgctttgaatggtttagctgagatcaggtcaagggaaacaggttcatcaatggaggtttccgggtcggatcattacttgttttcacctaaagctccgaggtgttccagcaggtggagggaactactgggtttcaaaaatgttcactaagcaccaataatcaaccatcaaaacccgaatctcaaagcagcaaagttttgttattatccaatgataac

SEQ ID NO: 47867 - DNA, 590 bp, Gossypium hirsutum
  unsure (1)..(590): unsure at all n locations
  Clone ID: LIB3582-059-P1-K1-G11
cccagcgtccgcccagcgtccggcgcgagcgtgcggggtttttatattgaagcaagaaaattggtttaaaatacctttccttggatctgcagaagcttaagagcctgaaagctgaagcatagcggttctttagaaactctagaccaaaacctctactattcgaaactcccagnaagtacgcgaggggggcagaattgttcaacaaaatatgggtcgctcttgctttctcaatttactcctcctttcaatgcttttgcttctctccttctctcaaggattcagtattangaaaaatgatggagactgttgagtttgaagaatccactgctcaattggaggaaaacgcagatacatcaagggaaatgattgaaatcatggattataaagatccagggccaaatgttaaccccagaactggttacatatttagccctcctccacaaggctagttcagagaattctacccttttttttttccaatgaattagaagcaaaaaaagtggtatgaggagttgagattttcagaatgttgatgtgttttgttttgcttagaattaaagtatttatgggtctttctataaatgtaagaa

SEQ ID NO: 47868 - DNA, 651 bp, Gossypium hirsutum
  unsure (1)..(651): unsure at all n locations
  Clone ID: LIB3582-059-P1-K1-H10
tnacatgttaagcaacttgntacctgggnaatggggatacattgctatgttattcgggcttgggtacgagtgtccagcatgagtatgctcaaattttttttttaagattttcatagagggtccttggtgggtcatatccctatatctatgtccagatatacttcggacataggtgtttgaagggaaaatgaagagtcnaagcaaaatagaattgttaggtgtatcctccggtcaagttatggtttatttgccctagcatgaggtgtggtgcaaaaaggtttaccatctctctggaaatgcaacatctgggccctctgatccctattcagaagttaaatgtagcgtgtgccatggtctgaacatgggaaaactgatgttgacactgaaactgacaatcatatgatcgctgctaactataatgtacaattaccatctgaggaagatgtttcaattttcgatatagttcgagattcaaatatcacaccacttgaaggacataatgcaagtgtgtcttcatgttctaatcattcaccacctagtatcatccctggatgggaaagcagtggggcagatgaagtgagtcgtcctagtaggaatactgtgggtaaattgactgaatcaggtgcaagaacattgcgtcgttgtcgcaat

SEQ ID NO: 47869 - DNA, 516 bp, Gossypium hirsutum
  unsure (1)..(516): unsure at all n locations
  Clone ID: LIB3582-060-P1-K1-E10
ggnaagggnaccatcatcctgtccaagatcaaggttcaaagagccagagaattgtctacaaggttgttccattttgcatctggcatgccaacgtggcaatcctgtgatggttgagctgttgctgcaatttggtgctgatataaatatgcgtgacttccatggcagaactcctttgcaccattgcatttctgaagggaacaaccgattggcaaagcatctactaagaagaggcgcacgatcaacaattaaagattggggtggattaagtgctttagaaagggctatggaaaagggagccattgctgacgaggaactctttattttgctaagtgaaagctagtgaaacaaacttgggttaccccaaatttgtaagtttgctttctcccccatagtttccactcatgttgactgttgttccatgtagcataacaagaacctgctattgtcttggaatctgtcgtcattaccgaattttttatcgtataatatctaaaactagatgtattgttgaatggt

SEQ ID NO: 47870 - DNA, 640 bp, Gossypium hirsutum
  Clone ID: LIB3582-060-P1-K1-E11
ccccgcgtccgcccacgcgtccgggctctctctatctaatcaaaattacagagtggattgtcactttggaaaattccctgttattccaagccatggattcaagcagagaaattcatttgctactgtcccaaatggacgttgtgttatgtatccatgttttagagttcgttttgtgagggcggaaggggagaactgcctatctgattgcgctgaagatgttttggctgttgaccctttttctcccttagatgccattgaaggatatctttggcccaaagtttttactgaaagaacagaatatggggaattagatgctgaagagttggaacagagggaagttctgcctaatcttttaccatcgaatgcaaactctactcaagccaagagttcaggttttatagacagcatgtccattgatttgccagagatgcaggaagatgaagctaacttttcacagattgcctctgaacaagttcatttcagagaattgaattctggtgaaacaatgtctttggatgaaaccaatatgggctctgctgggaaggaacaagagtttcctacagagtcaactaaaatatgagaactccctgttctgcatctggtgacaatgactttaaagattcctcagctagactattgc

SEQ ID NO: 47871 - DNA, 627 bp, Gossypium hirsutum
  unsure (1)..(627): unsure at all n locations
  Clone ID: LIB3582-061-P1-K1-G10
ccccgcgtccggggatagaagcaaactgttagnacactgaaaaatagaacatatatatatatatatatataaagcattcgattcttgggggggcaggtaaattattgttccgcatcttatttattaggattatcatttcctttttcaaaaaaaatttgattgcattttgatgtttgttctaatctgtatttctaatttttccggcatgattggataactactcaccctgatttgatgaacttgcgaatgggttctccttttaatctctatcagtttgttttttcttaatctgattttaaccttagaattacattctgttgcaatcttccccactgtttgcttattttcttttcttttttgttttttactccaggcaagcttcaaacttttatatgaattattgatatttggatattacattttcaatagctccctcctctatggggattctagaatttgaagttcggtgattggtttttgatattttttctggaatgattgtgactttgggaggtagtttgatccataaatgacttcgagagaaatgaaaagtgaagcttggaggtggggcttaggtttgttttacatattggccgtcgcgtctatatggatatctgctagttttgt

SEQ ID NO: 47872 - DNA, 615 bp, Gossypium hirsutum
  unsure (1)..(615): unsure at all n locations
  Clone ID: LIB3582-061-P1-K1-H11
tgtaaatactgtgaggggagcatcttatnnctgttgcacaaaatgnnaggggaaatnnccttgaagctttaatggccagggatgtcaatctnnggtgtctgatgccttttctgtgtgtcgatcaaaaatgctctcgnnatatgttnngttctttatggnacccatntggggaggagagtgcggggagagcgtgcgannatggggattttggnnnagtttgatgnnngcaaccgtctatttcattgcgataggggaaacttactagtgnanngtggtccttcttttgtgtattaccccaaacaagagagcccatgcaagggaagctaagaaaccattnnnaaaattgccttgagttcttgtccttgaatnntcacctgttgctttgaattggtnnaaagaagtactgaggnagtccaanannactccgcccttcacctgatttatgtgaggggtcactttgacaaactctttcttttgggaattgagtgatttccctttgatgggccggcttttagtcgcacacattcaatannctggaaaactcaagatagagaaacatgggnaggaacagtcttccaacttcagtcgtttggtggtaactttgctttggtttgc

SEQ ID NO: 47873 - DNA, 424 bp, Gossypium hirsutum
  Clone ID: LIB3583-034-P1-K1-B2
gtacaaaataaaaaaaataaaaaaaaaatatataaataataaaaaaaatgaaacataaaataggggaggaaaaaaaaaaaagaaatacaaataaaaattaataataataaaaaaaacataaataaaaaaagggggcggtcgttttaaagattcaaagtttacttccccttgcttccgacgtattacttttttttttgggtccctaaatttaaattaattggccgtggtttaaaaacgtctgaattggaaaaaccttggctttaccaaattaaatcgctttgtaaaaattccctttttcacaagttggattaataccaaaaaggccccaactgttctcctttccaaaaatttgcccactctaattggcaaatggtaccccccttttagcggtattttaagcccggcttatttggtgtttaccccc

SEQ ID NO: 47874 - DNA, 647 bp, Gossypium hirsutum
  Clone ID: LIB3583-034-P1-K1-B3
gaagcttcctctctgaagatatccctttggatctcaccgttgacaagcaataattacgttaacaatcaaagtatatcctctttttttttcctcggtgtcgagctttagttggcttcccgctaaatcaagatcggtctggcttttgctcaaagttcaaccgccacatcgtttcaattagggcattcatcgatgaaaatggagttttaatttacctttctttctttttctttttttcccttctagtttctgaaaatctcgaaatgaattccgacgttgattagccaacagtatcgcgggactttccgcagttcactttcggtattaagaagaattgctgagaaaatttcgaagaagggcttttaattcaaaattttggttaaaggcaagaaatggcaataccagttgagcctcctaatggtattcattaccaaggaaaacattactattccatgtggagaacattaattcgaatcgacaccaatatgtgccgacaagctatgggaaaagggatatggatcgttgcttctggaatggaacaacacaagtgcataaaaatacatgcttgcacctgtgtcactgaacttctgatgactctaaattaacataactatgttgagagttagcatatgaagctagtgtattagtat

SEQ ID NO: 47875 - DNA, 629 bp, Gossypium hirsutum
  Clone ID: LIB3583-034-P1-K1-B7
ctacattgtgcagcaaaacagagttgtcagacttagtcggtcctgaagcacctctgcctgctgatattttccgactacctcttccaaaaagagaacagcaacttatagaccagtggaaaaaggctggtccacggccccggcctcttcctccacctcctgataggcccatataccaacatgaaaaagaaggttggtatgcttggattctggagaaggacaaagaaccggacccttcacctatggaacataggatgcaagcgcacaggttaatttgggatgccctagattatatcgtctctgtggaagcagatgctctttttcctggttttaacaacgatggcagtggatggccagatttctcaggcttggttataggacagaggttatacgagagggcttcttctaggacataccgatcagataggaaaactattgctgcacttttcaacattacgcgtgatgaaatggtaccatccgaagcgtgattggatgttatcggttaaggaacatctcaacagaagtttgagtgaagatggtttcttcaggcaatccctgttgtcgaagcctaactcttttctgtcgcatccactttccgaatgctcttgcagaatcccttctgttgaaaccac

SEQ ID NO: 47876 - DNA, 674 bp, Gossypium hirsutum
  unsure (1)..(674): unsure at all n locations
  Clone ID: LIB3583-034-P1-K1-C3
gcaaaaccagctaagagttccaccgccgcctctgccaccataaccaccgtggtcaccatcacgaccaccattggtgctgtaaaaaaccaagctcaaagctctcgttttcgttttttgcagtaaaagaatatggccataatgagcgaccaccatgcttgggctgttgcatttggtgtcttaggtaatatcatctcaatcctggttttcctggctccactgtcaactttttataggatttataaaaagaaatcaacagagagtttccaatcattgccataccaagtagcattgttcagctgcatgttgtggttgtattatgctttgattaaaaagggtgctttccttctcatcacaatcaactcctttggatgcattgtggagactntatacatctctatgttcttagcttatgcacctaggaagagcaggatatcagccataaaactttntgcagctatgaacctgggactaattttcatttaatcttaattgccactcacttttttggtgaaaaattcgattcgaatccaagttcttggttggattaacgtcgccatttcagtatctgtttttgctgcacctttgaacatcacgacaagagttattaaaacaaagagcgttgagttcatgcctttcaatntatcgttggccctaacattgagtggcaatatgtg

SEQ ID NO: 47877 - DNA, 695 bp, Gossypium hirsutum
  unsure (1)..(695): unsure at all n locations
  Clone ID: LIB3583-034-P1-K1-C9
ggaaaagaagaaagctgatgatgtctgggtccctggtatgcccttttcctatgaaactgaggtttgcttgcaaagccttgtttcacttaatgtcaagagaaggcagcaaaatggagaggataatagggaacctaaaaagatggatgatttcctatcagaggggttcaaattagtgttatagtcaagtgggaaaaagaaggaaaaaggattgttggcccttggttcctagatgaacttgtcataagggtgcaatttaaatgtgcactggtcttctggagtggaaggtaccaaaagtcctatcttggtttcttaccagctaaaagtctgtaattctcatatcacctccaaaggcaattcaaaaacattcttgaaagcgcatctgtcatttctttcactccggtaccgtgtagagtttgactgctttttgaacgaggaagtgatgacatgctattcgaaagaagacaaggcttaattccaaatctctaagggttctagaaataatgcaactcanagctaggtagtagtaatcaatcagattgctttcttttacttttgctcccgagtttctggctctgttatatttttccgcagcatgttttgcttggtgttttttgggtgaaatactgttgtttaaagcagaaggattgatgttagataaaatttcagaccttattaatatatatagatatgcttat

SEQ ID NO: 47878 - DNA, 614 bp, Gossypium hirsutum
  unsure (1)..(614): unsure at all n locations
  Clone ID: LIB3583-034-P1-K1-D11
cccacgcgtccgcccacgcgtccgccaaaagtttcctctcttcttctctcagttccttgactcgctctcagaggtgcaaccacacacttggtgaaagaggtttgcaagctgaattgtattctggaatggctccagcccctaatcccgctcttcgtccaattgacaagtcaaaatggaagaagattcaagcgagcaaggtcgggatatctctttccatgatttcgtatccatcctggattgtattgaaaattctacatgaaggaggttttgaggcctatttagttgggggctgtgttagagatttactactaaatagaacacctaaagattttgatgtgattaccactgcaaatcttaaacagataagaaagaaatttcatcgagctgagattattggaaagagatttccaatatgcagggtgcatataaaaggttccataattgaggtatcaagttntgagacaagtgcaagacatgacgcagacaaagaaaaagctttatcctcttattaccaagatatgtgatgaaaaagacttaaaatcgctgagaaatagcangaatcgggacttcaccattaatagaccctgagtcataaaagctacngacgtaaatcc

SEQ ID NO: 47879 - DNA, 523 bp, Gossypium hirsutum
  Clone ID: LIB3583-034-P1-K1-E11
taaaaaaaaaattaaaaatcctctaaatgaggagaaatgggagccctccggtcccggactccggccactcgtcaccggggactttaccatctacggcggccggaagctgaaaagcttcgttttttcgtctatactgaaaggtaagcgagaatctggcgatgatcaatgatgatcgggcgctcatgatgatgatgttagcgctgatttgcgcgttgactgcggcgcgattcggggccagagttgtggggtgaggcgaagaggcgtgacgcttgggacgtttgcggcgctcaacttctggaaccttccgtttgcggcgcctagggttccaaaaactctaggtcttccatcctttgttaacaaattgggccatttgggctgtacttgtttgtgggttgggtgtaaacgggttagtgggtagtttaggttaattgggttctaagtatttgggtctacgggtttgtgggctatgggacttgaaattaaattaatttaattaaaatattttaaaatattcttatatttt

SEQ ID NO: 47880 - DNA, 738 bp, Gossypium hirsutum
  Clone ID: LIB3583-034-P1-K1-F7
cccacgcgtccgaagaaattggactggaatggatgctcagacctgcatttaagactgataagaaacatttagaacctgctgctgttgcacaacttgaggaacctcctactgaggagataaagacgatgcatcctagagagttgaatccatatctgaaagataatggaactggttatccagaggaagcagaagaaaagagagctggtgtagacaggcttttatcttcttcgtttgtaggggatggaggtgctagttggagacttaaagctttgaagcgtgcagaagagcaagcttctcgagaaggacgaagtattgaggaggttgttctagaacgttggggttctcttgatatactggctgcatatggagcatctcgtagagctgctgcacctcgagcccatctgcatgccataagaaatagaaagcaaggcccagataatgagaaacaaaatgttgcaaacaatcaaaggggaaggaagtcagaaggaaattctgaaaggaacactactcgagattatttgcgggatgtatctcttcgacattctgacatgaagaccccaaaagtccgcgattcattatcctggggaaaacgaaaaaaccaaaatattcctgctaaaaatgctggtgctatatcgactgcaaataagtttaccgatgatggaaacttcatgcaagaatttcttcgtaagcagggaaatgatactatcgcatctggttcacatacagatcgtgatggaa

SEQ ID NO: 47881 - DNA, 581 bp, Gossypium hirsutum
  unsure (1)..(581): unsure at all n locations
  Clone ID: LIB3583-034-P1-K1-G2
tttgctttctttttcttggtctccaagtaaggaaccatggctgatgatttcaaaggaagtttcttctttatacttttttaactgccaaaaggcagatttttgtttaatatgataatcgccaattccaattgtaacttaactgctgcctgcaaacatttatccaaagatagatattcttttactatttctttctcctgtgtgtaaaaaaatagaatatcgataatgacaatatatcgtaaagaaaagagaaagaaaaaataaagaatacacaaataatttttacgtggaaacccttttgggaaaaaaaccacgggcagaggagaaaattcactatgtcgaattcaaatgattacggaggagtagactatgtctatttataggcttgtaaaaccatattctaataggagtgtagtaagatagaaataccttattctaatcaatatcaaataaatggaatttaaataagtttaaaaaaatcttatcctaaattaaaataaattaagtatagttcttatggattttacttttattttattttattattggnattttaatttaaaataaatggattccggggtcac

SEQ ID NO: 47882 - DNA, 429 bp, Gossypium hirsutum
  Clone ID: LIB3583-035-P1-K1-A1
ttcatactctatgcaaggagaaaaagctgaaggaagcatctgagttactaagtagtgctagtaacagaggggatttgctcgatgaggtcagctatggtactttgttagcgggatactttaaggatggtatggcagacaaagcattacagctttggagtgagatgaggaagaaggaaattattcctagtatcataacctataacaccataattggagggctttgccaattgggaaaaactgagcaagcaatttgcaagtttaaggagttacttaggaatggtctagttccagatgcaaatacttacaatactactattcatgaatactgcaacgaggggacaggtgacaaagcatttgagttacacaacacaatgggtgaaaagtctgtcaaaccatatgtcttcacctgtaatattctactatctggtc

SEQ ID NO: 47883 - DNA, 509 bp, Gossypium hirsutum
  Clone ID: LIB3583-035-P1-K1-A5
gtttgcctcaagtggggcaatggaacatgatgaacaagaaaatgattaacggaatgactgtgagccgatgggcatgtattaacttctcacgaagcgtgcaagagagtgttgctcgagggttttgcaatgaacttgctcaaatgtgccaagtttctggcatggagttcaatcccgaacctgttataccgatctacactgccaggcccgagcaagtggaaaaagctttgaagcatgtttatcatgcatccatgaaaactaagggaaaagaactagagcttctattagctatattgcctgacaacaacggctcgctttatggtgatctcaagcgaatttgtgaaactgatctaggattaatatcacaatgctgtctgacaaagcatgtctttaagatcagtaaacaatacttggctaatgtggcccttaagatcaatgttaagatgggtggcagaaacactgttcttttggatgctatcagctgccgaataccggtagttagcgatataccg

SEQ ID NO: 47884 - DNA, 445 bp, Gossypium hirsutum
  Clone ID: LIB3583-035-P1-K1-B5
taagaattcaaaaaagagaagaaaagaaaaaagcagagaaaagatggagatgataatgggaaaggaatacggttatgtagcgatagtggtggttgtttactgctgcctcaacatgtggatggggttccaagttgtgaaagctcgcaagaagtataaggtcaatttcccaaacctctacgctctcgaatccgaaaacaaaaatgccaaaatcttcaactgtgttcagagagggcaccagaactcgcttgagatgatgcccgtgttcttcattttgatagtattgggagggatggggcattcttgcgtcttcgctgcactgggtcttttctacaccgtcacccgttatttttacttcaccggctatttcaccggcgatccttaaaaccgtcttactatcgggaaatatgggtttttggcattgtttgggctgatgatttgcaccatt

SEQ ID NO: 47885 - DNA, 490 bp, Gossypium hirsutum
  unsure (1)..(490): unsure at all n locations
  Clone ID: LIB3583-035-P1-K1-B6
cgttttgcttctccaaccgacctataaccctccttctcaggcaccgattcgtctccctaaacggcgatcggtaccttcatgccttgagggacatttcttagcctcatgactccattttgactccgatatcgacgaaaccaaaagaagtctatggcatattcgcaaggtattttcttatccttatgcttttatacccttttttgtgacgatgatggatttgaatcaatgctaaataacaggaagaaggaagaaaaaaagaagaaaggtatataaaaacgagagccaaaatcacctctctgttttctgatcgatccttgttatctctttgcttgtacactatgctttttttgtattttttctgtgaacccccatacaatatcaaatcatcggctttatagccgaatgttcaaaaaaaggaaataaagaatacaattntgttcttttttcatattggccactattactgntgtcgttttgtccatttttttgc

SEQ ID NO: 47886 - DNA, 480 bp, Gossypium hirsutum
  unsure (1)..(480): unsure at all n locations
  Clone ID: LIB3583-035-P1-K1-C2
cccacgcgtccggttgatgtttccaacattcagctgtctctgcccgctcaagatctctacattgcaagtgatattaaacatttactgtacttggtaaattataatagtcaaaaggggataacagcaaatgagtttgtgaaggagctgtgccagaaactggagtcctttgtgaggaacatngacataaaatttagtttacaagaaaatgagtttctttcaggtattccccatcattagcaagaactgcagtaaagaaatgcagcagcagcttctgtgcataagcctncaggtggtgccactaggtttgctgaaatgtgtggtcacctggtttgctgctcatttatctgaggatgaatctaggtccattctgcatattataaagaaaggatattctttgacccatgcatcttttgcatcccttttatgggagtggttccttttagggtattcaggaaaaacctcaagtgaaagtttagaagg

SEQ ID NO: 47887 - DNA, 283 bp, Gossypium hirsutum
  Clone ID: LIB3583-035-P1-K1-C5
gcccggaattccggctcgcacacgcgcgcaaattcctccccccttttctatatactcctcaaaagagggacgaactacagacacatttccttccttgtacttatttcctccgccggcgctccatttatggttgcaaagggaagggtcgttcccttcccttgaaggccacgatacgagacaagatcatgcccgccctcagctctgctatgacaggacggaagatcatgtcttgtctgaaatcagaacgggacacgacgtcttaactggagagcagagctgttgt

SEQ ID NO: 47888 - DNA, 507 bp, Gossypium hirsutum
  Clone ID: LIB3583-035-P1-K1-C9
cccacgcgtccggtctttgatagcataacacttcttggctattaattttctcataggaaccttatatcatgaagctaacagaggatcagataatgcagttgttgtctgccttctggatacaggccactcttcctgataatttgccttcaaacatagaagctatatctcactcttttgtgttgacactaatttctttacgcttgaagaatgttaatgataaccttgtggtccgcttcttccagcttcccttatctttaaagaatacctccttggaccttagcaatgggatgttgactccagtactccaaaggtcaattcttatgctatcaatgagcatgctcatgtttgcggctaagatatatcaaattcccaatctaaacgatctcatcaagtccatagttccatttgatgctgatccttatctaggcatcagtgaagacattcaagtctttgtgaggcctgaggcagatgtaagaggttatggatctgttacagagagccaacatg

SEQ ID NO: 47889 - DNA, 465 bp, Gossypium hirsutum
  Clone ID: LIB3583-035-P1-K1-D6
cgcgccaaaatatcccctctctcacctctgacaagtgaacccccagcacatctcgcattttgctgtcaagggcggcatcaaaaaacatggaggtgctcgcactactctcttcagaacgcggggcaccaacatatgccaagataaaaatcttctcctctattccttttagctcagcgaaaaaaaatctaatattctatgacatatccctccctgttgtttgtctatattcgtaaacaaatatgtttctgtttgtccacatagtgcacagaccgcaacagaagatacgacattgtttcgctgtaccaccactaataacacactatattcaccgaagaaatgattgcaatcctcctcttccacattacaacgaggacatcgagcatctgcaactattgctttttttttcagatcagcacaactaccacagaagttccaagagaatccccatattgaagcttttatttt

SEQ ID NO: 47890 - DNA, 522 bp, Gossypium hirsutum
  Clone ID: LIB3583-035-P1-K1-D9
cccacgcgtccgcggacgcgtgggttcggatgttaatgtcgaatacatgtttgcatctaacatgggtatatttaacttcttgtaaggttttttatatgttgaaaatggacacttctagcaaaatgtagaatccgaaacgggccagaaatctaatgtttaggactttccctgcttctccagtcttgcatggatttttgcattgaaaactataaatattgttgaatctttgtaagcactgtatacttacttttgcatggttataccattggagctacaaacttgaaaatgcatatattgacctctgtttcctttttgctgtatatatcatatgcttcaatgtctcaagtcatttttagatcttcacattgatcgtttattcatatttcttttaaagttcttaaatttcaggtggtagcaacgagagattaggaaaagaggtatgggtattatttctctgttgcaatatatgacaataacttggaacattcttctctgtttttttttgtcaacccgaagtggatg

SEQ ID NO: 47891 - DNA, 514 bp, Gossypium hirsutum
  unsure (1)..(514): unsure at all n locations
  Clone ID: LIB3583-035-P1-K1-E2
cagccatttgtatgagctatgattctacaaatgtatgaatgaacttggaaaagattgaggatacttgagtgggatccgtacttgtatccgacatcagctaagtccaagtaacataggacttatcagttgaccatgtcgatgttcagggaagaaagcagaagtgttttcaatggtgagattataattagatttaatggaatatccatagaatttgcaaattaccaaaagaaaaaggttgatatgtcatgttagcatgtggttaatttcagtttttcacttctcttttttttctgaacttgctagtgtaggtaccgagttctgtttaaaagggcaaaatctaaatcctccctagctgatatgttattgacaattttggcaagtattctttgctgatagagagttaggtctatattatctgaacttttcagtcctaaagctgtgatgtccaattcttgcacagaaaatgaacatangtacgaaaatataatattccaaatataaggaacaactttaa

SEQ ID NO: 47892 - DNA, 250 bp, Gossypium hirsutum
  Clone ID: LIB3583-035-P1-K1-E4
cccacgcgtccgcccacgcgtccgcatggtcctcagttctctacggtttctcccaggatcctaggcgtccgcctgtctcttaatcggtggcttctttacggtttacttaattgttgttgttgttgttgattttcataaaaaaaaaagttgttattgttgatgggccaatcagtttcgacggccaaactcacgagccgtcgggattgtaaccgtagccaacgttcaaagtcgaaatcaacggctctgatcg

SEQ ID NO: 47893 - DNA, 492 bp, Gossypium hirsutum
  Clone ID: LIB3583-035-P1-K1-F11
cccacgcgtccgggctgagggaattcctgtgagcccatatagtgtaaggatagctcttgagaatacatccattcctgtaggtggtttgcccgaagataagctaaccgctggtcaagggcttatgcaagttgacaaagcatatgaatatatacagaagtctcaagatctttcatgtgtttgttatcaaataaaggttaatcaatctggaaaatcaactcctatatcacgaggcatctacctaagagaggctactgcttgccaacagtctactgagtgggcagtgcatgttgaaccaaggtttcatgatgatgcaagtaaattagaacaattggttccctttgaggagtgtattgagctgcgctctagtaataatgcagttgtgagagcacctgagtatcttctcctcactcataatgggcgcaccttcaatgtagttgttgatcccttcaatctggctgatgggctgcactattatgaagtatatggaattga

SEQ ID NO: 47894 - DNA, 461 bp, Gossypium hirsutum
  Clone ID: LIB3583-035-P1-K1-F8
aatagaaagttacatatattgaaggcttcttcatcgtttctatattggattcctaagccttctccttctaaattctccaaattcccgtcaactccttcccttactccgtcttctccgccgtgttaccgtgtggtgtgcagtggcggatcccctcaaccggcatcgttccccgatctcagcttcgccttgcatgatgctctcgaatctactggaatcgatgcctctcatgctagagaggcgaggaagagttttgtttcgcagattcaaaagttatctgatatagagagagaaacaagtatctgcataaatagatgtgttgttctggggagaacatctctttatatagcagcagaggatgattctctcatgtcacagtcttccgttcctctgccggtggatgcattcctcgaaagattggatgatctctcaatgggctactgctcccactataactcagtatg

SEQ ID NO: 47895 - DNA, 502 bp, Gossypium hirsutum
  Clone ID: LIB3583-035-P1-K1-F9
cccacgcgtccgcccacgcgtccgcccacgcgtccgactgggtctacttatgtcttattaaggttaaccaggtaagagataattaattgagtcgttctttgggtactatgtttctctaactcttcgtttttcttgaagtacccatgtacagcactcatgtttgacgcatatcctaacatgggtttagggatatgaccctccgaatgcatataaaaacttgcaaaaaagttgaatatacttctttgcaacatataccaatgtctgaaactcaatacttgtttccgagtaacatgaactggacgttttgttgtatatttggatgttatagggctttgcatgttttcttgagcaaaacctaggtctttgaaattgctattgtttgtgatggcgtaattggttttaagcatggaagtttagtatgtaaatttgaataggaaaaaacttcctttcttaagctataagtcaaccatatgcaattctacctgtgatagtaaaaatttct

SEQ ID NO: 47896 - DNA, 502 bp, Gossypium hirsutum
  Clone ID: LIB3583-035-P1-K1-G10
ctgatttttccagagtgggaatctggcattgaacttttatttatttcagtcaagttattccatctaattatcttgtgataactgatgaagttcagcctaccagacattaattgatttgaacgtacaattaagtgtatccattggctctaatattgcaatctagagaagaacaagttttgacacggaaacctttttcctttcagagttcgaattgttattagtgtcttcaaatgagccttaatattcaagttacaagttccacgcctagattaccttttccttctttaactttccaatctcttttgccctatttcttttttagctgcagacaagttagattactgacaataaccaccttagtcgtggcatgccaagggaggatctgacttagtatggttctggaatagttgaatccaattagcctaggttcttccgtgcgtggtatgctggttaaccaggattagacttgtgaaggcatgtcagtgctcatttggttttggaa

SEQ ID NO: 47897 - DNA, 301 bp, Gossypium hirsutum
  Clone ID: LIB3583-035-P1-K1-H9
aaaattaacatttcatttattacatttcttctaaaatgagggcgggattttttttaaactcaatacatatctatccacttggaaagacccctctgactctcaaaagaaatagcacactttttgatttggttcctcctctcaccaaagttaacaacttaattttttgaccaacctctgttgactcatcacgggaaattatcattacaaactttacaacatgccacaaaaccctgctatattttcaaccctgttgtttgtttggaacttgcccgtattaaattgattgatacgtgtataattc

SEQ ID NO: 47898 - DNA, 303 bp, Gossypium hirsutum
  Clone ID: LIB3583-036-P1-K1-A9
cccacgcgtccgcttttgttcaagagaagtcctccggtgaacttgtaaatgtcttgttgccaaaacttgtgaaatatacgaggcatacaagtatacgcaacctgcagaagaagtgcacatgcaaaagaagtctgaaaatttccaccctctggagcatgaacagtgttcatctcttccccacataaattggtgtggggttgagtgttctaaggctgtattatgacaattgtacattattaatagttctttatgtttcttcattgtataagattcttaaacattcctaatgaattctaatgttct

SEQ ID NO: 47899 - DNA, 682 bp, Gossypium hirsutum
  unsure (1)..(682): unsure at all n locations
  Clone ID: LIB3583-036-P1-K1-B1
tggtcacttcatagcttcaaaaagttaccatagatggttattagaattatctgcgaaaattttcaatttaaataacgaggcctgttacaaatcattagttgtattgggtttttttgtttgtacccacttgcatcaaccagattagctttccttctcttttttcttctatagtgttagtctattttttttttntaaataactttgaatatcatgaatctgcaaatcaaaatccaaacaaatttattctccgatctctaacattgacggtcaaattggcttggatctaaggtatgtttttttactcgtcgatgggtactgagctatcgtacttattgtcgaatcgttatttggaactcactggctgaactttaaaaaaaaaaaacttaagagcccagtgatttagataaaaacttttgaataagtcagtaaattaaatgaaaacttttgaaaagttcaataatcatattataactttttgaagttggattattaaaatggagatttactaatagtttagtgatcttaggggtagtttagtattaaattttttacatacatttggatgatcataccccgtgcatatgtatgaaatgtgtcgaacacatatttcaaagaaaatgaagagggaataacatagaccaaatgcatggttgatatgcttactaccctttgaaactgatta

SEQ ID NO: 47900 - DNA, 736 bp, Gossypium hirsutum
  Clone ID: LIB3583-036-P1-K1-B6
cttgtagtcattcattcgtctttaccatctcggcctccttcacaagccccaataggatgttgagttgttcaatccgcacattgcggaggctaaaatgttgttgtaataagcgctggtcgtccttgttcttggcaaaaggttattgtttcagtaaacccaaagttgttccttcattttgcaacactgacatcaaatttagtagattttatgtcggggagcgacagagtagcctccggcaatggcgaagacgctctctgtataccgtaactgacacttatgaggcaatagagttggctcttgactcagtgatcaagatcttcactgttagcagtagccctaactatttccttccatggcagaataagtcgcaacgcgaaaccatgggttcaggattcgttattccgggaaaaaagattctcacaaacgctcatgttgtggctgatcatacatttgtccttgttagaaagcatggcttccccaactaaatatagagctgaggttcaagctgtgggccatgaatgtgacttagccattcttgttgttgaaagcccagagttttgggagggtatgaatttcttggagcttggagacatcccatttctgcaggaagctgttgctgttgttggatatcctcaaggaggtgacaacatttctgtactaaaggggttgtttctagaggtgaacctacacagtatgtacatggtgctacccaactgatggcaatacagatagatgc

SEQ ID NO: 47901 - DNA, 479 bp, Gossypium hirsutum
  Clone ID: LIB3583-036-P1-K1-D7
cgatgttgtccataatagcaccattgagctgtcttgtgtggaaatttatatgaaggagaagcagagaatttatgatatgttaagtaaattgcaaggcagaattaacctcgccattgagatgtggtcttcccctgagaattctaaatacgtatgcttgacagcgcattatgttgatgatgaatggaaactacaaaagaagattcttaatttcttaacacttgattcttctcataccgaagacatgctttcagatgtaattatcaagtgtctgatggattgggacatagactgtaagttgttttccatgacatttgatgattgttcgactaatgatgacattgtcttgagaataaaagatcagatttctgaaagcaggccacgtttaagcaatgggcaattattagatgtgcgctcagctgcacatgttttaaattcaattgctcaagatgccattgaagctctccaagtggtgatccaaa

SEQ ID NO: 47902 - DNA, 511 bp, Gossypium hirsutum
  unsure (1)..(511): unsure at all n locations
  Clone ID: LIB3583-036-P1-K1-E2
ccttagctcaatatatgacctaagattaagcgcctgaaaacacgccattgcttctgctgcaaaaacaggtggtatattcacatgcataacagttttggaacaagtcacttctgctctttcatttcttaccaccagcccggagcatgactcttttctgtgcttgttgaatgcagtattaaaattgatttttaccttcggtccattcggagcgacctatctacctgtatgaatctgtctcactgggcactccctgaacaaatgctccattgtttccgctttattttgacatcttcgataagttgctaatcccaacattcttcgaaaataaagattaccaaaagtaggcaaatagttacaagaaaacctccagtttgtaattttaatttttggaggaagatctaagctccacaatctcttgtaaaattgtctgtaattcgattgtatttgagtctgtccattatgtaaaagacattttttnctactatgaatagtatactcaccctttcagctc

SEQ ID NO: 47903 - DNA, 737 bp, Gossypium hirsutum
  Clone ID: LIB3583-036-P1-K1-E4
tgaaaccaggaaagatacgttccctcgcagaggtccttccagactcttctagaactttgcacgatgggctttacagagcacttgacatctatttcaaggcacacccttggctttctgatagagagaaggaagtcctttgcaacatcatcgactatgggaaactctccatcgatgcctgtgcccatgcttcccaaaacaaaagattgccactcagagttgttctccaagtcttgttcttcgagcaattgcatttaagagcagctttagctggttgtctcaatgtcttggaagctgaaagtgctcctacgggtcaggggattgccccaacagagatagctggtaatgtgactgccactggtgaaaccagccagcggattgttcaaagagatggatgggtgacaattgtacgtgaaaatcaagttttaaaagtggatatggaaaggatgaggtctagagttggagaacttgaaaacaaaagtcagtaaataaagctagaattgaaaaaagtgaaaaaatcacgtaactcactcagttccccctgtatagttgctgggaaattcggatgcaagcctctttcaaaatcctcagattctcaaacggatgttgttggcagcacaggactaactccaagaccatcattcgagcaaccacattcttcccgtcattccgggcatcgaaaaaagttatccttgttccgagattaacacttggaagctaacatcatcttttcaacatac

SEQ ID NO: 47904 - DNA, 351 bp, Gossypium hirsutum
  unsure (1)..(351): unsure at all n locations
  Clone ID: LIB3583-036-P1-K1-E6
gccagcgcgtgccgggagaaagtaataaccccccttatncnngtcgttcctaggaaacttttgcanccgcttagttctttaagtagnntagtttgtgtgtgagtannaggcanntgtaatgggggtggaataannnaataagnnggtggcnctttatgtnnaaagagngannagagcncnntttttnntgttgtnngtagttttagggaagtcncttnnnttgttttaaaggggaatttaaaataangnaagggaannatctttacttttttcnncaaaaaaannaaaaaaaagannngcggccgcttctaagnaaggatccnnaagcttanncgtacgcnngtgcatgcn

SEQ ID NO: 47905 - DNA, 746 bp, Gossypium hirsutum
  unsure (1)..(746): unsure at all n locations
  Clone ID: LIB3583-036-P1-K1-F5
gccagcgcgnntccggtagatatcanngccatggcnngttggattatcncnaaccggaaaaggcttcatggtttatatanntccgacgatgcgcggcttccaatggcgnnacgttgcgttgtaccgaaggaggcttaggannactttgccaagtatttagggttccttttcgtagagaaatatnggtctcgtgacttgcttgtnccggaccgtttaaatttttcaagctccgaaaatgatnaatggagactataagggttccgaatttaaggcagagaggaaaaagatggaggaaaaatatgaggttctgaagcaacggctaaggaaaattgttgaaggacactttcccacaaatgttgccatcaacaatactcgggaccatccttcagtaattgaggtcataaataaagaggaagatgaagttaaaataccccaacttatttatgtttctcgtgagaaaagaccttctcataatcataatttcaaagctggagccctcaacgtccttcttcgggtctcaacgatgataacacattctccgtatatctagcccttgactgcgacatgtactgcaatgacccaacttcagctaggaaagcaatgtgtttttactgtgattctcaaacaccttcttctttagcattcgtgcagtttcctcaaacatttcgaaatataagtcaagatgacatctacgacaaccaagtccgattggcatttaaggtacatnggtatggttttgatggcgt

SEQ ID NO: 47906 - DNA, 686 bp, Gossypium hirsutum
  unsure (1)..(686): unsure at all n locations
  Clone ID: LIB3583-036-P1-K1-F9
cggacgcgtgggtttattcacccccttctctttcctttcctttcactccatctctctcttctgttctcttctctccaacccctttctctctttgcaccccaacgggtaaaacctaaagcaaagaagcaatggcgggtcaggagaattgtgtgagactaacaaggtctactgttgctaagaagagaacagctgaattggctgggataacagatgagattgtgaccaataagaaaagggttgttttaggtgagctttctaataacgttgctgggtcggtgagtaaggttcaagggaagaaaccaacaacaacaacaacaacagcaacaacaacagcccagaaattgcaatgtaaagggaaggtgaaagcaaggtctaaagtggtaagacgggttcttttggaaggtggagatgaaaaaaaggaggattttgatgctatgtctaatgacccacaaatgtgtgggtattatgcttctggatattatggatatcttcatcaaatggaggttgatccaaagagaagaccnttacctgattatatcgagaaggtgcgaaaggattgtagtatgagtatgaggggggttttagtgggatggggtaagtgaagtgcagaggaatacaagctggtttcagatactttatatatgactgtttcatacattgatagattcttatctttaaatcctctc

SEQ ID NO: 47907 - DNA, 697 bp, Gossypium hirsutum
  Clone ID: LIB3583-036-P1-K1-G2
actgtggcttctgacttgcttgaactgtggaaaaaggttgttatcgaggagactaccaagagtaagaaaaatggcaccagtagtgccattaagtcggagaaacttccaaagccaagtgccgtgaagtctgaaaagctctccaatacagaaaatgtgaaggctgagaaagtatctaaagataattcagtaaaatctgtcaaagttgagaagagggaagcaaatggagatgttgcaatggccaagaagacagatcggggagagatgggtaaggttgaaaagatttgtaaggatgacagacaatcaccgaatgtaaagaaatcatcgcaaccacctgctggtccaccaaagctgacatcaatggtcaaatgtaacgatcctgtgcgtgacaaatttagggagattcttgtagaggccttgtctaaagtcccgaatgaggttgatggggacatgcttgatcaagtgaatgcttgcgatcccatcaaaggtgctgtgtctggagaatctgtgatgtttgagaagatgggtaaatcaaatggggctcagaaatttaagtacagatctataatgttcaacattaaggacccaaacaacccagatttaaggaggaaggttcttctcggagaagtgaaaccagaagggcttattacaatgaccccagaggaaatggcaagtgaacaaaggcaacgtgaaattaatg

SEQ ID NO: 47908 - DNA, 597 bp, Gossypium hirsutum
  unsure (1)..(597): unsure at all n locations
  Clone ID: LIB3582-054-P1-K1-A7
ggnaaaaaaaaaaggtaagcaagtagcaggccaggcctagnacagtgtaaagagtaaagagtaaagagtaaagagtaaaggagtgttgttgctcttcttcatcttccaaatgttagtgaaagaaatgtaatgaatgatggcttcttcaaacctcctcctcttaatttagctttcttctaccatttcatatgttttcttttcatactactgctgctcctatatcaaaactaacttcttaattccgagtaaaaggaaagaaagaaaccgccgcccctcatgggttccgagcagaacaggttccctcagcaagaacggcagaagagatggggaggatgctggggggcgttttcctgttttggtggtacacagaaaggtggaaagcgtattgtacctgcatctcgtatgcctgagggcaatgcatcagccacccagcctaataatggtactcaggctgttgctgggttgaccaaccaagctactacgttagctccatctnttctagcaccaccttcttctccagcgtcatntacaaattctgcactcccttcaacagctcaatcaccaagttgctttttgtcattatcggctaactcacct

SEQ ID NO: 47909 - DNA, 710 bp, Gossypium hirsutum
  unsure (1)..(710): unsure at all n locations
  Clone ID: LIB3582-054-P1-K1-A9
cgcagctgagggggctttctttgagattggtgagcttgttcctgaagaatataccccttccctgtctgatacaaataggaaaacccgaataaaagctgatgccaagcaaactcaaatactgagcactgctgagttgatctcatcattaaaccagatatggaactatgcaagctctattgctatccctcaacaacagacaaatctggaaagagcccgtcttgtctctcaaaaagaggatatattggtcaatttggggtcggaagaaaatggctcaggatctatttcagctggtagtaaatacttttgcattgatttgaggcagttgtcatctctcaggaagccaaacttcgatattgtcaaaataaccaagaaaatgtccatgtttgaatcttctaatggaaatattaacccattattttaccaggggcttttttgcggtggctctgacttctccaatgcggattggaaaggaaaggggcttgcggctgttggattttcctatgaatttgaaaatatctacaaatggatgagaaagatgattcctgctggccttcagcattntttaaaattcccaaagattgagaataagagnaatggtaaatatagcattgctgcaagtagtgatatagggaactgcatttcagcagatagaactagtctgacagataacttacccactgaaaatgctgagtgttattctcattgcatcg

SEQ ID NO: 47910 - DNA, 651 bp, Gossypium hirsutum
  unsure (1)..(651): unsure at all n locations
  Clone ID: LIB3582-054-P1-K1-C4
atccatttaaagagttgtgtcttgggcaagcatgatttctgcatatgtccacaatgggcttgctaatgaagctcttgaactgttccatatcctaaacaaaactaatattcaccctgattctattgtattaaaaatgcactctctgctgcttccagtttgtctgccttgaatatgggaaagaaatccatggctttgttattaggcaaaacttctctgaaggatcaattgccagctctcttgtggatatgtattctcgatgtggaatggttgagaatgcacacacgatatttaagtctattcaaagtaaagatttagtcctctggacaagtatgataaatgcatatggaatgcatggnccatggaaaagttgccattgatttattcaataagatgaaggaaaatctcactccagatcatgtagcgtttttgtcagttctatatgcttgcagccattcaggactgactgctgaaggtagacaattttttgagatcatgaaatatgaatatcaattggaaccatggccagagcactatgcttgtctggttgatctccttggtcgggcaaattgcgtagaaaaggcatgtgaatttgtgaaaagcatgcanatggcacctactgctgaaatttggtgtgcactcctacgggcttgc

SEQ ID NO: 47911 - DNA, 575 bp, Gossypium hirsutum
  unsure (1)..(575): unsure at all n locations
  Clone ID: LIB3582-054-P1-K1-C5
ccccgcgtccgcccacgcgtccggttttcacgtttcagactccccattcttcctctacattcatttcatcttcaatctggttctctcattttttccttttccttcagattctcagcataagcagggacttttcctattaggtaaatctcatccttcttctttagtgtctcagttgcaagtgtatgtgctaggttgtttgcttctcttgaaatgtactcaaaacaatattttttagatttggctagtaactgatgaatatcgtggatatatgctcccatcattgatttatcctgactttttgacttgcacttctttatgattgataatgcatccccttcgatgatggtatttatccattgtatgtcaaagtcgattttggttactgtccgacaagcaattgcttctgcagcaaacgctaatgcgacttggtggtgggtctctgtgaatgataagaaaacatttccttcgctatccctagccacagtccccacagctgggtaacggagattcctatcgtatgctgcatcaaagnttatcttcacaaacttatcagattgcccaaagagcgcagcaaa

SEQ ID NO: 47912 - DNA, 673 bp, Gossypium hirsutum
  unsure (1)..(673): unsure at all n locations
  Clone ID: LIB3582-054-P1-K1-C7
agaaatgaggatgcctgggaaacaaaagattgaactgcagaataactcagtttnacagaaaaggaaactttagaggatgcgagactaatgctcaaaatacttccaatatgcagaatcaagtaggttcatattgggaagggcctccagagattagacagaatcaattggaccttaatttacaaaggtttccagaatcccaaggaagccaaatggatttgcaatgcacaaatttcagccagtacccggagaatccacaaaatatttataattttaattcttatggtcaagtaacaagtaactttaatttttatggtcaagcatctgctacttctaatcccaatgaaggcttaactgaggtttctgaaactagcactaataatgctacggtagagaagctggaggaattttgcaataaaggaaatgttaaagaagctgtagaagttttggtgttgatgaaacagcaaggtattcctgtggatttagcccaaattttgcagttaatgaaggcatgtggggaagtgaaagctttacaagaagcgaaaactgttcatgaacacctcatangatcattttcacctctcanaataagcatctataacaggattttagagatgtacttaaagtgtggttctacagatgatgcatttgatgtgtttgaaaaggagcctaggcg

SEQ ID NO: 47913 - DNA, 472 bp, Gossypium hirsutum
  unsure (1)..(472): unsure at all n locations
  Clone ID: LIB3582-054-P1-K1-D10
ctngnagccgttcattcataagaggagctactcctgagttaacagggatgggagttaaaaatgtttcaactatccagaatctgatagacttcttcatctattaagccataaaaaatagaagcgggcgaccagtttacattaacacgatataatatgccattgaagtgactggtaactggttatggctggattgtgcaactaatgcaacacaaaaggactgatcaaatgtttgcattgaaaactattaacatgaatattgaagagtcacctccaacgcagatggtaaaggaatagaaaataaatcaaacgtttcatcgaacatatgcagtggtctgaaagcagtctctgtataaaaatggtgcgatttcaataatatatggagtacatggtatggaggatccctagccgactttctgagaaagaaaaatacattacacagccctatcttgctcccatatgtgagcaggcgcta

SEQ ID NO: 47914 - DNA, 594 bp, Gossypium hirsutum
  Clone ID: LIB3582-054-P1-K1-D4
cccagcgttgcccagcgtccgcccacgcgtccgcccagcgtccgccagcgtccgtacagttgacatgcgagcgcatatttgcgaagcaaagcattttggtttggaagttagataatagaggaacagctagacgtggactgaagtttgaaggctatctcaaaggcaacattggccgtgtcgatgctgaggatcagctcaccggtgctgaatggctaattaaaaagggctagcaaagcctgctcatatcgggttatacggttggagctatggcggctatctctcagccatggtgttggccaggttccctgatgttttccgatgcgccatttccggtgcacccgttacatcatgggatggctacgacacattttacaccgagaagtacatgggattcccttccgagggtgctgaaagtttcgagtatggctccgtgatgcaccatgttaacaagatgaaaggaagactgctgttggtccatggcatgatcgacgaaaatgtacattttaggcacactgcaaggctcgttaacgcacttgtggcagctggcaaaccgtatgagttactgatattttcagatgaacggcacatgccacg

SEQ ID NO: 47915 - DNA, 618 bp, Gossypium hirsutum
  unsure (1)..(618): unsure at all n locations
  Clone ID: LIB3582-054-P1-K1-D6
cccagcgtccgcccagcgtccgcaactttgttttttttcttcaatggaccgacactgcaccttacagtgtatatcagttctgtgttcagacaagttaaagggcttctgttttttttcttatactagatgccactaaactatatgatagtttcaagatattctttatcccgtgatcatataattcatgatattatatattttgaagatattatcttcttttctctgtttactttgtttttatttccctggagaatgtcagtttgtgacagtaaaacccttaagtttaggcctctgtgtacaggggatgtttagaatccgttttgttttttattttataatatttttcaaactaagattaacatgtccctgtgtgattgacggtgctcgtagtagatgcatgctttataaatagtaaaataggactgcacttgctatatatgtacaatgtcatgatcacagtcatgtcctagcaatgaagttaagcctgatttggcttaatgttgattgatcccacttcattgatgccacangccactgtcatgacaactctttggaatattacttgtgctagatatttgtgtcatatggataactaatgttaggaatgaccgttaggca

SEQ ID NO: 47916 - DNA, 615 bp, Gossypium hirsutum
  unsure (1)..(615): unsure at all n locations
  Clone ID: LIB3582-054-P1-K1-E1
tctctggtcaagacaccgtagtttttaaacggcgcctcattgtgtagacaatggcaattgtccacggacttaagtggttagaaatgttatatggagcattgaggtgttgataaaatactcatatttgattgctgaggtgagtatgtaaaggtaacatgattttagtaccagtcttaaaggttgcaggaatctaaggaaaggtgtgtaagaaggataagatcttttccttgggatttttttaaaaaataaactggtttcttcctgccataagtgcttaaattctgaggtagtaaagtgtgtaaaactattatgatctgctaatggtgatggaaagctgcaccaaacaaaagccgaggatggaaagtctcttgtatgttaggttttcaaaacagctattttctttagcaatctaaaccgtctctaaggattcattgagaaggaagaggtttaagagataaatattgctggttttcatgtatagtacaactgagttggtttctcctatttggtaagggcaaacttccctgcaactgagtatatagtataatatcacagtatcaccttgatgtctcataagcgctgntgtgctttcggctaacaagcttaactcctttg

SEQ ID NO: 47917 - DNA, 662 bp, Gossypium hirsutum
  Clone ID: LIB3582-054-P1-K1-E5
ccccgcgtccggtctttactccagagagaagctataactggaccagaatggaaaaggagtagatctcaagtggttccatcatacataattaagattagctgcccaccatctttctatgatttaacctttgaaccatcaaagacatatgtcgaattcaaggattggagacctgtatgtaccttaattgagacagcagttcaacacctctggaggaaaaatattagttatgctgatggattaggacaagctgaaaccctgaaggaagatgcaaatattttgaatgttgcagaagatttttttgatggatcatccgtggacttggaatttgcaacgaggaagaggactaaaaagtatcaaccatcttcttcattggacaagctaaccatagataatttgtttcttatggaccatgaagatacgccatttgaggagtgcaatggaaatactgcacaatttaaagatcagcagaatgatatgaagtttgttcattggactgactattctttgcaaagtttgggtgatttcctttccaaaggtggctccatagtaaaccaaagagtgattggcatctttggtcatctgataacaatattttagaagaagatcacttcttggaaaatagatttattgcttcaggaagaccaaactatcatgtgaacgac

SEQ ID NO: 47918 - DNA, 587 bp, Gossypium hirsutum
  Clone ID: LIB3582-054-P1-K1-E9
tttccccgcgtccggccacttggtgcggggaccctttccccgtaagagagtctgtcttattcagaggggaatcgcagtgttcctgatgaacactaataatgacagcgaatgccatgaagacaagccttggggctcactgcagagggcactatggagcatttatagctatgatgtctctgagcacctctgcgggggatactgtatttatcttggatatctctcctgatgacctggtgggaataataagtcaaaagcctttctcgaaagcaagaagagctattgttaatcaacaaagagtatgtgctgtacaagtgccctgagttacataggctgattaagggtcagagggtaattgctggatcgccacatatcttgcttgaggatgcagcatatctcagcaaaccttctttcaaagactctactgtaaagaagcttcctcaagagttaattgtgaaaccagcgccacaaaataagcccaaagatgatgctgagaagataagttataacaaggaatgttcagcacaaaatgcggctggtaggacatccctctcttctgtgaaaaaggtagtcagccttcagataatggg

SEQ ID NO: 47919 - DNA, 699 bp, Gossypium hirsutum
  unsure (1)..(699): unsure at all n locations
  Clone ID: LIB3582-054-P1-K1-F12
tgngnagttgncaccgacaggnaaccttctgcgtaaagttcagggnaaagctattctcagattctgaatccattcaagctagagctgaagctgcagtgcttttgaagcaattagattttccggtggatagcttacaggcaaaactccttgaaaagttagagcaatctcttggagaccttcaattgaaaacaaatgaaattgagaatgttctacgagaatctaatgatccttctaaacaaggaaaaggttttgactcggttcctggtataggccatgaggtctctgtccatggatttgcggaggctattcgtgcttatcgagtaatatttcctgattctgaaagtcaattaattaaacttgcacaaaacttggttatcaagcactttgaaatgactgagcaacgtgtaaagagacgaatttcttctaccaatttccttggtgctcttcgggctatatgggatgatgtgcttctgatggatggagtcttaagtgaggctgcgctatctaatttttctttggaggttgctcatgcaactgttaaaaagtatgttgccagcacatttacttaccttctacaagacatatcagatgctctcttgaaagtaaaggttagcccaaaaaggcagcagaggaacatcccttacaggctgctntggaggctagcaaaaaacagtactncaagcagcatggatgtcttac

SEQ ID NO: 47920 - DNA, 393 bp, Gossypium hirsutum
  Clone ID: LIB3582-054-P1-K1-F3
agaaaatcttaacttttattaaaaagagaaaaaagaggggacccgagcgcaccccatcaaaaaggagagggggggactcccctatacaccttcatttacaaaaactagggggggggggggggttccaaaaaaaggctccccaatgaggagcacaagagggggaacacaaatttgcgggggctaaaaaatcctgagaaaaccaaaaacaagtgtggagggggggtaaaaacacggggccccattatagaaaaatggggcgagcaaccccgtgggggggaaaaagggggaacactctgcacgatttgacccggagaaacctgagcaattattggggccttgtgagggcccgcgcgggatttgggggatgtggggcgttttacttcctccgccggg

SEQ ID NO: 47921 - DNA, 620 bp, Gossypium hirsutum
  unsure (1)..(620): unsure at all n locations
  Clone ID: LIB3582-054-P1-K1-F5
gcgttctaacacagnagnccaaactttaaccgcagattggctagtaatgacaagggcatattgtgttgcaccaaacccagcaaacataaactctctttattcaagaatcaatgctataggagacccaaactgcagtgtaactccagttcttcaacaatgggttaaaggcaaaaatgtcaaggaatttcagctgcagcgtctcatccgtgatttacgttctcgtaggcgttatactcatgccttggaggtttccaaatggatgagtagtagcgaccttgaattttcttcaagtgactatgctgtgcagttggatctaattggtagagttaatgggctaactgctgcaaagaacttctttagtagcttgagagaccaagataaaactgtgaagacctatggggctcttttaaattgctatgttcgggtaggccttatcgatgagtctctttcccttatgaagaagatgaaggagatgggttttctttcctctccgctcaactacaataaccttatgtgcctctacacacacnagggacaatttgaaaaagtccctgatgtattgttagagatgaagatgaatggtgtctcccctgacaagtcagctataaaatctgcatcaa

SEQ ID NO: 47922 - DNA, 588 bp, Gossypium hirsutum
  unsure (1)..(588): unsure at all n locations
  Clone ID: LIB3582-054-P1-K1-G1
ctcctcacaatctgtgttctttcttttgtcgaaatcttgttcaaattgttgtttccttttgtatcttttctgctgctagttgaggtggaaactagaatggcaaagaagccaagaattgtgataattggagctgggatggccggtcttactgcagctaacaagctctatacttccactggctctgaccatttgtttgagcttgttgttgttgaaggtggtgatagaattggtggcagaatcaacacttcggagttttgtggtgacagaattgagatgggtgctacttggatccatggtataggaggcagcccggtacatcaaattgctcgggaaatccatgcacttgagtctgataagccatgggagtgtatggatgggttctcgggtgagccaaagactattgctgaaggtgggttcgagctaaatgcctccatcgttgaccccatatccacccttttcaaaaacctgatggatttcgctcaagggaagctgactgaagacagtgcaggcagcggaggagatgcttgttactacaattttgcagctaaagcagccttgaaagattgtacnagcaatggtggctttggt

SEQ ID NO: 47923 - DNA, 661 bp, Gossypium hirsutum
  unsure (1)..(661): unsure at all n locations
  Clone ID: LIB3582-054-P1-K1-G6
gcgttcgccccgcgtccgtccatctccactgatcgaccattccacctccggtcctccacggctccacctatttccagaatcagctcttacaagtactctagcagcgggtattccttcaacaggaaaaaaagtaatcgacagcactcaagcttgatcaagaagggtacctttgcaaatgtataaagatctggcactgtcttctcgaaatcgaaaggtaaaggaagaggaaaaatgaagaggttagagcgctgtttctacgtcttctacctttgaatttcaaggtgagtttgctactgttaacaatgttaagttgttaaccctagtttatgtcgaagtaattttttgctttttgttttttttagattgatgaactaattgatatctattaaatgtctaagatgttaacccttctcaatttcctctcatattattttctatctcaatactcaatactgttgattatcattgctaattaccgagactatgttaactggtaccgagtgagtgaaacatacaggtttatgtcgattatcctgcattccctcaaaaaatgagtgagaatttctgaactaactaatacttanatgccattgtctagaacccatattttgttacttttgtatgttccctgcttaaatgattgattatttcatattcaact

SEQ ID NO: 47924 - DNA, 630 bp, Gossypium hirsutum
  unsure (1)..(630): unsure at all n locations
  Clone ID: LIB3582-054-P1-K1-G7
gttcggcggtgaaacttcaagttctttcacttggtgggaacttactcaacggaaggtaccttcttttctgggtaatcttactgagttaactgacttcgcactcgggtacaatcctttcaaaccgagtccattgccggacgagatcggaaacttgtcgaagctcgaatatttatggttgacgaacgcgaatctcgtcggcgaaattccgttttctattgggaatctcgtttcgttaaaaagtctggatttaacatgtaatttcctgagtggtaaaatcccagaaatcttatcgaagttaaagaaactggagcaaatcgagctttatcaaaaccagttaaccggtgagttacctgagagtttagctgagttgccaagtctacttcgactagacatttcacagaacagcctcaccggaaaattaccggagaaaattgctgcaatgcctctcgagtctttgaatctcaatgacaactttttcaccggtgaaatccctgaagttttagcttcgaatcaatatctctcacagctaaagctcttcaacaacagctntaccggaaagttaccgtccgacttcggtaagttttctcctttagaagacttcgatgtttcgactaacaatttctccggcga

SEQ ID NO: 47925 - DNA, 628 bp, Gossypium hirsutum
  unsure (1)..(628): unsure at all n locations
  Clone ID: LIB3582-054-P1-K1-H12
gcgttcgaaanctaaatgaactctaaactttggggggggcaaattataattttattatatattaaattaagatcttaagagttttggggggtcagtgaccttgcctgccgatatcaaacacaagatgaatacacgtgaatgaataacaacaatatgaacaggacatgacctgaatacactagatgtcaatgtgctttggcaatatctagaactcagaacgtgatatgaacacatgaactgttaagggggacctaacttaacctctaccatttgtttcaaatggatagaggtcatacgaggtcccgaaagtgattgttaaaccattcgtctactttgccagctgatctaattttgtaggcagttgaatttcatgaatggcacaatgaaatgatttaagaaattaattccttgattttctactgttttgtattggttaacgatgggactacaagttaaaccctcttttgaagtgtaaagtatgaagaggagggcattctaggggtttttttttataaaaattattaattacgaaaatgataaatgggtctagattatttatcaaaatggggtgtttttttttacattaactctaggtgctgcttgacacattggtggcattggtgaattt

SEQ ID NO: 47926 - DNA, 548 bp, Gossypium hirsutum
  unsure (1)..(548): unsure at all n locations
  Clone ID: LIB3582-054-P1-K1-H2
tgggccaccatggttgtagaagcaaacaaagctaagcaaatgatcaacgacaacaacaacgactgcgccaaagtaaacagttattcgaccatcgatgattcaatccctcactcttctctctctggtgatacagcacttactttcccccttatgtcccctcgcatcatcgagctgtgttaggatctggttaggaaatgggcgaagttggatgattcttgcttctctgtcgagactgtatccggtggcatcacaaatatactgctaaaggtgtctgtgaaggaagaaagtggagataatgtggctgtaactgttagattatatggacctaacacagaatatgtcattgaccgtgaacgtgagttacaggcaatcaaatacctttcagctgcaggatttggtgccaagttgcttggagtttttggaaatggcatggttcaatcatttataaatgcgtgcacattaactcctttggacatgagaaagccaaagctggctgctggaatcgctaagcagctntgtcgattccatcaagtggaattccaggtcct

SEQ ID NO: 47927 - DNA, 638 bp, Gossypium hirsutum
  unsure (1)..(638): unsure at all n locations
  Clone ID: LIB3582-054-P1-K1-H4
gcgttctattcctgggnattcagtgaaacggttttattcacaaagacgaagcttgcaagacaggaaaagaatggctgatcgtttctttccaaatgaaatgcctacttttgtggcggaatcaactgtctctacaggagctaccggcggtgactcactcaccaacctcctttctttgccttacaaatctctctctgatcacctcaaatccgctgctttggccctcaaagaaaccgtggtgagggagacttggggtttgagtggaaagagagtgcaagattatactttgtacacaggagcacttgggactgcttatttggtctttaaagcataccaagttaccaagaatgacaatgatcttaaattatgctctgatattgttaaagcttgtgattctgcttctaaagattctgggtaatctctctttctttatctctacaacaagtactgtcatatgcgtttatgtgtttaattttggactcgataagttgctaggtttatctgtgagattgtttcaatttgatggatggactgcataaactntgttggagtttgtagatgaatatgtttagcttaaaattcaagtaatttagttatttgattcttgcaatagctgaaaagtttagttcttgaatgcttat

SEQ ID NO: 47928 - DNA, 649 bp, Gossypium hirsutum
  Clone ID: LIB3582-055-P1-K1-A3
agcgttcgttcccatcatagtgaacctaatttgaggaaggcccaaagctgatgaagaacgccataattccacataagatgattagaatcctccggagcaacattacagagtgggcattcaacctgaacaaacaaccgacattgaaccagattggtataatgaggcacatagttgataaataggcgccacatatgtattttgattttagctagaatatgtaaatcccaaagctgctgatagaattctttgtatttagcagtagtcataaagttggaatcattagactgtaactgctctgtaatcaaaacacgatatccgctcttgacggagtattctccagtagcctcatacttccagaccaacgtatcatgcgttctgtggcaagccagcggaatagaaagaatacggttcatttggtcatcatcaaacaaactggacaaaacctcctttctccaagtatgagacacagagtcaatcaattgattgatagtagtcgaaaaatattaatgttttgaactactaatcggttatttccatgcccatgcaaccaaggattgttgcagatattcatgctacttccaataccaatacgccaaaccaacccatcagcaatcaactctcgagcactgcacgagcctttccaggtaaa

SEQ ID NO: 47929 - DNA, 658 bp, Gossypium hirsutum
  unsure (1)..(658): unsure at all n locations
  Clone ID: LIB3582-055-P1-K1-A5
ctcttgtgatggcttnatgggagagtcattcttcgtcaagtctcggtggttatggctccacagaaaccgatatcattttcaacgggaaaagttgctaatgttagacaactcatcggtactgcaaaattacgaatgttgaaaaaggcctgaaaccaagttctccttcgaggacattcatcgtgacccaaggttatttagtgtgattaaaaggaagaaattgaggctgataattagctggaagcctcctctatgaggccaactaaagttcagtgttgatggttctgcgcgttggaaccctgaacctgtaggcattgagggcatactgtgacaacggttctatcctaatgtctttctcaaaggcacgcgagtcccatacttccggaaattttagctgtgaagtaagcttgtcttatgtttccttcttcctttttggtacgagatggaagggtttttatgatttaatcattgaaagcgactgcaacgaagtcgttaattggtccagaaattcaagcaagagtcctcaaaatatgaaaagtattgtatctactgtgcaagctatgtttaacgcaggggtgttcaggcttaatccactggcttttatatgctgctagcagttcgagtttggtgcttgtggcttggcatctgtatgtttgttttc

SEQ ID NO: 47930 - DNA, 542 bp, Gossypium hirsutum
  unsure (1)..(542): unsure at all n locations
  Clone ID: LIB3582-055-P1-K1-A6
gtttagtctcattgtgctttataatgtttgcttcattgtctgattcctgtgtgtgtattgaattatgattaatgattattaattcacacctcactctataacattaatccctctgaagattctgaacttagaaaaagaccttcataatatatttaattgtgactaaccctaatatttttgtgggggggggaactcctatttcaaccacaactaaacacttatttaacaaaggaataagaaatcttacacttgccaccttcacctcagatcaagataaccatacaatcaacatatatgactatctctaaggattataacaagaaaaaatcagacagagttcaagccaatgtcattacatgttaaattccatgactttcaaggcaaaaactacagatctgctgtttcaaaattgaacaacgaaattgaaccagataattgcaaggtgatccttaagccaacattaatcatcatnacattgtacaaagcttctaaagggaattggactgacactgcactacaaaaaggacaagctgaaaccaatt

SEQ ID NO: 47931 - DNA, 615 bp, Gossypium hirsutum
  unsure (1)..(615): unsure at all n locations
  Clone ID: LIB3582-055-P1-K1-B2
cacatcccttcctcttttttcatactccagagtcgtgggtttttccctaaagtccttgcttgttacaagcaccaaaggtttctctcagttgtataaacatttccagagctctccactcaggtcagtcaaccagtttttttgttcggtttaggtttaatatttccttctttttatttctgggatttgtttatcttctggatcttttattgaatgtcgctgccaaaggaactatacccatctcaagatgaccttctttacgaagaagaactgttaagaaatccctttagtttgaaactctggtggaggtatttaatagctagatcagatgcccctttcaagaaaagatttattatctacgagcgagccttgaaagctttgcctggtagttacaagctttggcatgcttatttacgtgaacgtctcgagattgttcgcaatttacctgttactcaccctcaatatgaaacccttaacaatacttttgagagggcgcttgttacaatgcacaagatgcctaggatttggataatgtacttgtcgacgttaactgaacagaaattgattactaagacacgtangacgttcgatagagcactttgtgcgttgcctgtgact

SEQ ID NO: 47932 - DNA, 606 bp, Gossypium hirsutum
  unsure (1)..(606): unsure at all n locations
  Clone ID: LIB3582-055-P1-K1-B9
ggcatatgctggcatcttcaggggaggggaggcctgataacagaacttaggagggagctgagggtgtcagatgatgagcatagagagcttctgactaaggtgaatgcgtgatgatgattatcacgaaggataaggggactggaggcaaagtggtgggaaccagcctgcgagacttggtgcatcggatagcgtgcacagtattttgcctagtccaactgtttcagcatctggcaagaaacagaagacatctcaatcgggaaatctccctaccattggtggtggaataacaaggtttagaacattattagtagttctttgtgttaagctttcttctttggatgctagctagcaaagctgctttaggagcttggaccaaatgcaagaagcaatgacaatgatttcgttatagaaatgtgaatgcgtacattgacttgtattacttgaaaatttcccctgcaggggcagtcattgcctggcttatcctcggcaaagcctatgcattatcctgctgcagtttctgctggaaataggcaattcaataaccgtggtactatcgctagcctttcancgaatgaacgtgctgaaggagcaacttttgatccctta

SEQ ID NO: 47933 - DNA, 691 bp, Gossypium hirsutum
  unsure (1)..(691): unsure at all n locations
  Clone ID: LIB3582-055-P1-K1-D6
gnaaatgttggagcagnaaggttctctgactatacaggatatgcctcttcatttcggttttctggtgactatgtggacaaaaggagtgttgactttcttggaagacgaaaaaccagaattgttgctatagatgctttgtgcagtccaagaatgaaacagtacaaactgaaataccttattcgggagactaataaggcattttgtggctttttggatcaatcaaaatatagccagtacaagagaatattcaagatgaactcagtgcagttaaatgaaggttcttctctgcctattaaagctaaaggagaatccaggacagaggaagtcagaaagtctgatgagaaaagttggcgcttagaggactgtgaaaattatattgggatagcaacgggaaattggggctgtggtgcatttggaggagatcctgaagtgaagaccataattcagtggcttgctgcttctcaggctttaagacctttcatttcatactacacttttggtctggaggcactgcaaagtcttgctcaggtgactcagtggattatattgcagaaatggaatgtcggagacctttggaacattttgatagaatattcatcccagaaattgaggggagaagcagacgttggcttttttgcttggcttcttccttcattgccgaaaatatataatgtaatttgttatgctttaa

SEQ ID NO: 47934 - DNA, 681 bp, Gossypium hirsutum
  unsure (1)..(681): unsure at all n locations
  Clone ID: LIB3582-055-P1-K1-E8
gttctaatgcctttctcttcgtctctaatagatttcttacgaacttttcgtcgaacaggtagcgagggcgaactctgcaaacaagnaaacatnngccgcctagnaaacaagnngccgccaaaaacaacattcaggatggcgcccttcctcaacagcaagattgctatgaaggagaacggctcattcacgtgcttaaatcaatccgaagagggatagagtcagccagagctctggctggaaactccttgcctgaaaaagtgtggcttaagcaacaatttgcaatcggtgttaatgacgtaacacgtgtacttgaacggatggcagccattattgacgaggggagcactgcccaatcaccttttgttagacttcaggttagctatcctggttttacccatgttttaacaagcagctagggttagttttttattgcttgtacgtttgctgtaagtagctcgagacttggtgtatgtttgttgcgtttgtaggctatattgttagctgctgattgcaacccaaagtggctgacgaagcacctgccaacgttggctaaatcaagaaaggtaccattgatcattgttaaagatgataaaaaggggtccttaagattgggtgagcttgtaaagctaaaaacagctgttgcaattggagtaaaggctcgaggaagtgctatcaatcaaa

SEQ ID NO: 47935 - DNA, 675 bp, Gossypium hirsutum
  unsure (1)..(675): unsure at all n locations
  Clone ID: LIB3582-055-P1-K1-F8
gntagttcttcgcctatccgtcactccgccatcatattcggcagacggtcctaatctggccctgttcgaccacgaatccgagagttttgctattcttaaacctcacaatccttatttgagctccgatttctacgaagcaaacaaggattcgagggcctttatcgagataagtatcttccctttcatttatttttatttttttactcatacaataacaaaaatcaaaaagataaaagcaaaatgaaaagaaaaatgagatttaaaattaccacttgaaaactgttgttttctatatagatttgtatgcgtttggtttcgtatttctctgaaaaaagatcccatttacatcgtttttctggcttttcatagcagaataaagaaaaaaaaagaataataatcataataaaaatacaagcaattttccttttgttgtcagtctgttgtgggttgttattttgttgcaggtacgaacggagccagttggatgatggcgcacgtggcaacgacgaagaaggcacacatggggctggcacggaggcaacagcgatgctggaggctgctgaaagttgttgcggcgcaaaggatggtgctagggttttctagaaattttatattttgggccaatntgtgttagggtttatttgggcttggtttagttgttgggttgttgtaaat

SEQ ID NO: 47936 - DNA, 622 bp, Gossypium hirsutum
  unsure (1)..(622): unsure at all n locations
  Clone ID: LIB3582-055-P1-K1-G6
ccccgcgtccgcttggtgacatgcctcaaaatcctttgaattcaagcgagtggcttatgcacgagaatttcttgatgttgctcctggaatcacagtcatggactcattgaagagagtattaagacttccatctgtatgttccaaacggtttttgacaacaaaagttgatagatgtgtaacaggtcttgtagcacagcagcaaacagttggtcccttgcagttgcctctagctgatgttgcagtcatcgctcaaagttatgttgacttgactggggctgcctgtgccatcggagagcaacctattaagggtttgcttgatccaaaagcaatggctagactggctgttggagaagctctcacaaatcttgtttgggcaaaggttacttctctgtctgatgtcaaagcaagcggaaattggatgtatgctgccaagcttgagggtgaaggagcagccatgtatgacgctgctattgctctttcagaagcaatgattgaactcggtatcgctattgatggtgggaaagacagtctttcaatggctgcccatgcagggggggagggttgntaaggctccntggnatcttgtaattagtgcctatgtcacttgtcctgacataacaaa

SEQ ID NO: 47937 - DNA, 639 bp, Gossypium hirsutum
  Clone ID: LIB3582-055-P1-K1-H1
tacgccttggtcatgcctactaagtctgtagaacttggtcacacaacgatctataatctcgagcaaactttactgcttgtaacacttctcaaaagctcttttgatagttaatagtgtagccacacatcatattgcctttgatgcttaaagcctctccctagtgtcacagggctagatctttcgtctcgtgatccgtgcaatcttaggcgattcgttcatccaaactcgcctaagtcagcttttatttgaggattccttaagaactcgtccaaggcactaattgtagagcaaaagcaaacttatgccaaaagaagcaacaaagaactacagaaagccacaaaaaagatcgcacacaaggtgtttgagtaaatactctcagtattctattacttttaagaattcacatacaatggaatgatttaaaagtgagggggaggctctctatttatagttgagctccctcaaaactgatggataagattaagttacatcgacggacaagatcgaccatatcccttgattctagggatttacaagatatgtcatatcaaattctatctaatctttataagtatgattccctctaacttttaagattagttgcaataatagcctaagttgtcatatcctcattatcgg

SEQ ID NO: 47938 - DNA, 526 bp, Gossypium hirsutum
  Clone ID: LIB3582-055-P1-K1-H11
gcgtttgttctagccgccgcctgcgtctctgtctgcatctctctgtaacataaaactgtacatcataagcgtttagagagagactatgtggagaaaccaggatctcatctacgatgacaagcttctttatgacttattcccttacaaagaaatctacaatggaatgctgagtgaagttcagggaaagggggtggggcagggagctattgatggagacattgatgccaacacttcagccaaagatgctgatgaggatgaaggtgatgatgaccaatctgagaacgaagctgacattgttgacactatcaggctcaatgagcaaccccatgagcacacgaagcaggacgagaagcacatgaagaagttcatgaagaacttgacaccgaacctggctgcggaaaagcaagagtccttcaagaaaaacattgagggagcaaccaagggagcgctctcaaaattgaaggacctacaatttgacatcgaatagagcatgcacgaggatagacgctaggtatgagcttactac

SEQ ID NO: 47939 - DNA, 637 bp, Gossypium hirsutum
  Clone ID: LIB3582-055-P1-K1-H3
gcgttcgttcacttttcttcttcttctctttctccttagccactcaaagtcacccaaaaagcacaccaatctctctctctctctctctttttctcttttttccatgggaagtaatgttacagtggccatcgaagattgttttcatcacttccatggcgttactcatggtggtgatgatgatgaaagtggtggtgttgttatggtggaaaccaaagaagatcgaaagccatttcttaaaacaagggattaaaggcccaccttaccatttcttcatcggcaatgttaaagaacttgtggggatgacgttgaaagcttctgcaactcccatgcctgatttctctcataatattctcccaagggtcctttctttttatcaccattggaagaaaatctatggtacaccatttattgtctggttcggacccacggttcgggtcacagtgtcggatcctgatctgataaaggaaatcttcatctccaagtccgaattgtatgaaaaaaaatgaagcccaccctttgattaaacagcttgaaggtgatggcctccttagtctaaaaggtcaaaaatgggctcatcatcgcaaaataatacacccactttcatatggaaaactcaaattgcttgtgcccgtgatga

SEQ ID NO: 47940 - DNA, 641 bp, Gossypium hirsutum
  unsure (1)..(641): unsure at all n locations
  Clone ID: LIB3582-055-P1-K1-H6
ccccgcgtccgccccgcgtccgccccgcgtccgatctacgttttcttatttcattttgctctgtgtgtgtaaatcaatacccaataatctttgcanacctcaaaaaaacccattgggaaaggtgaggccatgccagggggcatgctggtccgcggagatggtgatgatagtaatcttcatcacaatcacgaagctgcagctacttcttctgccgggcccatgatcaagatcgacgtcgcttatggttcggcccagcataaactctttgtcccctcccattccactgtcggggaattgaagaaacaaattgctgaagaaacgggtttggaacctgataaacaaagggtattatttaggggtaaagagaaagaagatgatgtgcatttgagctctgctggtatgaaggataaatcgaagattttggttttagaaaatccaacaggcaaagtgaaaaaggtcgaggaaatggcgaatgttgaagagaaggttgaagaatcgatagctagaaaagaaagtaaggttgaagagattaaggaaactgaagagatgtcaaaggcttttgctgcggttggtcgagtcagaaaagagttgacaagctctctgaaagagtggctgcaatagaagtggctgtgaacagtggg

SEQ ID NO: 47941 - DNA, 722 bp, Gossypium hirsutum
  unsure (1)..(722): unsure at all n locations
  Clone ID: LIB3582-055-P1-K1-H8
cggaaccggccttcccggttcgacccagcgtttgccccgcgtccgcctattcatttactttattgaggctttccttccttatttcctcttctctggttcttgcaccctatcggtttccttttggttttcggcatatccagtgacacttttaactagcgaaggccgatgccacctcttgatgaatttctgaacaagataagagggtggtcccttcattgtttctggccacaatccccgaagcagattagaaatgacgcccatcgtatgctccgtcaaaattgatttttacggacgcaccagtgccacttttcttatcatgcattctagcattcctttctccccaaatggcccatagtacacaacaaaaaagtcggctttggaaaaagggatattgaacaaaaacccagggcatttgcggaagaggtgatcaattatttctgctcttcctccacatcaagggcaagttgtaatgttaactagctttctgtgctgcatgttaacccgtataggaaaataattccattatattctccagattgtaatcttgattttagtagggagattttggagccaaagttttttttgtagaaattccagtagttggtttgtaaaacataagctctagggttttcgccagaattttgtaatagtttataagcgctacagaccgagtactctcccgaagatcactactncataaagncagtcatcgtggggttctt

SEQ ID NO: 47942 - DNA, 692 bp, Gossypium hirsutum
  Clone ID: LIB3582-055-P1-K1-H9
ccccgcgtccgcccacgcgtccggttgatagaggtttaggatatgactgtaaaggaattgtgttctttcgcctgttatccatgtagatttttttttttatctcgagtatgtcttaaccatattcctgagtttatcttctaaaatgcttgacggtagagattgaatcctccggttttgatctttctacaaagcaaagaacacgcaaaggaactgtatgaagagctgaaattcgataatattagagttggtgtcatccattcagacttatctgaaactcaggtaaaggattatttctatgcttattaacgaagctgcaccaacaaaagaattccaagtacaatcgaagatgtttcaccttcacataatatatggctaggtgctcgttgtagtgcataatcgaaaagtgtaaccttatttttgcctttctgaatggttattttcttcatcctgatatcttataattgaatgcagtgtgaaaatgttgttaatgacttccgagctggcaaaacgtgggttttgatcgccaccgatgtcattgcccgtggtatggacttcaaaggtgtcaactgtgtgattaattatgattttcctgattctgctgctgcatacattcaccgaatcggtcggtccggcagagcagggaggactggagaagctaatgtgatggcagcatccggctgcgaggttccgtc

SEQ ID NO: 47943 - DNA, 642 bp, Gossypium hirsutum
  unsure (1)..(642): unsure at all n locations
  Clone ID: LIB3582-056-P1-K1-A1
ttcaatttcaacccaaanaagnataggaaaacccaaaagtgaaatggcaatggtgactgtagccaatttagtttcatatcaaaggtgaatttcttttctttattttaatatatattttcctttttgttgttcattaattctgggtttcttttacgttgttcacagagtcatgaattccatgtaatttgcagaaggagagaaaaaggaagagaaaatcaaagtaattacccctataaagtcattgaaattacacccccgcctaagtcccttggtgttcgttgcttccctcctgtaagtcccactttctttcttgtaatttgctgtctgaaatttattcaattggagttatatctctatagatttaagggcggaaattaaagcctttgaatttaggttaaattaatgactattaaaaatctattattggggttttaatcatgtgttttgaagtatcttattgtgatgaaattctggattgttttatttatttaggtatttttgtttttgtgaaaagaaaatatgcagtctttgacttttcaagtcgatgtctcgagtgtaagttactacagaggtctttatacatgagcatgaagtacacatggcatgatatttattactggctgattattctgttactcatgt

SEQ ID NO: 47944 - DNA, 600 bp, Gossypium hirsutum
  unsure (1)..(600): unsure at all n locations
  Clone ID: LIB3582-056-P1-K1-A5
ctgatttgagacggttngatgtccttcggcttggatggaaccgatttgacggaccagtcccggcattgaaccaatcttttctactcattttcaatgtttccggcaacaatctgaccgggaaataccggtgacgcctactttatcgaagttcaatacgacggcgttttcattgaaccctgatttatgtggggagattatcaataaagcttgtgcttcacgtgctccttttttcggttctccttcagcatccggtccgttaggtcaaagtgcggaggcccaaagcggcggcggcggtggggttatggttctttcaccgccttcttcgccgaagaagagtcaccggagaactggggtggtccttgggtttaccatcggcattgctttaatcttattttcagtattgttagctttagctgtggttaaaaaacaaagagtggactcgaaagggacaaagccgacaacgatagcttcagcggaagtaacacactcaaatgccggaaactcgagaaaccatatcggagaaccaccggagaggaagacaatgatgccggaaattcaaaggctgaaaaagagtgggaatttagtgttcgtcggtggtga

SEQ ID NO: 47945 - DNA, 611 bp, Gossypium hirsutum
  Clone ID: LIB3582-056-P1-K1-B10
gcgttcgccccgcgtccgtgatgagcagactgcatcagctctcaagtttcttctcctaaactaactacctcttcagtgaagcctgaactttgggctatcttagatggactgcgacttgtattgtcatcgacctatttgttgcacgtgtcgttgttcctctggttgagtgcagttgtttcctctttcttctactttcagaaagttaatgtaattgccatgacagttgcaagctcggttggcagaagaagattgtttggccagatcaatagctttattgctgtctttatcctcgctggacaacttaccttaacagtatgctatacctatgatgagtttttgtaattattttgaactaacagctactcataacaataaagaaaatgaagtatttcttggtactcatttggtttttccaggtcttgacgctatctattttgattctggtgtaattttttctttcacatctatcatcttatggggtctagatcatctctggctatgccctgtcatctgtttattatcctagcttttacccttattatgtcttcgcttattacaggggcatattcttactgttggctggggtactatagctcctatgtgcactccat

SEQ ID NO: 47946 - DNA, 629 bp, Gossypium hirsutum
  unsure (1)..(629): unsure at all n locations
  Clone ID: LIB3582-056-P1-K1-B11
ctcttgtccggnaaagcaagctagtattggtagatttggcaggctcagagcgtgttcaaaagtcaggaagtgagggacacatgtntggaagaagctaagtctattaacctgtcactgagtgctttgggaaagtgtattaatgctttagcagagaatagcgctcatgtgcccattcgtgattcaaaacttacgaggctactcagagattctttcggaggtactgccaggacctcattaattgttacaattggcccttccccacgacatcgaggagagactgcaagtacgatattgtttggtcaaagggcaatgaaggtggagaatatgttgagaataaaggaagagtttgattataaaagtttggctagaaggcttgaaatacagctggacaagctcattgcagaaaatgaaaggcaacagaaggcttttgatgacgaagttgaaagaataaacttagaagcacaaaaccgtgtctctgaggttgagagagatttcacagatgccttagagaaggaacgactaaagtgccagatggaatatatggaatcagttaagaagctggaggaaaagatgatagaaaatcaacggaagcatcagcatgatggcttcatgaaggacaaatgtaattg

SEQ ID NO: 47947 - DNA, 227 bp, Gossypium hirsutum
  Clone ID: LIB3582-056-P1-K1-C10
actgacttatggcattctggtgaggactgtctcattggagaaccagctctagttctttacctttccttcagcgtcgatttgttctacctaacactttcgtttcgacaagagctcatttgatcctccacggaggtaccactactgccaatggcgcacacggtggtgccaacaatgacgcactgagtaagacaggtgtgaagacatgtgaacaaaggcagatagagagg

SEQ ID NO: 47948 - DNA, 711 bp, Gossypium hirsutum
  unsure (1)..(711): unsure at all n locations
  Clone ID: LIB3582-056-P1-K1-C11
gcgttcgctctttccttctttaccataactgggatttaaatctgaggtcaaaattgccttcttttcctttttttttttttttctgaaggcacgtggtggaggagcaagaagaaccggaggacaggccacatcatgtgagttctttctcaggcatgatatccctcctataggactcttcaagagattcgcaaataccagaagactacgaattgaatcatccctgctgccagcttcatcagagaagtaagagctattagctaccaacttgcaccaggaataagtcgttgacaagctgaagctttagtagcaattcaagagatatatcgttgatctggaaaataatgcttcccagtctccatactgtcatgctgccataggttagattgccaacattaacttgcatatgtattcactgttataatatgttcattatgcacttataagtgtccaaaaatacttgaatttgagtatgatatgagtatgcaaattttcacttgctaattaactgtatgattgtgaagaactgtagtttgttcagttatattttatttcacaataagaaataacaatgcaatttgtgatgtcaatacttttgctactttctacttcgaaaagctataactttggatggttttgtaggcagcagaggatatttgattcaatgtttggagatgcacgctctctgcaattatgcanagcgtgtacactaac

SEQ ID NO: 47949 - DNA, 653 bp, Gossypium hirsutum
  Clone ID: LIB3582-056-P1-K1-C12
atccgttcgagcaggtcttaagaaggttccatgggatggttatttgaagtactctcgccctaggcccaagcatagagagcaaaaacaacaaagctttgccgaatcggtgcttcggaggctggaagaaaattgataccataaacacacatttgtttcgtttgttgagttgccattatctagataatgatttaggccctgtcggcacaccttgatgtctcatttgttgaatgctttatttttgtatcaaatcttagaattagaatgagttggtaatttgtctagttgtaggtttctttgtgaaataacataaggctagtattgctgattgagtcttagttcggttgtcattattgttgctgcaataaccggtattactagttggtaattttggtcatattgaattctgttgagggggttggctctcttttaggaggagtttttgaagtgtcgtctgctgagtgattgatcagatcctcaaacagtggaggtattgtgcccgggatgtctatgtttggttttagtctgggttttgtctctcgtaattcgagaagagcccaaagcggtacgtggagtttagagagcgcttagtcgcattctaaagcatttccttggtggattagctctctcatcagattccatgactccctttgggc

SEQ ID NO: 47950 - DNA, 530 bp, Gossypium hirsutum
  Clone ID: LIB3582-056-P1-K1-D5
cccagcgtccgctcttccttacaaaaacgttagcttagaacctgagaaaattgcaccctcttggctccagctaatgctcctatcgattttccagactctgagcaactttcataaagcttttaaacgagggaccacaagatgagcacctgattatcaacatattgcatcacactaatgcaacttagcgcagtttgattcggaaatcctataaggaatctacataaactaagatctgcttacgtctttggtatgaggaactaataagtgactttcagcgagctctagtgctgataactatggaccctgcctaaccatatgcattgtctggactctatgcaagctacaaagaggtgcacattaaaccattgggagctgatgaaaactgctagtactactctcttacatgaactgctcaatgttaggaacgtcgttcacacatcttctcagaaatccttgaataccatatcgacaccataccaagagaggctaccgcaagcttgtggaaccactagtgagagcattccgatacc

SEQ ID NO: 47951 - DNA, 640 bp, Gossypium hirsutum
  unsure (1)..(640): unsure at all n locations
  Clone ID: LIB3582-056-P1-K1-E1
tngagnactagctacaatttctgaatttgtcgagaacgatcaagatgttggtactcctggattaatggaattgcctaatttgtctggtgatcacaaggtattggctgatcatatggaatcagaacatcacaatcttacggaattgggcaatgagtgtgtagaaaatgcttctaataaatcaaagtctctcgatggggatactggtccagtggatcagtctttgcacaatgatgtagatcatgatgctgtgcctcctaaaaatggttgccattttggtgacatggagaaagaacaaactaaaccaccaggaaattctgtccatgatgccttgtgtgttgagtacacatctgctgttggtaatgtcagaggatctgatggcttggatagggtggaagatatgcagaatggtgttatgcactcaattgatagaactgagggagaatgtgcagaatctcctagctgctccaatatcacctttgacttggaggatccttctcgaagacatgtttaagtagcatctgtgtgcccacatcagatggctgtttggagaatggccaagcatcgcataaatctgaaaatggaaatgatgctgaaaccactgatattttgaagagccattctcttctgccaaagcaatagc

SEQ ID NO: 47952 - DNA, 185 bp, Gossypium hirsutum
  unsure (1)..(185): unsure at all n locations
  Clone ID: LIB3582-056-P1-K1-E8
tgntgatgacagccagttggttgaatcttttagcagtggtgaagaagaggattttgtggggaatggttttggtttctaattttgacctgataggctaaaatcttggtcataatgctttctagggatagtggaaaacgaaatgtttgtaattattattgctcaagggttattattattattgttct

SEQ ID NO: 47953 - DNA, 654 bp, Gossypium hirsutum
  unsure (1)..(654): unsure at all n locations
  Clone ID: LIB3582-056-P1-K1-F1
tgtttttgcagaaatttcaaaatctcttctttttttttgccctgttagggttttaaaccccccatcttcacctcctccatggccgaccatggattcgtcggcggtctttcatgcccatgccacgaatcggcgaccggtattgtgcgatatgggcttcttcgaccctctttgaatgagttcgaggacgaaatctccctaacttgcggcaccgcaaagaaaggaggagccttttggctcctttctctccgccacggccattcgggtttggctaccttcggatcggcaagagaatgtcggacacgccccaaatagtaaatcagaggttcctttttattattcttattttattgttgttttgtgtgtaaaaaaaatgaaaaaaaataaagaagaaagcaaatctaagtgaaaaaggatgaaaatcgaaactcaacaataatcaccttttgaaatcgtccattcttttgattaatttttgtttggtaaatgtctgtaaccgattacaaatgatagattttggcttttaaagccaatctacaaaccgttcattccatgtttnttgttctttagctatttatttcttctgcatgctctctgtcgttgngtttgatttgattgcaggtgtcagaggtgtgaaaggccgatggttggctggtg

SEQ ID NO: 47954 - DNA, 554 bp, Gossypium hirsutum
  Clone ID: LIB3582-056-P1-K1-G1
ggggcacacggttcttaccacacactttaggacgacgaaaaaggctctgctggacaccatatgcaaccctgtgtatttcattacatgccagatgaacactcagaagatgacatgggtgcataaacacaagactttgagagggatgcatgggccctaactctatataaagattcacactgactttgcttatgaacgaaagaaaactctatggagctgggtggcgaatatcaaatacacgaacctgtataccgccgcactggccgacttctcatctagcatatacaacggtaatacatggcctgttgtccaagatcactaagatgcgcaggacatggagagagttaaagggccggatgagaaaacgccccccaaagatgctaacagcttggctgcgggatgcccatgcaggcacatggaaagtgctctgcgactacagagatgagtaaactcaccagccgccacacaggtgtcgtgtatcgtccaacggtagcttgctgcaaaacagcgatgtctactcgttcgccaatcattctctcaaaataaatctgagcatt

SEQ ID NO: 47955 - DNA, 544 bp, Gossypium hirsutum
  Clone ID: LIB3582-056-P1-K1-G11
gccgaacctaaccttcattagcgcgccgtgggcagctaggcaggctccgagcaccatgagatagtcgcctacgcttccagcagtgacggtagctcaaccagtaactacaaacatcctgtttaatcagactgaaccacaaggacaaagcttactaatcatatgggctccaaccacaacgtgcgcacatcaggacagaaaacaagcgcgaacttcccccaatgcagtgcctaccacagaaggccaaactgctggtcctctacaataaagcactgtacgctcctcagctgaacatgaatgcaacaccgaatgctatacctgacacggcgaacagggaaggattaagcatcaaggttgctacaatgagaaggcaatgaacctaccaacaagagctgaggggatacttcataaacacccccgataaagattcagactgcaactaagcatgatcgctaggcaactacatggccaagcatggcatacgattgcccctgcttatattagtaccatttgctggtcgcggctacatgataagatgcttgacagt

SEQ ID NO: 47956 - DNA, 471 bp, Gossypium hirsutum
  unsure (1)..(471): unsure at all n locations
  Clone ID: LIB3582-056-P1-K1-G8
tgngngtactgatcaaagcatgggnaagcgaagattggatcggagcgatcatgtcagctgcaagaatatttcagcctgtagttttattctcaaaaaaggctgaaaaaaccccttaatttgcgctgagaggaacctcggatcctcttcatcaccatctgcaatatgttgaagagacaggctttaactcccttttgctgcaactttttttttgtttttgttttttaaatccagtaagtttggcttctattttgtatgtatatatataaatatatattgcattacaggttcttaggttgggtttttagaaagggtggtatatgttgcagtcctcagtaaaagaggaactcattttttcttcttttaatttctttttttttttttttccatttttgttgttttgggaagttggggtataattaatagtatagaacagagggagatttgtacctgcaaactgcaatttaagcactt

SEQ ID NO: 47957 - DNA, 640 bp, Gossypium hirsutum
  unsure (1)..(640): unsure at all n locations
  Clone ID: LIB3582-056-P1-K1-H1
ccccgcgtccggtatccgttttattggatgcataatttgattctatatcttgtctattgcttctgaagtttctcaatttgtacatttttcttgaaagttgtacagggatattgaatctgctcagagggtgataagaactagttgaatctggaacttggagcttagtttgtgtcattaatcttacatcatatagaaaaggaaaggcttttgagcatataagcgggtgcgtttcacattctatcaaattgttttttttggaagactgatggattcatggtaagttgttgtggagtgttcttttgttaaggtgaggatatgttacaatatagtaaaatggagtgttgtcaagagatggtggagaggaagattggagcagattctgtaaaacaagttcagtggtagaaaaagtgaaagttccggtggtggtggtgattgtttagagaaaattgtagagagaatttagaataagtcctcaaatgaaactttctatcctccatttatgtccctcaatgaggttatgaaagggagattattaaagaagggtgaatgtgccttaaataataggtggtggtggaagtaagagagttacatgaacgtgngtaatgggagagaagtatatgggtagtggatatagtgattg

SEQ ID NO: 47958 - DNA, 456 bp, Gossypium hirsutum
  Clone ID: LIB3582-057-P1-K1-B7
ctttcttcttcactgttcctgtctttgcttactcaccccttatatatctgctttctcaggggagaaaatatgagcaggccaggagactggaattgcaggtcatgccaacacctcaacttccaaagaagggactcatgccagcgctgtggagaaccaagacctggtggtggtgacagaggcggcgactatggaagctttggtggcaggggtggctcatctttcgggtttactggacccgatgttaggcctggtgactggtattgcactgtgggcaactgcggtgctcacaacttcgccagcaggtcgagctgcttcaaatgtggtgcagccaaagatgaatcatctggaggatttgaaagtgacatcccacgtatgaggggttatggttttagcactggcagctctagtcgctctaactggaaatctggagactggatttgcaccaagtcgggttgc

SEQ ID NO: 47959 - DNA, 636 bp, Gossypium hirsutum
  Clone ID: LIB3582-057-P1-K1-C11
ccccgcgtccgcaccgagtcaagtattttgtttgaatcccacatcgtcgatattcttcgtggtgttcggaccggtgatcttggtgacttatcgcctactcagttcaggttaagccgaagtacttgcatgcaaaccaatggattttgtttttttgggtcaaattctataacaagcccctctactaatttgttaatagtttttttactataatttgatcaatgattttagtgcaaggattttttaaataaaaatttacccttctttaaaatttgtaaaattgccctactcaagcatgcatgcataacaagttttagtagttcatacttcatcatacatataattttctttacaattttagttgttttcattattttattttatttaattatcctttcaaaaaaaattatttaattatttatgtaaaatattgaagtaaaatgttaatgtaaattttgaaagagaagaaaaatatgttgcatgctgtcattataaaatctatataatttcattaaaattatttttatttaatatttgtgactaaacttaataaagggataaaacaacatttagtccttgatcttgacattttttttcaatttagtctttgaattttttttccacattaatcttaaaatg

SEQ ID NO: 47960 - DNA, 688 bp, Gossypium hirsutum
  Clone ID: LIB3582-057-P1-K1-C12
ccccgcgtccgccccgcgtccgctttttaaaaatgagttttgaggtgggacggctcgaattcttcaattagctggattgggttgggtcgccctgttccgtcttgagatattaccacaatatctttatatattatattatgataataaaaattgaagaatatttgctctacataattatactagagaaaataattaatagtatgattaaaaacaataaaagaatattattatgttttaatagaaatatataaaaaaattaaaaattgtgaatatttaattttgggttaggtcaagtttggaatatgttggggcatattaagttaggtcgggtcgagatgtgttgggatatatttaatttttagtttggtcaaggttgttattttggggtaaaagaattatagaggcatttgtactagtagttagattatattttaccccctcaactaaaaaaatggacaaattagtctccttacattatattaaggagaaaattaatctttcttgttaaaaatttaatccgattgtactgttaaaactaggatggctaagggaataatcatatagtgacacgttgtgtcacgtgtacctcatgcaaacgtatagggactaatttttataatagaaatgataaatttttaacagaggattagttactcttgatctaatgataggattattactcattttt

SEQ ID NO: 47961 - DNA, 572 bp, Gossypium hirsutum
  unsure (1)..(572): unsure at all n locations
  Clone ID: LIB3582-057-P1-K1-C7
ggttgatggaggtgtggtggagggaggagaggttgagggataaggaagccattggtttttggtgaatggagtgaagnctgaaatggggttgtagatatgatgaaaggttgtggtcagtggctgttggattgcatttgctttgatatatgatctgtgtttgttggtgttaggagaaattgaaggatagggagaaggggctgctgagatttggttggttaattggttagatgattacattattggttggtggggacttattttgtttgtttgagaacttgagaggggtgttgggcctcgggaggtttgagaatttggattggatatctatactgaagattgtctcaaaaaggaggcttctttcttctctaaaaatattatctcttggccatctgaaaaaaatactgtcattttggtttgatcagcanggcaaagctctcaaaaacatggctttgaactttaaagccagcgtnttacatccttcttgattaaccattaaaagtggacattataaaagtctgtttttaaactttntttacattttttttttttctttgagattttttttcctttat

SEQ ID NO: 47962 - DNA, 582 bp, Gossypium hirsutum
  unsure (1)..(582): unsure at all n locations
  Clone ID: LIB3582-057-P1-K1-D1
ggntgatcaacttgcaaatgcctaagccaattatcagcctcttgtaaaagggaattggcttttggagactcgataacttcgggggcattccagatggaagcttggaacttatagaaagcaagtccaaaggtaggcaatggtagctttgagggcatttcggcagcatcaagctccctgatgttaaaacctcggaagggtaggctatctgtggcagtacctacttgaaaaacaataccgaaatctggtcatagttaagtctcaaagagaataacgatgacacttgatggaatgtgaatggtggaaaagatgtttaccgtttgatggtgtagaaaggcagtgatatgttagaaagcaggcatccagatttttcaaagttggacccattggcaccctatatataggataccttcattaagaaaaaaagacatttctgtcaaacattatcgggtttaaattcggaatgacaataaacgagganaatataccatgccacggaaatccagctcgaaggcaatagatcacagcttctgtacgtcgncaaagctggaaattgggatgctagatccgaaacctgttggatgc

SEQ ID NO: 47963 - DNA, 584 bp, Gossypium hirsutum
  unsure (1)..(584): unsure at all n locations
  Clone ID: LIB3582-057-P1-K1-D4
tcttaaataagntcgngnaaagnaaaaaaaaaggaacaaaatcgaaaaagctagatctgaaaatcaccttcttttcttttgaatctgtttttttgtgttttttttattaaatgatgaatcccccttttacattggcttctttttggcctttaaaccgatttacaagaccctattttttgctattgttttcactattgttgcctatttttcttttcttgcgtgttgtcttttcttctctgtttgcagattcgagcggtgtgcacgctggtggcagcagggaggcacatgggtggtacggcgcgtgtgggggggctgaagtgacctggtacggcgcgtagggttctccctcccttcattgctggaaaatattttgtgggcaagggttttagttttaggttagggcttagttgggtttggttttgggtctttgtaatgggtttggtttatttaggcccgggccaaaaatgggctgtataatnctaatagcaaaaactaagtttctactcacatcaaccggttcaattaatcaactaatattcttaatttattcagcccctttacttgttgtgttttgctttgacttt

SEQ ID NO: 47964 - DNA, 609 bp, Gossypium hirsutum
  Clone ID: LIB3582-057-P1-K1-E4
gaaagagttgtcctacatgtctcggggattgtctcttgtcccagaagccttgtgtatgtgcttgtcaagctgggggaaaatttgcttataccccagaaggtgttattaaggaagacttcttagaagagtgtatctctatgactcgtgatcctcaaaaacaatgtcttcttaattgcacagagtgccctcttgagagatcaaaagcggatgactttccggagccttgtaagggtcacttacagagaaaagtaatcaaagagtgttggatcaaatgtgggtgcaataagcagtgtggcaatcgggtggtgcagagaggtgtaaattataaattgcaggtgtttctgacacctgatggaaaaggttggggcctgagaactctcgagaatctccccaaaggagcttttgtttgtgagtttgttggagaaatactcaccatccctgagttttatgcaaggaacagggagaaacatacatctccagtcctgctggatgcttactgggggttgaagggagttcctaaggatgaagaggccctctgcttggatgcaacatgttatggaaatgttgctaggtttatcaatcatagatgtttagatgcaaacttgattg

SEQ ID NO: 47965 - DNA, 582 bp, Gossypium hirsutum
  Clone ID: LIB3582-057-P1-K1-E9
cccagcgtccggagccatgctgctggcggtccctataacatgagcaagtccacataccatggcctgcgatgttataaagtgagtgtaccgccaactaattataagggagcaagcgaggttcgacaacaggcatacatgggaagacccctctagtacaatatagaaataaccttgcaaggcatggctctattaaaagctcaatgcttacttattactcacccacccttaacattaactaggagttgtacaagctcacacacataggttacaagcactcggatcggcgcattacaacacacactcaatggtgggaactcataaatgctccacaatactagccattacaagagcctaaaaaagaaccaggtgtgaagaaagaaggtggattaactaagctgtcccttttgcagacaagttgtaacttaggcaagggttgatttcgtggagatatctctgcttctactaaaggtaggcattagctactttaccaaattaaggaccggaaaaaaacgacttctagtattcggtgaaaatgcatttgataatgacatccatgatgcgtaatccatttgatttgatgac

SEQ ID NO: 47966 - DNA, 591 bp, Gossypium hirsutum
  Clone ID: LIB3582-057-P1-K1-F1
tttagaaaaataaatctttgactcgaacgaatttcgtattcatgtagtatctgtttcaaacaagtggcatttttttccgttgctgtccgaaataaaatgcaatcatttgctaaaagtaggtgagaaatctgaggcccttttttgcttgccttaactcttctcattaatttttcgtgtatccctaactttataaggctggaaagaccttctcaacaaaataagaataagaatggactcaatgggtcaccctgtcttaatccctttgaagggaaaaaagttcccccttattcccatttaagacaaccgaataagatactgtagtgacacattttataagtaaagccacccaatttgaatcgaaccctaacttcttcattatatctttcacaaaattccattcaaccctatcataggctttgctcatatccaattttgctgccatacagcccttttcccccgccttgtgtctcaatgtatgtagaagttcataagccagcaaggaattatccgaaattagcctccctagaacaaaagcgctctcggccagatctagcatttatccattaccaaacgaagacgatttgccataac

SEQ ID NO: 47967 - DNA, 652 bp, Gossypium hirsutum
  Clone ID: LIB3582-057-P1-K1-F3
tttcgacttaagattctgctgctatagaaaatcaggggtttgttaatattttggaacaagagcaatttcgtgggggtaaatgttatgtataggcagagatttttcgtggtcgaaggcaaatggacgcttgaggggaaggaggtagtgctaataatcatttattcccccaattgcttttcggataaaaaattctttgggatgtgattgccaaactgaataatcattttagaagcgcttgggtaattggaggagttattaatgttgttagaaacagaagcgaatgtaggttttgcaagtgtatagagtagggctctaaagttttttgggtgagtttattgataggtgtaatttgattgatttgtcgctaatggggaaaaatttgcgtggtttggtccgggatgtaagcgtagcagattggactgattcctatttcagatcatactccaatcctgttgctttatgagtcattaaattgggggccccgaacttttaaatttataaatgcttggtttaataagaaagattgcatgagattgattgagaaagaatggtcggatctagtcagtgtcaaaggagaaacggaagtgaaattgagaaagtttaagggtacttgaagagtggaatgtggaggatagtaatatgttgggaactt

SEQ ID NO: 47968 - DNA, 667 bp, Gossypium hirsutum
  Clone ID: LIB3582-057-P1-K1-G3
cggccgcgtgggccagcggtgaagcaacgtctcttagattttgcattaagtgtttgcaaactggtttttttttttcaaatgtagtggtggataagggagttgggagcagttgtttgacaatggtgaggcgtcatggatgggaactgccggctcatacatttcaggttgtggccattactgttttctttttgctatcggttgcatattatgccttctttgctccctttctcggaaaagatatctatgaatatgtggctattggtgtctactctatcgtggcactctctgttctcatcctctatgttcgatgcactgctatcgatccttgtgatcctggaattcttcttgaagctgacaagacaccaactcgtaaatcacacactgaaatggatctgtctgggaatgcatcttctatcgaagagccttgcaagataagagtaaagtatggaagacaatataataggcatcgttcacaatggtgttccaaacttggaggtttcttttgtgcttgtcttgtaaaagaagattgctgcaaagatgaagaccttttgcagcaacaatctggagaagaagacgctttattctgcacattgtgtaatgcagaagtgcgcaaattcagcaagcattgtagaagttgtgaaaaatgtgttgatggatttgatcatca

SEQ ID NO: 47969 - DNA, 672 bp, Gossypium hirsutum
  unsure (1)..(672): unsure at all n locations
  Clone ID: LIB3582-057-P1-K1-G6
cttgtggtagctgtgtgtgggaactagctccttattactcttctggctatcaatgctacttgttatttgtagattcgttctcacagcacacattgatatattttcttcaaaaagaaatctaatgcttttcatgcctttgtgtcatttaagacctgtgttgactacagttaggtgttaaacaaattcagaccgatggaggtggggagtttcagccctttacctcgtatcttcaacaatgtggaattcttcatcgcgtgtcttgtccacatacctctgagcagaatggcttagtagaatggtgccatcgacagattattgaaacaaggctattgttgttagctcaagcttctttgcccatttcttattgggctaatgtgtttgctacagccatgcaccttatgaatgttcttcccacgaaggtactaaatagtgtatctccaagaaagaagctcttcgatcacaaacctgattatcatcagcttcgtgtgtttggatgttgttgctatccacttcttcgatcgtataatcgacacaagctgcagtatangtcagcaccctgtacgtttattggttatgcttcaaatcacaatgggtataaatgtgttgatcgatctagtcatgtttacatttcttgacatgttcaatttgatgagaatggttttccatttgttc

SEQ ID NO: 47970 - DNA, 642 bp, Gossypium hirsutum
  unsure (1)..(642): unsure at all n locations
  Clone ID: LIB3582-057-P1-K1-H2
ccccgcgtccgcaatacctttaacttttngaaataaaactctcctccaaaacccaccatgcctcaaatttaaaacttctaataattcttctcttctcctcctgtttggtagtaatgagcaacgaacaatngatcggaaaaagaatgagacatatgtctaacttgaaattccgggaataaagttatccactcttccgtagtcactcccctatccaaccgctcttggatattcgtttttggtagatttcttctttcccaagtgaaccatcttctagagaaacccaaatcccttagatcacaattctctaaaatcgttctaaatgcttccattctcccttcctctcgaagtaaacctcccttttttttcaaagctatacaaaatttcattaaaatcaccacacaccatccaaggcaattcccctccattacgcaaatttctcaacaaattccatgattctactttatttgaataaggagagccataaaaaccagtcaatctctaatttttttcctcctctgcatcctcaatttacacatcaatatgactttttaaatagcttttgtaatgacccaaattcacgggcatcgaaaaagttaatatcgggcctncgtcttagtaaattgagtccgaaaataatattag

SEQ ID NO: 47971 - DNA, 664 bp, Gossypium hirsutum
  unsure (1)..(664): unsure at all n locations
  Clone ID: LIB3582-057-P1-K1-H9
cagtgtttagnatctcatctctatcctctttaaacaatgctgaggttgaagggaaccttggtttccccattttcctttttcgcagttttcagcattattcttgcttcccccaccttcctcagtgtcgaatcttattcacatcgccatgcttccaccgtgggtcagttggttcttaagcacgacaggaagctcttaactcagacagaacatggagaaatctcagccgctatagtcactgatggaacaaaaggcccataccatcttcaattcatcaccctggagcctaactccgtttttcttccggttctgctacatgcaaacatggtttttttcgtccatacagggagtgggactttgagttggactgatgatgatgatatgagggatgtgaaccttcggaaaggagatgtatataggttgcctgaaggatcggctttctatgtacaaagcagcttagaggctgaaagagagaagcttaggatttatgctatcttcactaacgcagaagatgacatatatgagccatacattggggcatactcaagcattactgatgtggttctcggctttgataccagagtcctncaagcagcttttaaagtaccccgagatttgatagaaataatgagagcaagcaagccacctgctataattcatgcagtgc

SEQ ID NO: 47972 - DNA, 519 bp, Gossypium hirsutum
  unsure (1)..(519): unsure at all n locations
  Clone ID: LIB3583-045-P1-K1-B12
gnctagttctagnacgcgatctaggactagtgtggaatattgctggaagttgtgcaaatactaactgacctcgacttcactattactaaagcgtacatctcctctgatggtggatggttcatggatgtgtttcacgtcactgatcaacaagnggaaaaagatcactgatggaagaacagttggttacatagaaagggctctaggacccaagggccatgcagctgacgggatgaaaaactgccctggtaaacgtgtcggggtgcactccgttggtaatcacactgcaattgaactcgttgggagggacagacctggtctattatcagagatctctgctgtccttgccgaccttcaattcaatgttgctgctgcagaagtatggacacataataggcgaatagcttgcgtgctctatgtcaacgattattccacaaatcatgctgtgcatgatctaaacagactgtctattatgggggagcagcttaagcatatcctgcgtggtagtgaggatgacgacaa

SEQ ID NO: 47973 - DNA, 616 bp, Gossypium hirsutum
  unsure (1)..(616): unsure at all n locations
  Clone ID: LIB3583-045-P1-K1-B9
atgtaaggggnaagttagggnaactagnatatataatgatgatggttgacacacatgtatgtatagaaacataaggagttagggtttttctattaattgtcctccaaaatttgttgaaacttggtaatctgctcgttaagcattttaaggactatagggactaaatcttaattattttagcaccaagcttaagttgttaccaagttattctaattgtttggctaatatatattgtattgcttgcttattaattgaatggatctgtcactcagaaaatatttctgtgtagagtttgctttgaggaacaaatcagggtagttctgcttccttgtagacatcatgttctttgcaagtatttgcatctgcccttctaatactgacaatgttattttccattttggttgttttctcagtattggactattgtttaatgcaaatatgtctatgaaagctttggcttaggcatcatatatactcataaatatattattatggtatttacatgagttgtagtggcataaacatatttttggcatatggtgtggaatattttcatttcttatcaaaagatgtggaacttgttttctttaattattaataatgtttcttctttttt

SEQ ID NO: 47974 - DNA, 607 bp, Gossypium hirsutum
  Clone ID: LIB3583-045-P1-K1-C9
ccccgcgtccgctctcaacctgttattttatttctcagtctgttctttgatttcccggaacctaaacacctagtatcccgacgcctagctactctacccagcagtgaactcagtcttagcatgttggcaagaagctatcagaactgattcgagatttaggtggcctaacatctggaactgaacaaggcaggtggcaatctgaacttgctcatgtggcaattaagctaattgctgaaaatgagagttgaggaactccatggattaaatattgaagaactacagcatctaaaaaaatctctagaaattgggttgagccgtgtgatggagaaaaaggtttaatagacatgtgcatgttcttgatgtgtttgtttgcaggcttacatgcatctgtttgcatgtttatattcatatctcttctactatgtcatcatactcatgtttcaaatggcatttagtcaacataatcaattaccaatatctcacttgttgtaaaataattagtttaatgttgtcgtaaattaaaaacaaaaactatttaggctttgataacttcaatgaattaatatctcttggtttggttatgtttcattatattcatttgatttta

SEQ ID NO: 47975 - DNA, 557 bp, Gossypium hirsutum
  Clone ID: LIB3583-045-P1-K1-D10
aatgagcctgcatgctgctagggcttcattcagcagccgccaaacccaccatttgatttggtggtcgacagtgcgcaagcggaggccggatcctgctgaagaaagctcgcccgcggtggttcggtgagtttacttcccctttcctttttcttttaacaaaaaaaaaacttaagatcctacgctattctatcaaacaagcgaaatacaacaaccgaaaaaaacaaagaaaaacaaccctcgcccgaatcaccatattttcgaaacagatgggctttcatcggtgttgtttcgagtgttcatttcgtttgtgttaatatcataaggaaaatgagaagaaagatgaaaaagggtaagcagattcgaaaaatcaccttctttgcttttgtattgtttcgtattgctagtgaatatgttcgtaaaatgtctaccctattacaagattaaaatctggctttttatagccgaaaagaaagaggaagaattaacaaaataaataaaaatacaatgttttccttttgtttgcatttgctgttgttttcgtttgtctttttgcaggt

SEQ ID NO: 47976 - DNA, 588 bp, Gossypium hirsutum
  unsure (1)..(588): unsure at all n locations
  Clone ID: LIB3583-045-P1-K1-E8
ctgncatcatctaccctgttcttctacaaacagtgatcaagggtgaccctcgtatctgttcagcaaaaattatctgggttaaccctgatgcaacaacttggataagaaatccaagtaagactcagaagggtgaattggctttggaagttgttttggagaaatctgctgtgaagcagaactgtgatgcctggaggactgtcatcgattgttgtcttccagtgctaaatataattgacacccataggtctataccttatgccataaagcaagttgagcaactgctcggaatttcttgtgcttttgaacaagcagtgcagcgtctctccacttctgtgtcaatggtgacaagaggtgttctaaaggaacacctcatgctcttagctaacagtatgacatgttgtggaaatttaatcggcttcaactctggtggttataaaacactatctcgctcattgaatattcaagtgccatttaccgaagcaacactgtttacaccaagaaagtgtnttgaaagggctgctgagaaatgctatgatgattccttgtcgagcatagttgcatcctgttcttggggtaaatgtgtggctg

SEQ ID NO: 47977 - DNA, 621 bp, Gossypium hirsutum
  Clone ID: LIB3583-045-P1-K1-G12
ccccttcaaaccatacgcctttaataccatgtgctgtgattaactcacaaacaccttctcactttcctttttttttcaacttataaacttcgagatctccgtacacaaaaagatccaagggtctgttcctttccccctaacaaattttgggtatcttttgttttgttctataggatgaagggcgctctagtttcacgcagtggaagagagttcatcaatggtggcctcgagcttcctgactcagctaccgtggctgatctacaggaggcaatttacaagagaactaaaaagttttatccttcaagacaaagactaacagtcccagtacctccgggatcaaaggagagacctgtcgtccttaactacaagaagagcctcaaagattactttgatgaaaaacagaacaagttaactgtagtgttcaaggatctgggtccgcaagtatcatatagtacacttttcttctttgaatacttgggtcctttgatcctctatcctatcttctactactttccaatgtacaagttctttggttatggagaggatcgtgtcatccacccagttcaaacatatgctgtatattactggggtttccactacctcaaacgtattatgggaaca

SEQ ID NO: 47978 - DNA, 607 bp, Gossypium hirsutum
  unsure (1)..(607): unsure at all n locations
  Clone ID: LIB3583-045-P1-K1-G7
nttgcatgcattgcatttatcaattaaacgtctctaaattttgtaacttttgcatgnngtaaacttganaacaatttgggtgtttactgttcgatgataacagnaaatgtgntaaaatatatataacataggcataaatactaaatagccattgtggtctttgcataggaaaactactatgactcggtttggcctaaacatataaattctgctaatggctggaacccttgatgcataaatcgatttatacttagactcatggattatagttggaattagtgatagtcaccatcacatattttatttataagtgatgaaatggactttcatacttgcatcaatattctgcagtgaatttgattttgttactatggaattttaattattgcttcgagtatgtgtcatgtagtttcagttttctgaaacaggctttgatccttgcccgacttcttgggaagtgcattgacttaggtagcataaaggttagtaccggaactctctattgctttgaagttgtaataatcatacccctttttctctcggctgataattatatccattggggaattaaacgttatgcgggttaatattttgcaaatcttgcaaa

SEQ ID NO: 47979 - DNA, 484 bp, Gossypium hirsutum
  Clone ID: LIB3583-045-P1-K1-H9
cccagcgtccggtctttcaacaggggtgcgggggctggggaaattccatcaaagaaagtgtccattcaagatagatatcgggcctgtctatagcgttgatcctgccaagaggcatgcttatgcgcaaagtggcgacaatgttttcactccagttgagagagaattggtttttgatgtgggtgagggggttatgatgatgttagatattgctgcacgggagcttatgtttgtttggtaatgctggcctctaatgacaattgcgattaaagttattgttttttttctcagagatgactttggctttaatcatattctatgggtatatagtggtcgtcgtggtgtgcattgctgggtttgtgatggaaaagccagaaggctgactaatgaacaaagggcggctattgctgattatttccatgtatacaagggcaatgaaaatagtcaggaaaaagatatctttacctggtcttgttcttcatccttt

SEQ ID NO: 47980 - DNA, 577 bp, Gossypium hirsutum
  Clone ID: LIB3583-046-P1-K1-A12
cggccgcgtggggcaaccaagattgtaacctggagtcttggttgcactgcttcgattaggcaagtctgcatcaagaggaatgtttatagactcttgctttgcccattgccaaactgagatgcaagaattatggtttatgcaagactccccattgttgaataaaaccaaaattgggaaggcagtgggagactggttttatgataagaaaccgttccaaaagatagattgcgcttatccttgcaacccaacttgccacaaccgtgtttacgatgatccgcatgcaccccattcataaacatataatagatatatagtagattatacattttctcagcatgcagttcatattcatactataattacatacatacatacatacatatagcgtagaagtataatttttttggctatatagatttaatattcatcattaattcatcattaaatgaaatttagcattggtcaattcctttgaataagcaatggccaccactgcaccaaacttgtgtgctgggttggcttcatttgtctattggatattattattcttaataaatcaggttctttttcttttaac

SEQ ID NO: 47981 - DNA, 562 bp, Gossypium hirsutum
  unsure (1)..(562): unsure at all n locations
  Clone ID: LIB3583-046-P1-K1-B7
ccccgcgtccgccccgcgtccgtttgttttcctttcggaaattcatacttcaaaggttttnaaaaagggaaaaaaatctattaatctctggaaagttgttttaattaactctaatctaatctctgatttttcctttttaaaatttttttggaagtgatttttttgggaggtcttttaatagatacggttagggtttgggtagaattaaagaatctgggggagaattgaatttttgcgagtgcacgcagatatggtaactgcagtatccgctacggtaatctctaaacggaacggaggaggaccaaggccacggtcacagccacagccacagccacagccacaaccacggccacggcaacggcctccgttattaccctccgaccccgataatgccatcgttccacgaagtctaaaattccgagaagttacttcccgttatttgtccacgtcatcatcgtctaattcgtccacgtcatcgtcttcgtcttccggagcttacactaaaccgtgtccgtcgccgtctggttcgaggactcctactgttacaacgccgtcggtttgc

SEQ ID NO: 47982 - DNA, 505 bp, Gossypium hirsutum
  unsure (1)..(505): unsure at all n locations
  Clone ID: LIB3583-046-P1-K1-D11
cccgggtncgnaccccactgccgtccgtcccacgcccgtccggttggcactggattacaggggtgtgaccacaagccgctttcccttgataatgtatatagttctggagtacggngaaaagaatgtcaaagtaaaaccattgcaagatatgctattggaagaacccgagctttctagattaggaaggataatgagacgccactgacctttattgggatgtagcattgcatttacatgttcggtttgcagtgaccattcagaaattttgctgtcactaccctgttgctagttcttttttcccctacttcgatctgctcaagtcttttatgatataattaaatgtaaaaatatatgtagtagtagaagccaagacaggatattgtaaaattgatcattttgtttttaatgaccatttgttctcatcttttttcatttttcataaatgtgtccaatatatatttatgtactttatatacaagatattagagtatgatgtttttaatgt

SEQ ID NO: 47983 - DNA, 579 bp, Gossypium hirsutum
  Clone ID: LIB3583-046-P1-K1-G10
ccccgcgtccggttaaattgatattggtgaagtcctgccatcagtgcacttcaggatcggctaaaagagaatgaaattcggttagcattgttgacggatgaagctcagatgttggagaccgaagcctccaagggagtggaccaagttctccacacacagtgtcacatggattccgaggaagcgcttcagttggccagagagatttgcatagttcagctgaacccatcagcatgaggacattttctggtcctgagagcagaagcagaaagcggtcttaataaaatttctggacctaaccctcttctccctgcattttgttaaacatgttttggggtttatcggaggagcatctgcaactcaattggaggtattgaagttcaaaacagtttgtaagagagttgttagtgatggttgcctccgtaggagtctttgaggaaacaaacaatggtgatgtactgtaaatagtcttgtttggttgtgatgttgcagtttggggagtttcgagtatcatgttattgacgagggggaagcagatttttgcccttttcttggttttatgtgtatttttccttaaatgta

SEQ ID NO: 47984 - DNA, 544 bp, Gossypium hirsutum
  Clone ID: LIB3583-046-P1-K1-G12
tattagcttgtacatcgtgtgcggaaggagcaggaagtttgatgatggaggaattgaagggaaggaggaagagaagaaccaggagaaagagaggaagaggaggccagaagagaatacggaggaagaagctaagaggaaagcgtaagaagagcccaaaagagaagggatgaagaagaggaagccagaaggagagaggaagaggaagaagctaagagaatagaaaaaaaggtaggccagatggagagaggaagaggaagaagctaagataaggagagaggaagaggaagctaacacgaggagagaggaagaggaagaagctaacagaagagaagaaaaggaggccataatgagagaggaggaggaagaacatgccaggaggagagaggaggaagaacaatctagtacggaagaggaagaggaggccataacgagagaggcagaggatgctcgacagatagatgatgaagagggagctacaagatgggtgacaaataagacaagagaataacaagcaggaaagagcatgaggaagcttggaaacagg

SEQ ID NO: 47985 - DNA, 547 bp, Gossypium hirsutum
  Clone ID: LIB3583-047-P1-K1-B10
atttggaattgttttgcgaacctgtgtcagaccagcctcagaaagttgctgttgatctttaggcttggtactttgcacaaaacttcctattacatgaatggatatactgaactcttgctaccaaaaaaagggtgaagcatctaaacatactaccatattttctcaaatattttgtttgagcatgacctaatattttgtagacctccgttattgcctgctgttttaactcaccttatacattgaaagtagagatctcttcctctttgaaggcaactcatatcgcggggaaactcatgtgttgaaccctcttttatgtaaaactttatgtacttgtattagttgttttcttctttggcatctcttggatcggttatcgttatctttatgtcattcgatttcttggtataatgccactcttagtttcgatggtataaggtttggtctttggcaaactagaatattctcacaccgtcaggattggatatctgctgaatcagttcaggctttcatttcatcctctacgatctgattcttaacgaggatcata

SEQ ID NO: 47986 - DNA, 482 bp, Gossypium hirsutum
  Clone ID: LIB3583-047-P1-K1-C10
cccacgcgtgcgcaggcgcgtgggcgggaaatgctcactaatctatgaaagtttttggcaatgcttcctgtagatcccaagcttgggaaaatgctaatcatgggtgccatcttccgttgctttgatcctgtattaacaatagtgtctggacttagtgtcagggatccttttcttttgcctgcaagacaagaaggatttagctgggacagccaagtctagattttctgctgaaagactacagtgatcacatggctcttgtccgtgcttatgaaggctggaaggatgcggaaagagaaggatcagcatatgagtattggtggagaaacttgctgtctgcacaaactctgcaggctattcattctcttaggaaacagtttggttatattctaaaagaagctggcttggtagatgcatatgtagctgcaaacaataaattaagtcacaaccagtctctagtgcgagctgtcatatgctctggactc

SEQ ID NO: 47987 - DNA, 586 bp, Gossypium hirsutum
  unsure (1)..(586): unsure at all n locations
  Clone ID: LIB3583-047-P1-K1-C8
cggccgcgtgggcggccgcgtgggtgctgaagtgggaancagaaacgacatgctctcgttactacccatctcgacaccagctcccccgcataaatctgtggttgtaggtgatctgaaaatggcagatttcaagcagtttcttgccagtaagggtgtcaaggtagaatttgctgcaggggcgttgcgatgcggtgaatacgtgacattacgcaaagttggggttgcaagccaaagggtggtggttctggtacacagcaaatcataatcgaaggtcccttgtgcgaagattactacaagatacgggaatatctatattcccagttttatttactttaggttgtggaatgaaataatacacaatgcaatagagtatggaaagcacagctttggtaaggctcagaaactaattaactttgtttgtcagtagcataccatttttggttgaatgtacaatttgtttacccaactaaattgtatggtttttaggttgctgtttgttaacctttttgtcattacttaagaggatagagctagacacatttatacgtattttttgtatatcctttttattatgacattagtttag

SEQ ID NO: 47988 - DNA, 357 bp, Gossypium hirsutum
  unsure (1)..(357): unsure at all n locations
  Clone ID: LIB3583-047-P1-K1-D12
gttttaaattctttttattgttgtgggtagttagtgcgcttgatttatgttgtttagagatggtgaatttaacagaagtaatatagttgatgtcagtattcatgtctgtggaagaatgattagaagagttaattataacaagagaaatggaaataaggtacaattcactncnttgagggtcttgctctgggcgttnaacaaaactccaccantanggttatctttgccgatagatttatggatgaatgccttctggactgttttctatctcaagaatctttaaggctgggaggcccacagtgtaatcttcatggaaaaatccaatgattttctgaacatccctccctgttttttttt

SEQ ID NO: 47989 - DNA, 602 bp, Gossypium hirsutum
  Clone ID: LIB3583-047-P1-K1-D9
atggttaagcaggcacaaactgatgaaccgatttgggatacgagcttggaaggtgggagagaaatactaaaccaagatgtgtacttgaggactttcactccttgcattggtatgaaatccaacggctttgtcacggaggcttctagagaggctgggatggagattatcaacaggatggcccttggtgaaaccttgatggactccaatcgggggtcggagatgtttccatgtatgattgccagaacatcaacgactgctgtgatatctggtggggtgggaggaaccaggaacggagcacttcaactgatgcatgctgagctgcaagctctttctcctttggttccagctcgggaggctaatttcctaaggatctgcatgcaacacgtaaaacgggattgggctggggtcgatgcggccgttgacaccaaccgagacacttagcgtgcaccctcatttgcgaactgcaggaggctctcttctggctgtgctgcgcacgatatgcccaatgactactccaaggtgacatggatggaacatgcagaatatcatgcgagccatgttcaccaactctaccacccattgctaaaatcggggatggcctt

SEQ ID NO: 47990 - DNA, 612 bp, Gossypium hirsutum
  Clone ID: LIB3583-047-P1-K1-F10
agtgactacaactcttcaaatgttcaggaagattttctgacactggttcacaaagataccatcttagttgggcactccttggagaatgacttattagctttgaaaatttctcatgatctgataattgatacatctgtaatatacaaacaccctcgcggtggatcttataaaagtgctcttcgagttcttgcgaagagatttctttctcgggaaatacagcagtcggggagtggacatgatagcattgaagatgcaagagctgctatggatttggctctgttaaagattagaaatggacctgattttggttcgccaccatcctttatgcgtaggaagctccttacacttctgggtgattgtggcaagacctcctctttcattgatgatgtttccatagtgaagcgatatgcttctgagtcatcccatgcaatcccagtttgctctgatgatgaagcacttttaaaggctagaaaagaggtcaagaatgaccgtgttcacttcgtctggacacaattttcagaattgaattcctatttcagaaaacaagctgaggatgacgtaaagttgaatggaaagcttgcagaaatgatatcattgcttacatgtgataag

SEQ ID NO: 47991 - DNA, 272 bp, Gossypium hirsutum
  unsure (1)..(272): unsure at all n locations
  Clone ID: LIB3583-047-P1-K1-F7
ttttaggtttacagtcgcattgtgtgtgtgtgggctatggcaccacttgtaatttgaggttatgcaattttgggcccctggnnactgtttaaaacttggactttataatancttttattattaatttagtctctcaaaaaaaaaaaaaaaaaaaaaaaaaaaaaaaaaaaaaaaaaaaaaaaaacagtgggtggggggggggccaantttccntaccncttccatgccacctcttttctcttctatagtgtcccctaaattttcttctttgg

SEQ ID NO: 47992 - DNA, 162 bp, Gossypium hirsutum
  unsure (1)..(162): unsure at all n locations
  Clone ID: LIB3583-047-P1-K1-H12
tgttctccaaaatgtttctgtnatggtggtttatattcaaaaaagagtggagcatttacagaagtatttcgtacttgaatagttctgaattcattgaatcctacatggataacaaagtatacaattacttatcaatttattattatccaaatattactattt

SEQ ID NO: 47993 - DNA, 568 bp, Gossypium hirsutum
  Clone ID: LIB3583-048-P1-K1-B9
cacaatgctggagatctggttcatcaatgctctgatgaagggtataagcaagaaactaacttggtgaatgaggaggagcctcaaattgcaacaccatgtcaaaattcatgggttgaggaattgaaacagaaaatagatagcacagtacaaagtgaagagaaaaaggaagtaatgggtagcatagtggaaagtcctaggttaaacaaaccagaagaaactgctccagaagaagaaatggaaactctttcaaaggggtctcaagatgtgaaggatttatcacagagatcagagaatgtcatagaaaacactccaaagatcaaagataaaaacttaaaattgggtcaatctgcaaaatctcatcagatcacggcggtgaatatggagaggaatgattcgaggataaagaagaaacctgcctcccctgtgactaaaacaccacaagtttctacatctagaacatcaaagcaaacactaacacctaccatgtcatctgcttcgagaacacgttcaaaaactggaactacattatcttattcttcacccaagaccaagaatccatcagtggagc

SEQ ID NO: 47994 - DNA, 543 bp, Gossypium hirsutum
  Clone ID: LIB3583-048-P1-K1-D10
cgcaatctaagatatccatgaatgtaaagagcgggctgatgcctttgcagcatttggagcacttagcaactatggaattggggcacataaagatgcttttcttgagcagattcatgctacactcccacgcttgatcctccacctacatgatgatgaccttgctgttagacatgcctgccgtaacaccctgaagcggtttgcccctttaatggagatagaagggttgctggctttatttgattcacataggattaactctgaccatcgaagtgcttacgaggacttcgtaagagattttacaaggcagtttgtgcagcatctttcttccagagttgatactttcatggcatcaaccatacaggctttgaatgcgccatggccaataatccaagcaaatgctatttatgtttccagcagcattctctcgctttcggatgatccgagcattttggctctttaccatgcacaggtgcttggaatgttggttggcaagatgagtcggtcggcagatgcggtggttagagctagaagctctttagcttt

SEQ ID NO: 47995 - DNA, 578 bp, Gossypium hirsutum
  unsure (1)..(578): unsure at all n locations
  Clone ID: LIB3583-048-P1-K1-G7
ccccgcgtccggtaatgtcagcgccaaattgcaaaagctgaagctgtttcacgtcccactcgatatttggctattgccactagtggaggcttgaaccaacaaanaaccgggattacagatgctgttgttgctgctcgcattttgaatgctactcttgttgtcccaaagctggaccaaaaatccttttggaaggatgcaagtaacttctcagagatctttgatgttgattggttcatatcatctttgtcaaaagatgttaaaattataaagcagctgcctaaaaggggagggaagagttggactccgtacaccatgcgtgttccaaggaaatgtagtgaaagatgttaccaaaatcgtgtattgccagttattttgaaaaggcatcatgcagttcagctcaacaagtttgattacagacttgcaaacaaattggatacagatttgcagaagctaagatgccgagttaactaccatgctctgaagtttgctgaccctattctagaaaatggggaaaacacttgttcatcgaatgaggatgaggagcaagcgttatattgctttgcacttgaggtttgagc

SEQ ID NO: 47996 - DNA, 604 bp, Gossypium hirsutum
  Clone ID: LIB3583-048-P1-K1-H8
ccccgcgtccgggaacagcagcaggtgggaattacgcagcatctggtattgacctaaaacctgctggtcaagagcgtcaaatcagttcagcctattacagtatgccagctggtgtatcaactgatgagaatgctgctgatgttggaaatgtaacagctgaagctcctaaggctgctggtgtgcagttctttagatggaaatgttgtcaatgaagcaggaaatgccacaacagttgagaatggaaacactgttgataatgtgggtggagcttctgctgcacctgagtttgtggatggttccgcaccgcctatgtcttgtgaagaggatcggttgtggagtattttgagagctaattcattggattttaatgcttggacggcattaattgaggagacagagaaggttgcagagaacaatatactgaaaattcgaaaagtttatgatgctttcttggctgagttccctttgtgttatggttactggaaaaagtatgcggatcacgaagcacgcataggctccatggacaaagttgtggaggtttatgaaagagcagttcagggggtgacttattccgtggacatttggttgctatattgttcatttg

SEQ ID NO: 47997 - DNA, 603 bp, Gossypium hirsutum
  Clone ID: LIB3584-008-P1-K1-A4
tctttggtagcgtgctgtaacaatacatgtctcaggatcaacaggtaataggttgcaaggagcagcaataactataaaccaagtctcaaaggattttccatttggttctgcaatagcacacaccattcttgggaatttgccctatcagaactggtttgttgaacgattcaatgcagcagtgtttgaaaatgaactgaaatggtatgcaacagaaccagatcaagggaagaccaactacaccttagctgaccaaatgttggagtttgttagagcccaccaaataatagccagaggccacaacatattctgggaagaccccaagtacacgcctgcatgggttcggaaccttacaggccctgacctacaatcagcagttaattccaggatacagagcttaatgagcaaatacaaagaagaattcatacactgggatgtcagtaatgagatgctccactttgatttttacgagcaacgacttggacctgatgcaaccttgcatttctacgagactgcacatcaatcggaccctttagcaaccctgttcatgaatgaatttaatgttgtggaaacctgcagtgatgttaaatcaacagttgacactta

SEQ ID NO: 47998 - DNA, 507 bp, Gossypium hirsutum
  unsure (1)..(507): unsure at all n locations
  Clone ID: LIB3584-008-P1-K1-B10
gcgnctgccccgcgtccggtttctctcaatcttgatgcagggtgagggagcaaacctctgcaaatctgggataaagaagttgaaaatgggcatgttaaacgaccccatgatgatgacattcaatcgatgtgctggaaataattggatcaaatattcaatcaacttttatcacttgcccagctgaccctgctgcaacgctggttttttttcttccgttcttggttatgattgttaaaaacttgaagaaatatttctcttttgagatccaagttctcgatgataagaacgtccggcgtcgttttcgtgcttctaactttcaagtatgctgtcactcgagtaaagccatatatatgcaccatgccactgagattggatgagggttggaatcaaattcagttgaatctggctgattatactcgaagggcctatggcacgaactatgtcgagactctacgtgttcaggtacatgcaaattgccgnctaaggaggatatatttctctgatcgc

SEQ ID NO: 47999 - DNA, 329 bp, Gossypium hirsutum
  unsure (1)..(329): unsure at all n locations
  Clone ID: LIB3584-008-P1-K1-B12
tcccgtttcgacccacgccctgtttgcaaagccaagaaacatagcgggcttaaggcnaatgggggctaaaaactaatgaagcatctanaacaccacttgagatgaaggtatctagttctgctatgggtacaagcattggtccagttgttagcaaagtagaacgtgtagacttgtcctgcaaggcctactcccanacttaatggggggggggggtttttttttttttctnggaaagccaaggaannnggaacaggggggggagaaaaccaaaacnngggaaccaaccgaganngnngacgccacacaangncgaacagnggccangccgg

SEQ ID NO: 48000 - DNA, 588 bp, Gossypium hirsutum
  Clone ID: LIB3584-008-P1-K1-D8
gcgttcgccccgcgtccgtatttttttgttattattattttatgaaatctgaactttaagctattgtaaatatgaaatcatctataatcataagtcagtgcaagaaatatagtgactgctgtaatggccctttgttggtctagtaaaatctgacattttgcatgtaccatcatgtctgtcatgatattaactattaagatctggtggttggtagcttttatgctggacattgcttattctctgtgatttcatagtcatgctaggcccatgagcggtcaattaaccaggcacatacaaaagagttgcttatgaaggttagggtaatagttctaagtatttacttataaaggtatttgctaaagtcttgatagcttgttgagcattggacatgttttcaattccaataagataaaaagtatatgtaaatgataaagcatgaatattttactatatcctgctgaaagcatcagaaggcttgtgcttttttatgagacttggtgctgaacctcacccttaagctaacgcgtaagctagcttacagttagcgtctgtgcttgtttgttggggtttggttgaggtaatttgttc

SEQ ID NO: 48001 - DNA, 627 bp, Gossypium hirsutum
  Clone ID: LIB3584-008-P1-K1-E7
cggccgcgtgggctctattggttcatatatagcactaggaatgctaaggaggctgccagagaaggcaatgtattgcattggactctacccatttttagccttaaatctgcaatcaaagaacaggctgtcatcgtgaaggttattatgtccagagtactgtccactatggttacactttttgtggcatcgttgagcttgttaccaagacaggttttgaggctaatttctgaactttcgaatgggaagtcatggtctaatactgcccacgaagcttgttgctctcacttaccacagtatcatactatacacaatgtgctatatatggccaggacggagttcataaagctttcagaaacaccagattgggaatttatgagagaaaaccaggagaaaatttcattcttgtatggcattgatgatcactggggtccattacaaatgttcgaagaggtctctaggcaggcctcaggaattgctctatcaatagaaagggagggccacactcacggtttttgttgtacggaggctggctccatatgggttgctcgccatgttgctagcctgataaagaacaaattagccagatgatgccggtaagatcagtcctataattattgcattattttg

SEQ ID NO: 48002 - DNA, 323 bp, Gossypium hirsutum
  unsure (1)..(323): unsure at all n locations
  Clone ID: LIB3584-008-P1-K1-F12
aaaaaaaaaaaagaagaagacggggaaagaaggcaancacaanagnnnnctctttgaagacaagnagnagcagcaanaacaaggaagccccnccaaaaccagnncttaaaagtgctcnnaanagaccnaagccnacgggggggggggggggttttttttttttgnaaaagcncnngngannnaagaagacaacaagagccncagagacacaagnnaccgaggcaangcanaaganngcgncacanancaagaaccccaccaagnnnncnaaggcggcaaagcccgccanacagnnganacaggccggaagngggaaggggggg

SEQ ID NO: 48003 - DNA, 513 bp, Gossypium hirsutum
  unsure (1)..(513): unsure at all n locations
  Clone ID: LIB3584-008-P1-K1-H4
tgctcaatgcaaagctcatcaccccaacgtggatggggggtggtgagctactaagaaaaggtgttangagaattaaatattngaaccatatnngatgaggatcaagggacannggggatttgcgatacccgttcagatggctgttacaacacacaatactgcacttccggctgtcgaaagatatagaaatggtggagtgcaggttgctttagtttggaattcaagaaatgagaagtcctcaaattcggacaaattaaatgccttggctaattttttgtggagaaatggtgggtcaaggagtaaactccatttgatccattctgtgtgggctaattttcagacatctactaacaatataatttttgggaatagatggagacatcttttgggggaaagggatttctgggagcatgttggggggattgatatatccttggatccctccagtttcggccaagcaaacacacggggcttttgataatttgctttcggagttacacaaatatgttgcct

SEQ ID NO: 48004 - DNA, 430 bp, Gossypium hirsutum
  unsure (1)..(430): unsure at all n locations
  Clone ID: LIB3584-009-P1-K1-A1
gcgttcgcccgatctaagcaggggnaaaacctgctggngagnacaaactgggattcgggaaaccaccttcacctaatctaagtgggcttaaaagaaccccagaacatcatgttgaagattcgtccagatcgcatcataaggttgttcagtctcagcagcaacagctgtcaaggtttgaccgtccagaagttgggtcacagtttaacagattggcagataacagtaaaaccaaacaaacagaaattggcgcaaaactggaagttgtcctggaggattttggtgaaagccataagaaagcaccgactagtgcaccacaacagcaggaatccaaacgaggatcagtgtctcagttcataaaggaaagtaagataccaacgtctaataaaatggcggatatggatatgactgnttcacgtnnggatgcagtttt

SEQ ID NO: 48005 - DNA, 196 bp, Gossypium hirsutum
  unsure (1)..(196): unsure at all n locations
  Clone ID: LIB3584-009-P1-K1-A12
acctgttgcagacaaacatccccgtggtgtgggggagggaggaaaggggaatnntctgctgtcattaaccctcggnaaaatatgnntctagggaaggctccnngtctcccagttcaggggaagcggagtttggtgaagcagtgngattcaaaggggncctagtaatttgtgtactcagataaaagtgcccgggact

SEQ ID NO: 48006 - DNA, 632 bp, Gossypium hirsutum
  unsure (1)..(632): unsure at all n locations
  Clone ID: LIB3584-009-P1-K1-B12
aaggggcacaatgctaacgaggggcggggggggtggganaacacctctgcatatagctgcatccaaaggaagtgagaattgtgttctcatcttacttgatcataatgcagatcctaacattaaagattcagaaggaagtgtaccactatgggaggcaatactaggtggccatgaggggatagcncgggctactaaaagacaatggggcaaacatcaatgttggtgatgttggtcattttgcctgcatcgctgccgagcaaaacgacttggacttactcaaagaaatcgttcgttacggcgggaacgtcatgtgtcctaggtacaacggttacactgctcttcacgtcgccgtatgtgaaggaaacgttgaaatagtgaaatacctattggaacaaggcagcgacatcgataaacgcgatatccatggttggacaccaagggacctagctgcacaacaagggcacgaagacatcgagacgatattcaaatcattaaccgaaaagaagaaaactcaaccaatcatgactatcccagagaagcatgaagtacgtttcctcggaagggttacaagcgaaccgggcatatccacggcaacctctggtgatgggtttggatggatcatcaagaggcaa

SEQ ID NO: 48007 - DNA, 281 bp, Gossypium hirsutum
  unsure (1)..(281): unsure at all n locations
  Clone ID: LIB3584-009-P1-K1-C9
aagnaacgttcttcttttttcgaactttccttcacttaagatacatcactgattatcaaaaatgaattctctgcaagcagcttgagtgagatattgcaggcacttgtaattgtatccatcaaaatggatttagtgcccttttttttttttggtttttttgatcaataaaatatacaacacatttttctatattttcgtggtttgttagtggattctgtacttggattttgttgtgttctgaggttgaagcaatgagcaatgagtttggataatgttagatc

SEQ ID NO: 48008 - DNA, 155 bp, Gossypium hirsutum
  Clone ID: LIB3584-009-P1-K1-D4
gcgttcgattaatggcggatgttattttcaggattttgaagtttacgttttcatggtgctcaaactgaatcatggggtacatatggtttcaatgttgaatggcaatgtaaatcaactttgtacagttgaaagcttcggaccaagtttcaggcaac

SEQ ID NO: 48009 - DNA, 696 bp, Gossypium hirsutum
  unsure (1)..(696): unsure at all n locations
  Clone ID: LIB3584-009-P1-K1-E7
gcgtgggcnggacgcgtggggaaaaaaaaaaagaaaaaaaaaaaaaaaaaaaaaaaaaaaaaaaaaaaaaaaaaaaaatataaaaaaaaaaaaaataaaaaaaaaaaaaaataaaaaattaaataaattattttataaaaaaaaaataaaattcatattttttattaataaatttaaaatataaaaataagtggggggggggggggttttttttttttcttaatctccttaaattaaaatccttttttcgccgtctgaaacaatagttatttggcaaaaccctgattgccctttacaatatttgtgtaaaataaatgcccttttggacgcgtcttgtttttgctatttaaccccgtcttttgttgttttttacgcgttgcttttcctttacttttaacggggcccttccttttgttctttttttttttttgcgtttttttttgtgtttcctcgtttttttttcttttttttttttttctttggggcctcgttttttttttttttttttcccttctttttntgcctactttcgtttcgtttttcccgtttcgttttttttttcgttttttttttcctagctttttttttttttttttttttgtttctttttttccccttttcccttctctttttttctcgtacctcttttttgcttcttttcttttcttctttcccttttttttttccttttttttt

SEQ ID NO: 48010 - DNA, 618 bp, Gossypium hirsutum
  unsure (1)..(618): unsure at all n locations
  Clone ID: LIB3584-009-P1-K1-F4
agctactgcagnaacttagtgggtggggaggaactggccgagttggatcctattgagcttgagaaaagatgttagaagaagagcaagatgaccaagacgactcatcttcgtcacaaagtgaaatgaatattgatggcatgaaaaagctagtatctgatctcattgccgaggaagaaatggtgcaacgtgatggttgcatcgataaacaagcagcagcagaaagggtacgtaaaaggttggattcatggaaagatgtagagtcgaacaccattgacatgatggtggaacaagatttcaaaagagctcatatggagggttggaagggaaatgaagaagaggttagagaggctggaattgaagttgaatgtgccatctttggattactgatgcaagaattgattgaagaactagttctttaaatgggaggttttgaatttaatggctaaaattntttgaagctttaataagtggttaaggattggatcttcgatctagatatggagcaactttaaaacttgtngttaacatctactcttttcatggaccgacaaaatgagaaggattagtcaatagacttgctcttgtggcttccttcagaaaccaatttttttttttttt

SEQ ID NO: 48011 - DNA, 561 bp, Gossypium hirsutum
  unsure (1)..(561): unsure at all n locations
  Clone ID: LIB3584-009-P1-K1-F5
tctccccgcgtccgccccgcgtccgccccgcgtgcggaaaaagaaatgaagactttcattgctatcctttttttctgctttcttctcctgtttgcaaatctcaaccatgcanagaaaagaaccaggggaatactggagaagtgtgatgaaagatcaacctatgcctgaagcaatcaaggggtgggcgtgaagatgaaacaggttcgggttcgggtgcggagatgaaaatgaagcagttcgttaaagatttcgacagccggcatagtcttataatatatcataacagtccggaatctaaacaagaagacacgacacatgctaaggatgttaaacacacgaaggaccagaaacaagataaaccagacagaaagaactaggaaaaacaaaaaaacaaaaacaaaacaagagcttgtgttaatggaggttttttcttttgtctgatgtgtatgcagctagtagtatttttagaggttatatatatacagtcagaaatactagctgatatctattgggattaaaatttaaacatggattatcaacatcgagctagtttcatttctt

SEQ ID NO: 48012 - DNA, 450 bp, Gossypium hirsutum
  Clone ID: LIB3584-009-P1-K1-G3
gcgtttttcccgcgtccgccccgcgtccgccccgcgtccgccccgcgtccgattttattgaagttggatgtggggtaagagatgatggcgcgtcaaatgggtaagatatttgattatgtattttaggaagttggagcaatggaggacgccaagaagaagatgctctgggctactatgaaggcggcggctgttgccaacatctgaaaaaaaaatggttttcataagttattaagttgaagattaagtccttttctctggtctctgtttggttacttgggtttaaggactacgaaagtccaaaactctcgatttcatcgaccatgattatttttgttttctaaattaaaatgatcagactcactagtagtagaaggatgacatttcttttactcgattgttaatttccttttctttttcttttttaaaaattaaattatgtttcttttatat

SEQ ID NO: 48013 - DNA, 559 bp, Gossypium hirsutum
  Clone ID: LIB3584-009-P1-K1-G6
actaacttgtatactttatatatatatcattacaataaatgttacagacaaaacaacacattcaaagtacctgagaccaaacattttctattcagtgacgatttctgttaaaccagatctaaaatgtccgggctggggggggcattctttcatatagctcttgcaacaaccacccatttctctcttctccacactcatacaagcttgcgctgtctcatggcttgtgttcattggaatgtctatggcagtgtgaggtgactcccaataatctgtaaaacacttgtttgaataaggatgagcctctggtttcgggctctctaaacaactatgctctacaaaggttcctaaagtttgacggtcagtatggtttccaccacaagtggaatgacaatgatcagcttttgtcccttgctgattagacgaatgatggcagtgcttttcccccaacttgccatggcttgaacaacatttactgggcaaattgtgggcctcaatcttgtgattgactatgttacagcttccctggtcacaatgcttcatttcacgtgtcccttgtgac

SEQ ID NO: 48014 - DNA, 486 bp, Gossypium hirsutum
  Clone ID: LIB3584-009-P1-K1-H11
cactaagccggggggggggggggggcaagataacacaccaaggcataccgacttcctaagtatcataccactgcacctgcccctaattactttaccgactatgaccaaccaccccactgaggaaacccatgaactatctcaaaaaaagcactatcaacaaataagggggggggggggttttgtaatttcgaagaggcctgtaccatacacgctgaagcaaatggcgacgtattaaatcacacatgaaccgctcgcgataagaagatcgccaagcacactggcttgcaaagaaatctcgcagtccctcacgctcgccaatccttgctctatctcgcagttctcctcaatgtctgctactcaaagagcttgctttagaccttcagccttcttctgagttgaaactacttgctccctaaaagagatgcaataatgtgtcttaatgattccttctggcctctgaaaaagcttggtttagtggtcagaatg

SEQ ID NO: 48015 - DNA, 550 bp, Gossypium hirsutum
  Clone ID: LIB3584-010-P1-K1-A7
tcagtaacaatggcaataaaacttacttgcgcatgactgagtcaatacagactcctggggatggctaatactgagcttcagtttgaaatggcaatgagagaacagataatccacaaccaaagagaggcacaaagaaatctttggaacttgatcatggggttgggactggatgagaaacagatatgggagggggctgccaagcagggaataacgattgaagattggacagtgacacgctatccggggctttcaaacagagggaaatcacccaatttggcatctggagggtatgctccattcagttatggtctttctataaaccaatggcgcagatcatcttgcatctaccagaatcatcaacgtgttgcttcaaagtcattttctcaagactgctgggacctgtctcctacattttgccgggaaaagcaccatagtttttactacttactagctcatgataactctccgccatgtgtcaggttcaggaggagttgtgataactgggtcagtggtggtcatccaatttcttggtttgggccccctgtttagc

SEQ ID NO: 48016 - DNA, 566 bp, Gossypium hirsutum
  Clone ID: LIB3584-010-P1-K1-B10
gcgtttttccagcgtccgcaaattaccttgggggggtgggggggtgttgaggttaaatttattatgtttttttaaaataaatgccaaattaacaaaatatgtaaacttagaggattaaaattgttattatacaaatcaaaattatgtatgaaagacagaacaccgtgatcaattgcccttaatggcgggggggggaaattaatagtaattaaaatgcttcgaatttttatatgatcaatttgttcaatttcaaaattaaaagagaccgaagtgattttttaccatattcaaattgataaccagtttttggattcaaattaaaactgttttaaataaaatttcatgttattgctttaacaaaaggagttatcaatttgtgttcaactaaagtagaagatgatatccttgaattgtagcatagtagagggagtaaaattataattaaacctttttttttatctatatgttgaattggttatcatttttttaatacagtattgatatttgtaacaaagcaattgaaaggtgtttttttaggtgtgcctgtatttttggagtgtttctct

SEQ ID NO: 48017 - DNA, 623 bp, Gossypium hirsutum
  unsure (1)..(623): unsure at all n locations
  Clone ID: LIB3584-010-P1-K1-B5
cgttcgtcatttctctacccgtaggacattttcctgtggtggctggggtgctgtgctaagacaaattttcttccacatgcttcatnnctccgttcattcacctccccntcaccatctcnncgttcgtcactctccgtcgacccgtcggcccttaccttctatnntttgaagaaacccctaaaaaattggcagngcacccagtcaagaaaagggggcggcgggggcagtggttctcntctctgtcatcaacagttggttgtggaaagaatgttggcttctgaaggaataaaaagggtagaagtgggcggagatgaatttgaaaaacaagtttgggagtggaaagagaagtatggtgggatcattactaatcaaattaagagacttggggcttcttgtgactagactagagaatgtttcaccctcgatgagcagctaaatcgagctattatagaggcatttattagacttcacgaaaaaggattaatttatcaagattcctcacttgagacctgcggaatacaagaggtctaggttacctaggaataggaggactgcgaaccgtgcctatggtggtgtggtatctggccgggccgtcagggagagggatatttgggcctttttgg

SEQ ID NO: 48018 - DNA, 642 bp, Gossypium hirsutum
  unsure (1)..(642): unsure at all n locations
  Clone ID: LIB3584-010-P1-K1-C3
tcgcccacgcgtccgctaagnataagatcgtgtttagccgatttgatttagtttttgcgttttctttgtctgaaatatgactagcgaagcttcatcttttttttttttaagatgtaattccctttgattgaacctgcatttcctacccatcttgagatataggcccattagtagtatttggatgtgcctattggtcataaaatcattggctaattgtttcatagtggaagtaagcttttatgtttgtattatgtatgcctgacagttatgaatctagaattgaaatgttcatgtcattgatttgtctcgagaattccacacttgctgtggctgattcagttggttaattttgtgatctgtaaacatgaaatattatgtctggtgcttattgcttgaagaatactgaataggtgtagagttttgtactttttgtgtgcaagtccatgtttgctattatcacatgatccatgatttatcaaacttctgatcctngatgtctgtgccttctgaaatgcatcagcctgtagcttgttgtctctccacaggtttgacttctgcattgctggccggctttttgtggctttggttttgcccctttgtctcggtcttctttttcctgtttgggtccttgttttggccctg

SEQ ID NO: 48019 - DNA, 606 bp, Gossypium hirsutum
  unsure (1)..(606): unsure at all n locations
  Clone ID: LIB3584-010-P1-K1-D3
cacgcgtccgnaaactacatgnaactaatgtaggataatagtgctgggnattaagggaaggnnggttgcggatnngttaagttttgagccgtaggcttaatnntggacctcagnntctgggataagnnggaaagggttatggatgttacaantttgtgctnntaaacttcttgatgnnatgccacctatnntaaaggaaactacggtgatctagttangaacagnntctgggataaggngaagggngatgnngtccgggatgnntgggttttgagccttaannacttgcatgaaccctaattaggcttaagtccctgagnntttgagtagttcattctcatnntactgttagcttttgcagtacanaatgaaggcttaaactcatttcagtangaatggtgnaaaacatnggaaacgaaccctattggntttggaagctttaactacatgttatcagtaaaatggtgatcggtgcttatgtattggaaccggtcggtgcanaagctcaacatgagccttgataagaacttgttttctgtcnttgagtnngaaaacgtgaacactatcagtgttgaaacctggngctctttgttgagttgaattatt

SEQ ID NO: 48020 - DNA, 270 bp, Gossypium hirsutum
  unsure (1)..(270): unsure at all n locations
  Clone ID: LIB3584-010-P1-K1-G12
gagcggcatttaaacatgccattgagaaggacattaagaatctgcaaatgctacaggagatgtacaatgaatggcctttctttagggtgacattttttttattcnaaatggactaaacaaaggggggggggggggttttctcttttttnanaancnccnnnnnnctccanaacgggggacanncggggagaggccaaggaccaacnangaagaaacaaanagccnncnccnccaganggcngcgcacanggancnncnngaaggggaccc

SEQ ID NO: 48021 - DNA, 576 bp, Gossypium hirsutum
  Clone ID: LIB3584-010-P1-K1-G8
tggccggccatgggttcatcggagggtgtgtgcacacccacaccggcgggcggtgttaggtgaaacgggccccctttcgatccttctccgaacgggtacggaatcggggccttcacgacttgcggtaccgcgaagagcggaggggcccctcagctccctttctctccgtcacggccaatggggggggcggggggggttcggcgacctacggatcgacgagagcgtaccggagcacaccctgaacagcaaatcaaaggtgttagaaggctctcagaagtgcgtggaacggccatgatagaggcgtggtggctgaggggagaccaacagttcggcagcagcatgcttggggcaagggctgctgctgttttctcttctctgcaaagggctagggtttagtttgtttgggctgttttgggccataaaatgttgggccacatatttgttgtaaatggacttaaaatttgggcttttttatttggttatttgggttttgcttgttttattattctaggggcaaaattggctattacactatcgtgaacattttcattttacttttggtctttttataaaaat

SEQ ID NO: 48022 - DNA, 647 bp, Gossypium hirsutum
  unsure (1)..(647): unsure at all n locations
  Clone ID: LIB3584-011-P1-K1-A3
tttttaccatgctgttgnccaaacaaagnananatcctgtccaagggttttgccctaaattatgcgatgagtcacagctacctaagnngcgacgaacannatggcttcggttattggtnngcctgccatcagnnaatgcaaaatgnngtgccaatccagnngtttcggtcctttaataatttggcnnggcaagaccagnaaacatttgtcacgtgagcaagtaatgnncagaactaggatnnctgaacaaatggttccccctgntcatgaaacnnctcctttaggtcccantcccttttaaagngatgccctgatggtggnntgtcaagctttctggtcacgatgtatgtgattctgcgagtccatcctcatctaatcctgttctcaggctaatggggaagaacttaatggtggttaacaaggaggaagaagcatctatgccactttgtcaaggtcagccatgtgcccggagtgataatcgggatcaagacgagatgcccttccatcatgcaatgtctccatgttctatgatcttcaatcagaatccaaatgatttggtggagcgaacttttgacgcctactcgacgaatggctatagaaaaccgtgccacttctggcaaccccaccacaaacaaatccgcaacttt

SEQ ID NO: 48023 - DNA, 276 bp, Gossypium hirsutum
  unsure (1)..(276): unsure at all n locations
  Clone ID: LIB3584-011-P1-K1-D2
gtcgacccagcgttctgttttagnaaaaccaatggatgatctttcagatttgaaatttgcattctgatattcttgaccctttaggtttactaattatctgatgcaatttgatcttgagataatgtaattatgattcatttttctatatatattagctattattccactttcctggtcggtccattttttccacctttagtgggtggccagaaataaatgagcttgtcacttgagttcattagaaggtatatacaatctgatttcacaagtttttcc

SEQ ID NO: 48024 - DNA, 500 bp, Gossypium hirsutum
  Clone ID: LIB3584-011-P1-K1-G8
tcaatggttggaattgggggccctcccatgaatagtaatgttgttcaatctcatgggcttcaaagtggtgggatgggaatagtgggtataggatctccaggaagccagatatcatccgatgtcatttcaaaaaacagtgtacataccaactctttcaccgcaggtggggggggtttggcctctgaagaaaagcagtgcagctttggagaaagtgttgagagaaggcaaaggagaatgatcaagaatagagaatcagctgcaagatctcgagctcgcaagcaggcctatacattggaacttgaggctgaggttgcaaaacttaaagaaattaacgaagaactgcagaagaaacaggaagaaatgatggaaatgcataaaattcagacgttagaggcagtgaatcgagcatggggaggtggtaaaagacattgcttgagaaggacactcacaggcccttggtagagttggaacttctgatactataaaagttacttaagatg

SEQ ID NO: 48025 - DNA, 450 bp, Gossypium hirsutum
  unsure (1)..(450): unsure at all n locations
  Clone ID: LIB3584-011-P1-K1-H10
ncctcnccaagttaggaagtggactctgggtttaaganntnggggaagacctaatagctgtgatcagagctactgggagcattagccgtgtgaggagtccattaagttcgccaagttctggtatcgttgcagagcaaatcattgagaagattcgtagtgtccgagaatcaaaaagaacaaggcgggggggggggatttgatagtttcggaggtgatgctcttgcttcagatttaatgtggagggaaatcaaacttttagctgcatcgaaacctgtcattgcatccatgggtgatgtggctgctagtggaggatattatatggctatggcagctcaaactattgttgctgaaaatttgactttaactggttcaattggagttgtcacagggaagtttaacttggggaaactattcgaaaanatggattcattngggggtcatttcggggga

SEQ ID NO: 48026 - DNA, 513 bp, Gossypium hirsutum
  unsure (1)..(513): unsure at all n locations
  Clone ID: LIB3584-011-P1-K1-H4
tctgncgcgtgggcggacgcgtgggtggtggggtgtggagccctcatcaaaagcatcatctctttgttatttgtcaacatgaacgacttgcttacggattcatttgtgggcgatgccaaaggccaccgcgatatcgaaatgggaagacaggttcccggacctggaagcaactctgacatgggaggggaggcggtcaataagcagatacaagaggttgagaaacaggtggaaaagctctctgggttactcaggaaactcaaggatgctaatgaggagtcaaagtcggtaacaaaggcatcagctatgaaagctatcaagaagcgaatggagaaagatattgacgaggttggaaaaatagcacgtaatgtgaaagcaagattacaagcgatcaacaaagataacttggccaatcggcagaaaccaggatgcgagaagggaacaagcgttgacagatccaggaccaatgttacaaatgccatggcaacaaatttcaagnctttgatgattgagttc

SEQ ID NO: 48027 - DNA, 380 bp, Gossypium hirsutum
  unsure (1)..(380): unsure at all n locations
  Clone ID: LIB3584-011-P1-K1-H9
tcttggcatgttcctcggggggggaggtnctgggtgtgagtgcttttgaagaaatccttgtatcctatttttgtcgcgtagttgccaaaatgtgcctcaaatactattttgcagactgaattatctgagcttttaactttgattcttcaataccatgcttctttgttagctttgggggggggggttttttttttctngatnaaanatnangctatttggtctataagatttaaatcaacacanccattcaacaagattcattgtcatcctctttggctttttccatttgtttatcttttttgctttcangaatttttgttttgtcnnggngccnggtgttttttcctgcgcttccccctgccccccgcccctcttttttt

SEQ ID NO: 48028 - DNA, 362 bp, Gossypium hirsutum
  Clone ID: LIB3583-004-P1-K1-A10
caaaatccaactcataagctattattcaaacccctgccccttttataaaaaaaaattcccctctcatactattcatcctcccttcatcttattagatacaaaatctattcttaaattactaaatcaatgcatacataactactttccttttcctaaaccatacaaaacattcattaccctacccacctctttcttttcaaaacttccttatacaatcacatcagacaccattacttcatcattatatcaatctttacaatttcctacatatctctatctctatcatctaacattcacattaataatccaattatctacctccatcttctaaacttcatactcactttatcataaaacatata

SEQ ID NO: 48029 - DNA, 364 bp, Gossypium hirsutum
  Clone ID: LIB3583-004-P1-K1-A7
ctttaaactacgtaaaatacaaccaatatccagaaatctataccattagtatatcgagaatgggtgggtttgaattgtgattaatgacacaaactagcctcatccctcggcttagctggttgtcttagaaactgagtttcatctttggcgagccatttgccaaataatgcctacggaaaccaatgataaattttctctctactatccatagactgtttgatttagggatagtttagtggggattttctaaagagtggaaatcgtgaattaagattcaagtatttagaaatgggtcaaaaaagatatttgaaacgtaatctttttaaacttgatattgtatagaatttaaatggtatttttattc

SEQ ID NO: 48030 - DNA, 582 bp, Gossypium hirsutum
  unsure (1)..(582): unsure at all n locations
  Clone ID: LIB3583-004-P1-K1-B6
cgcgtccgccacgcctccaaaagagggggngcccccctacacttgtattattttttattatggctctgctgactgtcttgccggaggcggcggcggagcccatgaaacaaccgccgaagcgccgcagaaagcaagtgaaaaggcaaaagcagaccaccacgtcttcttgggatcaaatcaagaacttgctcacttgcaaacagatggaagggtccaaagtccacgacccttcgaagaacaataacccggcgccgcctcatcatcatcaacatggctactcaaaactgggttcctcttgtagctccatctgcagcttcagggacgtcgttcatggaaacacgagggttgttcacagagctgataactcacctgagagtagcacattaggtcaagaaactgcgctgctcagacgcaaagctgttaatgggtcgtcgtcacggtccttgtcggggtcaacaagatccaataacagcaccaccacctcgtcttcttcaagagctattcaattcaggaagctttctgggtgttatgaatgtcatacgatcgttgaccctagcaggtatccatcgtcaagaacaagca

SEQ ID NO: 48031 - DNA, 521 bp, Gossypium hirsutum
  unsure (1)..(521): unsure at all n locations
  Clone ID: LIB3583-004-P1-K1-C1
cccacgcgtccggccagatttaatnttnagagccagctggaggttgtatgaacatgcttcatggtgtgcaggagtgtttttgagtatgaaaaattgaacaaaataagtgaaggtacatatggcattgtttatagagctaaggataagatgacaggagaaattgtggcactgaagaaggtgaagattcttgatctaagagatttagaagaatatggtttccctgtgatatcactgagagaaattaatattcttgcgtcttttcatcacccttcgattgtgaaatctagagaagttgttgtagatgaccatgacaatgtttacatggttatggagtacatggaacatgacctcaagtggctaatggactcgatgaaacgacgattcagtaccagtgatgttaaatgtttgatgctacagctactggagggtgtgaaatatcttcatgataattgggtacttcatagggatttgaaaacatccaatcttctcttgaacaatcaaggtgaactcaaaatatgtga

SEQ ID NO: 48032 - DNA, 506 bp, Gossypium hirsutum
  Clone ID: LIB3583-004-P1-K1-D11
tttcttgtgtacctttctataaacaggtttatatatgtatatgtacacactatattctgtcaatatctgatggtgcatttaatgctgtttcggtgaatttaaaattaccattaatgttaccatgcttcacttgaatatgcaaatggagttcatggaagaagcaacaacacacaagcgctctagcagtttcccatttcataacacaataaagagccatgttgatgcaaacaaggatcaaattttcaaccccaaagttcaacattcattaaagcaagagattctacagcttgaggaacaattgcaggaccaatttgtggttaggcatgtattagagaaggcattaagtcctaggccttttacctatgatgtagcagttgatgagtttcattcatgtaaattccaggctgctaaagaactaatcaaggatattgcagtggtagaattggaaatagcttacttagagaagtatctcctttcattgtaccgtaaaatgttcgatcggcgat

SEQ ID NO: 48033 - DNA, 544 bp, Gossypium hirsutum
  Clone ID: LIB3583-004-P1-K1-D12
tatttacactttattttgcttgatagtgagatattcgacggaaattaccgcatatctaaagttactaaataacaaatgatatgaaggaaaagtaagggatataacaccagtactcaaaagtgaaataaacctttcacactaaaataccgcttgattaatattttcattatcattcagtgaatgttggagtctatatacattttaaactttacagccattcgaaatggaactcccatttcaacatgtaatttgcttggcaggaactatagtttgcagcacgattgttttgagaatacataccttgaatcccctcattggttgtgatgagatcaagttcaaggaggtctagaagacgtccaagatcaactccgctagtccaattttctgggggttggccaactttgagtttcaaccgacccctgttagcagtcccaccccaaatgattccaacaggctgtggcttctccccattctgaccctttaatagtatgaggcttccactgtctccttcaaggtcaaaagtctgctggttctcaccaactac

SEQ ID NO: 48034 - DNA, 553 bp, Gossypium hirsutum
  Clone ID: LIB3583-004-P1-K1-F10
tccttgtatgtaagacgaaaaacagaaaaaggattgggatgccgaaatttccacttgttactatccaaaacagtaataactttgaaattaggaggatagttggtatataaaaatcccaagtagttgcacagcgtcttactcaattggtagattagcctttgttcctttttagtttctacaagaataggcaaaggcaaaggcaggagagatcgatatcaaatgggttgtagtttgtcttgtagatcatcatcgtgtggagtgaagaatatgatccgagtggttcacctgaatgggttggtacaagattttgaccaccctgtttcggtgagtgaagtcactggcaccgatcgcccaccaaagcagttcctttgcactccagctcaactcctttccgactgctcccagttgggtcttcaacctgatactattcttcaagctggccatatttattttcttctaccttacaccactctgcagtctgatgtgtctcatgtgtctttggcatctattgccagaaagctcactgccaaagccaagtccaccaagcccaact

SEQ ID NO: 48035 - DNA, 348 bp, Gossypium hirsutum
  Clone ID: LIB3583-004-P1-K1-F5
attttccttcgtaaacatcaagattctttgatgcatagagtggtagttgcagaaatgttatatatcttggatccgaccaagaaacttgaggctgttaagttaattgaagattcatccaatatagttgagccaacgaatgcaacacttggaccaatcatggcatggaagctcaaggactgtattggagtccaccaactcttggaaaaagttcttgttgatcaagatgctgctttgagatggaaagtaagatgtgcggagtacttcccctactctacctattttgaaggtagtcgtagctctgccgtgaacaatctgttcaacaatcaggagggcaaaactccagtaaat

SEQ ID NO: 48036 - DNA, 453 bp, Gossypium hirsutum
  Clone ID: LIB3583-004-P1-K1-F6
aatcaccttgtgtatttcagtatgagtagtgtgcgtgaaggggtttgtaggtacattcgtcggcttttatagccggatttgcagagtaaaatcaaaaaataaaattacattttattgttgttatttgctgtagattttgtttttctccttcttgtatgttccatttgcaggaaaggccgtacacaagcacgtgcggagacgcgcgcgaggggctggtggcacacgtgtggtgctcatccgaattactggctactgcgcgagagggagaacccttagagcttctgaaacaatcacctggaccagtctttgggtcatgtattgaatgggctgggactttgggttattaattaattgggtttaggatttatgcaattgggttttaaaaaatgtatctgggctagattgtatatatatattttttgggttaaataacttgtaaatggatattgactt

SEQ ID NO: 48037 - DNA, 515 bp, Gossypium hirsutum
  unsure (1)..(515): unsure at all n locations
  Clone ID: LIB3583-004-P1-K1-G2
aactttctgatgctgaatccatgatggcactaagagatgtgttaaatcgcatgggatcaaacaatgtgtggtgtgaaggaactggcacaaaccctagtgctgatctaagatacatatatcttatgaacagcagtattgctggtcttgagaaggcagatgtgttccttctggtcggaacccagccaaggtatgaagctgctatgataaatgccagaatccgtaagactgttagggcatcaaatgctaaggtaggctacattggtcctcctgcagacttcaactatgactaccagcatcttggcgttgggccaaaaacacttattgagattgctgaaggacgccattctttctgctcagccatcttaaatgccaaaaacccagccatcattgttggctctggactgttcgagagggangacaaagatgcaatattttatgctgctgaaaccattgcaaagaatgggaatgtcattagacctgactggaatggattcaatgttttacttctcagtgct

SEQ ID NO: 48038 - DNA, 585 bp, Gossypium hirsutum
  unsure (1)..(585): unsure at all n locations
  Clone ID: LIB3583-004-P1-K1-H2
ctctccgncaannacgacncggnnngnnncaatggatcaccggttgctcctccgaatcttatctatatgatggattattgtgtttctggcttgtttggctcccagtaaaataccattttttagattgctgactgtataaagtatagaatcataattcataaataacagagttaaaatgaaagtattttttgagtaggaatgcatctgcatgccacgaacgaaatgaactcaattacttaagcttcaagtacaatattatataattttcttacatgaaagaaatgctttaccatgtttgaactccgctgtttattagccatttgtttttttttctaacaaattctaagtaaataaaatgaaatttaaataccaaaagctataagtaaaaggagaatcatgagaattttctttctttttgattttggaattggtttaatttataggcaaaacttttttttctttttggttgctacaacacaaatttgtttagctgccataaattttcgtttgatattttaaatttagctgcatatctgcttttatctggctctggttctggtattactagnctattgcttgatttta

SEQ ID NO: 48039 - DNA, 514 bp, Gossypium hirsutum
  Clone ID: LIB3583-013-P1-K1-A11
ccctcatttggatttttggaggctgttttcccagatctgtgccatccgaggaatgttctagtttcttacatcagctcaaagtatggccatcatgtttctttagtgaatggtgattcaacaatttgaattcagttgggactacagatgttgcattttcataaccataatcattgtcatattcccctctgcagacaacaaccaatgaagttctgcatgagttcagtgttttatttccttgtcatcataagtatttttcttcctctaatagtagctgatctaaactctgataagcaagcccttcttgagtttcatgctgctgtcccccatcgtcgaaatctgaactggaactcaaccaacccaatatgcacatcctgggttggcatcacttgcacacaagataattctagtgtgcttgccctcaggctccctggggttggatttataggccgaatcccgtccaacactctaggtaaattaggtgcccttaacattctcagccttagatccaatcgct

SEQ ID NO: 48040 - DNA, 515 bp, Gossypium hirsutum
  Clone ID: LIB3583-013-P1-K1-A12
cccacgcgtccgcccacgcgtccggataaattgagggaaggagaagaaccggatgaactgtatttgcagcaatataactatgttgatgattatgataaaggagatagtggtgttaccattgatgaggtttttcagagagcaaatgatgagtactgggaacctggtgaagaccgctttattaaaaaccgttttgaattgccagctaagttatatgagcgactatttgggcctaatggacctcaaaccctagaggagttaggagaaataccagatgcagaaaccagatataaggcacataaggaactgcataaagatgatccaccaagtaatttacctccgtttgatgtgattgataatggaaaagaatatgatattttcaatgtcgtggctgatcctgcttggcaagagaagttccgaaataagaagcctcccctggcatactggaccgagattcgcaaaggaagaaaggcatggttgaaaaagtactctccagctattcctcatggaagcaagta

SEQ ID NO: 48041 - DNA, 509 bp, Gossypium hirsutum
  Clone ID: LIB3583-013-P1-K1-A3
cccacgcgtccgcggacgcgtgggttttggttttattccttaatcaatttcaaatgctttgacatgtggccaagtatgatacggagggtattttgctttattttaactatatcctccttttaaattgtttttataggctgttcagggttttcgaagcttgattagagccttttctgaccattgtgctttttgctgtctcagtatattctcttttagtagatcatagtgctttcctcatgatgttatgtaggattttagaaacttgtcttggtttaatctagacctgctgccattattttgcccaatgatggaaaactcaattttgattggattgttctcgttttcaattcatctttggcttttgcactccacctcctttcattctctctctctctctctctctctctatctatctctctctctctctctctctcttcaccacacatgttatctccattggcaatatgttgggtatatttcccacacgcatatatatatacatacatata

SEQ ID NO: 48042 - DNA, 502 bp, Gossypium hirsutum
  Clone ID: LIB3583-013-P1-K1-B11
tagaatgttactaaactttgtctgccatctggagtatttgctgttctgatcatattacgcacacaccttacatcatttagcatgtgattgcagttttatgtggctgtggattttttcagttggaccatgcacttttaggttctgtgtttgtggtttttaatcatagatttgtttgcgacaatttaagctatttgagtaactaaatgatcttaatatgcttcttttcgaaaagtagctagatcattttggactttatttgtcttttttattccccgaagtggaacttttattttgaaagaatatcggtgtagtaaagttaagtcctgaatatttttagtaccagctcaaccaccttttgttaacgagaatactttcctgaagctgtatatctcctatgaactttgggattgagtacgtaccacacagtattttcttctttggctcctcattcaaccttttatcagtgcatttccatgttgcctggtagcagtttgttctatat

SEQ ID NO: 48043 - DNA, 516 bp, Gossypium hirsutum
  Clone ID: LIB3583-013-P1-K1-C6
ggagaagacgcgaaccaggaaaaggcctcgtcttgggtgggacgtggcaccgtctgggctagaggcgcatcaaactctggcgaaggctcggcgttcgtcgccgcccaagaggggtgatgaccacgatggccattatgttttcaatctcggcgaaaatctcactccaagatataaaatacttagtaagatgggtgaaggcacgtttggccgagttttggaatgttgggaccgtcaaacacgagagtatgttgctattaagatagttagaagcattcgcaaataccatgatgctgctatgattgaaatcgatatacttcagcatctggcaaagaatgaaaagggcacctctggctgtgtgcagattcggaattggtttgatttccgcaatcacatttgtatagtgtttgagaagcttggaccaagtttatttgattttctaaagagaaataaatactccccatttcctgtgggtcttgttcgcgaatttggacatcagcttttggaatctgtagcata

SEQ ID NO: 48044 - DNA, 510 bp, Gossypium hirsutum
  Clone ID: LIB3583-013-P1-K1-D9
aagaaagtcattttctcttttttcacaaagaaaaacagagacgtgagtcgtagtgacgaagaattgtgattcttttcttcattttcagcgttcacgtttgtttttcccaaatctcgaatccgaaaaaatcatctctacaatttttttttttttttggttttgaatccctaaatctatctaatcttgtttgttttcatcgattttgcatcattggaaactgaacgcctttttgacgttgttatttgtcagctaacggtagaaaaggagagattctgataccaaaaaaggtgtcttatttgttttgttagaagagcgagagactcaaaaacagaaagttggtcgagttttattatcaagatggcgaaatttggtgtaaaaccgagtgttttgaggtcgataatgttgaatttcttcaattttggtgtagcttttatgctagtttcagctgagagaagcttgaggaatggagaatctgtcaaggagtctgaaacaaacaataattatttcctc

SEQ ID NO: 48045 - DNA, 520 bp, Gossypium hirsutum
  Clone ID: LIB3583-013-P1-K1-E2
gcggtctgcattgctatcgttcggtacttaagtcagaaagaaatgacacagttaggtctccaatgaatcccgagggcaagtcaaattcttcatttgatggtgttgcggcacaaatatcatctagtaagaaatctgctggtccatctaccacgaggaaggcaaagtcaagccaaagtgaaagtgcttcatccaatgccaaaaatctttcagaaagtagtgactcggagataagacccaggcatgaagactcctcacctattcctcagttatcaccttctaagaataaaattgctggaaaatctggcattctcaagagaaatagcaagcgagtagctgaacgagttttaatttgcatgcgcaagaggcagaagaagatggaagcttccgaatctgattctcttgtgagtggaggtgtttcacctacagatatgagactcaggtctaatccacgaaaagaaaatgaagatgctacgtcttcttcgcaaaaggatgtgaaatcctcaaacacaggaaggtctag

SEQ ID NO: 48046 - DNA, 517 bp, Gossypium hirsutum
  Clone ID: LIB3583-013-P1-K1-H1
cccacgcgtccgcttttgtgtcatgttgtcatgatgtggctgcaaatcaccatttgaaaatgcttaaggcattgtctcttgatttagggccagtttaccattgaggttgaaaagtgcttttgaaaagtttgaccatgtttacaatttctgtaaccaagtgcttttgagaagatacaatgtccttccttcttagcttgatgttgtaaattagaagatatgttggacttatttaatgaagataaaaagtaattttaggcaaaagcacttttgcaaaagctaaaaatcttggctttttggcttgggttaaaaacccaatttaaaaacatggtttagttagaaaagtccttgtttaccattgcttttggcttgaaattatgatttgggttgaaaagcactcctcaacctcaatgggaaacgtagccttaatgtcagatgtgtatgttgcagatttcttgtctggtttttgagtttactacatgcactagttgttcctcttaaagttgctcaatagacatac

SEQ ID NO: 48047 - DNA, 418 bp, Gossypium hirsutum
  Clone ID: LIB3583-015-P1-K1-A1
aatagagagcttcagcagagagaagaaagtagttttagtctgtatgggagagttagatcttctgctgcgccaccgccctgtagatccccagaagagattcgagagagagtctgctagaatgccgtcttctagataataggcttcgtcctcttagcctacttaagagcttgtttcgtttcgagcttgatcttcttctatcccagagagctattccaggagtgtctgctacattgccaccagctagttcttaagccggttaggtagcttctatgtgtgaaggttgctaggttaggttcctggagtttccttggaggtgagagagagtagtagtagctgtagaggaggtttctgtagtaggagagctagttcttagccatatccctttccacttccatagcagatcattccaatctcgatt

SEQ ID NO: 48048 - DNA, 440 bp, Gossypium hirsutum
  Clone ID: LIB3583-015-P1-K1-A10
agcccatttctctgctctcccctagatcgtctcctagagagagttctccttactgcttccgttctcattcactctctctttctctgtatagggtcgagtcttccgagctcttcgttagaggtgctggttccgtcttcttggccctctccctcctccgctagggtcctgctcgtttccgctgcctcgtcttcggagttcgttttaggcttcctctagggtgtagtctccgatgtcatcctcgtccctggccgaggcagctcctttggcccgagtcagtcttccgtcaccctttccgttactagtagctgtaagagcttttcgttgccgccgagggtatgtactctggtctgttcgtctatagaggttagtaggctactcttgaggtcggttaagtatagcctcttagatctatccctgtaagagctgtcgtttgcttcgtc

SEQ ID NO: 48049 - DNA, 418 bp, Gossypium hirsutum
  Clone ID: LIB3583-015-P1-K1-A11
gcttagcctgagtggtcatggatagaagagctaaatatattaccaatttcatctcatataaaatcaataaccccagttccagttaaagtagaccctgtagaggctgtctgtatctgtgcgggacctgatgaatttaaatctagatctatgagtgagattttcctgtaggtcctttgatattgatgagttgttctctggatctaggtttagctgttgttacatttcttgatgctattttggacatgtacctgcgctgctctgttgctttgcttgctgctcgaggtcgtgggtaatctgccgcactcggcttagctgtcgctggtgctattgctgctgggtattcaaatatctatgtaacggcgcctagtcctgagaacttaaagaccttgtttgaatttgagtgctaaggttttgatgc

SEQ ID NO: 48050 - DNA, 587 bp, Gossypium hirsutum
  unsure (1)..(587): unsure at all n locations
  Clone ID: LIB3583-015-P1-K1-A3
ccaggcgcacccgcacagacacgagccagcaggacagagaaaaaccgcagccacacccacgaacccncagccgagaaacccgggaagcggnccncaacacacgaagagagcagccagacgagccgnnaggagggaggcaaagccaccgaaggcagcagggacagggaacgcnccgcaaagccagccaagaacaaanaaagacccagagccaaagagccacggcaccaaagaggaaaggcagcgagggacacgcccncaacccaccgagccaaaccccncgccaccccaaccaaaacggccgcnnnnacgaggcnngcccncgnaacnnccagcagcaaccccgagaagaggacncccccgnagncgcccccgaaacaaacaaaggancgancnncgnaccgcaccacaanncaaaggccacacncgaggnccccgncaccgaaagaaacggccacgncgaaaaggncagcccccaccccnccaggcagagcncacacaggcccncccgagaggaagaagaacaagaagaacaagaagncgaaaggagaagaggacaacacaagagagagagagcccagnnaccaacc

SEQ ID NO: 48051 - DNA, 264 bp, Gossypium hirsutum
  Clone ID: LIB3583-015-P1-K1-A4
tcttacttcgagtctagacagaagctgcgagcttcgagaagaagagtttgagagcaataatatccacattgtctcgagtttacagactaaagtgaaattttctagttttaagctagcatgttaagaaataaataaggagacctatgtaaaggtagtgacccttgttttgttgtgcaataacttgtatgaactttttgagtgcctaaaaaaaaaaaaaaaaaaaaaaaaaaaaaaaaaataaataattaaaaaaaaaaataaaaa

SEQ ID NO: 48052 - DNA, 576 bp, Gossypium hirsutum
  Clone ID: LIB3583-015-P1-K1-A7
agcagttctagatccgaagaactcttataatagttcttcgatattcaagttcttagttcagtttcgtcttgacgaggctagtcgtagcgctccatttctgcgctcttcttttcgttgttttagcgtcttagtctcatatatgtctcccccgtagccgatgctttgctcatcgggttggtgtacatgatttcggagaatttgtttttgtcgttgccggacgtagtgttgccgcttaggcattcagcatttgttcgatttgttgagcggagtgttgtttatgccgagagttccggagccgttcgagaagcatggtctggtcatagtttgcaagacttatgggtagaccatccatttttggcaagtcgataaaagagataatctccctcttgggttacctcaattgatgatggctctctctagagaaggtctgctcgatgaagaactcggtcgagatgtggtgatacgattaggggtatcatttgagttagtaagggcgtagagagctgtgttgacaggtccaacacatgggattcatccataggcttatggtggtgggatagggctgatccctatact

SEQ ID NO: 48053 - DNA, 416 bp, Gossypium hirsutum
  Clone ID: LIB3583-015-P1-K1-A8
ctcaagagccatcctttagctgatacaaggagaagaggttaagagcctcggatcaaccattctccattggagcggttgttttagtctagagagatagctagttagagttgaaggagtattactctacttgaaaggctcttcattcctttcctctgcaaccatgaacaagactgtttatctatcgctgttgaacgaaacccaagtctactctgtagaaaaagcgtgatttatacctagacaaggatagggtatccacctttgagagtttagaagccttaatctaggagagaagttagttgttttttttagttttttagggttaggttgcaattaaaagatagcatcaaaaagactttagcttcaaacgaaatctgtcatcaattgttgaaagaagtaggtttttaattcctaagaca

SEQ ID NO: 48054 - DNA, 408 bp, Gossypium hirsutum
  Clone ID: LIB3583-015-P1-K1-A9
aggtagctctgagttcttggccttcctagtcttctgggtttagctttccattgctgagctcctccgccctgtctatttccctggactattcctgttattcttcccttctggactggtttatcctctgtcatatttacgaatcttctgccgagttattcttgtagctgtcttctattctcgttgagtgctgcttgtcgtgctgtttggtagggtggctttgccatcgttgagctgctaggtctgggtatgttccgtatagccagccttgttcttattaaggcatagagcctagtagctacttcacctaggggtttaggttgcgagggattcgccttcaacttattgagccaaacccctcgctactccaaccaaaacggccgcttctatgaagctagccctcgtaatttc

SEQ ID NO: 48055 - DNA, 495 bp, Gossypium hirsutum
  Clone ID: LIB3583-015-P1-K1-B12
ccctcgcgtccgggagttccctctagagtctagtagagagcctttatctgtctgtaagtctcttagagttagttgttttgtagagtagttaggccttgagtgcttttggttgaggtttatcttgtttagtggtttgtttcctctgtcatatttgctaagttagtcttgcgctaggatttgtttttggtgttttttctcgctgagtacttgttttctgtgagggttttattttctttagtggatcttcccttcattgagctgctctgatgctccttcctgtccttatattgtctgttccttgagcttgtctttgttaatggagggcatcttttcttcctgctttatcgccagagcttattctaggttgttttggctcgcatatatgctgctgagatagtatctgctgtttctcatctccattctaatggcatattgctcagggatctctttcctgagtatattcttctagacgcagagggtcatgttatgctgtct

SEQ ID NO: 48056 - DNA, 624 bp, Gossypium hirsutum
  unsure (1)..(624): unsure at all n locations
  Clone ID: LIB3583-015-P1-K1-B3
gcggatttttagtcctttccaaggatcttattctctagttcctcttcctcgtagctcctacattctccttcttttcatgggtctttttattgccacccttttatttcttcttcttcttcctttccatcttacgctccgttttctgagtgtaagtagcttggttagtcatcgtcatctctggcgcttcttccggtattggtgtgcttttggctttcgtttatggttgttgtggtgctaggtttgctctgactgctagatgtgtgttatctctgctagttatagctgatagagctcgagattaggggtctcccgatgttattgtaattcgtgctgatgtttctatagttgatgtctgttgacgtctagttgaggtaaccgagtatcatttcggaagaagtatgtctatatcttatgtatgtgcatgtatatattactgcggtctgtcccggagccgagaccactcctaatccataaaacncataaactaacaagagcaaaattagactttagacaaaacaataacaataatccaatccaatccacatttttaccatagtttgccaaaaatattatatttggctccgcgactgacaactgatactgttagttaatatgtcatggtct

SEQ ID NO: 48057 - DNA, 466 bp, Gossypium hirsutum
  Clone ID: LIB3583-015-P1-K1-B6
gttcgtcataggggttgttagagtccggttagttctctaaattctgaggttgcgattctgatggagagtgagcgattagccgctatcgaaatagttggagagcttttcatgtgtaggttttagtctgtaagggtttagtgtgtttggccgcggtgttttgcgctgagctgcttgttgggctgtgagagttatatggattggattttgttgttgctgatatttaggaagaagattcctactcttctctttggagttgggagtctagagatgctttgttgtttccttaagctgtacgttccacgttatgaattcggcgtacctgttgaaagaagataaatctgagaattactgctgtttctgcaatgataactctgttactgtagtaggagtatgatcattgcttcgagcatgatttcgtgtaagtatcagaaaagcttgtcaagggctgtgttagtagcttagcgag

SEQ ID NO: 48058 - DNA, 479 bp, Gossypium hirsutum
  Clone ID: LIB3583-015-P1-K1-C10
tttagaaaacattttcccccctttcctttcatcttctctcatcttcaatcaggttctcgctcactgtcaagctctttctgctgttctgcatatcgaggttctccttcaaccagcaatcgcttctgcggcgaaagtggtgggttcttcttgatgaatttctgagcaagagtgagtgaacaaccctttctctatttctaaccactatccctgaaactgattggaagtgtctcgcatcaaatactccatcaaagtttattttcactccctgtcccggagggtgtttccattttccaacatcctttaagttttaggaatttcttgattcgacaccatcaagttctttaatatagtttttgacaaaaactgctatctcctgaccatttttactgactttatcatggatttgagagttaccaattagtctgctttgagagggagagtattgagcttcgatctaagagagctactgtatgaactct

SEQ ID NO: 48059 - DNA, 451 bp, Gossypium hirsutum
  Clone ID: LIB3583-015-P1-K1-C4
cagagctatcgttttcaaggagaggaattagtctgcttgcgtagtttagctcttttctcttttcctttccgtaggcttgctttgttctgccaaagactttcccggctgttgaagcgtcgatgatccttcgaagaggtacgtggactgccggagagcgatgcgtatgggatactcgtggtcttaaagtgcttctgctgtgtgatgaaagtagtaaaagtcagtatggagagaaaggtctactgctgcgccaccgccctgtagatccccagaagtgatacgaggagagtctgctagtatgccgacagctagaagaaaggcttcatccactaagccaacaaaagagcttgttacgattcgagctagatcatcaactatcccagaagcaattccaggagagtcagcaacattgccaccagcaagttcttaagccggtaaagtagcatcaatgtgt

SEQ ID NO: 48060 - DNA, 529 bp, Gossypium hirsutum
  Clone ID: LIB3583-015-P1-K1-C8
gttctttagaagctagatagggatccccataggttaagttctgagtagccttttttgtttctgagttaatagctctttcttttaggttgtaaccgtttaggttttgagagttgctagttagttcttattttgcctattttttaggactgtctctcttcttcggatatgttgagttgaagtggtttgcctactatctttgaagcatcattctgctatgcttagggctatggagctggtgctctcctccactgaggtttttccggattgatatcatctgtaagttatttgagtgccccagttgtagtatggtctgttggtaggtctgcccttacatctatgttggttgtggtgaggaagcttggttttttcaagcctgttatcatgtaagctatggtagtataggatggagctccattcaagtaatttgcttccttgcgggaagagagggcctgttaaaactgctacattagtcctggtcctattcaatttgttgagcgagcttctaatgcagttaaccacacactgctcc

SEQ ID NO: 48061 - DNA, 228 bp, Gossypium hirsutum
  Clone ID: LIB3583-015-P1-K1-C9
gagcatttttagtctatagtttttgttctagttagaggtttagcttagccgttcttagttttttttttacagcaagtccttttgtatcttgcgttagtagttattttagtatgtagttatcatagaccctttcatttttagaagagcttattaagtctttttcttgagtgccttggatgtgccttttcatggcttccttacaagggtttttcaatttttttttttttt

SEQ ID NO: 48062 - DNA, 482 bp, Gossypium hirsutum
  Clone ID: LIB3583-015-P1-K1-D4
gccacgcgtccgcccacgcgtccgaaaatactgagcttatcgtaatcaaggagaggaatttgtctgcttgcgtaggtttgctcttttctcttttcctttccttaggctagctttgttctgccaaagactttcccggaagaagaggcgacgaagatcctccgaagaggtacgtggtctgccggagagcgaagcgaaagggattctcgtggactaaaggtgcaactgctgtgagaagaaagtagtaaaagtctgtatggggagatagatcaactgctgcgccaccgccctgtagatccccagaggagatacgtggagtgtctgctagaatgccgtctactagtagaaaggcaacgtcctcaatgcctacataggagcttgaaacgattcgagctagaacaacttcaatcccagaagcaattccaggagagtcagcaacattgccaccagcaagatcttaggccggataggtagctactatgtgt

SEQ ID NO: 48063 - DNA, 497 bp, Gossypium hirsutum
  Clone ID: LIB3583-015-P1-K1-D5
agcgtgcagccctcgcgtccgccctcgcgtccgggctctctctcttttctctcttggtcctagacctctggtcgtcgggcctagctccgtccgccgagccggcctccgtttatctcctaagagtaatttttttttttgtatttactatatatatttaagtagatcgatagattcaaaaaaaataaaagcaaatgaataaaagaaaatatgatctcctcaagttttcggatttttgtctttagattttctggtttgagttatactcgtattcttttcttatattttccttgattctctgcttgcatgtgtgtatagtaattgtttcttttcattcattccagattcgaaccccctattccttttttcattcggcttttatagccttatttacaagttattttctattattatctgtcttttcgtttcactaggtgcaggtgctagttgtaggagaggtggtggggacttgtccggtggagcggcgctggtcagttggc

SEQ ID NO: 48064 - DNA, 448 bp, Gossypium hirsutum
  Clone ID: LIB3583-015-P1-K1-D6
gcgccctcgcgtccgccctcgcgtccgccctcgcgtccgtctcgattaggtcttatgtgattggagctgatcgtacgagcatccattgagacgctaatgtatcatttactggttctcctgctgttatttggcttgaaaggatatattgctaaagcttctttttttataaagaaattaatatacctgctagtttccgcgattaatcattgttattgtgctggactgcttggagttgagttttggtgctacccctgagatgagcatgtagttcctaattagggtggtctctcggatgctagtagagtttgatcggtatcctactaggggtgatgttgttctagtagactctagggtctgtgcatctagttagtatggcttgcgtagagataggcttgtctgagatagtaaaactggagtagttttaacaagatcctctagtgtgtgggtg

SEQ ID NO: 48065 - DNA, 626 bp, Gossypium hirsutum
  Clone ID: LIB3583-015-P1-K1-D7
ccggtagattttttagcgtttagtctctgttctctgtagatggcccgttcctagctttccgcccgttagtgttctggtgggttgagctcctaggttgcttctagcttccttgagctgcccgtttttctgccccttcctccggtggagtgttgttgcctcttcgtttccgtcctggttctgttgctcttcgagtttttcgttttttcctgttgtgtactgtgcttcttatctagttattgcctttcctgagagcttgttcgagttattgccctagtcttctagactgatttgcgtttcctgagccatgctgttctagctctccaggttgctgctgtgagcattccttgagggtctttttgttgtctccttccttagcgcgttccatgcctagcgtgtctctattatgccctaagtcatccagttggctcgtaagatctggggtgagcgtgctttatttccagtagtgtggatctgtcgcttagaagaaactattgtttattttttggcttatgtataggttttttgttttttctaatcatctttttagccatgatggtagtggtaggttctttgtgttgtgatgatgtagtggggcgtctgatatgttaatggactataactcatgt

SEQ ID NO: 48066 - DNA, 577 bp, Gossypium hirsutum
  unsure (1)..(577): unsure at all n locations
  Clone ID: LIB3583-015-P1-K1-E1
tatagagagttgcatttttttttgttctagagatgtactttagtttttctctagtttatttttgagagagttgcttcagattttgttcgaagatggtcgtagctattgttggttgtctcttagttacttgatacatttttaggagatgttgttaaagtatgttcttgtttttggttatataagatgcccttatattgcttcaagatagtttaaaatttaaactcatttgagtttcgcttattattatcaacactacttctagtcgtatattgaggtcggagataatacttccatatatgctggtttttgagggtggtagccataagatgccagtttactagtattctcttatagaattaggatttacgcagacattgtacatatgcatatttggtttttagagggtggttgccattagagggatttaatacaaatgcatctatgttacttgtactcagatacaagagtaggttacgagtatgtatggattttttaaaagttttttcatgtatttggaggatccttaaaagtcgnatcttctctctatcagncaaacatgagcgttagacacaagtac

SEQ ID NO: 48067 - DNA, 421 bp, Gossypium hirsutum
  unsure (1)..(421): unsure at all n locations
  Clone ID: LIB3583-015-P1-K1-E10
gggcaacnccaggagagccagcaacaccgccaccagcaagaacaaagagccggaaaagaagcaacaaagagggagggaaagcaaggaaaaggaccaggagaacccaaggaagggagagagagaagaagaagcagaagagagaggaaaccgaagaaagagagcaagaacaaagccacaacccnnnccaccnccaccgcagaccaccccaaccccgacccaaggaagaacaaggcaaccccagggccccccaaaggcccgccccaaggcaccccacccccaggggcaccaacgagccccgcccacccaccccagaagcaaaccccaacactnncgnnctcccacaccaaagagacgcagagaaaacnaaccncgncaccaacggaagaagaacgctnacgnncnagacacaagaaaacaaaga

SEQ ID NO: 48068 - DNA, 541 bp, Gossypium hirsutum
  Clone ID: LIB3583-015-P1-K1-E3
tgcgagcggttatttttttttttttttttttttttttttttttttttttttttttttttttttttttttttttttttttaagaaaaaatttttttctttcttagagattagtcccttcttttttttcgcccgcttgctttcttctctagtgcttgctttgtagtcaccttttttttttggtctgccctttgcttttctccgccctttctggtttttccccggccctgcttttccttttggccttccttctttttcccctttacccttctgccttttttccattgaggccccctcttttaactgtccctttctgttggccttcccgttttgtgttcggccctcgccgtgtttcggctctttttctgcggtagactttttagctccccacagcccgtcctttccccttgcttgccccctatccccccatgctccctattccttcccttccttttttttttcgttggctctctttcccagttaagcttttttcccagacttccctttttgcccccgttttttttttggtcggaaccttctcctt

SEQ ID NO: 48069 - DNA, 361 bp, Gossypium hirsutum
  Clone ID: LIB3583-015-P1-K1-E6
agcttagcctccgtaagcagcagggtctgggtaagttccgtttagcctgccttgttcttatttaggcattgtgccttgttgcctcttctcctaaggtgttttgaggcgtgagtttcgccttctacttattgtaccttacccctcgctactcctacctttacagccacttctatgtagcttgccctcgtgtattccgagctactcaaggtcatctaagtcaccgtttctgccttgctattataccatagatcaatctttgagccgcactactattcataagctacattcgaggtccttgttttcgtaagttttggtttcgttgttataggtttctcctcatcttcctaagcatagctctttt

SEQ ID NO: 48070 - DNA, 369 bp, Gossypium hirsutum
  Clone ID: LIB3583-015-P1-K1-E7
ttttagtcccggttgtagagtggagtcatatttgttgtccctgctttctttcctgtttcattcgttgcatcccttaacctgttcctgaagatgtctgggttcggtctttacatcctgtacttttacccagaccataaccagagagatcttcgtggctgggtttttctaccatgtgtgtctatgggattgcctatcctaagtgttggccttaggggtgtcttcgaagttggaggatgtgatattctactgctacccataagagtcttacttcgtgtctcgacagaagctgcgtgcatctgtataaagagttttaggctattataatcacatagtctcgagtttatggactaatgagaaattttctagttt

SEQ ID NO: 48071 - DNA, 591 bp, Gossypium hirsutum
  Clone ID: LIB3583-015-P1-K1-E8
tagatttcagagagagagagagaccgagatctatgtatctgcttctgagaagtccttgctgcgtttgtcagcttgtttctttcggagcctgctgttgttgtctcctttgatagttaaggtttccttctagttgagctttagtatcctcgagagggcatctgctagggtctgcttgttcggtgagtctggtcctttcatggcggtctgtccgtagagttgtgttgctattcgctagtacgttagctatcttctagcctccatacgctgagcgtggaggtattcctatatgctttccactgttaggtctgcgaggttcgctggagctacatgggtttgcctggtactggatttggatcattgatgtctatccaccaccattgcatccttatgatcctagtgacatggcctatactgacttgctgttgttgccatctgatgacgatttgttgatttggccattctgtttcgagtttcgtcttcgggtatctttgactgctgatgggtatcttagcttgatgtcacgcatcaagtttatctattacaagccttttagtttctcaatagcttatctcacatatttctccatctctg

SEQ ID NO: 48072 - DNA, 424 bp, Gossypium hirsutum
  unsure (1)..(424): unsure at all n locations
  Clone ID: LIB3583-015-P1-K1-F10
agagaccancaggaaaagagaagagaaccagccagaaaacaaacagacaaagagacccacaccggagcaagagacgaaagagagaacccaccaacgcaaaaaaaccgagagaaagccacacccccacccccacaaggccagccccacagaaagcagcccagccacgaccaacggagaaagaaaacaacaaaagcccaccccacacaacacaaacccccccacaaaccaacaaagccacacaaaacacagccagaagaaacaaaccacccgccgagagcagagacaaacgacacgacccacgaccccgaacgcgaccacgaagaagcaggagcagcccagcccacaacaaaacaccccgccaagagaaaccgcccgcgcaacgacaaanccgacacgccnncaccagcaagaaacccccccccag

SEQ ID NO: 48073 - DNA, 499 bp, Gossypium hirsutum
  unsure (1)..(499): unsure at all n locations
  Clone ID: LIB3583-015-P1-K1-F4
ggcaccacccaagagaagccgcaagagaagacacacacccagccgaagccccgaccaacgcagaccaaaaagaacgaagcaggagggcacgggcaaccgacgaaacggccccaagcaacgccgaagagaggagcggaaccgacgacgagaaccacaccgccgccagcgaagagcacgcagaggaaggcagccgccaaccccaaggcaaaacgccccccgccgaaccccaaagcccagaccccgaccccagaagaacagcagaaaaccacgccgaaagcaccagaaggcgccagcaaaccggagaaggccccgagcacccggcacgccggaaagacgccccacgcgccgccaacccggggacccacaccggccgggccacacaagagccgcaccacagagaaaccngccgcaacgggcacccacacaaccggcaaagncagaacgagggcaccacgaacgaaccaaaccgccccacagcagagaaagaaagccacagacc

SEQ ID NO: 48074 - DNA, 443 bp, Gossypium hirsutum
  unsure (1)..(443): unsure at all n locations
  Clone ID: LIB3583-015-P1-K1-F5
agagagcccagncatcttccggagtcctttttgtagtccctgctgagccttcctggcacgttcgttgcctcccttttcgtggtccttagttagctcgggttcggtctcttcttcggccttgtcttcttgtggttcttcgtggctgggttttccttctttgtgtgtctttgggttcgcctggccttagtgctggcgtttggagtggtgtcttagttggaggttgtggtattcttcttcttcccgctagtatctttcttcgagtctggtctgagtcggcgtggttttgttgtgtggtggggttgttttttccccttatcagccgttcctggtctttgcacgcttgttctaagttgttgttttgttaggcttgttttggtggttttttttttaggtggcctatgtaaagaggtagagccttgttttgttgtgtgtttaggagtcct

SEQ ID NO: 48075 - DNA, 398 bp, Gossypium hirsutum
  unsure (1)..(398): unsure at all n locations
  Clone ID: LIB3583-015-P1-K1-F6
acccacgcggccggccacgcgnccggaggaaacaggcgacagaacaggaacacgcccggagcccccgagggagcccagaaccaacagaggcagagacaccagngagaagcaggccaggcaaagccacaaaccccacccagcagccgacaggacccccgaagcccacccccccgaacaggccgaacaacccgccaagagagcagaaaccgaaaacccgggagaaccacgccgaaggggaggaagcccccaaaggacccgcccccgcagagaacaaacaaaaggaaccgcaggaagnagcaccaccgaagcacagaacggaggaaaaccccacgcccaaacagnaggagaccagagagcaccccccacccagaaacagcccgcacccncaaacacccaag

SEQ ID NO: 48076 - DNA, 467 bp, Gossypium hirsutum
  unsure (1)..(467): unsure at all n locations
  Clone ID: LIB3583-015-P1-K1-F7
ggatcttcgtaggctgggtttatcttccatgtgagactaagggattgcctagcctagagagtaggcctttaggggtgtcttcgaagttggaggaagtgtttttcttctgcttcccacaagagtcttacttcgagtctcgacagaagctgcatgcatctgaataaagagttataggctataattatctcattgtctcgtgtttatggactaatgtagtaattttcttgttttttgctagcatgtaaagttatatataaggagacctatgttttagtggtgacccttgttttgtagtgctatatctagtatgaacttttgagagcgtttttttgtctttctatgttaaagtataaaatgttaagtacttaagcntttaaaaataaaaaataataaaaaatttaatattaaaaataaataaaaaaattatataaaaaaataataaaaaataaaaaaatataaaaattttg

SEQ ID NO: 48077 - DNA, 536 bp, Gossypium hirsutum
  unsure (1)..(536): unsure at all n locations
  Clone ID: LIB3583-015-P1-K1-G10
cttcgnagccttatcagtagtctgcgcctagcataggctttgctgttggttttttgttccgaagcctcctattctagagtttgttgagggttgagtaggcttggtctttgagttattgctggttcttaagatttcgctaggctagtaattgctggggtcgtctattcggctgatgatctgtccatcattgctgctctcttgcaatatattatggcttttcctgttgcacttatgagtcaagtcatgtatggctcggatattggcagagatcttcaaaatttgctagaagttgatgatttagcggagatactgaactcaaagcatcggccacgctgcataatcgagttcatttctcaaagccttcatctgctgaactaggtagaatcatagagaactacgttggagtcaaagatctcaagtttccatgaaagtataggagtatgtgtacaactcatggagattcctatccctctatcatacactcggttgacatctaagtttttaggcctatggcatctcactcttcctatcatact

SEQ ID NO: 48078 - DNA, 569 bp, Gossypium hirsutum
  Clone ID: LIB3583-015-P1-K1-G11
ccctcgcgtccgcccacgcgtccgactagttctagatcgcgagcgcggacgcgtgggtgctgagataggcggtggagtgagaggttatgagctttctttaaggtgttcctggattggttggataaataagcggattatgatgccattgaggacggtgcttatattgggctctaccaacaaaattttgctgagggaggattctgtgttcttcagcttgatgccgtcataaaagaaaagtatactagatgagggaataaaaggccacttgtcatcctgcataataagcgtgtgcgtgccctctaggaaaatccttcccatagaaagtaggttgatgaaaggatggctaaaggagttctttatacaactccacatggctccaatgatgattggtataggctttacgccactgtaaaacttagatgtctgctcgtgacttatgatgttatgcgggatctcatttttgaactcctaagaagtagcttctttctcaaatggaaagataggttcgatatacatttctgaaaggagccctgaaacttcagatgccacctgcatactctatcgtcatt

SEQ ID NO: 48079 - DNA, 482 bp, Gossypium hirsutum
  Clone ID: LIB3583-015-P1-K1-G12
gcttatttctttttccttatggaagtagattctatgttccttccagttcctagtctatttcattttcatgggttttgatggttagagggttccttgagttctctcttcgtcctgatgttctagtgcgaaggttctcctttattgatcatgtctttgctcattctcgtattcctcttataggtgttcttatctctgctgttgaaagagttatcattgatataaagcatcatctccattttcctgtcatctgccatgtatattacttcttctctgtccatgccattcttatgggtgattaggtgtctactgtctttgtgcatgctatcaaagttttagcccgcttagatgatgtttctggtgacaggtatgtctctgattctctctggcaagttgatgcagtcatgttggtcgttctttttactagccttgttgaataccttcaactagaagatgcatataacatcttcattttgaatcctcgt

SEQ ID NO: 48080 - DNA, 608 bp, Gossypium hirsutum
  unsure (1)..(608): unsure at all n locations
  Clone ID: LIB3583-015-P1-K1-G8
cgctactctagagagttcgccttcgaggactgctcttacaacctctcccccgtagagctctgctccaagaggtctctttgcgaagccttgattgagcgctgaggttccttagtttaccgtgaggtctttgtatcttctagcgggagatagttagtcgttgggtgtgccggtgttgggatcgttaatgtggatctgtctgccgccaccgagcatggttgtttggtcgtctaagcgcctactgctaattccgttgcggcggctgttcatggtatcgcgctctaggctgccatggctcgtaacgtcgctcaagctgatgcttccgtctaggctgggtttaggctgaggttcttatatgtgggtgtatcccttgttgggtaaacgcttgctgtttagggttttggataggttggatccgtagttgctcggagagctaaagagctaggcatgcatgttattgcactcgatccttacgccccagctgatcgtgctcgtgctatatagagagagttggagagctntgatgaggccatagcgactgctgatttcatctntctacacatgcctctcacccctgctactaataagatgctcaatgttgagacgtttgc

SEQ ID NO: 48081 - DNA, 414 bp, Gossypium hirsutum
  Clone ID: LIB3583-015-P1-K1-G9
gcaagtccttctgtattccagtcgttttctgtttcttttttttcttagtttttagctgcttctttagtgtgacttagagtctttttcttagagttctaaggggtggtctgagaggtttttctctcgcttctcttccatgtctgttcttggttctctagtttgctgagaggtttttgctagctttgcttctgtctcgcgtatgttggtgcgttttgtttcctgtgttgtttgttctagctcggctactgtatctttctgttcggtagtcagctctaatctagattcttataatcaccagttttctgatgctggtggaagttctccctcttttgtttcctgagctctagcttcatgtgctactagttctgctcccttatatgtatcttctctgttactgcatctccgtatatgctt

SEQ ID NO: 48082 - DNA, 379 bp, Gossypium hirsutum
  Clone ID: LIB3583-015-P1-K1-H1
cccacgcgtccgcccacgcgtccgcaccgacagtgttaggctgaagcttgttatgttcaattacaagatcacactcgctgaaacaatcgaagcaacaaggctatttgccgaggagaaagtacttagttgatgccgatatgggtttgtcttcaaagcttgttacaacgacggaaaggttctctctattcgccgcttacctgacggatcactcgacgaaaacatgttccgtaaagaagcagaatttttaagaaaagtcaaacaccgatacttaaccgtcctccgaggttactatgcaggaccacccgatttaagactccttgtatacgactacatgccaaacggcaacctcgcaacactcctccaagaagcatcgcaccaa

SEQ ID NO: 48083 - DNA, 437 bp, Gossypium hirsutum
  Clone ID: LIB3583-015-P1-K1-H12
gcagggttttctagagccttagctctccaagcctattcttttccagattttcttaagttctctgtctgggttagcgttctagtttgtagtagtatagatcctcatcatcctagctacctaagaggccttttgcatgttctatttgatctcagttccttttcttccttctcagcattagcctatggctaacatcttatagtccttagttgtaagctaggcttctgctttcctagttttttattttgtaaggctgctttattctactgcttcgtttgcatgtgcattgttctatgtactgcctgctgccacatttctcctcgcagccatttgctgtcttgtagctgtggggtttttgttagcttctaggctagcttaagttattagttctttggtatgtgtaggaggagctatgttgctgtcattttaccatggacaca

SEQ ID NO: 48084 - DNA, 338 bp, Gossypium hirsutum
  Clone ID: LIB3583-015-P1-K1-H2
gcgccctcgcgtccgctcttatcgccccatccatggcgagacacttcccatcccagcagcggagatccccatgaggacctttttagcctcatgcgaccccaggcatctccactttcttacatagaatccaagctgattcaccgaactccgctcaactgccctagttcatgaccggctagtttcttcttctcctgaccgggctcaccggcaccaagaccagtctcggcttcatgtttttcatgccatcgatcatgatttcttgccctggatggttccctataggcaccgaagagtcgatcgtcttcacgagtttcacctgtgagtgtaggcttcgtgtt

SEQ ID NO: 48085 - DNA, 457 bp, Gossypium hirsutum
  unsure (1)..(457): unsure at all n locations
  Clone ID: LIB3583-015-P1-K1-H3
cggacgcgagggaccgagnnagccaagagagcgggagcaccnncacccaccaagnaaaccccaacaccggcgcggggcaggacccgcaaacgccgagcccccccgccagagaggagagcggaaacgccaccacggcaggcccccagcagaaccagcccgnaaacgcacccaagccctcagcggacccggaagacaaaacccagggacaaaaccgaacacacacacnccgagcccaaagccggacccgncgaggagnccgccagccctcaaaggaagacaccccacagacttttccccaagcaacccaaaccccgccaacagaaccacactcctcgaaggcaggacctccaagctccccacaaccccctcaagaagggaggtcagcccccgcgcagagatcgggaagcacgcgccactccagagaagatgcagctcaaccgcctgacacaaacgacac

SEQ ID NO: 48086 - DNA, 249 bp, Gossypium hirsutum
  unsure (1)..(249): unsure at all n locations
  Clone ID: LIB3583-015-P1-K1-H4
acccagaacagcccaaaaaagcccccaacaccncgaagaaacaaagaaccaaacaagcccaaagaagagagagaagaaagagagagccgaaagagactacgagaaccctccaccaacaccacccaccaacgagaccaagaccaagcctcagtcttttcacagagctctcaccaccgaattcatcactactctcctcttcctatacatcaccacagccaccatcatcggccacaagaaacaacacgaagc

SEQ ID NO: 48087 - DNA, 530 bp, Gossypium hirsutum
  Clone ID: LIB3583-015-P1-K1-H9
cccacgcgtccgctagagatgcaaagagactgcgagctttaagagataagaggaagagtagcttctagggctaggtatgcgtctagagcttgcttctgatggtggtgtgcgtattgttgttgctcggcctcttctggtagagttaggttgatgtggtggtagtagttgatgggctggcatgcatggtgtgtcgagaagagctatagtttgagacccactgacttgctgggtgtttattcttatagcaagcgtgtaaacctgggtgtaggctcgtctagttgagctcgtggagagagagtttacactaccgttagttattttaacattattcatttccagagccattaagaggctattagagcagatgctgctctgaagaatccaaagatagagagggagggtgctactctcaagaacaaagaatcactttgcaattctttatttcctgagagaggtccgtcagttccactagcacagtatgtccggtttgtcgaccattactgggattacctcaatgctcttagtcgtgc

SEQ ID NO: 48088 - DNA, 619 bp, Gossypium hirsutum
  Clone ID: LIB3826-001-Q1-K6-A10
atttaaacatgtataatttaatgcttattaaacatacgaacttacctcattcgctgaaacgacaaattaggtcgactaatccgatattttgttttccctcgttctaaatccaaatcttgtttatctcaatctaattgaagggattaaggttgctgaattttgaacataaaaatggcttcttcctctttaagttttggctgaaaaggtgaaaagatgatggcgttttgtttttattttatttaacttattattaattacttatttacacttttaccctttaaaaacattaataataacaccaatttccactccactatcatccactatctcataaatgagatatttactacataaggaccttcacttttaagttctatagctatttgatacctttagcttatagaacacaacttttacgctttacgcgatttagtcctttttaccgaattaaacacttaaacggtaaaattcctttacaaaaatttcacacaataattatatcatgatataaaccataataaaataataaaataaatattttgacttcaaatttgtggtctcaaaaccactgttccgatttagctaaaattgggttgttacaacttcttctcccagttag

SEQ ID NO: 48089 - DNA, 523 bp, Gossypium hirsutum
  Clone ID: LIB3826-001-Q1-K6-A12
ggcgtcagcagagtgcaagcgataatgctcggtcgcagctttgagaggttctcaataaccctcttaagcatgcgtatttgagatgggaagcttgcaactgttgggcgacagagggatactgcgagctagccattgtagatacttaaaagcctggatcgggccacattgggtgtgtgtatctataagaagtgagtagacctaagtgttatgtcgcagtgagagtttttgacaatgcatctctagcaagtcacactaagctcgtttcagctcaaacagaaagacagatgctgcaatcagcttgagtcatccttccttcctacgctgcacccccattgggcatcgaaaatacctcgaccgtgggcatggcgctctctcccgggcgaatatttccacacccttatgcaaaggcaacatgctatcattttgcgaacacaagcaggaaaagtttaatgtagcaaatgtcttgcttagtactttaatatcgttacattctcaggggttatctatcggtggccttcaaccc

SEQ ID NO: 48090 - DNA, 295 bp, Gossypium hirsutum
  unsure (1)..(295): unsure at all n locations
  Clone ID: LIB3826-001-Q1-K6-A3
ctcaanattggaactgagggatacaaactattgcgttttgaggaatttttgaggctgaggctcatgttattactagttctgttgactcccaaattgaagaaaattttgttataatgtaaataagtccccgtataatgcaaatctattaagatttgaatgttgttattgcacattaacttttcattttttaatgcaagtttactgtcataaactaaaaaaaaaaaaaaaaaaaaaaaaaaaaaaaaaaaaaaacaatataaaaaaaaaaaagcttacataactctagcatgcaaaa

SEQ ID NO: 48091 - DNA, 618 bp, Gossypium hirsutum
  unsure (1)..(618): unsure at all n locations
  Clone ID: LIB3826-001-Q1-K6-B7
aaaagggggctctagaggcggggagggggggtcctagtcccgaacccgatggtgccgctgcactgctagagctgcttccctggagagagcagggcggcttgtgccggacgagggacggactgggaacggatcctttgggggccttatctgggcgaccaacaggctactcacaactggttcggacgaagggaatccgactagagcaatttaaaacacaaccataagtagaagacgcaccgtgtcggcatagcacacggcacatcgcgatatcactgcctcgagagcttctgcgatgtagaaagagagagacaatgaaccatgggccattcaacagtgaaagtaactatgactatcttaatgcagacaaatgccatccacatctaacttgtgacccgcctgaatggtttaacgagtaacacactgtctcgtgtcactgtccatgcgaaaccacaaactacgaaacgggtcttgatgtgaataagctgggataatacaagaaccctgtntgatgcttgaactctagtatcacctttgataaaatgactggagaggcgtaggataagtgggagctctcgggcgaaattgaaaaccactgctgtcaacgttatggtacttatt

SEQ ID NO: 48092 - DNA, 650 bp, Gossypium hirsutum
  Clone ID: LIB3826-001-Q1-K6-C4
gggttctgcaagtctgggaatttggacgaggccaatttgattgtagtggaaatgaaggagaagaatgttatcctgataaagtgacatatactattctcattatcgggcattgtatgaaaggaagaatgcttgaagcaattggcattttcgataaaatgttatcagttggttgtgtacctgatgatttcgccgtgcattctttggtatcttgccttttcaaggctgggatgcctaatgaagcctcccgtgtttcaacaatatcatctttggataacaatattcctttgaggataaacagagttgtgcctgttgctgcttaagagaaaagctccgcatcattgaactcagtctggtccagagatgttgaaaagggcctacagcatgcatcaagtatccaattaagcatatccagcttgaagcacaaatgaccttccattaagataacaagagaccatcaccaatgaatatttttctttggcttcaaatgctggataatgctatagaaaacaggcatgatgctagatgagtggcacgtaccacggaggttggccctttgtcccttcacttctgtatgtcaaatgagaaaacaagcaatttcgtgttttcagtaaggaacatggaaaaaggatggatcaaaatcatgttttttc

SEQ ID NO: 48093 - DNA, 586 bp, Gossypium hirsutum
  Clone ID: LIB3826-001-Q1-K6-D1
atataataaaaaaaagaaccaaacaatatagaaagtacacaaacaaacacaaaaaaaaaataaaaagaggcatagaatcttatatataaaaaaaagaaaaaaacaaagaaacataatgcaaaatacaaacgaggtcatctttagaaaacaactaatcataacctactctctgtcagggggcgcgcatgcctggtttatggccatctggtgctcttaaccaattggcgggctgcttttgttcttaaccatctgcttgggcgaaactggtgtggcaaaatctgactctccctgtattggataaaaatattcgttcattgtgcttaatactctacagcgggctccacttctcttatcttcgtgctacactgcggtgctgtcagctttatgatgacttctctttctaatcgttaatgctgtattcctgttaggttctttatctgaggctgcctttatggttccggtttagtgctggaccccccctctaccgctccaaactttactttgcggacggctacgttgttgccctctccctgataaataggggggcgcccttgggcgttccagtccacggtttttattggggact

SEQ ID NO: 48094 - DNA, 454 bp, Gossypium hirsutum
  Clone ID: LIB3826-001-Q1-K6-D2
ttccgaaaaaaaaaaaaaaaaaaaaaaacaaaaaaaaaaaacaccaatataaaaaaaaaaaaaaaaaaaaaaaaaaaaaaaaaaaaaaaaaggaaaaaaaattgtaaaaaaatgaaggataaaaaaaaaaaaaatagggacctaataaatggtaaataaaaaaaaaaataaataaaataaaataaagggaccattttaagggggaaaaaaaataaaaaaaaaaataaaaatagggggggctcttttttaggggttccagttttcctttttggtcattgggagtttttgttttttttttggggccccttaatttaatttaatgggccgcgtttttaaatggtgggtgtttggaaaacctttggtttcccctaatttattgggtttgtggaaattccccttttggcgacttgtttttttgcaaaaaggcctggacccgttcctttttccaaaattt

SEQ ID NO: 48095 - DNA, 585 bp, Gossypium hirsutum
  Clone ID: LIB3826-001-Q1-K6-D8
aaaaaaaaaaaaaaaaaaaaaaaaaaaaaaaaaaaaaaaaaaaaaaaaaaaaaaaaaaaaaaaaaaaaaaaaaaaaaaaaaaaaaaaaaaaaaaaaaaaaaaaaagggaggccttttttaaaggaaacggggctgtcctttcttagtggctcccaggtttacacccctttttttggggccaccctatgttttgttggggggccccctattttcaatcacgtgcccgggtttacacaccgtgtgcccgggaaaaaccctggggtgcccaaccttttttccctggcggcctttccccttttggggggggggcgttttgcccttgggccccaacccgttccccttttgaaaattgggcccccccttcttgggaactggccccccccctggggggggcttttacccccggggggggtgggtgttttcgccaggggggaccgttccccttgttaggctcttatcccccgcttttttgcctggttccccttcttttctcgccaggttctcggtctttccccgcttttttttaatcggggggctccttttggggccccgtttctgggtttaacggctccgggccccgaaaaa

SEQ ID NO: 48096 - DNA, 601 bp, Gossypium hirsutum
  unsure (1)..(601): unsure at all n locations
  Clone ID: LIB3826-001-Q1-K6-D9
ccggngtcgacccacgccgtccggtcagctgtgcgcactgatcccataatgtctccgagtttcccctcggtcgtgactttgggaaaaccactagtacatctgtgcggaagaaatcttgctggggtcttacacatgctcttattctaatatcatgatgggttctctcatcaccgatagatcagcattgatccttcttccgtaaagctgcactgggcagatgatgatatcctactggnccaagcgggcagcacctggctttaatgagaagcgcggcatagaggatcgaataaccagtgctaagagctttggccgaggtgccccaaatgctgcaggtgcacctgtagctgctggcagaggagccagagctgccgctccacctactgctgtcgaaaagctgaagaactcggtgaagagagtctgacaatctgggattcagtttgatggaatcagtgagtagtggacagtgactacgtacttaccatgaaggtagttacgctattggagttgaatggctatggggatgaggatgatgattataaatggtacgcatgggaactatggaatgtgacactaagtagctctgaactaagagatctgtgtt

SEQ ID NO: 48097 - DNA, 632 bp, Gossypium hirsutum
  Clone ID: LIB3826-001-Q1-K6-E7
ggtatggagacactatatggatgtgggtggggagaatttcttaagaccgtgtaatcttggtgatgttgatatggtggaagaaaggaaataagagaaaggagaggaaggagagatggaagagggagaaggaggaaatgtagaggaacaagaggatcacgaggaacaggaggtacaagatgaacaagaggagcagcatgaagaaggctttactacttccccaaaaggtgacaatttggaggctgtgcactcggcaaatcttcttgaaggaatggaaactgccgatgtcccttttacaactggcttgcacattcgcgataactcatcaggggaattccttgtctccagggttgatgctcggacagttcctgctgtctcatcatttctgagtaatggtaacaagagagagattggtcatgagaatgatatatctcataattccttgaatcttagcaataagaggttgagaactgatgagcaatgggataagtcatctgattttgatacgtgcatggaacaaatgcagcattggatggacaaagcaagaatgttgtacgctgcgaaagaccaggcttgtggagattcgagtatgcaccaacaagtgttgctccatgagttgcaacggagggataccc

SEQ ID NO: 48098 - DNA, 560 bp, Gossypium hirsutum
  unsure (1)..(560): unsure at all n locations
  Clone ID: LIB3826-001-Q1-K6-F5
gtcgacccacgccgtccggtgtgctctgtggtctcattcactgcccactagacctttaaagccaggtataacatgattcttccttttgaaaaaatgactacatggcttctctattgggtactaaaatctgtagtgggcaagcactggcatgagtgtcaatgatatgtgcccttaacaaactctattcgttgtatagcaaattactactgcaaggaaactangaaaccctacctttccagagcacacaatcccaccagacactgaaccacctgcatattagccccatgtgtcaacatactaaactgaggaagttttgtgaggctaaatgcatcactgctgaggcctattctccttacactgccaaatgagctggtgccgaacaacttaactgatggagtgtcatgtactcaaagaaattgcccaatacaggcaaaatcaattacttaagtttgcttgagatgggcatgtaaacaaagagtgcgtgcgataccgaagagctccaacactgaacggatgaaacaaatcctagacatctttcattgaaggctcaccgatgatga

SEQ ID NO: 48099 - DNA, 641 bp, Gossypium hirsutum
  unsure (1)..(641): unsure at all n locations
  Clone ID: LIB3826-001-Q1-K6-F9
ccggtcgacccagcgtccgtaactgtataaaanaaatcctaaggaactagctgactcaaacgtgcattccaatggttactacaaaaattttttggactggccaattatagccatggttatccgaactgtagtgtttggtttggttttaattcaggttttattatattacgactagactggcgtaatttgaaaacttcttattaagataaccaaataaggctagccgaaccgatgtttgttttctggtgacttgattagttgagtgaaaggatccaacaatagtgatgtcatttatacgtattttaagcattttcctccattgtaacatgactgacttcggttttgtcttctgatttgtaatagcagggacatactaaactgatccattctgtatgctgggacccttcaggtgagcttctagcatccgttagtgaggactctgttcgagtttggtcctttgcgtcaggcagtgaaggggaatgtgttcacgaattgagctgtaatggcaacaagttccactcttgtgttttccatccttcgtttcaatcactgctcgttattggctgttaccaggcaagtaactttacttttaatcttgtatttgctgttatatatactaccttgtcaatgacatgctccct

SEQ ID NO: 48100 - DNA, 395 bp, Gossypium hirsutum
  Clone ID: LIB3826-001-Q1-K6-G10
atatgggggggccgttcttacggacccatgcttgcgaccgcgtgcctgctatgtcgtgcctcttatattgagttccctggcttcattttattaaccttggtgttgggacgaaccctctggtaaccccctgaatttccttagcttaattccctttttggccagccgcctttctccgggtggggccctgaccaatcggccttccaaaatggtccttcccaatggtggcgaatgctacacgccatgtggcgccccctttgtcgcggcgctttgtgcgcttccgctctgggggtctcgctcagttggcccgttcctctggcccgctccttgtggttccttcctttccttttttgccctttctgcctggtctccccggcgggctttccctggggggcttt

SEQ ID NO: 48101 - DNA, 487 bp, Gossypium hirsutum
  unsure (1)..(487): unsure at all n locations
  Clone ID: LIB3826-001-Q1-K6-G11
cgggttcgacccacgccgtccggtgtagtggcangnagcagcatatgtagnaggcagtatcaagcagtcgatgtggagccgactgaaagctcagtgtagcagactttagtatgtagtattcaatacagcctcactaaagctgaacgatattgagaatgggtaaggcctatccaagacgtgttaggggcaagaagcatgggtattcttcgtgtttaaggccattcttcagattacctaagagnaaggttatgtgttgttgcgcgacatttgggtaagtgtcctattctactcagtagtttgagctggtaacttannagtgttatttttcgcaaatgaaacagttatgggtacaanaagcatcttttcagccaaggtgctgtaacaaagccttgctttcaaagccttcaaaaacagtaaagtagtagaatactntgcaaatcctcttttgaatcacttccgcttccctttcccttacccgcttcttaca

SEQ ID NO: 48102 - DNA, 654 bp, Gossypium hirsutum
  unsure (1)..(654): unsure at all n locations
  Clone ID: LIB3826-001-Q1-K6-G12
acgcgtccgaacaacccaaaanaaaggaagagngggnnaaataccatgtggtgcggcgtaccagtgggagaaggtgacccttgcataacgtgctagttgcgacaagaaaatacaagactggtgtaccatatacatttaatatactctattatcactggttctcatgctcaaacagggtgaacagatatatgcctgcactctgtatcttgatgcagattaatcgcccctatttcatccgatgatatgaggcattactgatcataaggacatattattatgacttaactcctagatgaagttgtttcctggagcaatgctgacataggtggtaacgtacatatgctatgaaagagtcaaagttcattttatacaagggattatgatggaatctaggtctcactagacccgtcatcgagttgtttcattcgttagaaataatgttgcttgagcatggattccagaagcatctcactctagtatgatacatgaatgtccaagttttagaatacatttctacatctgccatcccttattatcacacatggcgatcttaaccgatatcatttgcccatgaattctaccctaaaagtcttgtttgaataagatgcaaaatcctaaataataacagataaactgtgtatcaaacgctcacaa

SEQ ID NO: 48103 - DNA, 563 bp, Gossypium hirsutum
  unsure (1)..(563): unsure at all n locations
  Clone ID: LIB3826-001-Q1-K6-G9
gttgtaatccggttccatccattgtccacaggtaagtgcttcgtaactttgtgtatttgctctttggtggtggatctacatttgtgctatttaggttggctctttttatgggtgctgtatgttaagtgtaacgtccaaagtactgcgtttatgttgggcgaggagttagggaatcatttgtaggatgtgtgtatcttgatatgtgacgatattgtctatatttacccatttgacctgtctctacctccatgtaagatgagtagggtcctatggaagactcgctgtgggtcggacctttagccgtgttaattcctttacttatagatccatctgttggaccatgtgtgcttaaaaggatgtgttggcgctcgcgactggattgtggtgcttgtgtattcatattttattatttaatattcaagggttttgagaacattaatgctcatagctattattgaacgagattatttttgaaaagttaaagtcagtttgctgataaacttctacggtaattgtttttaatacctggtcttggntaaaattttagagagccctatagggcg

SEQ ID NO: 48104 - DNA, 583 bp, Gossypium hirsutum
  unsure (1)..(583): unsure at all n locations
  Clone ID: LIB3826-001-Q1-K6-H6
tggtacgcgtggngctattattctgcatgaaacaaanattcctctttcgaaaaaaaaaaaaaaaaaaaaaaaaaaaaaaaaaaaaaaaaaaaaaaaaaaagaagggggatataaaaggataaaagattaaataaaaaaaaaatgacgagggggttgtgcttttttttagtttcccgcttactttatttggggggggcgggggttttatattttgtttactgggtaaaatactaggggttgcggatcttaatctttcttgcttgggatactccttttcgcttgtctggctttaatagcttttgaggccttgtaccgtttttccctttttggcagttttggcttattgggttgggggactggtgacctttcctgtttttggggcattaatcccttgcggatggggtgggttcgcctgcagcgtgacctttacatttgccagcggggtggttcccggtcctttgacttttttcctttcctttttcctaaggtcggacggttttcctttttaagttttatttttggggcttctttcaggttttccctttaccgctttaagttttttggtccgttttaaatttggttt

SEQ ID NO: 48105 - DNA, 337 bp, Gossypium hirsutum
  Clone ID: LIB3826-001-Q1-K6-H9
aaaggaaatagctgttgtgtggggggttctaggttcagttgtctggccgtggttttccctcgttttggtttggtttcccctggctttacttggcgggggggggttgccccacttccggctttggcctgctgtggctttggcgatttggcttgtttcggttcgtcttcccttttgttgcgctgcctgtttggcggctgggccgggccctgttgccgttcctttttcccgcctggtgtggtgttttctgcagcttgcccggtcctttgcctttgccctggcggctgttgctgtttctttcttccgttcctttttcgtttgctttgccggctttccccgt

SEQ ID NO: 48106 - DNA, 403 bp, Gossypium hirsutum
  Clone ID: LIB3826-001-Q1-N6-A2
aataattcttcttttgccttttatgtgatcattttttattaatttcttaaaccctatttaaattttttgagtttgccacccaaggaacaaataaaaggttgttcccaggaaacaaccccacccaaaggaaaaagggccaattagtttggacttgacaagcaaatgtggatggcagaagggcaagatcaaccggcaccacctgcggaaaaattaaaaactctgacaaacaaaagctcaaaatggggggccaacacaactactcgttcctgaagggccctataaaaaccatgtgacccttggtccattgtctaaaagataaggtacaacggacttcatgggaggtctcagagaagcaaccggcccacaacatcccattgcaagctttaacgcgagcactaaaccg

SEQ ID NO: 48107 - DNA, 172 bp, Gossypium hirsutum
  Clone ID: LIB3826-001-Q1-N6-A3
acaacattcaagttttaatagatttgcatttttcggggacttatatacattataacaaaaggcacataaatacgggagccaacagaactagtaaaaacaggagcccaaacctcaaaaaaaccccagaccccaaaacaaagaaacccccaaacccaatcttgagcggacccca

SEQ ID NO: 48108 - DNA, 439 bp, Gossypium hirsutum
  Clone ID: LIB3826-001-Q1-N6-B10
aaaataaaaaattcaattttactttattggaattgaaggggaaccaacaaacccccaaactaacaacaaaaacaaggggggcttattacagccaattacatgggagtttttaacaaaaacaaacatccttcaacaaaacattgggacgggagcttaaaaacaactagccccattggacttttaaaactctggagtcttaaattttggggggagtcctaaatcagggaccaactcaaatccttggcataaatcccgcgaggggaaacaacattccccattgctctgagtttttcttccaaccatttgtatcgatcttcgaaaagccttgggagtaaaacctttgctttttctattccttccatttcggctcgaacaggaacttaaagaatgggtggaccgttccttggattgaaacccgaccccgtcgggtaattcatgg

SEQ ID NO: 48109 - DNA, 429 bp, Gossypium hirsutum
  Clone ID: LIB3826-001-Q1-N6-B3
gagttaaaaacaaagcgttggtgggggaaaataggggacaaaaaggcgggtacaaaaggggggcaacggggggataaaaatggggctctttactttgggcaaccaggccttcaaaaccaggccttgaaagtgggggtttgtttggggggattttcttggaaaacagatcttggaaaacagtttcgggatttttagagggaaactcaaagtttagggccacaccttaaagggggcccccttaaacggggaaactccaaccagggagaccaaaactgggggcccaactttggggactgaaatttggaaaggcaaaatttaaagggaagacacctgggggaagacaactgaaaaaactggctagatcaaaaatcctgtaggggcaagggtatatggagggaaacacatttaaaaatgcttgctaaaagcttt

SEQ ID NO: 48110 - DNA, 403 bp, Gossypium hirsutum
  Clone ID: LIB3826-001-Q1-N6-C4
gggggggccaaaaaaaaagggttttgaattgccccaaataaataaggaaaaaaaatgaatttggccccccctttttccatgttccttacagaaaacacaaaaatgctttgttttcccatttgacaaacaaaagggaagggacaaagggcccacccccgggggaccggccactcaattaaaaaaaagcctgttttttatagcattatcccccatttgaagccaaaaaaaaaattcattggggaagggcttttgttattttaaaggaagggcatttgggcttcaaaccggatatgcttaaatggatacttgaagcatgcgggaggcccttttaaacatttttggaccaaactgagttaaaagatgcggagctttttttttaaaaaaaaacaggcacaaatttttt

SEQ ID NO: 48111 - DNA, 394 bp, Gossypium hirsutum
  Clone ID: LIB3826-001-Q1-N6-C7
ggggcaaagggggggcaaggggtttttctgaaaagcaaggggcaataacttcagaaattcatagcccccaaaacaaaaaaaaatggccgggaaaatcaaaggggcagttttttaaaacctccaaaaatttcaaacccaaaacaaggacttttaaaaacaactaggaaaaaaaggctaaggaacacaataacccaacggtagcggcaaagggaaaaagggttttttcttttccaggttgccccgcaaaaaggacggtttttggggggcaaaaaaccctttccaaggaaacccctgttttttttaccaacaaaaggaagtccccaaaattccctgggcttgggaaccggattgcaaaaccagttaatttttggggcattggggatagcattggggg

SEQ ID NO: 48112 - DNA, 452 bp, Gossypium hirsutum
  unsure (1)..(452): unsure at all n locations
  Clone ID: LIB3826-001-Q1-N6-D8
ggtcgcgtgggtgggccgggttggggccgggggggccccccggggggggggggcccggttccgggggggggcccggtttcccgttggggggggggctaaagcggggggcggggtgaggggcataggggttcccggggggaaattgattccggccgggggcccaaaaaaaaaaggaggggggggctaaagggggaacgccgggggggcctttggggggggccaaccaaccgtattggggggggggaaacggccgggttccccgggggaaaaaatggcccaacccccgggtaaaggaaggggccaattcgcggggaaggggggtttttattttggcccccggggggggttttttttnttcgcctgaaacggccaaaaccggtttggctttaacccagggggcccctgaggtttgcccccgcgggccaaaacttgttttgcccgggggggaaaaa

SEQ ID NO: 48113 - DNA, 531 bp, Gossypium hirsutum
  Clone ID: LIB3826-001-Q1-N6-E10
gtcttcttgtttttgttttgtttgttctttataattttacttttttgtctagtctgttagccatgtgagtaagtttttttcttttcctgtgaaagcatatgggcggcaaagggcctctaactatcggaattgtgctggagggtggggaatggccatgacattcgttttgaagaagaagtttaggtcccaaatgtgccaagtcttttcggaagttgatgttccaaagattctgcaaatacctttggcccagcgtggacaaaatgaacttttgatatggaggggtgaagcatcgggtaaatatactgggcgtagtggttacaaactactattacaaggcaatgattacaatattaatggttacagcccgcccgaaattacaaaatgttacaagaaactgtggaactgtaatctcccctcaaaggtactttttacagtttggagagccactcttaactacctccctaccctcgtgaatttaagaatgaaaagattaacgaataacgccatctgcccgagatgtaagcaagggct

SEQ ID NO: 48114 - DNA, 460 bp, Gossypium hirsutum
  Clone ID: LIB3826-001-Q1-N6-E5
gggggcccgggggccgccccggaaattcggggccggggccggggggggacccactttcccatttgggggggggataaaaagcgggggcaaaaaaaggaaaaagcggttcccgggggaaaaaggttaaccgctaaaaatgccaaaaaaaaaaagggccggaaaaaaaaagggaaaacccggggggccctaaggggggggcaaaccaaaataaatgggggggggctaattgcccgttttccaaagggaaaacctggggggccacctgtataaaaaaaaacgccaacccccggggaaagggggtttccttatagggccccaggggggttttttttttgcccagggaaaagggaaaaaagtggttgcccttaacccccgggccctgaaaaaatacaaaaaggggcccaccctggtttgcccaaaagggaaaaacctgttgggggggggtaaacggggggaaaaa

SEQ ID NO: 48115 - DNA, 545 bp, Gossypium hirsutum
  Clone ID: LIB3826-001-Q1-N6-F5
aaataaactggttaatgtgaagtttgccacacataaacaaacctttgttcatatctatatgtctatatctatatttggtatagagaacacaaatctccccatcccaaagctcttgaagagactcgacaggaccatcatccgatccaaatgccagtgctggatatactttgcactgcgtggagttggcttattttaagcaactcatcattactgagcccccaatcaaagatgtcaaggttttgctacatcctttccttgctgaagctcttaagtatcacacacactccttgctcacatgcccatctgaagcaaacctgaacaactgattgttccttggcttgggcaattcttttgagtacatcacactccatcacctgatccgatccccaccatctcctttggcacccaaaggagaataagcctccacaactatgcctttctcctcacaaaacttcctgagcttcttttgatgccacattgggctgatctccacttggttcactgctggtgggattctggcactggaaaggtaggcttctagtttc

SEQ ID NO: 48116 - DNA, 291 bp, Gossypium hirsutum
  Clone ID: LIB3826-001-Q1-N6-F9
cgaacatgcatacatgcattgatttcattaacaaaaattccgcaaaaactatcaaagatgttaccatccatggcttcaaatcttcaacctcaaggaatatgcaccttatccaatccatgaacagtcatctccgacttcgaaaaaaaaacaaaaacaaaacagatgtaccaacaaaacatcaaaaacacaacgtgaatgaacagcaagaatgtccgagttaaagatacaagggttacataaacatgcatgcaacaacagcagggttagtttttactagggttacacagggag

SEQ ID NO: 48117 - DNA, 483 bp, Gossypium hirsutum
  Clone ID: LIB3826-001-Q1-N6-G10
cgggcgcgtgggtccggcccggggggccggcccggggcctgccggcccgccccctgccggggtaccgggtttccctagaggggggcgtattgagggggggggcagccgcggggatgaaagggtcctgggggaaaaagtccacacaccaaacggccccgaaacataaaagcccaagccgggggggccaaaggagggggcccccaaaaagggagggaactgaaataaatggccgtttgccaacgggcaaacctgccgggcggaaacctgtaatgaaacggccaacaaggaaagagagaccgcccggggaagggccgccagggtgtttttcccccgggcgggtgtgcctgccaccagttaaacggccaaaaccggctggccctaaaagggttgcccctggggagacccgctggtgcgccccacccgggaaaacccccggcggcgagaaaccaacgggggggtataaaacgggcgggattaacgtgg

SEQ ID NO: 48118 - DNA, 445 bp, Gossypium hirsutum
  Clone ID: LIB3826-001-Q1-N6-G2
aatccaaattggttaccgaagtttcaaaaccaaacattttaaaccaccaccggtaacaaaacctaaaaaaacccaacaaccttaaaaactgaaaaacctcaacaccaccaaccactgaacgggccccggggacgacccgggaaaaccggacccgaaccagaaggcccaccaagcttgcctaaaacgaggacaaagaaaactcgggggaaaaaagggcaaaaggggaaaatgggggaaattggaaaacccggaaaaatacacaaaaaaaacaaaccggaagaaaaaaggggaaaacccggagagcccaaagagcgaacaaacccacattaaaaggggggaacccactggccccattccaaggaggaaacccggcaaaccacggggaaaaaaaaaacggccaaagcgccgggagaggggggttgggcaaagggggcaaagggggaac

SEQ ID NO: 48119 - DNA, 408 bp, Gossypium hirsutum
  Clone ID: LIB3826-001-Q1-N6-H3
aaaaattaagttttaaaaaaaggaacgttggggaaaaacaggggggggcgaaagggggggggtgaaaaaaaaaaaaaaaaaaaaaaaaaaaagggaaagggaaagaggggggggaggagagggagggagggggggggaaaggaaggagggggggcaaaggggggggggggaaggggggaggggggggggacggaaggggggggaaagggaaagggaaagaaggggaacctgtgggggggggaccttgaacgggggggggaaacccatcaacgggggggccaaccccaaagaaggtggacctaaaccccggggggcgggaaagcgctaccgcgggggcgggcccatgagggggggggggattaaaggcctggggaaatggtacttggggccaggcaattgttccccccc

SEQ ID NO: 48120 - DNA, 260 bp, Gossypium hirsutum
  Clone ID: LIB3826-001-Q1-N6-H4
gctccaagggggctaaggggttactggcaaaataaaaccgggcgaaagcggaggcccggggggggggggccaaaggtcttcggaggcccctgggggggaaatgttcggggggggaaaaaccccccccggcccggggggttttcaaccggagtaaattgtttaggtttaacacagccctaattttgggggcgcccgtcaaccgggccgcttgggggggggggctttaaaaaggtggggggggtttttgacttttttttttt

SEQ ID NO: 48121 - DNA, 489 bp, Gossypium hirsutum
  Clone ID: LIB3826-001-Q1-N6-H6
cgtgggggggggggggggtccggggtttctgggccggtccctccgggggtccgggggggggggggggggcgcgggacgggggccggggggccggcggggcttcccggtttccgggggggggggggtttgggggcacaagggcccaaggggtacaggggggaagcgggggagttggtcccggggggcctaacgagcgagcgggcggccttaaatggaaaggcgggggcggccggggggccagcggggaaacctgtcgggcctgggggcttggggcctcggcccacccggggagggggggagcctgggtgtcgggcggcaggggggaatcccccttgaccggggggggggggaatgggggatgggggggctcggggtgtccccggtggagcggggaaaaggggtccagcctggtccgccccaccccgcgaaaattcggaatgggggggcaggcgggccggcctcaccgggcgaaaacgcgggtttgggggg

SEQ ID NO: 48122 - DNA, 375 bp, Gossypium hirsutum
  unsure (1)..(375): unsure at all n locations
  Clone ID: LIB3827-001-Q1-K6-A2
gtcaagtttctctctctctctctctctctctnttgttgnagttcntaagcttttgtttcantggctgntgtccgtggccgcttcctgcctctccaagttcatgttctcccactgtaccgtttcgtctttgcttccggtggcggtttcggtgcattgaactttctcagtgggccctcgncaggccgggttctagccgtcctttcgcttctccccattggtggtgcactgcttgcattngccgggtttgcactggccggctccgtctttgggctggtgcttgccgcaccgctgttcttcatcttcagcccggttcttgtccctgctgcctttgccnttgccttggcggtgtcggggttcttgtcgttgggggcgttt

SEQ ID NO: 48123 - DNA, 526 bp, Gossypium hirsutum
  unsure (1)..(526): unsure at all n locations
  Clone ID: LIB3827-001-Q1-K6-A6
gttctagatcgcgagcggccgctcgcgatctagattagagaatagtnaactatctggtctcttacaaattcttgaagtgcaagaatgataatttcaggtgccttttctcctggaattctgacaagagtataaacatcttctatgctcaaaccttgatcaccaacctttcgaatttcggtgccaacagccttgtccaactcaagatgaaagtggctgccttgtccttcatcagaaagttttgacaacagatgctcagtgtaaccctccatagcttcccaaggggacttgccaaacttcaatgctgtgctgacattctttctaaactcaagcatttccttcatctgatccaaactagttacactttcatcattcaaaagctcaagattgtgcctctcctcatctttgaacaattctaaagcattggatgtgggaaatcttgtgctntatacggntaccatgataccatgaaagcctctttcttgtcgngaaataaattcaccttgcgtgatggattttagtttctttt

SEQ ID NO: 48124 - DNA, 465 bp, Gossypium hirsutum
  unsure (1)..(465): unsure at all n locations
  Clone ID: LIB3827-001-Q1-K6-B10
ctattacttctcattatcaatgagcagtctcaacacctaaaccatacaatacaccggaatatttttccaaagtaccactaaaaaaaccatctcctttcgattttcaactgatgtctctgttgccaaagagcgattcaatccaaatgcggggggggtggaacgataaccttgaggaggaatttgctttgattcgtgaaattgttgatgattacccgtacattgccntggacaccgagtttccaggctttgttttacgtccggttggcaatttcaagagccgctttgactatcactaccaaaccttgaaagacaatgttgatttgttaaagttgnttcaattgggtcttaccttttcagntgggaaagggaacttgcctccttgtggaactgttttgtnttgcttttggccgtttaatttttgtgagtttaatgtcggccgggatgtctttgctcttgcttcttttg

SEQ ID NO: 48125 - DNA, 320 bp, Gossypium hirsutum
  unsure (1)..(320): unsure at all n locations
  Clone ID: LIB3827-001-Q1-K6-C1
gcgctaccggttgctgcgcctccaggtcaatggatgggggctggtggctcnntgtttttggtgtctgctnancngacgggggctgtgcggaagcacttcntagggatggttaccatgcttgatattgtggcatatattgctgntgacgntggtggtgatgatcagatgacagacgttgctaatcttgagaagaagatgatggtgccggtntcgtcgattatcgggcgcagttttgagggtcttagcttatggactctaatcccagtcacagtcattgtggactgtctggaattgtttagcaagggaatccacaggtcctt

SEQ ID NO: 48126 - DNA, 301 bp, Gossypium hirsutum
  unsure (1)..(301): unsure at all n locations
  Clone ID: LIB3827-001-Q1-K6-C2
ctttaacatattcccccactccgcccaatggaccctcgaggcggtgatgccatccccgtcggcgatgccaacgattttagatcctccgaccctcccggtgatgacaagtctctccctcncaccggggatggagcttgtcctggcaagttttttgtaggaggtttagcgagagagacaagttctgcacagtttattgagcatttcggtnaatgtggtgcaatttcgggttctgtgtttatgaaggaccggaaaacgggtcagcctcgtggntttggttttgtgacttttgcttagccttctg

SEQ ID NO: 48127 - DNA, 649 bp, Gossypium hirsutum
  Clone ID: LIB3827-001-Q1-K6-C4
ccgtccgaaaatttaaaattttaattagacccctcaaatttttagaaattctaattaagccattcaaaaggtttaaattttaattagatcctccaatttttttgaaaatcttcattaatattctaaaaaaagtttaaattttaattaaacccttaatatttttaaaatttttaagtaggccccatcccaaacttaatggcacgtttcgccactaagtcatagttccactaaattcaaaatcgagctgggtcaaaccctaagcattaagcaaaactctctcaacaatattttctctactcatagaattcaaactcgaaatcttgcttaaaaaaatatcgtactcgtttcttcactcactacccaagagatcacattaagcaaatgtaaaaatctcttttcaatcttccctattgaaattctattcaaatggggttgctttgattaccatgggtagcacttgcaatttgtcatttcctttaaaatgtttggtatgccttaaaaaagttgtatcatgccaaaaaagttccccagatttgagccatttttatgctctgcttttctcctttttttaagtttctctttgataatgtgctttttttctttgtactttttagctttgaatgtgttaggttacctatcaccatttgag

SEQ ID NO: 48128 - DNA, 536 bp, Gossypium hirsutum
  unsure (1)..(536): unsure at all n locations
  Clone ID: LIB3827-001-Q1-K6-D10
tgtatgtgaagatgatacagggatttgcagctgnaaaaaaaaaaaaaaaaaaaaaaaaaaaaaaaaaaaaaaaaaaaaaaaaaagaaaaaaaaaaaaaaggcgggagcgatgcaaaggaaccaagctttctatacgcgtgacctgcaacgaaatacactgtgccgtagtgttacctcgaattcaactggggggggccctggtgtaccccctctctaactgggttgaaccctcgtgcccccctcctcacttggcttgctagccatgcggccttcaccggtcgcccttttcaccagttaggcccgccccaatggcccttgggacccgccctgcaccctgactttaaactcggacgcgcccttggttacccccttaatcaccgctgctgttgcggttgccctcacgcccaccccttcccttttcttccccttatttcccgcccctttcgctggctttccttcttttgtcctcaatttggcgggcttttcccggttaggtttaaatgggtggctgcccctcggcctcccattacttgctt

SEQ ID NO: 48129 - DNA, 536 bp, Gossypium hirsutum
  unsure (1)..(536): unsure at all n locations
  Clone ID: LIB3827-001-Q1-K6-D12
gngaaacctaagcaggaagcttcacctttctgttacggatgagaatttttttgtgtcacaatccgattcattacaaggggaagaatgtactcgattctctcagcatggcaaagctttatatagatgattccagcacgtcaacttctgtgaagcctttaaccaacatgcagatgctaccttcaggaccttcattgggtaatactggtcaaccctctcagtccagggtacagggtagaggtgtagctattccaggaccgaaggcctatcatcctgctccacatcataaccaattaaacagagtttctccaccaacgcaggtgaattctgttcagggaaatcctgttcatggcagggctatctcttctgtacaagcagctgctcagcagttgggccagcatcctggtattgggtctcaagcttcctctcctccaaagacagctgtgtcagtcagttcctatgaatctggagaggttgaatcgtcagaaacaagtaaatccaagggtgccattggtgagcaagggaaaaagcagtgctca

SEQ ID NO: 48130 - DNA, 488 bp, Gossypium hirsutum
  Clone ID: LIB3827-001-Q1-K6-E9
cccacgcgtccggcttaatcagagccatcagacgactgggagaagttcttcagcagcttattttagcagccaggtctattggcgaggacacagctcgaaacaaaatttgaagaggctgtctctaagattaaaagagacatagtgtttgcagcatctctatacttgtagtataggtcagttgctggaaaggatcaaggttgttaaatggcaagatgatcatctttgatgagaatattttttgtcagtaagctgagtgaagcaaatgtgatcaaaggggagggaaaattacctacaaaataaattgcacattaatctgcaagtggatgccttttgccttggaagctatttttcacgatacactttacacagagcagcctgtaacagaaaacagcatataaggcggcaaagcgaacaagattctgaaccaatgttgagaaataatttctcacaatccctaacttacattttacacaatgcactagcctgtt

SEQ ID NO: 48131 - DNA, 487 bp, Gossypium hirsutum
  Clone ID: LIB3827-001-Q1-K6-G11
ggagggaaaaattacaggggatgtaaaaacatttttcaacataatatacatttacatttttgttggccaccccagttgtacaactagccctgccgttcctaaaccttttgtttaatgcacaacgaaaacaatagatactgggatttgagtcccaaacttaggctttttttggggcggcggtgtattgcggggcgatgcgtttagtttacactttgtctcacgctacagtattgctacagtttttaatttcaccgccaccgttttttttacactaaccgcaagtaaacacactgcccatccaaactcacccttaatagatatcaccacttacgggtggctttttgaactaattagattaaacctgggttcaaattctaaaaacttcggatgtactatacacagatcgggttagacctatcacttaaaaaagggttaaaagaaatgccgagtttggacaacctgtttctttacaagttcgtgattgggc

SEQ ID NO: 48132 - DNA, 128 bp, Gossypium hirsutum
  Clone ID: LIB3827-001-Q1-K6-G6
cgtcacactgatactttgggtctcacgaattcgtgagaaagagtgataaaggaggggcggatgaagatgattgtattcaagttgttcgacaaatattcgggcttgacttgaaaacaatgaactattag

SEQ ID NO: 48133 - DNA, 454 bp, Gossypium hirsutum
  unsure (1)..(454): unsure at all n locations
  Clone ID: LIB3827-001-Q1-K6-G7
ggacctttgatgatnaagcagcaccctccactggttatactctaatacaagatcaaccctcaagtttgccagagaaacctgtactagagcgtattcttgacatattacagaggagagacacctatgaaatatttgctgaacctgttgaccctgaaaaggttgagggttactatggaatcattaaagaacctatggattttggcacantgagagctaaacctcatgaaggaatgtatacaagtctgcaacantttgtgtcttcgagattgatcccaagttgagcagttgttgtgatatattgtcgaagaaccaccagagggtgctggcaacaaacggtccttcaagtttccattctttgcctgtctgatntttacctgtgagattgatgtccttttgagggcttttgctgcggnggatgagttgttgaacttacttttctccttggaaccgaacc

SEQ ID NO: 48134 - DNA, 388 bp, Gossypium hirsutum
  unsure (1)..(388): unsure at all n locations
  Clone ID: LIB3827-001-Q1-N6-A2
agaggnaaagacaggcatggttaagacattnaaaggaaacatacatggaattgaagcgnaaccctcatttttcatccacacatgcacgcttgcaacgtaattcaaccccccccccccagaaacgaaaagccaaaagcctactttcttttttattcccataagccctgttttgttttttaagtccttccagtttggccttcgtgtgccttgttttcaatcttctgcccaactttctttgttttttgccccacatactctgccctgtcctggacccttctttttgcgtggtctaaatctagcttctccgtccctgttgtcgtcctcagcctgtttgcccgtttctcactacgtcaccctgtttacccgaacgcccccgacgtcaagaacc

SEQ ID NO: 48135 - DNA, 496 bp, Gossypium hirsutum
  Clone ID: LIB3827-001-Q1-N6-A8
agtagtaggagtattgattttcataataataacaacaacaataattttggcaattttctacagaaatcaaccatacaatcatccgccagtataattatgctcaccccatttcaaaaacaaggtggtgatcacaatatgcgggtctaaattacaaacacatatttattacacacaaccattgatttaaaagaagaaaaatcatcaacaaatctaagacgacgacccttcttcttcttctttttttcctttcgtgcacccttaaatttaataaggccctttaagcgaaggacccttcaaagttcaaactgcaccacgaactaaaaccgactcaagctttcgtttactcaatggagacgtaggagccgtcggagattgtcagtggctcccacatcgaactcagcggcttcagcgttgcatccgagcttcggtctaagcgagaacttgggcaaaggcaagctgctaggcggtggagagagtgtaaagacggaacctgaaa

SEQ ID NO: 48136 - DNA, 415 bp, Gossypium hirsutum
  unsure (1)..(415): unsure at all n locations
  Clone ID: LIB3827-001-Q1-N6-C1
aaccaacactagaaacagataagatttggtttgtaggaagtgtttattatatacagaaagcacaggcagccaacanagattctaagatgttgcgtctctcaacaagacatggaagttcacatgacgtcaatctttgacaacaacgaaaccctgagggctccaactatatcggtgagagaaacaagccccgcaagtaatccttgttcatcaaccacccacactcggtgcacgtgcttcgatacgatcttctcaattacttctgcgagggccgtctgcggctggcaactcaccatttgctttggcgccgacaccccctccttggatgcaaataaagggctccttgagactaactcggtgaattccagtgcccttagaggcaaccntgtctgctgtgcctaaagatggcaacccctca

SEQ ID NO: 48137 - DNA, 530 bp, Gossypium hirsutum
  Clone ID: LIB3827-001-Q1-N6-C4
ttttttttttttttttttttttttttttttttttttttttttttttttttttttttttttttttttttttttttttttttttttttttttttttttttaaaaaaaaaagggtttgaaattttgggggaaatggcccccaggggcccaaaattttaaaaaaggccccttttagccccttaattaaaaaaggcccaaaaaggccccaaaacttttcaaaggtttaaaataaaaccaggggggggaaaaaaaaatgggggaaaaacttttttttttaaaaccgcccgcccaaaaaaaaagccccccccctttttttttaaagataagttttttttttaaaaaaaaggcttggaccccccaaaatttaaaaaaaaaaacccaaaccccttttttttttaatccccaacattggccgaaaaaaggccccgaattaaaggggtgtttttttccccggggggggggttgggtgggcaaaccattgctgggaaaccgatccccaaattaaaaaaataaaaaaaacccccggccttaat

SEQ ID NO: 48138 - DNA, 393 bp, Gossypium hirsutum
  Clone ID: LIB3827-001-Q1-N6-D10
accggttccctggggtggacccgggtttcccggaccgggccctgggggggcccggggggggcgggggcagagccggttccgggggggggggggtaaggggtaaaaatgccccccgggtgacagatgcgaacccctaaaaagtccacccaggggagcccccggagggagaaaaggcaaaacaaggggggcggaatgagggaccgaattaaaatcaaaaaagcggaagtaacagccgccttaacaaatgggaaaacgggcgggcaaagggggttaaagaattggccaacacggggggagagggggttaccagtgagacggccaaggggggatggcctttcaccgccgggcccggcaaaagttgaaggaactgcaccacccggccctggccaaggg

SEQ ID NO: 48139 - DNA, 400 bp, Gossypium hirsutum
  Clone ID: LIB3827-001-Q1-N6-D11
acatatcaaatgaaagatttcatttcataaacaaactggtacagcaaggggacctaaagcccaagagatacatgagataaagcccaaaggcttggcccaagagttcaaaccaacaaaaaccctggcaacacacaacaccccgcggccattattaatgaaggaggggagaatgggaaaccccccacgaccgtgaaaaaaaagtcggctcaagaaccaggaccaagcagagtgaagcacgaaaaaacccgagcgcttgtgatcaccaacatcgattacaagcttgtcggtggaggagccaaggaccaaaagaccctccgatcagtcggccatgagcagccaccacaaaaacacttaaaattcatggtttaaatcaaaacctggcaatggtgtatgctttgtg

SEQ ID NO: 48140 - DNA, 488 bp, Gossypium hirsutum
  Clone ID: LIB3827-001-Q1-N6-D12
caaaatgatttgcactgataaaattaaaggaatccactgaacaagagcagaatcaaactgtgcaatgtatcagccttcaaaatctcaaacattgatcacgtactctcaaaaccaggcaagcgtgctcaccaaagagaaataataacaccatttcttataaagaagcccgcctaaaacctctcagaagcttcattagaaaaccgagccacaagaaaaaccgcacatttaaacaaagcgaatgccacccgtcaagccacactaccatacttgaactgactgcagcatgagcaggcgtttgtcatatataactacactatcctggaacaagttgcagcccaaagtggtccaggtcaaaagctggggaacacaaagggcctgaaaggaaggccttcatcaattttatttggacgggctccatcttcaataagcgaatcacttgctaaagctcatttctgaatatctgcgaggctgtttatttgggttatttt

SEQ ID NO: 48141 - DNA, 432 bp, Gossypium hirsutum
  Clone ID: LIB3827-001-Q1-N6-D8
aggggataaaaaaaagtaatttcattaaaaataaacatacctctctctaaaaaaaaaaacatacctgtttctaaatctcatcacactgaatctaagttgggtgtttttgtaaaagggatttaaattacccacaaaatgtgataagatcatgttgtctaatgcaaaaactcttttgggtcagtggtttaacccgtcaaagctgaaacagtggcagtgtatggggaagcaagatatatttgcccttccttatgccccatcccaccaggaaagtttctatttgttgttgacacacaaacctgagcttcgttcatgcgagcatatgtgtccttagggccacccatacaagcagcacaactagggcttgctggtgtgccacaaccagcttcttcaaattttgagacaagtcttgccccagatcctggtcaatgagag

SEQ ID NO: 48142 - DNA, 369 bp, Gossypium hirsutum
  Clone ID: LIB3827-001-Q1-N6-E12
aggaccaggtcttacataaaaacgggggtgggccccttttaaaacactaaaacaaacaggaaaacactaagggccagcttagattacagacaccaagctaaggtttaaaaaaggccaggttttacatggaaacggggttagtcctaatttaaaacactaaaacaaacaggcaaaaggaaaaaactagggtatagcttagggtacagacaccaagctaaagcttaaacatggccagttttggtacaaaaaaactgggtaagtttttcctaaaacctaaaacaaaaatacattattaggggttatttttaaaaaaaaaaagctagggttctggcgggggaaaagaaattaagtttttgggtctgaacttgg

SEQ ID NO: 48143 - DNA, 576 bp, Gossypium hirsutum
  Clone ID: LIB3827-001-Q1-N6-E8
gaactaaactaaattgaacttcttttatttccacatatttttccataaaattaaccaaaaaacacaaataagctatatttctatgaactctcttcaaagtaaaaggaagaaaaaggaggaaatatctccctaaagatgcaacaactttcacagcatcttttccaaatcaattcttatcctagacccaccatggaaaactaatcaattctctcttatacgaacctagggcctatgttactcaaacctggtttgagtgtgagtcttggatatgtctgcacggatttctaagtttgttttttttttcttgtcatgtatgtgaagtgtccttgaagagtcatatccttgtacaaggttcggaagtatatcgagcataatatccggatatgggtacttcaagaaagatgaagaacccgtgaaacataagaaaggacttattgcaacatttgcaaaatgaactgtcaaaccaaaacctacccactaaaatacctaacgcatcagctttgtttctaacagaagacatcaaaaaagagataaagtgaggcaaagaaagggaaaaaaataagagaagaagaagag

SEQ ID NO: 48144 - DNA, 407 bp, Gossypium hirsutum
  Clone ID: LIB3827-001-Q1-N6-E9
cttccaagcctagaaaaaaatccttcttcattttttttttttaaaaacattaaacaaacttacaggaaaaattttaggggactaatttcactaatttaactagaatttagcttaagttcccccaacaatggcagaaaaaaactgggatcagaaacaacacatgttttttttaacaataaaacaggctagggcattgggtaaaatgtaagttagggattgggagaaattatttttcaacattggttcaaaatcttgttcgctttgccgccttctatgctgttttctgttacaggctgctctgtgtaaagggtttcgggaaaaatagcttccaaggcaaaaggcatccacttgcagattaatgtgcaatttattttgtagggaattttccctcccctttgatcacattt

SEQ ID NO: 48145 - DNA, 527 bp, Gossypium hirsutum
  Clone ID: LIB3827-001-Q1-N6-F12
catattaacttcattgaataaatcactaatggtttccatgcaaaaattttggtgtaatgtctataacaatgatgtgtctcggtagcctatgttggatatatggttatattacatcaagagatggtagctcttttgcctaaccatgaataactttaaggacaaaatactccttcaggctccattccagccgtctacttttcgactgagattcaatgatcttcagacactatgaacttgaagagttgtgacaccacattttagtcccaactgtcccggctttttcgaaatgctttcttgtctgaaaggaccttcttgcttttaaggcgtttttgctccccaattgcagccatctttgcgattttcttcttttgttcttccgatggaggtggtggcacataagcagcagcatcaatgattgcctgtagttttgccaaagcatcatcgatgtttcccttttgcgtcctagtcttggttgatgatatcacgatttctccatccttgtttatacggttcttttccatttgcat

SEQ ID NO: 48146 - DNA, 481 bp, Gossypium hirsutum
  unsure (1)..(481): unsure at all n locations
  Clone ID: LIB3827-001-Q1-N6-G1
gttctacttactgcaccttttttatttttttcgtgacgtcccttacaagcataggagaagacattccatatgtggcgnaaaaggacttttgattgcaacgtctagcttgatggatccctgtgggacccaattgtgttgcttggtncaggttcaggtncagagcacagggncacagtgaaacagtttgagcttgtatatctttctgtgagccattgggcgtgntgcgttngggtgntgctgggctccgccngctggtgatcactcntgtacttcgtacatttagagtccggtagacctgtccctgtcagtggaccttcccagttgatccagtggtggttccacctccctcctgccaaggctggaccaaatgcccttgctgtgttcatggcggctccatcaaatggtccgcctcctaagatgttggcgctcacttttgagcctatagccagcggtgctattagtccccctctttcttttttgc

SEQ ID NO: 48147 - DNA, 557 bp, Gossypium hirsutum
  Clone ID: LIB3827-001-Q1-N6-G7
gaagaaatcactcaccaagctgaggcaacattgcattgatagtctctgaatttacagggattggaggctcatacataagttgatttcggaaagaatacatcaagggagaattaattgctgatctttttggatccaacaatgagatgcaaaccgagagtgagtttacaaggccagatttggaatgtgaatcttccaatgcatgaccaaatatccttgcaacaaagcttggactagagagttttgtggctaatgctgatggcacattccgagttattgcacataatgtttctgccgcattagcatgaacttcaggagcacatgatggactcaatttatccacaatcatttccagcaagttgctatcagctaaccattgcattacatccgaaaaatttggatatacatgatcattagcagctactaaccgaaccaaaacctccatgatggatgtgattcctatcaaatcaaccagttggcagaacacatcttgatgcacttgaacgtagttcataagtggaacagtcttccgtagcataaggcatacaacaaccttactg

SEQ ID NO: 48148 - DNA, 379 bp, Gossypium hirsutum
  unsure (1)..(379): unsure at all n locations
  Clone ID: LIB3827-001-Q1-N6-H1
atggaactgccctggctcnccctgtttcttttctgccgggccaatcttctttttttttggtgctgcggtgcgttcttgttttgtgttaatgtgggtgcgtcttgcggctggcgcggtctcggggcggttgctgtgcgcgnaagctcgctcctttcgtttatttggatcgntggtgtgggtcttcctgggtgcctccgcgggtgttccttctggtccctgcgttgttngacgccgcatttgggnngtcttggttccccgttgttcctgtggctccctctgtgtttccgccaagccccttgctgctggggtcatctttcctgcctgtgtcnttcccnctacctgcggtggggttccctcggttgtcatgtccaccggttcc

SEQ ID NO: 48149 - DNA, 525 bp, Gossypium hirsutum
  Clone ID: LIB3828-001-Q1-K6-B11
ttttttttttttttttttttttttttttttttttttttttttttttttttttttttttttttttaaagggaaaaaaaatttcccccccccctgggaggggttctgggcaaaaaccggggggttcccccgtttccgccccaaaatccccccacctcgtcggggggaaaaggaaaaggattctttcgaaccgggaatcagcggggggatcgcgttttaaaaaacaaaagcttctcgaagatttattttacgaaggggggggcttgcaaaaaaataacccccctatttgggaaaaaaaaagttcacaacccaacgcttcgttaaaatggaagcttccaacagggttttaagagcccaagtaattgaattgaccgagagcttggagtccttgaacccgatgctgtaaaggggggaaaacataagcgggtaccacgtccatatcccggagatcccccatcctttgatgaaaccgtggaaacttctttgggcgacgcaacccatatgctcgacttttggggggggcaccgg

SEQ ID NO: 48150 - DNA, 645 bp, Gossypium hirsutum
  Clone ID: LIB3828-001-Q1-K6-C10
gtcgacccagcgtccggctttcctcccagctttgcaaatctgatcttcatgaattcaagcagcactgttgcatccacagtttcctgcaaatcgggaaacaagaacgattttcttgtctggattttggcttgcttgcttcgaagttttcttggaactcctgttgcattcattaacttccacttgtttaaggccattgtacggtgcccttcctcatctaactgcatgccagaatcatttggaagtttctagccttagcctcaaagcctttttaaagttaccacgtcatttcataaccagcatggtttcctctcagttatctagtttaaatgagtctcgcattaacaaagcattccaatatcagttgcttgtccctgtggggcaacctgattctctgacatctgatcatcttgagtttgatttctcggatgtgtttggacctgccccagttcaaccctcaatggaaatcaactcccagaatcctagaaatctggttgttgcaattgaatccaatgaaatgctttatgatgttccaactgtcatctgtaaccgttcacactccttggttggcccctcaacatatgttagccagtcattgaagcttagcaagctcacattacgtgaaacgggggattccttggaacttgt

SEQ ID NO: 48151 - DNA, 631 bp, Gossypium hirsutum
  Clone ID: LIB3828-001-Q1-K6-D4
gttatacattcagtccaaggagaacattcaagtacttgaagctattgaggacaccagtccaatagctagtatgctttccccacaagactctgccggtcgtagtggtgttacactgtttacagcacaaaaggatacatatgtgtccccacgtattggcattgctgtggctctccgagattctgaaatctacagtcctgggatttctcttcttgagcttgaaaagaaggaacgttttgatgtaaaggcattcagttcagaggggtactactataagctttcagctctagttaatatgaccacagacagaacaaaggtcattcatcttcagccatacatgttgtttgtcaatagggttggtttaagtttttgtcttcagcagtgttattctgagacagtggaatggatccatcccactgatcccccaaagctcttagggtggcagagttcttcaaaagttgagttgttgaagttgcaggtagatggatacgggtggagtaaaccttttagtgtttctactgaaggtgtgatgcgcatttctttgaaaaagacactggaagtgatcacttatttttaaagattgaagttaggagtggcacaaaaagctcacgctatgaagttacctttcgcccaa

SEQ ID NO: 48152 - DNA, 658 bp, Gossypium hirsutum
  unsure (1)..(658): unsure at all n locations
  Clone ID: LIB3828-001-Q1-K6-E1
cgacatcttagtccccagctttcaagacaggtaatcagagcaatttcaagatgccggagagaagctatgggattagaagaagaaaacaggggttcatggaaacaagaatccaaccactttcattaaagttggaagagaaagttacaatggaatcaaagttgaatggattcaatggcttccgaggagttttatatgcaatgaggaatgtaagttcattgctactaatgatgttactatatggcggggttcatttttggccagaatcaagtatggtaagagggggaaacgaaggttgtgtgtgttttggatcaacattcatgatatcaacagcaagattgcaacaaagagtagcagaagagataaacgggatgaatgggaaagcagggatattgttgtatgagtttaggaggtcaaagatggcaatggaagaggtgagaggggagctggagaggagaggaggaggagaggggtgggtngnantgnnaaacagaagtggggttgagggaaaaagtagacaacatgagagggtgttttgggatattgagatctggggttgaaaatattgttggacaaattgatgatttctttgatgagatattgaagggaggaagagctttggactctgcagcacagtaagagattgggtaaaatgtaaggg

SEQ ID NO: 48153 - DNA, 423 bp, Gossypium hirsutum
  Clone ID: LIB3828-001-Q1-K6-G3
tgaaattagggctgaaggtaaaagttgatatcttggtctgtcctttttgcttgctataaagctgctgtccatctagttctggtaaaggtttttcgtaagggtcgggaaccgaaagtggtttactacatgtagctgtgcatttattatttgcagattcgggttttgaatttatcagggttttcttaatcctcatgtgattgggtaagagaaagtttaagtgctggcattgttcgaggcctttatgtgaaggtggtccaaaaaaaacttgtgaaacagtttttttttttttaattatctaaatgcatcctctaaaaaaaaaaaagaaagataaataaaaatgaaaaaacaaaaatgaaaatcaacatgaactatgattaccaaaatcaactggaaaataaaaaaaataaagggggggggcctttt

SEQ ID NO: 48154 - DNA, 586 bp, Gossypium hirsutum
  unsure (1)..(586): unsure at all n locations
  Clone ID: LIB3828-001-Q1-K6-H6
gggctatggnccgaaccattgccgacggcggatggggtgaaggagaacaaattatggaaatgggtctttgctgtcagtggaatcttgattactcttgtcatctatggggttttacaggaaaagatcatgagagttccttatggggtaaacaaagaatattttaagtactcgttatttcttgttttctgcaaccgcatcacaacatctgcggtctctgctggttctttagtggcaagtaagaaggcattggatcctgttgctccggtctataagtactgccttgtatcagtaacaaacatcctaaccacaacatgtcaatatgaggccctcaagtatgtaagctttccggttcagactcttgctaagtgtgcaaaaatgatacctgttatgatttggggcactttcatcatgcagaagaaaataagggttttgactatttggtggcttttctggtgaccctaggttgttcgatatttatcctatttccggcaggaactgattttagtccatatggcaaaggaagaagaaatactgtttggggcatttctctgatggttggttatcttgggtttgatggctttacaag

SEQ ID NO: 48155 - DNA, 612 bp, Gossypium hirsutum
  unsure (1)..(612): unsure at all n locations
  Clone ID: LIB3828-001-Q1-K6-H7
gttgcttctggagatatggatttcaaggttgcntggaaatgaagatggcataactgcatttcagatggacataaaggtagaagggataaccttacctgttatgagagaggcactcctacaggcaagggatgggcgcaggcgtattcttgctgaaatgatgaaatgttcccctccccctgcaaaaagtctctcgaagtatgctccacttattcatatcatgaaggttgctccagagaaagttaacatgattataggttctggtggaaaaaagtaaaaagcattattgaagaaactggagtagaagctattgacacgcaagatgatggaattgtaaaaatcactgcaaaagatctgtcaagtctggagaagtccaaatccattattagcagcctgacgatggttccaactgttggtgatatatacaggaactgtgagatcaaatcaatagttccatatggggttttcgttgagatagctccaggacgagagggactttgccacattagtgagctgacgtcagactggttggccaaggctgaagatgcttttaaggttggtgaacgtgttgatgttaaacttaccgaggttaatgataagggacaacttcgcctt

SEQ ID NO: 48156 - DNA, 273 bp, Gossypium hirsutum
  Clone ID: LIB3828-001-Q1-N6-A1
tcgcgcccacgcgtccggcaggcatgagcattaattatataaagatggttccttctgtggcagttggatttgcatcatacgacatgatgaaggtttggcttcgcataccacctcgacagaaatcacagacagtatcttcttaataaacggagatggatttacaatggggccacctgaaatcctaaaacgcttaaataagaatttcaaccaaactttagttccttgattttatgatgtttatttttcagattgtttatatcatataacaaggaa

SEQ ID NO: 48157 - DNA, 636 bp, Gossypium hirsutum
  unsure (1)..(636): unsure at all n locations
  Clone ID: LIB3828-001-Q1-N6-A12
aagtacaaaaattaaattggacatttntgaaaatataggtattacactagaacaaacacttaagtatagggtctttcgtgccattatccctattttaaacagagcacttaatattatgattccgtacagcaaagtggttgaatgttgcagccaactagtttgagttaagacaagacagtatcggatatctaatgcatacgtctctataagtaacaattaattagtattatttttctgaaactttaacataaaaaacatttttaaacatcagaagaggcgcacgagccacgttccctcccttaattttggtcaacctgaatttggagagccagacatgcaaaaagacagcaactagaaccctgctgaactctgctcctgcacatgccctattccctccaccaaatggtatgaatttttttgccatcgtattgcgctcaatgttcttccatctccaagggttgaaggcaagaggatcttcataggtattaggatcaagatgaaggacagcgggaataatcaatagaacccaaccttttggtatggtatacccgttaacgggaatatcagctatggttcttctgaagacccaggaaggaaatacctaacctaagtgtctcgttaatgacgtaatgagta

SEQ ID NO: 48158 - DNA, 123 bp, Gossypium hirsutum
  Clone ID: LIB3828-001-Q1-N6-A3
cgagaatcccactcttatgcaattatgttcaaaaacagggcgtgctggccggccgaaaatccaaaaaaggggaattttggcaagaacagccttttcatccatcacatgaggggatccaaggcc

SEQ ID NO: 48159 - DNA, 572 bp, Gossypium hirsutum
  unsure (1)..(572): unsure at all n locations
  Clone ID: LIB3828-001-Q1-N6-A4
ggttgcaaagggcctggttttaattatctaagagttatggagtttttttaagtttaacccttttctcctaggaaatgagtgtgatggggcaccagaggcatactcccaaaacttcctggtaacatacaaatgacactcttacaagcgaagcaggcttttcagagcacccctcaaactgcactacatcttcatgctttaatataaaggttccattagagaatctcatgtgccttcccgtaatacctgtttatgaaaggagcctttacatttgacacatcaggagtatccggagtgtgaacaggatagaacttgtaaaatctcatgttctgaaatgctgctttagtttcctcactcatttcttcaagggcttttctgcgagcttctcttgcctgccgattagctttttttgcttctcgaactttctctttgacaaaatccttaaaagcatcctttntgatctttatctaattcatctgcttctatcagtttatcagtaaactcatcaagttcatccaactcccaatcaaattcacaaaaaaccggcttttgttctgctggaaaaatatttgaac

SEQ ID NO: 48160 - DNA, 503 bp, Gossypium hirsutum
  unsure (1)..(503): unsure at all n locations
  Clone ID: LIB3828-001-Q1-N6-A9
atgcccaacaaaataggagagttttatcctatagattctgtagtttagtttatattgcatctatccttgcatgataagtatcgaaaagaaaagaaaacgaaacatgacatacatgcacaacacatgtatacgagagatggaaacagatgtaagctatgcagcactgttcaaataaaacttggtcaagtgaacaaatggagaaacctttgtgttgcagtttagagagcataaaacagctaaaaccctcataatgattgatgatatagaagccttgtatgtttaaaacgattttttcttacgaccacttagtgagattcgttttagctcttgtgacccacttttaattcccctttggtacaagtaaatgaagaagtagaaaagaggcagcagcatcaaagtcaaaacggatagagaaatgtaaagcatacttgnttcggttcttttgtcctttaggaaaaggttttggaccaccgctgcaagtgtgggcatcacagaattgccgc

SEQ ID NO: 48161 - DNA, 531 bp, Gossypium hirsutum
  unsure (1)..(531): unsure at all n locations
  Clone ID: LIB3828-001-Q1-N6-B9
actgttaacccatgtcatgcagttcaggaattacttcataaataaattcagtctataaaaatcaactgtcataaacactacaaatcacaaagaatcatccaatacaaagctccaacttccaaaagaattcttttctctttggatatcatgaatgttgaattaaatatattcaaatttgaatgctacaacatatatatatagtgtagtagatgaaacacaagtgagggcatgagttgcagaataccaacttggacgaatgaatcataattatgcaatattctagccaacaactaacaatttcacttttcgttctgccaattttgctttaggatgatgtgcaagtctcaaattccaactaaagaagcctaagatgtgcagtatcattcaaccgttttatctgccaacctgttttccaggaatgctgtaatacagtgacagaaagagtcttctatgcacaccttatgtgacattacggngctgcactcaaggagggcctgtgataagacatttaattggcagggaatgagtaaa

SEQ ID NO: 48162 - DNA, 554 bp, Gossypium hirsutum
  Clone ID: LIB3828-001-Q1-N6-C8
ttttttttttttttttttcttttaaaaaaaaaaaaaaaaaaaaaaaaaaaaaaaaaaaaaaaaaaaaaaaaaaaaaaaaaaaaaagggcggcccccctttttttttttttttattaaaaaattgactttttaatcaaattaaaaaatttttttttaaaacaaatgattttgggtaaaaaatgttcccgtaaaaaaatcctttaaagtttgcctgcccgccttaaaattttttaattttttcccaaactttgatttgacaaatcgaagttaaacctaaccggccggaacctttccaaaaaaaaaaaccgattgggggccttttttaccttaataaaaaatatttaaaaagctccccaaaaatgattgttcaaaaccttcccaaaccaaagggcttaaacatctctttattaatcggaccttggcctatttaaaccacctttttgatggttgtccaggggaaaaagccctgggacccgtgtttccgttttccataacaccggcaataaagtatccctaatgctgccatacaaccaatgggaattgcccacctttcc

SEQ ID NO: 48163 - DNA, 627 bp, Gossypium hirsutum
  unsure (1)..(627): unsure at all n locations
  Clone ID: LIB3828-001-Q1-N6-D4
tcctattatgccttttccaacaccctgaacaaagccctcgacaccagagctttttgcgccttcaagaggctttgttaatatgcctgtaactcctctgaacaacccttttgctagtgctccacccccttctctaataacatcacctaagtcctctacactcttgctctcctgtctctgtcggctttgaatgaatttcttatccattgataaagcagccactcctttactcatatgtccaagagcactacttgcgttgctcaatatatcaagaccagagagcaaccgaagtggttgaccaagaagatcatttttgatgtttgaaatagcattattaatcatcatactctgcctcatgcacaaattctcatgaaatctttgatttagcttgacagtcatattctctgtgttccctaatgcagtcattaaggatgaccaaaagccaaggactcccctagggcgttggctaggcgacatagccattgatactttcagtctaacttctgagatgttgagaatcccaatatgaatgataggatcaaatgacacangctgttgtgttactatcagataacctactgagattgacctgctgcatcatctcatgaatgcgccatataataggttcat

SEQ ID NO: 48164 - DNA, 411 bp, Gossypium hirsutum
  Clone ID: LIB3828-001-Q1-N6-E1
attacactctaatattctcccttttttattatttcttaattcaagatagcagaaacttctatgtcctttttttttaattcaagataccaaaaacaacattagagaaagccctgcatgagaaattcctctttttgggggattcttcaagatttttgaagcccaaatccatctgctttgctccccagcatccatatgaagagaaaaaataaactactatctccatggtagaagcaataaaatgcatgaaaataaaaataaaaattagaaggaagagaagggttaaaagaaacaacaactgattccctttacaatttttacccaaatctcttacctgtgactgcagaagtccaaaagcttcttcctcccttcaataatctcatcaaagaaatcatcaatttgtccaacaatatt

SEQ ID NO: 48165 - DNA, 583 bp, Gossypium hirsutum
  Clone ID: LIB3828-001-Q1-N6-E2
attattgatatagttcataaattagctacagtgaaaaaaataccggaaaacaaagcgtggatttacatggacactttgcatctctgtagtagtaggaaaattatacaatgtaataagttctaaatcttctgttttgaaaatttaggctttttgaatcatgattgctaataataaactactatatgtggcagccaaagcccgtacaaatgagaaaaagaactcaaaaacctgtttggcaaagcagttcttctatatctcatcaccagcatatccatttatagggaatttgtatatcctgtgggtgcttggcttgatggtagggtggtgtggcaactaagcatccaaaacaatttacagtttgactatagatgctggtctcatttgatcttatgcccttgcgtgttccggaataagacgttgacgtagttcgggagatgcaccagccaattcttgagccgtgaaatcgaatagaggaggtagagctcgcccgttaggcaaacatgcagtggggtctctcaaatcatcaaagaaagggtgtgcacaagcctcaatagcggtgcaacgtaagtttggcgaatactga

SEQ ID NO: 48166 - DNA, 472 bp, Gossypium hirsutum
  Clone ID: LIB3828-001-Q1-N6-F3
gggggggcaaaccatcactgggaattcaaacctggttcataaacgcccaaacaaggaagggggagaaggccctcttcaacaatgaaaaaaaagaaagaaagcctcttcaaggggaggaaccccaaggaatatttttacatttattaaaccaccctttcttttttggattcttcaaaacctcaggggttcaaccatttttttgcgggggcttaccggaaaaagggggcaaaaaaagaaacgagggttgctccaaccaaggacccaaaaacaggcattgttgaaaatgccaccctggaatctgggcctggggcaaatgctgaaactgaaactgaaactgcaactgcaactggagcttaaactggaaaaggaactggagcggccccagcaaccaaaacctttcttatagaggggggggggacaatgacggggcatgaaaactttttcatggccatgggattgaaaaaaaagggta

SEQ ID NO: 48167 - DNA, 389 bp, Gossypium hirsutum
  Clone ID: LIB3828-001-Q1-N6-G10
gagttacttatattccattttttcagggcatgcatttgtaaacatttgccattcaaaaagaacatgatagaggatgggcccgaaaaagggcaaaaaagttaacaagaaaaaaggccacaaaggaaacacaaaatcacggttagtagagggagacccaaatgaaaacggagaaaatccggtttcaaagtgacagacagggcaattaaaaaaaagaaaaggcttaataatgggggggggggagctgttcccaaaagttgctgaaaaaagatgaactcccaaatgagaccagcgagaaaaccaccgttaaagggtccgacccaataaatccaacccttgtcccatgtaaaaataaccgaggctggccccaatgaagcagctgggttcaaaaa

SEQ ID NO: 48168 - DNA, 319 bp, Gossypium hirsutum
  Clone ID: LIB3828-001-Q1-N6-G3
gggggggggcctttagataattaaaaaaaaaaaacgggttcacaaggttttttggggcccccttcaaaaaaaggccccgaacaaggcccgccctaaaactttttttccccaatcacaggggggttaaaaaaaccctggtaaattcaaaacccgaatctgcaaaaaaaaaaggcccagctccctggggaaaaccactttggggtcccgacccttacaaaaaacctttaccaaaactaggggggcagcagtttttttgcaggcaaaaggggccgcccaagatttcaacttttcccttcagccctaaatttcacgggcccgg

SEQ ID NO: 48169 - DNA, 659 bp, Gossypium hirsutum
  unsure (1)..(659): unsure at all n locations
  Clone ID: LIB3829-001-Q1-K6-B7
aaaaactcctataattgtgagctttatcagcttttctagtttgttagctttcctataaaataaaaaatggggcattttcagatttcacttttaaattaaaacctcttttgaactctctttttacaatcttactctcggagttgcagtgcctggaaaaaatggggagagcttcaaggtggctgaagagcttgtttgggataaagaacagcaaaaacagcttcaatcccagagacgggaaagacaaggaaaacggcagcattgaccattcagtgggtgattcaagcatttccccagaaaaggttgcgtggttaagatcgtgctataatgaaacagagagggagcagaacaagcacgccattgctgtggctgccgccactgctgctgcggcggatgcagcagtagccgccgcgcaggctgcagtggcggtggtgagactgactagtcatggtagagggaccatgtttggtggtgtacatgagaagtgggctgctgtcaagattcaaacagtttttagaggttatctggctcgaaaagcttacgagctttgaaaggattggtgaaaattcaggcacttgttagaggatatttagtgaggaaacaagcttcagctacatttcatagcatgcnagcattgatgagagcacaagctacattaaatc

SEQ ID NO: 48170 - DNA, 641 bp, Gossypium hirsutum
  unsure (1)..(641): unsure at all n locations
  Clone ID: LIB3829-001-Q1-K6-B9
gttcctcgcaaanaggataattatttctttgcttgtcgaaatccaaaaaccattagaagaaattttagaacaaaatccagattttgttcagccttcttaccgtttgaatgaggtccaaggttggataaaaatggcttaagagatttttcgatttcccgagcagctgtggaatggggtattccggttcccaatgacaataagcaaactatatacgtttggtttgatgcacttctcggctatatctcggctctgttggaggataaggagcaaataagtttacaaagtgctgtttcttcaggttggcctgcctcattgcacttgattggaaaggtatgaaactaatccacacggcaaagtatccatatgcaccaaaatgctactcaagtgaatgagttatgttcccctttttgaattgtgccgagtttggcattttctttttgtgtaggatattttacgttttcatgctgtttactggccggctatgctaatgtctgctggattgagtctcccgaagatggtgtttggccatggtttcttgacgaaggatggcatgaagatggggaagtcattagggaatacaatcgaaccaaatgaattggttcataaatttggagctgatgcagtccggtacttcttcctaa

SEQ ID NO: 48171 - DNA, 224 bp, Gossypium hirsutum
  unsure (1)..(224): unsure at all n locations
  Clone ID: LIB3829-001-Q1-K6-F7
catggnaaggggctcaacaattcaaggtgatgtgttcacttgtttgctgtcaactttcgtctcaacgtgttagattcatccttggagtggcttgaatcttactttgctctctttgaggtgatgaagacctcatacaagtgtattttgttctagtttgctatgcgacttgattttatatcaagcgtgcataccatatctttaattgtaatctcgtctaactttcc

SEQ ID NO: 48172 - DNA, 214 bp, Gossypium hirsutum
  unsure (1)..(214): unsure at all n locations
  Clone ID: LIB3829-001-Q1-K6-G3
gttagtcacaccttacatccaaaagcaaagctttttttacatgtgtatgtaaggttgctaagcaaatctggtgagccttcactgctgttttaaggatatagagcaactttnntgaatttcatcgnctgtaaagaagtttaggaccacgacatgttcttgcaaatttgaagaagcttctaaggtctgtccagtcttcagaatatatagatacctg

SEQ ID NO: 48173 - DNA, 602 bp, Gossypium hirsutum
  Clone ID: LIB3829-001-Q1-K6-H1
gttcttcgtcgccgcagcagcaatgtggcggtaatagcaagatcgttacaccgttagtggctccgcccgagccatcgcagttgcctaggtggaccattcggtctatgtgggagttagcttccgtacttaattttttgcatgttttcaggccgcttttgaatatagctgtggagttctcagcggaggagtttgagacagcgttgattactcctaattatactttggcagatattcatattcctttgttgaaggcaatccctccaattactcggatgccccttacacgtgatacctgggttactgttctttgcagaaaattaagagactggtggcattgggttgctgatggggatcttcccattgttgcttcacatgggacggagattgaattatacaagtcgcttgatcctggagttcgtgttgtgatcctgaaagcactgtgtgacattcgtgttgagcaagatgacattcgaagctacattgacaactcacttaaacatggtgtttcaactttcagcctttcgtaaagaacgtatcggaggcgattctcagggaattaattactggtatgaagatgatgctgttgttggtcatcgcttttt

SEQ ID NO: 48174 - DNA, 523 bp, Gossypium hirsutum
  Clone ID: LIB3829-001-Q1-N6-A12
aaataaatgagattgcaataaaaatagaggtgattcagtacattgataagatgttcgaagcaccaatggtttctacaatagagaatgggctgaaactgctactaccaacttcatttaacatcacttcgactggatagaatgttgagcaatgcctaaactggtccagcctcgggtccgaatgactgctaccacctcgggtgcagtcgtcttcaacataaaactctcagtaattcggctactatttccctgtgatataaaaactcaaagttacggttaccataaagataaacaagcctggccttctcagagttgcagatgatgtcgaccttgaaacaatgctcgcacccgactcggttttaagtccgaatcccaaggggaagagtggatcatagtgtgaatccctaacattcatcggtaattgatctacagttttgaaccatgttctcggaagttttccactgaatctgtagtccccgtaaagaaatcagtcacaccttggccttcagtgccaggtaaccatgct

SEQ ID NO: 48175 - DNA, 576 bp, Gossypium hirsutum
  Clone ID: LIB3829-001-Q1-N6-A5
cgagtcaatttttagttactcgattttattttcttagccctattggctacaactacaaaattaaccatatgcatgttcgggtacatgtcggacacatccgacactcagaagccaaaactgagtaaaaaatgtgacaatgaaagtccttgttacgaacagttttgtaaccctattatttctttcttttcattgataatttttcgacgagaaaggaaaatcgacaagaacacgggttcatggaaagattacctttggcactgaatcgacaatggattcgaattaatggctgtaaacctatacagtgcacttggccggatccttcttggattgtaaaagcatgtcaacaaactcttgattccggtatttgagtccaagtcacgagtgtcggtataaaatgagtgtcaatataaaggtagccctacaagcagttaaaacgtagaatggatggttccagccattctcctatgtctctctcaaaaagcgaatggagtggtctttggagttgtatactgggacccataagaacgctctgctttacgaaaacagccactgaaattacagtaacacaaatgccct

SEQ ID NO: 48176 - DNA, 556 bp, Gossypium hirsutum
  Clone ID: LIB3829-001-Q1-N6-B7
cataatcaccaccttctaatctgcaaatggtttctctcaaaatctttaccaaattctaaggacctatcaagcttccccattactgcattcttgaaatgaatagcttcttgagctcgtgaacatgatctctgcatctttaccccacttaaactacttctggattccatcatttcattgagggaaagccgttttttcgggcctggttccggtctttgttttggagcactatgcgacctcaatttagccttgaatgattgtgtattagccatataattaggaaaatccccacagggtctgaaaaagttgtgacccgacacactcttggccggtgtagccggagcgcaagaattgatgaaccgaggcgtactgtgagctgtggaaaacctgcattcatctccactaaatccccagtcaatgtcctgataatgccgactatctggtattgataatcgagctggacatcgacacggaagtggtgaaggcagtgtttggtaggtatggtcatcgatgaaatctgatatactggtgttggttcttcgagatcttgctttaggct

SEQ ID NO: 48177 - DNA, 544 bp, Gossypium hirsutum
  Clone ID: LIB3829-001-Q1-N6-B9
gttcaattcttgccaacactggcttaggttgtgccatcacttgaccaccttttactccaccccactttgtattcgctccagcttatgttatcgaactggtcctcggagtatccaagctgtgcatatatttgcctacataagctgggtgcgaccggtgatagagcgatcgctttaatccttattgcttcgagtttgaccacaagatcctttgctgcaacttcggaagcagcaccgccttgcttaaaaagagaccatggttgatgcttatccatgtacaagtttccaccattgccgatctctagcacggattcacaagcagatgatagggacagattttcataattgatacgagctttttctaccagctactaaacggtatccttaaaatactttccttcagctgccatggttgaatcaaccactaaagtcgactggcagttcttcttaagaagtccaagagtacggttgagaatatttcctattgtgtgtgcaagatgtgcattgacaatattaacaaaacgctcctcagaataatctacatcac

SEQ ID NO: 48178 - DNA, 386 bp, Gossypium hirsutum
  Clone ID: LIB3829-001-Q1-N6-D4
ccacagctggggaagttggctttttaatttcacctaaaagagaaaccaaaatcagcccacttagctctaatgggttacctaaaattaaactaaaattaaaaagagtaaaagggatccccaaatccttaaaaagtggaaacctcaaattctgaaaaacccccaaaaataaacaccagaaaacctaacctaaggaataatgaacataaaaaaagacctccaatagtccaaattgaaacaacattttgaaacctctaaacaaaaatctttcccagtttgcctattttccatagggatggtatcaaccacttcccgaaccattataccccccttaacttccaaaaaaaaaactccctcctgaaaaaccaccaccgtaaccccccggaacc

SEQ ID NO: 48179 - DNA, 495 bp, Gossypium hirsutum
  unsure (1)..(495): unsure at all n locations
  Clone ID: LIB3829-001-Q1-N6-D5
agactacttgcaccaaggcaacactcacaaatttattgtctgttacactcaatctgcaatctctatttctcttcataaatgttcccacaacactagcttttctaccttaaaacaagcaaaagaatatacacaacaatacctgaaactgcaaaatcatttgcatttataatgatgacaacgttaatgtgatcatctatatatatataactatgaaacaccttggaatgacaatcgatcccgaagagtgtcaaaaagtgaggaagctgctgcattttgtgcaaatgttaatttcaatctacccagcaattcaccatcttttgcttgagaagctgcatcagcagcttctttggccatgccaatcctagcatatgcctcggccctttcacggagatcagcaagcttgggtatatattttagagcttcacctttctcatcagcatcaatgcatgcctcaacaaatggcctataaccnaattggtggtctcttctcttttg

SEQ ID NO: 48180 - DNA, 537 bp, Gossypium hirsutum
  Clone ID: LIB3829-001-Q1-N6-D9
gctcttccattcaataaacacaaacaagaaatcatcgaatacaacatgctggaaaaggagagttacgacgaacaatgattcagatattaaaacagaaataatatgatggctttttttttttggctaaagtgaaacatttgatttagctaacaaactaactaggatattatatgcttacctcatcttccgccggataactcgatcgcgtcctgattatataatgaatcttctccccattcaaatctcctttgaagtctttcgtactcttccctacgcgtaacttcaacatgctgccactcttcccatctctcagccagcccctctccttccagcatcctcaccacctctgacattgctggacgctcctcgggtgaagcttgtgtacaaagcaatgcaacttggatcattgcttccacctcctcgatgttgtagtttttattaaggttccgatctacaatagcatccagctttttctccctttccagcttcttgacatgatcaagcagcaaacatcatcctcttcttccaagcgtgaaa

SEQ ID NO: 48181 - DNA, 386 bp, Gossypium hirsutum
  Clone ID: LIB3829-001-Q1-N6-F10
ccaacaacaaatctttttaaccggggaaaaaaaggctaaaagggcggggggtttttatctggccccactaaaaaaagcaaagccttcaggggttaaaaacatgctttaaaagcaaaaaaaaaacacgggttttgaaaaaaaggaaaagggttttgacattcacatttttttaaaaatttttaggggcaaacttccattttatgctttcaggagttacagggacattgaaacgtctagggacgggttttggacttttccataaccctcggagctagggcgaaagcccctggacttttaaagaacccaaaacttttacacgaggggggaaaaatttcccaaggaaaattgcccaccaagattcaatcaccggttttattttcataggg

SEQ ID NO: 48182 - DNA, 646 bp, Gossypium hirsutum
  Clone ID: LIB3831-001-Q1-K6-A8
gggatttagtcctgaattagctcttgttacgattggaggaggcaaggaactcgaagagaaacttgtggttcgacctaccagtgaaactatagtaaatcatatgtttacacagtggattcacagttatcgtgatctccctctaatgatcaatcagtgggcaaatgtcacaagatgggagatgcggacgaaaccatttgtaaggacccttgaatttctttggcaggaaggtcacacagctcatgccacactggaagaggcagaaaaagaggcactgcaaatgattgatgtctatacaaagtttgcttatgagcaagctgcaatacctgtaattgcaggtagaaaatctaaagtggaaacatttgctggtgctgacaaaacctatacaatagaggctatgatgggtgatcgcaaggccttgcaagctggaaccagccacaatcttgggcaaaacttctcccgtgcttttgggacacagttcactgatgaaaatggactaaggcaacatgtgtggcaaacatcttgggcaatcagcacaaggtttgttggtggtattataatgacccatggagatgatgccggcctgatgcttcctccgagaattgcaccaatacaggtggtaattgtacctatttggaagaagttgatg

SEQ ID NO: 48183 - DNA, 639 bp, Gossypium hirsutum
  Clone ID: LIB3831-001-Q1-K6-B4
aaaaatacctcccaaaatcttcaacccagtatctgtctctttaattggtacaaatatccctgcgccgcccttcaattttttcttcgtcatttgcttaaatttcttggcaaccaaacagaaccgagaaaatcgaaattttatattttttatattttttggggatttttttgaatatcttttccgatcatgatgcaaagtctgaaatactggttagcagagcatccatcaatcgtgaatttccggtggagtcacacccaatcatttggttcaacgtggtcattccttttcgccgccatcgccgtttacatcgtcgccgttataaccctccacagtttcctttcccttatcctctccaaaagccgacgtatccctctcggaccaatcccagccatccacagcctctgtgtttcattaatctccgccgtcattttcgtcggaatcctttactccgccgccgctgagatccgcgacacacgctggttctggcgccgtacaaaaacaatctccacaccatttcaatggttcctttgtttcccactcggtactcgtcccttccgccgtgtattcttctggtcatacgtcttttatctctcccgcttcctccacctcttccgtacattcttcaccattctccgtcac

SEQ ID NO: 48184 - DNA, 594 bp, Gossypium hirsutum
  Clone ID: LIB3831-001-Q1-K6-C5
caagggggggggggaatggtttatacaaaaaaaagatttaaaatctgtacttattcctaatttccttatcttttgatcccattaatgtatttttggcactagtcttagagaatgataaaaaaaaaaaaaaaaaaaaaaaaaaaaaaaaaaaaaaaaaaaaaaaaaaaaaaaaaaaaaaaaaaaaaaaaaaaaaaaaaaaaaaaaaaaaaaaaaaaaaaaaaaaaaaaaaaaaaaaggggggcccggtttaaaaaaaaaaaagtttaccccccgaaacattccaaggaaaaacttttttttttgggccccctaaaataaattccacgggccgctttttaaaaacgctgaaaagaaaaaaaccttgggttccccaaattaaatacctttaaaaaaaatccccttttcccaagtgggagaaaaacaaaaaagcccccaacgatccccctttcaaaaaatttgccaacccaaaaagaaaaatgaaacccccctttaagcggccattaaaccccgggggggggggggttaaccccaagggtaaccattacatttgcaaacgcctaagcgcccgctcttttggtttttttcctttctttt

SEQ ID NO: 48185 - DNA, 489 bp, Gossypium hirsutum
  Clone ID: LIB3831-001-Q1-K6-C8
caatttgtagcttttgcggtggaggcaagaatagtaaagttttgatcagaggagcgattgcgtaagttaaattataggttcgtttgctattcagaaaatgatgaagctggtaaaggtatgtttccttttccaagaaggaatataaaaggtgaggtgttcgtggcttgactcaagtctatttatttctcctaatacaacccgacccaaaatgtgaatttcaaatccatttaaattcactcgtatctgcaaatagtaattttattttttttaaagttaaaaaacttttattttaaaaaaaaaaaaaaaaaaaaaaaaaaaaaaaaaaaaaaaaaaaaaaaaaaaaaaaaaaaaaaaaaaaaaaaaaaaaaaaaaaaaaaaaaaaaaaaaaaaaaaaaaaaaaaaaaaaaaaaggggggggcccttttaaaggacccaattttacttccccgggcttgcaaggtataagtttttttttagggcccccaaaat

SEQ ID NO: 48186 - DNA, 669 bp, Gossypium hirsutum
  unsure (1)..(669): unsure at all n locations
  Clone ID: LIB3831-001-Q1-K6-F7
ggaccttgtttcacgcctcacactccaagaaaggttcaacagttggtgaacacagcctccggcattccccggctcggggtgccagcttaccagtggtggtcggaggccctccacggcgtgtcggacctcggtccaggcactcggtttaacgccacggtgcccggtgcgactagtttccccgctgtgattttatccgccgcgagtttcaacgagatgttgtggctcgagatggggcgagttgtctcgaccgaggctcgagccatgtacaatgtcggtctagccgggctgacatattggagccctaatgttaatgtgttccgcgacccaagatggggtcgtggacaagaaacgccgggggaggaccctacggtggtctcgaaatatgctgtgaattacgtgcggggattgcaagaagttggctccgtgggggacaagcttaaggtttcaagttgttgtaagcattacactgcttatgatgtggacaactggaaaggcgtggaccggttccattttgatgcaaaggttacgaagcaggacttggaagatacgtatcagccaccatttaagagctgtgtagtggaaggacatgtgagcagtgtaatgtgctcatacaatanggtgaatggcatccctacttgtgctgatccagaccttctcaaagcatagtta

SEQ ID NO: 48187 - DNA, 642 bp, Gossypium hirsutum
  unsure (1)..(642): unsure at all n locations
  Clone ID: LIB3831-001-Q1-K6-G11
gcggtggcgagtatgggagagctagnnggcttgggaaacaaaagagatctacttcgactacgtctttgcaaggggaagagaatcggttcttgcaaaatagtaaggcttccttgagttcgattcctgataacgttaccagagaagatccttccaccaaatatgaattgctcaatgagctcgggaaaggatcttacggggctgtttacaaggctagagatataagaacttcagagcttgttgccattaaagttctatctttatctgaaggggaacaagggtatgaagaaattcgtggtgaaattgagatgttgcagcagtgtagtcatccaaatgttgttcggtaccttggtagctaccaaggggatgaatatctttggatagtaatggaatattgcggaggtggaagtgttgctgatttaattcatgttactgaggagcctttagaggagtatcagatagcttatatatgtagggaagctttaaagggccttgaatatttgcactcaatttttaaagttcatagagatatcaagnggtggtaatantcttgttaactgaacaaggagaggtgaagttgggtgactttggngtagctgcacagcttacaaggaccatgtcaaaacgcntacatttattggcact

SEQ ID NO: 48188 - DNA, 640 bp, Gossypium hirsutum
  Clone ID: LIB3831-001-Q1-K6-G7
gttgtgggccactggctggctacatgaccggataagagtcgtagtttcaagtttctttgtaaaggttctgcagcttccatggagatggggtatgaagtacttttgggataccctattagatgcagatttagagagtgatgctcttggttggcagtatatatccggtactcttctggatggccgtgagtttgacctcatagataatccacagtttgagggttacaaatttgacccacatggagaatatgtccgaaggtggctccctgaacttgcaagattgccaacagattggattcaccatccatggaatgctcctgaatctgtactccaagctgctggaattgagctcggatcaaattaccctcttcctattgtaggaatagatgctgcaaaagataggttgcaagaagcactttcggtgatgtggcaacaagaagctgcttcaagagctgcaattgagaatggaactgaagaaggccttggagactctagtgaatcagtgccatttgccttccctcaagacatacaaatggaggaaaatgttgaaccagcaaggaacgatgctccagctacaactcggcgatccgaagatcagatggttcctagcatgacttcttctttggtgagaggcatacatgaa

SEQ ID NO: 48189 - DNA, 663 bp, Gossypium hirsutum
  unsure (1)..(663): unsure at all n locations
  Clone ID: LIB3831-001-Q1-K6-G8
gagacttctggntaacataaaaagatactaattggggctttaaattcgtagaaatgactaggcagtactccccatgattccggtccagagtatcctcctatctgccgattaaagtaatgactatcaggaacgaaataatcctttactattttttagtttaagccccattcgtggttttatcagatccgaaagcagaataggaacgaaaaagaaacaataaagaataaaaaagaaatctttttttttattctttctttcatagatatagagagatctaatccgtgtcatgatttatgagctaatggaatgtttcatttttttcgtaatagaaaacaatgggttgaaatatctattgatattctacaagaagtattttattgaaggcttaagttattactcaacaaataaaaattgaaattatgaatgggcgagatcaattcagaagcactttttttttattcttcagaatatagcagacagaattccattggtataattttggaccttccaatctattttttctctatctattctacaaccatacgaagataaataatactgattcggtcctaaaatttatttgtgacccacgaggagccgtatgaggtgaaaatctcatgtacggttttggactagcgatgtaaacagtgatgttatcatcga

SEQ ID NO: 48190 - DNA, 582 bp, Gossypium hirsutum
  unsure (1)..(582): unsure at all n locations
  Clone ID: LIB3831-001-Q1-N6-A2
gttatccttcaaattgcactcactaaaaaactgtagaagattacacactaaaaaagatttcatattnaagaaagaaaagaaaaaaaaggaaattagattagattggtaagaatcagagttgatgaagcactaccctgtgtcaacaaccttcccaagaacagtggttcattgcacagcagtgcaaattgtaacaactaactacacaagctctttccatcatcatggagaagtcatgacttggtttcggattcggcttgaacgcctaactggggtcactatcccttcttctcttcctctatgctttctgggtatcttatcgtacgtggtaacactaccataggacgacgaacccgtggagtaatcggataaagccgtagattctctcctgtaagtagtcttcctcctttcttggctctgattattttcatttaaacctgctgccactgaaggctttcctctctttgtgtagactaaagctgaagctgctaatagacacaacacaagcaaagcaaaacccgtcgtattcttcacgagaaaaccgtcctctggtccattgattgtggaatcatctactgaaatttg

SEQ ID NO: 48191 - DNA, 609 bp, Gossypium hirsutum
  Clone ID: LIB3831-001-Q1-N6-B4
aattaattctcctaactcttattaattcgtttataaacaattttctagtgtatactgtatacacgtacaaattcttttttcagaagaaagcaagaaaaacgccaaaaaaaaaaaagaaagagaactttttgcttggtaatctccctaaaactaaatgatttatataacaaaaatcattaaaaaaaaaggtgggtttaatttgtaattttactaaaagtcaatcaaattttatatcagacctggaacatccatgagctgaagaagaagaagaagatgatgatgatgaagaattgctgtttccatcaatgtcttcaacgttcttctttctcaaatgcattttgacgtagaaattaaggaacagtattaaaatgacgccgtttagaacggagttgaatccccaagctcccatgccgttacatccacctttgagaaaatggaggaaaaggacaccaaaatgggagattaggttacaggctaaaaggacgacttgacaattgacgacgaaagggaaacaggcactcggaagaccgatcgccgtccaaaaaggtagccgtatacgacggagtataagagagtggctaagagaatggcgaggacttggaatgattg

SEQ ID NO: 48192 - DNA, 605 bp, Gossypium hirsutum
  Clone ID: LIB3831-001-Q1-N6-C11
attatgatcacatttaagatttttatgaattttgaaatgctggtatgttttggttgttgaaacattcaacccatgatgacaagaatagaaccaaaaaggttagaccacatgaatacttttaaataacatcattattaaaaaataaccatcatttgagctaccctacatccatattaatggaaaagagccaagccagctgctaaacttgacccacccaaaaatggcgtacaataaaagcaggttaatgtcaacttgtagggttgaccataagtgctccagttttgtcttcaatagctgtcaccagatcagagggtgaaaatgattcatgcttaaactactcgaggatccttaatcagtcattcttcagataaaaggcaaaattgcagactgccgccccaatttcattcatctggtaaggcaaaaccacaaaaagtcgtcccgatttcacggtggtgggaatccattggccctcaaatacaagcagctcgagatcatgagcaaacatgttggcacggaacatgttggcacggggaaatgatcagtttgatgaaaatgtcaaaaccattaaccccgccgacattgaagctgcaggctgcggctcatta

SEQ ID NO: 48193 - DNA, 475 bp, Gossypium hirsutum
  Clone ID: LIB3831-001-Q1-N6-D10
agaaaaataaaaaacctgggtttcacccttattttagtatatcaaactagattgggggaaagcccaattttaggggggggaacagggttcgaaattttgggttttaaaacctaaaaacaagacataataaaagtaagggaaagcccgggactaggaccagagcccccagtccaaagtaatttttaactacaaaaatttgactttcattattaaacaaatatattctggttttaaacaacaccaacactgtttcccaaaagttagaaaaaaaaaaccccacactttttaaaaacattggtcacgggcgacccccacccttgaatttggcacatcgaaaaccaccctatgggtctgctggtgcatattggcgaacacattcagggctggggccggggccatcgccaaacatgtgaagctgcctgctgggctggggagcaataggttcttttggggcaatgtcacgttcatgccccaa

SEQ ID NO: 48194 - DNA, 635 bp, Gossypium hirsutum
  Clone ID: LIB3831-001-Q1-N6-D4
aaagaaacgatagaacaattgcacttttgcgatcaaacaatttacacgcaatatgtgcttcatgaaggccttataacatcacagcatatattttatttatggggaaaaaaagaattttgaagcaatgcaacaataagaaaaagaaaagctacaagtggatggacctcatctatcacacaaacaatcacagttggtgaagtccaccttcaattcaccttatctaacatgaatatcatcgtttgtgaatgaactgaacggcccttgcatccgcatctgtatctctttgatacaaatttacgatttatcacctattatcttttatcgtggttaacctggttaatgccaatatggctcaactgtacattctcattccaggagggatccgctggaggtagctgatattcatcaggtttcaatgctagagcaaaatctggcaaagttggagccgtctccatgattttttcataagagtagagatcacggtttatccgcaccttgctagaagtgtctttcggaattttctcggatagatacttcatggttccccaaagaggtgggtttctggataaaggatgagctgcattaaatacctcacaagcccttttactttctttgaaaattcatcagcagcttga

SEQ ID NO: 48195 - DNA, 285 bp, Gossypium hirsutum
  Clone ID: LIB3831-001-Q1-N6-F6
gagagtaaataggagaattattagctccatgcatgtcttttaacataaaatactgatttgatacactactgttctccctgggagggtacgagactgggagctcacattggtccctatttatcaaacatttcatgctacatagttacatacaacactataattcaagggtaggtatatgcgattacactgtcggatcctcctgtgagccccccattgttggctgatgcacctgtgtgaacctatacttatgctacttgcaaggcttcttcgcgttttatgtcaaac

SEQ ID NO: 48196 - DNA, 581 bp, Gossypium hirsutum
  Clone ID: LIB3831-001-Q1-N6-F7
ataaatataaaatattttaattatgataaacataacacgaggacaccaactcttatatctaccaaaaacaaagctaatatcaatatccctgatgatattagctcagttactggtcccttagtattcttttactccccaacgcaccataatttattctaatacagtactaaaatgcaggctattataagctttgcctgccattaagtaatagagactaaaggttccccactttcatcccctgcttgcctcacaacaaaatggtgcctcacttggtgctcactggttgtgcctacaaaaatggtatgttgtcctataaccagtttcctcttcccttcaacatccactaagctcaggtctttgcacacatttaagctcactgtcacattcttggtcttccctttcttaactccaaccctctcgaacccgatcaactgcatgttcggtgcaccggtgacccctttcgtgctcggtggcttccaaaagaggagaaccacgtgatctccgtccattggtccattgtttttaactccgatcatgaggttgaattgcaggtcgtcgcagtttgaaacgcttgatgcgtc

SEQ ID NO: 48197 - DNA, 426 bp, Gossypium hirsutum
  Clone ID: LIB3831-001-Q1-N6-G8
ctgggtggaaccaagtcaggaatctaaaattctttttttttttacggggaaagaagggggaaagaagggggtaataatagattcccgagagaaaggggtaaaaaaaattcccacccgaaattaaaaaatgggcccattcttaacctagggaaagcccatcggggggggatggaaataaacaaaaacaaataagttttagctaagggaaaaaaaataccaatggggggcccaaggatcccatttattttatttatttaaaatagctcaggggcgaatacgtccggaagggaaatattccaaccccccaaggaaaaaactgttccaaataacgaaaaaagtaatagttttagatgggaagcaacgtaaaataaaccaaatttgatacctgaatattcggttggataccctgctactaattcttcctcc

SEQ ID NO: 48198 - DNA, 531 bp, Gossypium hirsutum
  Clone ID: LIB3543-001-Q1-K1-A10
cccacgcgtccgcccacgcgtccgcggaaaaaaagggtatggggtctcaactttctgtttttactcctttttattacatgccagtttgcatccagttatcaggctcattaatgttatttggatttttttttttaaatttgataatttgtacattacttagattcctgacatttatattataatactttgaatatgtttaaaaaaaaattaaacgcatttgaaattattaatctgatgattcccaccattcaccgtatggtacatatgctgttgtcgtgctggccacttgccattggttgacattgttttaatattaatatttttaattaacatcaaccttttttgtaaaacttaaatttgttcaaaaatcttaaattttaaattgtatttaatattttccattttcgttacatttttagtgttttattttccacactgaaatcttttgcttttgctgataaaatttcccaaaatggttagtattttttcaaaatttcatgatttttataaatatactaacccaatagatat

SEQ ID NO: 48199 - DNA, 645 bp, Gossypium hirsutum
  unsure (1)..(645): unsure at all n locations
  Clone ID: LIB3543-001-Q1-K1-A2
cggacgcgtgggaataacttcaatgggtgcgtgaatttaaggaagatacttaatctttcaagagccatcaaccttgaatacctttattgcagtgactgtaaaagtttagttgaactttggaatggagatgattgtgtggattttgttaatttaagggaaattaacttcaatgggtgcgtgaatttaagaaagatacttaatctttcaagagccatcaacctcgaatacctttattgcagtgactgtaaaagtttagttgaactttggaatggagatgattgtgtggatttttttaatttaagggaaattaacttcaatgggtgcgtgagattaaggaaggactttgttaatttaacatccttgtagtaatttaagaaaaatagctaatctttcaagagccatcaaccttgaattcattgattgctctaattgtaaaagtctggttgaacttccttgcctcgatcatttggcatctcttgatgcgtgtaatcttcatcttgacggatgctatagtctcaagaagttcctcaggtcccacgtcacttttgttatttagatttatcaaaaaccagaatagnaaatatgtcgttgcctttcgatcccctatgtaatcttcagcacttagatatgagtggctcagcggtc

SEQ ID NO: 48200 - DNA, 636 bp, Gossypium hirsutum
  unsure (1)..(636): unsure at all n locations
  Clone ID: LIB3543-001-Q1-K1-A6
ttcttcttcaaattgtttttcccagttattttgtttggttttctttgatctctctctctctctctttcatcttcaatctttttctgttcttttcttttttaaatttatataaaatttatgaatatattacgttttggttctgggttgatttagtcagtttacttccttttttatttataatctttttttcatcatcaatctcctttgtatttctataacatttattaccatttatttaatattttgagcttatacacttgattttcgattacccttttgtgagattcgaaaaaaaaaacccatttttttacttattttccgatgaggagagggaggggtctcgccgccgccgtcatccccgatggagaagaacccaaatacagaggtgttcggaaaagaccatggggtagattcgcagctgagatccgagacccgtggaaaaaaaccagggtttggttaggtactttcgattccgccgaagaagcagctcgagcttacgatacggcggcgatgacactgcgtggaccgaaagccaaaacgaatttcccaatcaatccctcgaatactanccgctttccgatcgatcaccaccaccgtcggttatacctgatgggtaattttcaagacccgaaaatg

SEQ ID NO: 48201 - DNA, 672 bp, Gossypium hirsutum
  unsure (1)..(672): unsure at all n locations
  Clone ID: LIB3543-001-Q1-K1-B10
tcaagcttcagcagaaggaaatattcggtaaaaaggagagattctgaaggagagagtagttcctccacctggggaaagaagttgagtgggtcatctccggagggactgaacaatagttctagcctcagtgattctatttctgattcaaggcgagccagaaattggtcttctaatagggattgtggtattgcttcttcagttaggactcagagatcaaacagtagttatggtagtgggagactccctaaccaagcaaatggaaatagtttaactttgaatgagtcacccatggtcatcccacaggcacctcaatctgatattcgtactgatatgaatgctcctgttcccatagaaactgcctcaactcgtactagttcttacagtcgatcaggtagtatagatgagagtttacgaggtttcatgccttccagtccttcagaagttagtggttaccactcttcagtgaaccagggtagcttccagcactacaatatggatggctttgcagaggtattattagaacttgagagaattgaacaagatgaagagttgacatacgagcaattacttgttctagagaccagcttgctccttaatggcctggacttttatgaatcgcatagagatatgagattggatatagatgatatgtcatatngagaattactagct

SEQ ID NO: 48202 - DNA, 634 bp, Gossypium hirsutum
  unsure (1)..(634): unsure at all n locations
  Clone ID: LIB3543-001-Q1-K1-C12
aaagaaaaaatggagattcgagaagagtgaaggggaaaatatttatggtgatgaggaaataaaagggagaataaaagagcttttaaatgcaaatgttgctggaatattgtacttatctcagatatatgattctcgatcatatgagcttcatagacctgttatttacgtgacgcngaaaagatggcattaaaattcagaagtatatagacaacagtaacagaagagaaaaaaaagcaaaaatttaccagactgtttatgaggaacaagatggagacctttgtaatgttagcctcatatccggaaaaggcccaaatccatatgatccatatgtactaaagcctgatatatgtgctccgggagaagatattttatgtgctagcaaatacgatgctcaaaatatgtatgctcattaccaggtgatgagtggcacttcaatggctaatgcagttgttgctggtatgttatcctacattaagacatttcacaaggattgggggatagcaagaattaaatcagctataatgaccagtgcaaatccagtgataaacttttctagcgcagctgtgctagcaatgggaagtggatgtattaatccattgaaagcaatgaatccaggcttagtatatgatatatc

SEQ ID NO: 48203 - DNA, 645 bp, Gossypium hirsutum
  unsure (1)..(645): unsure at all n locations
  Clone ID: LIB3543-001-Q1-K1-D12
cccacgcgtccgcatacttcttgcagtaccttgcattttaggtgtcaatttatctgatgttgatctattggaatttcttcaccagcttgctgatacagacggatcatcaacaatgcccccatctgttagtcgcattcttaattccaaagcatgccgaggtgcaattatgttcggagactccttgcttccttcagaatgttccttaattgttgaagagctaaagcagacctcgctgtgcttccaatgtgctcatgggcgaccaaccactgccccgcttgtgaatttggaggcattgcatgggcagatagctaagatgcaagtgagggatgatgaaggcagggagttatggcatgggctatgccgacaaggagtgagccttgaaagggccagcttgcggttaagagcagctgctgatgaaataccaaactaacgtgttaagctgaacccacgtcatagtgtacttgtctaaaggtgactggacccattgttggattgattttacctgatctcgaagcccgcgagaagttgggctttcaggcaactaaagcattatccaagatgggtaattgagattctttctcaccctataataataattgggtgctacgagatgtgttatttntcttccttctatgatgtattctc

SEQ ID NO: 48204 - DNA, 666 bp, Gossypium hirsutum
  unsure (1)..(666): unsure at all n locations
  Clone ID: LIB3543-001-Q1-K1-D6
atttggtatgggctgacaatttgnctttaagaaaaaatattgtaaactttgaaagaagtaattaaaatctattgagtcttatgtgctattgcattcctttttctctcttgaatggctcttgatacaggaatcattgtaatactggagaaatgatgatgattatgatggaaataattatagtaatagcttagccctgtgtagtacttgattttatggtgacacttaacgtgagcataaatcactagtcgaaatttcaaattctagagcagataatgtttaagctgttgggtatagttagatcatcaatatgtagctatcatgcctatattattcatttattctagttctttcttctaatttagtaatgctggacacattaaataccttgaactgacaatggctttttattagtagtaggtcctccgaaataccgagaaaagaataaagaaacattgagcatatatttgttgaatgtgagcacatattggacaccggtattaagtctgggtcacatagatataacattgagtgcttttatgttttagtcgattntccaaatttaccccttacactcgatattaggtggcaaattgtttcatgaccttttggtagtcgatttcctttctacgtggtgtttgacatttgttttgcaagatattatactct

SEQ ID NO: 48205 - DNA, 622 bp, Gossypium hirsutum
  Clone ID: LIB3543-001-Q1-K1-E2
atcttcctccaaacccaagcgagaattttccctcttttcttcacaaccatacagatcacaactacccctctttcgttcttaatgtaaaatgtcaaatctcggtgacgatttctctcagttcgatatatcaaaagaggaaaaagacaaacttgttgcagaagtagttcgttacatattgttcaaaacacatcaaaattcaggatgtccaattaaaagggaagaactctctcaattagtcactaaaaactatcgtcaccgttcgcttcctgcttatatcattaacgaggctaaagtcaaactctccaccatttttggttacgaattaagggaacttcaaagatcacgtccttcttccacaagccactcccgattgtctcaacagagtggagttgatgccaaatcctatgttatcataagccagttaccagctgaggtgtataagaaatatgttgaggatgttaatacatctcatcttactggttttacttttgttgcgatcagtattgtgcagcttgccggaggtaaaattgctgaagataatctttggcttcatttgaagagaatgggattgcatgaaactgatgaaaaccacccagttcttggtaatgtgaaagcagtattg

SEQ ID NO: 48206 - DNA, 542 bp, Gossypium hirsutum
  unsure (1)..(542): unsure at all n locations
  Clone ID: LIB3543-001-Q1-K1-E7
cccacgcgtccgccccgcgtccggagcattcgaccggttgctttatgcatcgattactttcagatttttgaaagatgagaagcagtctctttgtaaatgaagaggaaatgcagaggacgaatgaatcggcgtctgcatctgcatctgtgtctgcgtctgcgtcagcgtctgtggataaatttgaagaagaaattttattctgttttggatttgagaaacagctcgaagaggatttacagagagccagctccatcttaacagatggagccgctgtttttcttcttgccaaagctcaaggtttctgaggatgtttctgggaccaatcaatgtgcgggcatctcgtaaagaagtccagttttaagttaaggacgaatataacaactatagagtcagcatcacttctcttttacccttttctaattttattcgntgattgtctttttgatctgcatatgaataaattctttaattcaacaattgcatgtcatttccncctcgtatagaaattcaccaaataaatagtanggatttatcaaattcat

SEQ ID NO: 48207 - DNA, 542 bp, Gossypium hirsutum
  Clone ID: LIB3543-001-Q1-K1-E8
cccacgcgtgcgctctttttccctattgtgttgactgcccccatttgcctttccttaaccgaagtttgatgttcttgtatgatgatggtcttatcatggacggagcataggtgttggaagctaaacatggaaccattttcgtagcctatgcttttcctggttatcaagaagctgtacaggatagagatcacagattcttaacacgagcaattggagaagcatataaagggcttgaatgtaacggtggaggtccgtcaggagcaagtgtcgttcgcccagactaagtcgctgagagttgtgacaacatggtatgagaaaaacactgaccctactgtacatgcagaggttactgctcttagagaggcatgcgatacactgaatcaaactgagctctcggactgcgaataatatgctcaatgcgagccttgcccaatgtgctgcagcgctatgcatctgcctagaatcaataggctgccttatggatcgaacgctgaggccgccataaccataggactcgatgattttattgccgatgcattgag

SEQ ID NO: 48208 - DNA, 662 bp, Gossypium hirsutum
  unsure (1)..(662): unsure at all n locations
  Clone ID: LIB3543-001-Q1-K1-E9
tgcgccgattacactatgttgcaaaagcggaggggctggacatgaaattagcccctatcaacaaagcatgcggatcctggctattgggtcgggtcgcgcgcggatcctgaagagggctaaacggcgccgtttcatatttctttaaaagccagacttatttttaggtttcattttcttcaaagaacaacacaaaaaaagaagaaatggggttccttttctctgctagggttcgaaacccagcatgggaaccccgccgccatccgccgttcttccctcgcaacgccaccgaggatgacggccagcgtcatgcagaacaaagggcttctgccctttaccaccgaaataggcgagaagaaaatgaaaaaaagaaaaagaagccgtcctcgtccctcgtttcaactcgtctccgacgacagagatcagggctccggcgaagagaccgtggcgctcaggtaagttttgggtttttgttgtttttatttcagtaaaataagaaaaaataaaaaaacaataactaaataaaaaacaaaatgaatggttagatctaagacagaaaacgcaatatcaccttaagaatgtttttctcttttttatttcgattttttcccgaagaagactacaggagntntcgttttcggcctttatagccgaactgggcttgt

SEQ ID NO: 48209 - DNA, 584 bp, Gossypium hirsutum
  Clone ID: LIB3543-001-Q1-K1-G11
gtcgcagcaggcggcatacctgctttgttaagcttctcaaataagctcctcagcggctgcccaaattgcagcaggctaatgcgcttgttggtctatcatacgagcaggaaagagttatgagtattgtcgatgaaatgggggttccaattgtggctcaagtgtcgggagattcccttatgaaggttcaaattccggctgcaaaactagaggcgagaatggcggctcatgaccctgtggctcaagaggattcctgcagagagaatgagattaggcccctggtcactttggtatcgttcgacactttttgcggatattctaagacacagtagggtaagcaaagtattcattctatagctcagatcagttaagaatggagaaattttctatttgctgtgatcgacattcgagtaaactatagttatagaccgtattcaaactgctactcgaatctgcatatggaagggagctgtatgggaggaaattataggaaagaaagagaaaatgagactcctgaacttaaacttcagctgaaaatcaattgtgctgaagctttatggatgcttgctaagggcagtgcctcaaat

SEQ ID NO: 48210 - DNA, 641 bp, Gossypium hirsutum
  unsure (1)..(641): unsure at all n locations
  Clone ID: LIB3543-001-Q1-K1-G2
cccacgcgtccgcccacgcgtccggatcttcttttcccgtcacagccttcccttccataattcagtttcacattctccgtttcttcctcaatattttctttctagccaaacaaacagaagaaagaaaaaaaaaacacagaatcatgggcgtcgattattacaatattctgaaagtgaatcgtcacgccaacgaagaggatctcaaaaaggcttacaagaggctggccatgatttggcaccccgacaagaacccttcctacaaaagacccgaagccgaagccaaattcaagcttctctccgaagcttacgatgttctatcagatccgatgaaacgacagatctacgatctttacggcgaggaggctctcaaatccggacaattcccgcctcctaaccaatctcacgcttccacgtcggcgtcgtatccccgcggagctggccattactatnataatagtaataataatcagaggcagcagcaaccgaatacgggtcctttcaggtttaagccgagggacgcggatgatatatacgaggagctgtttggggcggaggccaatggtggaagaggaaatagagggtttagagaagggaattttaggaatagtaatggttacgggactagtagcactactagtaat

SEQ ID NO: 48211 - DNA, 647 bp, Gossypium hirsutum
  Clone ID: LIB3543-001-Q1-K1-H10
ccccgcgtccggactttcttgagatggagaagttggcgtgttcttcaaatgattctactgcaaatggtgcaatcactaatgcaggttctacaaacaataaatcacccgaagctgttaatgctgatgcttcaggagagacttcttgcaaggaactccagtctggaaagcagcatgatctatcaccaccagcaaatcacgggcctatagtccatcctgaatctgatgcagacaaattgcttgttatgaagcttcattcaaagctttctatggtgcttgaatcaatgtccaaggatgctgatgcgcacaaaattctggatgacatcaaatgtgctatccaggatgcacaggacactctgagcgatcactctgtcaatggtgtctctgaggaagtggatggctctgaaggcaaatgcaataggcagggtcatccggaaaatggaagcttaactgaagggaaggacattgctgtgcccccaggtgataaggtgactacagaaactttgcaaactataagtcaagaattagctgttgcgatttctcagattcatgactttgtaatttccctggggaaagaagcagtgcagttgacaacatatcttctgatgcctatggattaagccacaaaattgatgatttctctgtcacct

SEQ ID NO: 48212 - DNA, 508 bp, Gossypium hirsutum
  Clone ID: LIB3543-001-Q1-K1-H11
cccacgcgtccgttttaatggagttgttattttccaaaaaaaaaaaaaaaaaaaaaaaaaaaaaaaaaaaaaaaaaaaaaaaaaaaaaaaaggtaaaaaactcaagaataaaaaagcttacaatacgctttcgtgcgacctctttgctgttctctggtggggcctcacttcccttcgctggtgcgtcgttttaccccggccccccttggaaaaccctgggtttcccccctttaacccccttgaacttcatccctctttggccatctcgggtagtcccgaattgcccctcctcgctctcccttcctattggttcgggccccttatttgccaatgtgtcgcgccctgtgagggggcattgctcggggggtgtctggcggttacacgcatcgtgcccgtagcgcgttccagccccctacctccctttcttttccctttcttccgttccttttccccggctttccccgttttgccccatcccggtttatcccgggggtggtttttgggggtg

SEQ ID NO: 48213 - DNA, 637 bp, Gossypium hirsutum
  unsure (1)..(637): unsure at all n locations
  Clone ID: LIB3543-001-Q1-K1-H6
cccacgcgtcgggattcccggtcggtgatcatcccagggttcatcggtggacgaatggtgaaatggttgaagagaattatcgttaccacacaagaatcagacaattattatcactatnaagataacagagtacttccttctcatgttgatgccgagctcgccaacgctgaaggttggtggtataagccggaatatatcatcaatgagttgaacattaactcggcgataacgacgccttgtcatgaagagatcttgccgatcaacgcgtggaccactcaaaggccatatacgttaaggggctatgcatattccgggggagggaagaaggtgacacgtgtggaggtaacaatggatggtggagaaacatggcaagtgtgtaccctggaccaccctgagcaaccaaacaaatatggaaagtactggtgctggtgcttctggtccttggaggttgaggttcttgatctgctgggagccaaggaaattgcagtccgagcctgggatcagacccttaacacccaacccgagaagctcatatggaatgtcatgggaatgatgaacaactgctggttccgagtaaaaacaaacgtttgcaagccacacaaaggagaaatcggtatggtattcgagcacccacgtt

SEQ ID NO: 48214 - DNA, 601 bp, Gossypium hirsutum
  unsure (1)..(601): unsure at all n locations
  Clone ID: LIB3543-002-Q1-K1-C6
ctttcttggggtttcacatttcttgttcacaccatctccatataaatctttcatgtttctctctctccatcttttcttctttctgtcaatcttctcttttttggatcaatcatccttttggaggctgcaaaaacataagacttatcgataatcttgtgtggcttttgtatgctttgcgtgtgatagttgtaaatggaagggcaccaacaccatcatcatcaatatcagcagcagcagtatcaatatcatcagcagcagcagcaacagcaacaaccacctaccagcagtgtaaacgttgatgctgatagattccctcaatggagtattcaggaaacgaaggaattcctgatgatcagagcggagctggatcgaagtttcatggagaccaagaggaataaactgctttgggaagttatctctaccaggatgagggaaaagggttttaatcgaagcactgaacagtgcaagtgcaagtggaaaaatctcgttactcggtacaagggatgtgaaacgatggaagaagaagctatgcggcaacagttcccattttacaatgnnagtgcagccatattctcagcaaggatgcaaagtattttatggt

SEQ ID NO: 48215 - DNA, 629 bp, Gossypium hirsutum
  Clone ID: LIB3543-002-Q1-K1-D10
gaaaaatataaaaacaacagtctttgaacgatgtcgtgttcgtctccgatgaggaagacctcgtgcctttcacgtaggttctcgagatcattgagactgtctgccagaacggcggcgttaacaacagtctcgaccagggagaatcacctggagtcttcttctacatcatcaccgtcttcgccgccgccgttggcggaggctggaggggattcatggtcgacgttgctgccggaattgttagttgagatcatggagcgtgtggaagcgagtgaagaaatgtggcctgacaggaaaaacgtggtttcgagcgcttgcgtatgtaagaagtggagagaagttacgagggagatcgttaaggcttcttctcaaaatagcggcaaaatcacttttccttcttgtcttaagcagcctggtccacgggagtttcctaaccagtgtattataaagcgaaacaaaaaaaactcaacattcttcctttatcttgctctttcaccatcattcaccgagaaggggaagtttctattggcagcacgaagatatcgacatggtgctcatatcgagtatattatatcccttgatccaaatgaactatctcaaggcagtaatgcctatgtcggggagttaagttc

SEQ ID NO: 48216 - DNA, 616 bp, Gossypium hirsutum
  unsure (1)..(616): unsure at all n locations
  Clone ID: LIB3543-002-Q1-K1-D8
agnaggagcaaattaccttttcagaagatgaatcaacatttattagtctcttgaaagcattggcactttggacagagaaaactaatgaccaatcttttattatgctggcttcaagcatttgcactttgatatttgacatgacatccgaaaatgctcttttgaatcatcctagttttagtagcagctgtcttgatagcctgtcacggctcattgcaagaagtttggcttcatggggacaggatatgtctgatgctgctaaagcagatatggatcttctagagattgttactgcaggatattctcgatgggctgatcggttccctcaaatacaaaaagcagttgggagataatcaatgtaactacttagtttccttgaaggtaatatattatactggtaattttctttttaatgaagaaccctccgattgttaaacctgtcaattgtgtcttgaacccgaataagcctacccaaataacacatttgaatcaacttgatttgatcataaaaaaccaacctaaactcaaaaatgacccagaccataaatgactagaacccggaataacccaaatctaaaatgtgccgaacaagtaacctgtaacctgtagtgatctgaaa

SEQ ID NO: 48217 - DNA, 690 bp, Gossypium hirsutum
  unsure (1)..(690): unsure at all n locations
  Clone ID: LIB3543-002-Q1-K1-E6
ccccgcgtccgaaactcttcaactttcatcgcttaacaacgttgagatattacccatacaagtcattgacatcgaagaaaacaagattcaagagcctgctgttgatgaattcgattactctcaaagaggacaatggcttcgagctgctgttttgggagctaacgatggattggtgtccgttgcgtcactaatgatgggtgtcgcctcagttaaaaatgacatcaaagctgtgatggttgccggttttgcaggattggttgccggtgcttgtagcatggccattggagagttcgtatctgtatgcacccaaagggatgtagagatatctcaaatgaaaagagagaagcgagagagatcattagagagtgatgaaaatgatgagaaactgccgaatcctggacaggctgctgtggcatcggctttggcttttgcagttggtgcggtgcttcccctattggctgctgcttttataaagcaacctaaggtgaggatggcggtggtttttgtggtagcaagtgtggctttggttgcttttggagtggtgggtgctttgcttggaggaactccggtggtgaaatctagtgctagggtgcttgntggtggatggatggcgatgggtactacctttgggctcaccaagntgattggaatcgatcatgggatgcanatttgattgaatttactttgcat

SEQ ID NO: 48218 - DNA, 481 bp, Gossypium hirsutum
  unsure (1)..(481): unsure at all n locations
  Clone ID: LIB3543-002-Q1-K1-E9
acgttttgcaggcatatcacaagagatgaactcgaagctgccatgaaagaatatggaatgggtgacgatgacacaatcaaggaaatcatatctgaagtcgacaccgataatgatggtaaaatcaactacgaggagttccgtgacatgatgagaagtggaacccagcatgggcagctgttttagattttcaagactagaattgcagcaaaaaacaacagttggcttttaagagatttggagatttccaccacataagtgtggttttttcttttttttttggggggggggggaggagggggggnnnnnnnnnncnnnannnngngngnnananangcatatagatattcaatcggattttgagaggggagattgttttgnttatatatatttttccttgtttnttcagttntggttttggccagagcgttgaactaaaaacctcataggatacctggcagttcacatacagtatacttgtttt

SEQ ID NO: 48219 - DNA, 632 bp, Gossypium hirsutum
  Clone ID: LIB3543-002-Q1-K1-F11
ccccgcgtccgcccacgcgtccgcaagctgagacttgtcaagttaagcattaatggcaacctctgtgggcctttctcgtgtactaacgcatagaatgaggttgatggaatctctgacaataactggaacttcccccattgttggagtagttgcaacgtttatttccttccagattctggtgtgtatgtgcagcactgacactaggaatgcccatgaatgtaacaaaccattcaactgcggaatcgtcaaagagataagctatccgttccggcaaaagggtagcccggcgtattgcgggaaaccgggatttgagttgttttgtgagggcggtaatcccatgattacaatcagttcacggacttaccaacttctggtatacaataccaccctcagatctctcactcttgaacctatgtctaatacggatagtgtgctttgtcctcgccgccttgtcaacacctctttgaatctcagccctttccgcgctctttggaatacccagaacatatcactctattacggttgccccatcgaggccaatcagtaccaaggccttactaatcatcagttcaattgcagcatgaatggaactgatactgtcggctactaccttgttccaactgcctttcctg

SEQ ID NO: 48220 - DNA, 581 bp, Gossypium hirsutum
  Clone ID: LIB3543-002-Q1-K1-G1
ctcgagaaataaatatcatcatcacaaacacactagtaatcacaaattcgatgaactaaaaagaaaaaaagagtttaacgtcgtcatcgctgtttattttcaaagaaatgacgtcagggacgagaatgccgacgtggaaggagagggaaaacaacaagcggagagaacggcggagacgagcgatcgcggctaagatcttcgccggtctgcgtatgtacggtaactacaagctcccgaaacactgtgataacaacgaggtgttgaaagctctctgtgatgaagccggttggaccgtcgaagaagacggcactacttacaaaaagggatgcaaaccagtggatcggatggacattttgggaggttcggcatcggctagtccatgctcttcgtatcacccaagtccttgtgcatcgtataatccgagtcccggttcatcatcctttccgagtccggcttcgtcacattaccaagccaatggcaacggcaatgccgatgccaattccttaatcccatggctcaaaaacctttcatccggctcgtcttcagcttcatccaagcttgctcaccatctctactttgct

SEQ ID NO: 48221 - DNA, 433 bp, Gossypium hirsutum
  Clone ID: LIB3543-002-Q1-K1-H8
cccacgcgtccgccaaacttgatctgaatcctggggtaccggacgtgcgcgtgtcacgtatccgtcgtgtacctggtgggggtactcaccgcgcatgcagggtgctttcggaaacatgtgtcgcggaggacgcatgctttgctcactaccatagatctgtgggccagctggcaccggtaaaacaacgataaccaaacgcgttactcctttgctgtactgccatatgtcgcctccgctgttccttcccttgttatgggacctggccactcgatagaggttgtaccgggatacccgctggaaatttctgacgctggtaatagcgataagaaaaccttgggtgcaatcaaggactggaaacagatcgcagcatatgctgatgtagaaaaggctaaagacaggcaatgaatgctgcccggagaatgaaaaatgagga

SEQ ID NO: 48222 - DNA, 351 bp, Gossypium hirsutum
  unsure (1)..(351): unsure at all n locations
  Clone ID: LIB3826-002-Q1-K6-A2
ctcagtttttcaaaaagaggtagaacaacaacagcctccgtctcatttgttgatccaaatgacgaaaaatctaattccggggaacatggtccaaagccttccgaggtttatggctttgttggttccattacaacagttgttgctacagctatttacttagcatgggcatatattcctgaaccttggttacattcaatncggatcttctattatcctagcagatattgggctttggcagttccaagttatgctatggtaataatagtattagctgntatattntatatcgggctcaacttcatgtcaccccaccaccaacttcattaaaccacatgtttgatgaatttagta

SEQ ID NO: 48223 - DNA, 488 bp, Gossypium hirsutum
  Clone ID: LIB3826-002-Q1-K6-B1
aaaaaaattttaaaagagaaaaaaaaacggaaaaaagaaaaaaaaaaaaaaaaaaaaaaaaaaaaagaaaaaaaaaaaaaaaaaaaaaaaaaaaaaaaaaaaaaaaaaaaaaaaaaaaaaaaaaaaaaaggggggggcggcccaaggggaccaaggctaacgcccgggggtttttaacgaaaggggtgttttatggggccccctaaataaaattaaggggcgggggtttaaaaaggggggggggggaaaaccccgggggtccccaaattaaatggcttggaagaaaatccccttttggccggggggggtaatacgaaaggggcccgccccgatggcctttccaaaaaggggcccaccctgaatggaaaaggggcccccccttgtaggggccattaaggcggggggggggggggggttccccccagggtgaccgttacattgggcggggccttagggcccggtcttttggtttttttcctttctttttt

SEQ ID NO: 48224 - DNA, 215 bp, Gossypium hirsutum
  Clone ID: LIB3826-002-Q1-K6-B10
cggacgcgtgggtaggatactatgttgttttgattaaactcagggcttatttggaagtccccgctcgcaccaacacatgtattagtatctgaatttgagggaaatggtgtagtgtatacatatacatatatatatcacgaagaagaaaaggaaatattaaatgaaaatgtattctggtgcagtgtatacatatgtaatatatcatgatttgggtc

SEQ ID NO: 48225 - DNA, 471 bp, Gossypium hirsutum
  unsure (1)..(471): unsure at all n locations
  Clone ID: LIB3826-002-Q1-K6-B3
ccgggtcgaccttgcgtccggggtgcttttccacatgggggaatcgcatatggtttggatagattggttatgttgttagcggatgcaaattcaatcagagatgtcattgctttcccaaagacgagtactgctcagtgtgctctcactcgagcaccatcaaaagtggatatccaacagttgaaagatctgtcactgcagcaagcccagtagtttcttcttgatttgcctgtctcaatgcgaacccaactaggctggccattaattagccttttcttaatcaccattgtttatgcccctttaaagttagaaaacatacagcaatcgtccccgttcccccttcttcccctgttttatattttaactgtgctttacggatggctgattttaggaatgatttgattctttttacctaaataaactattggctgtttatggtatgctagcaagttcggtttanaaaaaaaaaaanaa

SEQ ID NO: 48226 - DNA, 364 bp, Gossypium hirsutum
  Clone ID: LIB3826-002-Q1-K6-C10
gtgactctaactgggaagattcttccgattggaggggtgaaggagaaaacaatagcagcaaggaggagcgaagtgaagaccatcatattcccgtctgctaacaaacgtgattatgatgagcttgcaccaaatgtaagagaaggtcttgatgtgcactttgtagatgactacagtcagatattcaatttagcatttgataataacacaggaaattagtttcttatggttttaaataacaccattttcctgggtttctgcctgaatattccttgtaattgatttgggaacgaaaacccaattttgtattgtggtacaccaacattttaaatcaagaaattacagagtggagcacaaatttgtgatc

SEQ ID NO: 48227 - DNA, 470 bp, Gossypium hirsutum
  Clone ID: LIB3826-002-Q1-K6-E12
taaggtgtgtagtgatgcttatttgcaatgacacttcatggaatggtcacacgtgattgctagaatgacctaacttggagcactgatccttagtggtacatacagtgacttgacagaactgtcttgttctataagtcatctgcccactctgcaagcagtctccatctcaataccatccaccttcggactctgactctgcacattgtgagcgacttgacaaactagataacctgattgtggaccacaatcctctattagtgccttccattgtgatagctaataatggggctgttgcttcataagattacatgtttaaacagtggctcgatatattaaccgccgatcaaaagagaatgatgcttgaaacacgcgatcagagacgtcagatgggttggtagtgatggggaacttcattgttgagttacgccatctatgagatgtaccaaagtgttggacaatacctgattggg

SEQ ID NO: 48228 - DNA, 650 bp, Gossypium hirsutum
  Clone ID: LIB3826-002-Q1-K6-E5
tttcaggatcaccccacaatccagagatacagttactgtctactaaactcaaaaaaggatgcaggaacctgctgaagagttggcactgatcttggattctaaaggaaatctcatgtccttgatgaaacagcttaaattgcttattcctttggtcttctcatcaagtttggttatctgagtattagccacggtaccaggcttcgggcagttggctacgatggcatctgtttcgctcatgaaggtttcaactgcagctgcagtctcatctgaatgatctgtgtcagggactagacctttgacagtcggtgttgaactgtgatcttcatttttcatctcattgttcagactatatttcctgaaactttcacttaaaggttcttcagctatgaaggacagctctttctcttcactatcctttccagtatcttgaatgcaggagattgaagggctctgatctccattatcatcaaaaggctccaaatggactgccgcagctggctcgaccactgaatcctctctttctcgcaaggtccttacgataagtgtcttgagggagttcatcacttggaccgatacatcagtgcattaggggatctgccatctgcacccaaataagcattaagcgcagccagcagtcagcacaatatatg

SEQ ID NO: 48229 - DNA, 642 bp, Gossypium hirsutum
  Clone ID: LIB3826-002-Q1-K6-F3
tcagtctataaatgttactttattgagttttttttattgtttttgtccaacaattctactcctatataagtattatttgatttaactgacagtgagagtgtccttttgaagaactgatagtgagagtgtccttttgaacccttgttatattccagtttgggaatgaatagttgataaaaatgggaaggtaattctgaatttcgaattactctttgaaaatttgatcaaaatttgactttcccagattttgattttgcaaatggacatgtggagttgtgttggttaattattttatgaattttagattagtaataatgatgttgagaattgagattgtccttttgacacctagttatattgttgtttatgtttctaaggtttggcgatgaatatttgataaaatggcaagacaaactaatatcctttttcttgaacaatggttgagtactaatattggtgctattagctactctgtttcagaaattagggttaatattgatgaaagagagaatattaataatttcaatatttttaaaatccttaattgaatttggtaaatctgaatattatgctgaatattcaatattttcaatattgaatttggtgagaatattatgctggcatggttttttttttattggg

SEQ ID NO: 48230 - DNA, 544 bp, Gossypium hirsutum
  Clone ID: LIB3826-002-Q1-K6-F4
aattacccttcattcttggccttggtcctttgctttgtcaagcggcattctgtcaagattgaccgctcgttggaccgaggttgctgcatggctgttgtgccggtccctcaccatatatttcatgcactccagtcgtatttctgccttctggagtgccttgccgctgggaacatgaaccttggtgcctaggcaatgaaagaaaggcttttcctttatccaaacatggccggattggtgttgctgtcgacatctgatctgtcgcaagatgacctccatgcatgagatagtgtatacaatagcggattcttttcattcactttcacccacttcaccgactctcgggccgagggttcgattcaacgtacttcgattaacagcgcttacacagtgcgatgaagagagcgaatcatgcgatctggtctgtaggtggcatgcagacgtactactaatgaggcgcttcagctagggagtgcttataatgatacccggctttagatcgtgactcaatgcatctggagatactggtatataggactcgcttgta

SEQ ID NO: 48231 - DNA, 611 bp, Gossypium hirsutum
  Clone ID: LIB3826-002-Q1-K6-F7
ggtcaagttgaggaagcatataaattgatcaatgacatgcccttggaattggataagacaggtgcttggagtagtttgcttggttcttgcaggatccaccaaaaagttgaaatcggtgaaattgcagctaggaatctcttccacctagaacctgatgtggcaagccactatgttttactatccaacatatactcatcagctcaactatgggacaaggcaacagatattcggaagaggatgaaagaaatgggggtaaaaaaagaaccagggtgtagctggattgagttcgatgatgaggttcataagtttatagctggggatgcatcacacccacaaagcgggcaactatatggattccttgaaatactgtcagaaaagatgagaaaggaagggtatgtgcctgatacttcttgtgttctacataatgttgatgaggaggagaaagaatacttgctttgtgggcatagtgagaaactggcaatagtctttggcattctcaacagccctcctggtaccacaattagagttgcaaagaaccttagagtttgtaatgattgccatgaggctgctaaatacttctcaaggataacagatagggaaataatcctaag

SEQ ID NO: 48232 - DNA, 507 bp, Gossypium hirsutum
  unsure (1)..(507): unsure at all n locations
  Clone ID: LIB3826-002-Q1-K6-H5
gtgaaattgtggcaaacaaacaagaaacgaacatacttgatgaacctaaaacaccttacccatcaaggattgaagaagatggttcttctgccgcaagcatcgactttgctgcacatgctgaagccttaaaaaatgccttgaacaaactagctttcactgaagagcacaatagcccgtttggagaaacctgccgagacgaagatcaaggctcagcaaaacaaaaagatactgtaagctttgacgagagaaggagagcacattatgacgagttcaacacagtgaatgaagtacaagaaaagggctgctctctagacgatgagcttgataactgtatacatgtttccggttcaggttcaaccctcgacatcgattcaatagaaattgatatcgaggatgatgatgatgaaattctgccaaatattgacatacaggaaaccgatgatctgagtttgcctcaatactgacattttggttaactagaanaatcatgtcaatatctagcaatca

SEQ ID NO: 48233 - DNA, 444 bp, Gossypium hirsutum
  Clone ID: LIB3826-002-Q1-N6-A10
gtctcttgggttttcccgggttccccggcccgggccccgcgggggccccccccggccctccggggcggggcctgggggccggcccgcctcgggggcatgggggcttcctgggggcaaggggtagcccggcccaatgccccgcccgggcgggaccgggagcccctcgcgataaccccggggggcccaacgggggagctaaaaaacaaaaactggggggccctaaggggccgcttacccaacgggaaaccggtggggccaccggcctttttgaaatgggcaaaccccggggggcggctgctttcatgaagggcgccacgggggggggggggtgcgccagggaaacggcccaaagggggttttccttcaccccctgggcccgggagaaatggtgcaagccctccacgcccggcccccccaggagggcaaaaacccggccgaaggggg

SEQ ID NO: 48234 - DNA, 367 bp, Gossypium hirsutum
  Clone ID: LIB3826-002-Q1-N6-A3
attcaaacttttttacattatgaattatagatttgtttcatctaattaaatatatcttcttaaaccctaatgacaattgcagtatcttgccataattgcaattggtcatgtaaaggatcttatagcaaagccccaaaaaattacgcgccaaacagattccaagaagtacgcaaaaaaaaaccatccgtaagttggaagagcgcaaaacaaattataaccatgccccagaaaaatgtgcactgtcacacccacaaaacgaaacaagccaaattcagccccttctcgaacaaacaaactttatgcaaacaaatcttttcaaaactggccaacaaactcggatttcttccttaaacccaatcacggcgag

SEQ ID NO: 48235 - DNA, 440 bp, Gossypium hirsutum
  Clone ID: LIB3826-002-Q1-N6-A4
aaaaaaaaaaattttttggcaaaattcccccaaaaaacccgttttgggttttaaaaaagggaaagggggatttgtcttgaaagtttttggggggaaggggggggggacccctgattttaaaaaaaaccaaaagggtttccaaggaaaaaccattggggaaattggggggggggaaattatttgccccccaaaggggggaagggcccaaaatctgaaattgggggagcttgcaaattgggggggggggggcccccaaatccacctttgggaccaagggcacgggcttttccacccccagggcaaaaaaacttttccccttaagggggtttaaagaactcattggtgcccaaaaacttttgggtttttttttttttataaaaatccttgggcttggccttttaaaaacccagtttgaaaaaaagggcaacattgcttttttt

SEQ ID NO: 48236 - DNA, 138 bp, Gossypium hirsutum
  Clone ID: LIB3826-002-Q1-N6-A6
aaaacattgcaaaccagctcatcgaagtaaacaaaaggggatggtaaattaaagaaaattcaacttcaaccagccagatggggcctaggcttctcaaatgaaaaacattttccaatcaacaaactgacagacgttcac

SEQ ID NO: 48237 - DNA, 496 bp, Gossypium hirsutum
  unsure (1)..(496): unsure at all n locations
  Clone ID: LIB3826-002-Q1-N6-B11
aactgagactaaactgtatcatattaattcagagtcactgacatggcaacaactggaatcatggatatgctttcaaacggtaaaagaatgtatcttcacaaactgcaaactcaaatgcattaaaaatttaacaaacagcctaaggataggcccaaacttgttcttttacacatgccgccttttttttaccgactggacagcaagtccaccggctgatttggacatcacaaaccagtactggttaaagcatcacctgcgaagctatgattcccaccaatatcatgaatttggcttaactatccattggttccaacctggctaggttatatacccaatctgcaatttcttttccaccgggccaaccaaaaacatgtntcctcctacgaacagtactgacaaactccatgtaaactcttgctgacttatcagtcactacctgccataactaagaacttccctttatacttacttatagagcgaggttgagtgtttccac

SEQ ID NO: 48238 - DNA, 423 bp, Gossypium hirsutum
  Clone ID: LIB3826-002-Q1-N6-B3
cttgcttccaaaccacagccaggcaataagtaaggaaagaagaaagaaacaaatcctacctaaagccaaccgtacagcacaaacaaaaaaaaaaagagggggggaaaggagggcggacgggaacgagggaagaaaggggactaaacaggggggggcaaaaagggggggaaaaaaagagagggctaatgggcggccgaccgagaggggcccggaaagaggcaacccaagaagaaacaaccgggcgggctggaagaacagacagatcaccgggcgggagggcactcacgagggagcgcgcgggagagaaccccccccggggagggccagggggaaagaaatgaaagacgtgttcgattggggttaccccaaccaaaaaaaaaaccaatccaacccaaccgcaagcgaaccacccaggggaaaacc

SEQ ID NO: 48239 - DNA, 577 bp, Gossypium hirsutum
  Clone ID: LIB3826-002-Q1-N6-B5
aacttaaaatctactaattcattcaactaatggagttgagaatgtcatcttctgtaagacatgcatgaactcaaaagcaagctcttacaaattgtcaatagtatacaaaaccctgttttatgctttatacatcatgttctagctatgcgtctagctcaggaagttcaaccagtcattgatgagacagatcaagtagcgtgtctttggttcagctctccatgccaatgcttgaagctgccttaccagcagaatccttgaatttgtttttacactgcttcttcctctcttccttgttatccgagaatatgcttctccttagactccggcttgaaagatatgttaatggtaaacagtaggacatggatgatgagttatcttgaccccagcatgaaagcaacgaactaggaagagcctcaaaggtagaacgaggagggtaaaatgcagacactgttttaagtcggagctcttgtaattctcatcgagcagtttcaccggagaaaagagataatgcaagaagctggactgtcaggagtagcaatttttttacttcgcaggctttgctgaactggcaatttat

SEQ ID NO: 48240 - DNA, 402 bp, Gossypium hirsutum
  Clone ID: LIB3826-002-Q1-N6-C10
gcttcatcctctcattggggcgtttgaagggggggggggccccaatccccctggggggtttttgtctccttctttttccattggatttttgtgttcttccccgtggtcttggggttcttctcttccatcaggtgcttcttccccttgttcccccccattgccaacctggatttttgggggggggtcttctttactcctccctgctgaccttgttttctttttggcccctcccttcctaatccccctcgctgggggcctcggccgacggggggctccccgcggttccttcccggtggttgttggcggcccccccccccctcctgtggggggccttcccggttggcggccccctccccctggttgctccctggggtgtcgtgtccttccccgccaactttcccc

SEQ ID NO: 48241 - DNA, 384 bp, Gossypium hirsutum
  Clone ID: LIB3826-002-Q1-N6-C11
cttatcgttacagaattgtcgagcgctgggtgcttttaaaacatgggctaaacttgctccatgattgtaccattgataagcatttatttttaatcattcattccatacaacgtggacattttagcttcatgctattgcacttattgatcttcatattgatagtcacacctaatctgacaaaagattctatcatttaaaaatcttgattctaggaagaccaattggaatcatctctatcatttccaatatctccactaccaattagttggccagtgtatcgtgtcccatgattgtatggttattatagagaatgagcttatcattaatgaccataatcaatgtcttctaattgtctatcctaattagacattattttatccaaat

SEQ ID NO: 48242 - DNA, 528 bp, Gossypium hirsutum
  Clone ID: LIB3826-002-Q1-N6-C2
acaaacacaagctctcggggttaaacgacttaagacacatacaacagtagccttatacacaggtttgtaaaggaaacagagcttttacagtacagagctccagcactaaacaaagcttaagctctagatacaacaacatatctcggatgtctctccaacattattagaaacataacaggagttgcgaagacataaatatagcatctaatatcaccaagaaaaaaacacaataccaggctcttcaggggtaaaacaacatcgtttggcttgattcctgaaccatgaaggggaaaatgattagaggcacaccccgccattggctgtagcagcttcgggatggtaatgaagcatttccttccacattttctctctgatcatctcttcccctaaatcctcatctatgtcaagatcgagtggcacctgggctgaagggttgctgttcggatcatacaatggtgccatgtaagggtgttggagtgcttcagttacactaatcctttttgaagggtcaaaaacaagcatcttttg

SEQ ID NO: 48243 - DNA, 420 bp, Gossypium hirsutum
  Clone ID: LIB3826-002-Q1-N6-D4
gaagccaactttccccagcgctgaaaataaaaccaaaaaaaaaacccaaaattaaaaaaggggctaaacaaaaggccccccccgaaggcttttttaaaccaaaaaacacccaattttcctggaaaaaaaaaaaaaaccaaaaccccaagccaaacatttttcccccaaaataaaacatgcccattaaagcagggaaacccgaccccatttgccaccatgctgggccttttggggaaactttaaaccccccccaaaccccaacgacttggtccaaaaaccccaagaaaattggccccccaactttggaaaccttgcaaaatttttcccaaaaagctttgctggaagccgggtttctggggggccccccttttaaccaactgttttctgggggggaaccggaaaaaaaaccttttttggaaa

SEQ ID NO: 48244 - DNA, 596 bp, Gossypium hirsutum
  Clone ID: LIB3826-002-Q1-N6-E5
aaaaaaggcctaattacaattgattgtatgatgcgttaaaagggttcaatattccactgatgctgcgcggaaactccatctgcacaccatatattgaatattcaaattcaattgttatgaaactggaagttccatttagtgtttcttcatgtagccttgtagggcattcatggcatgtagagaatggaaacccccccaaaaaaaacaatggaaacccccccaaaaaaaacagacacccgagatcagcatatctcttaattcgtgtttttgttccttctttttgcagtacaactgtttttggagtttccacagaatccatgcagttgtcgtatgactccagagggaacatcgttccaacaatacttttgctaatgcaaagacgtctgtatgctcaaggaggcttgcaggttttctttcttattttcatacttcattttctctttgctattgctcaacataggaggacatccaattcttcaacattctctcgtatctatatgactggaaattctcaagaaggtttctaagttttcagccccgagtccttaccatagacttcatacatgcaggcagaagggatttttcgaataatgccg

SEQ ID NO: 48245 - DNA, 433 bp, Gossypium hirsutum
  Clone ID: LIB3826-002-Q1-N6-G10
cccccgcccccgaaccgttaaaccgggggaaaacccaattttggggttcttttaaccggataagggggaaaaatttttggccccaagccttaaaaaagggtttttttttttaaaaccaggggccccccccttaattccggaccaggggggggaaaaccccggaaaataccaaacgggggcggaaaaaatccacccccccaatttttttatttttgaaaacccctcccccttaaaggaaaggggaaaaaaccgggggggtggcccccctttattgggccccccccaaaaaaggttgggaaaatttttatttaaaagttttcccggttttggcaaaaaaaatcctccccctgttgccccccccaaattcggggaaaaccaaatttttataggggaacccaaaaaaccctttaaattccccccggggggcccccta

SEQ ID NO: 48246 - DNA, 319 bp, Gossypium hirsutum
  unsure (1)..(319): unsure at all n locations
  Clone ID: LIB3826-002-Q1-N6-G11
ctcaggagcctctgaatcttaaatggttcttaacttttgatgacatttctaaattnaaaacctatttttttctaaaatcccttgttcttctttacatgccctgcgtttcccctgttacatccttacctgaacaaattctgtttgtatatgcccctaacgctttgtatatttgaaaaacctcacgttttaccaatattttcttcaaacacaaaaccacaaggaattgaccctagttcgcacacttttgtccatatattttatcctatctgtcatattgactcacactggcttccttcgctggagcttcttctagtccaac

SEQ ID NO: 48247 - DNA, 440 bp, Gossypium hirsutum
  Clone ID: LIB3826-002-Q1-N6-G4
aaaaggggggaatttttttttttcaaatttaaatcccaaaaattttcccggggcctttccaatttaagggggattcattaaactggaagctttggcctctttgggtaatcccctttcaaaaccccttgaatgggtgggttccccggcatcatccctttcatcatgggggggggcatcatcatcatcatcatcattttctcgaccctgccccttttcggaatcaatttttttctcatagggccaattaatatcttcggtttccataaaatctgcatcatttcgggggacatgttttcggaaaaaattgggtttcggcattggatcaacaacgatcatggggtggttttaaaaactataactgggcatatcccttaaaagggcccatttttttaaaaacaccaaaaggtcggccaacccccccccctaatgaggaaggggaa

SEQ ID NO: 48248 - DNA, 624 bp, Gossypium hirsutum
  unsure (1)..(624): unsure at all n locations
  Clone ID: LIB3827-002-Q1-K6-B5
atcaagatgaaattccaactgtttttaagaagttatcatgagtttcttttattttatgggttatattgattttttgtttcttcttacaagtgcaaactagtttttaaaatattagaggagatatattattatttgattttcagttcacagccaaattcgagcgcccaaacacacgtcatagcccctgcagcaaacgtgacagacacacagggaggatcccgactaatgcctgaaccagcctggtcgacaaagaacatacacccaaagcctcaagctcctgcgtatagttaagaataaaggtaacaattgcgttgctcgtttgtgttacaccttcacgatcaaatatatctatacttcgagttaactcatttaatcataaaaatatatttaaaaggattttcgtaaatttcaaaataattgaatttattctttcaccatagccactttaccaaagaatattcaaccataagcccttaagagttaattttttatattcaaatgataatataagattgaatatttaagccataaccattctactctagggaagattaagttatttgatagccggtgggtttgacaagggtgtcatttntttagttgtgctcaaataataaatatgga

SEQ ID NO: 48249 - DNA, 561 bp, Gossypium hirsutum
  unsure (1)..(561): unsure at all n locations
  Clone ID: LIB3827-002-Q1-K6-C5
ccgggtcgcccagcgtccgggctcagctctttccagccgngntcaaagattggtcttttaggttctaagtggcccacaatccctgcattgggttggccttggagatccggttcacaagcggtaactccgtcagatcgcccttcttggggtggtttngncattttgtacagcttgggaatacggtgttcaagaaagtgttggccatggagtcaaagcagcntacatgcaggagttgaaagaagggatcttttcattacatccaagctatggtgcaccgtgttgtgtcccgaacgagttcgncctgctttattgaacactctccaacaactccaacttgaataccttgatctttacctgatacattggccctttaggcttgcngatggngcaggcngaccacctaaaccnggtgtcgttcccgaaatggacatggaaggtgtttggagagaaatggaggacttgtaaaagacaagctggtttgagacattggtgtgtgttattttacnttgttgnagatgaacaaattgctttggttttgcttgggccttgccctctgtttgt

SEQ ID NO: 48250 - DNA, 472 bp, Gossypium hirsutum
  Clone ID: LIB3827-002-Q1-K6-F11
aaagagacgtaataagaaaaaccatttgaagacaaatgagctggtccccatacattagacaccacaagttcaaaagggagagaatacacagtatgcgtagcagggaaatgaagcttgtgagctttgcctaactgacaagctgtacaaacttgctgcaaatcactctgtttgaaaaaaatatcacaagctttcagtacacaagcaagaacagtattgcaaggatggccaagcctgttgtgccacaaggaggatgaaggcagttgagcaacgttcagcaaactagtgtaagatttcaaggaaagatcggcaccagtggaagcagatggagaaaaatgaaatctgtacagaacttcatgcatgcagccctcgagcagagtcattcctgtctgaatatcctgtgtaaagagaagcagttgtgagattggaggcatcagaagtgatgtgattggtcgcactcgagtcaggatactag

SEQ ID NO: 48251 - DNA, 607 bp, Gossypium hirsutum
  unsure (1)..(607): unsure at all n locations
  Clone ID: LIB3827-002-Q1-K6-F5
acttaagcggcttcatattaatgaagaatatgaggactntggctgcaataaaattggagttgcaattgtgcagtctgctctgttgagaaggttgattttgactgcttcatcatctaaagtacttggcaatgctgtgaaactactgtctaccctaaacaaagaagcagctgataaaggggattttacagacttaatcattatatctaaagaccaatttccagaggttgctagagctcggaaagcacttcagttggcaaaggagaaactggataatttgattggcttgtatagaaagcaatttaggaatcacaaattggaatttacatgtgtttcaggaactacacatttggtagagctgtctatagatgccaaggtaccttcaaactgggttaaggtaagcagtnccaaaaaaacagtaaggtatcatccacctgaagtattgacagcactagaccagttaagactggcaaatgaagagctcaccattatttgtcgagctgcgtggggcagctttcttatggagtttggagaatattatatggactntcaagctgctgttcaagctcttgccactctggactgtttgcactctcttgccattctttca

SEQ ID NO: 48252 - DNA, 458 bp, Gossypium hirsutum
  unsure (1)..(458): unsure at all n locations
  Clone ID: LIB3827-002-Q1-K6-H2
tgctcagcngaaagagacctggatgatattcatgatgaggtagctgngattatcaaggaggatttntggcctaatcctcttacttatttcaacantgaggctgntgaagaggactctgnnggtgatgaagagggaaaagatgaagatgatcaagatgatgaagatgaagacgaagacgatgactaaaatcacatctggccttatattagttagttgcttgccttgctttaagtaagaacttgtgcaaagttgtgtcgttgtagttactaaggttatggggagcataatcatcttttagatngctttctctgcttcacaaacaactctcattagtgtgtcaccatacctcttaactcatttcctttttgtccatctctcgtttacctttatcttttttgtgtttgtttttttttcttgtttcctcccccgtggtgtccgtcttgggaatatacccccct

SEQ ID NO: 48253 - DNA, 207 bp, Gossypium hirsutum
  unsure (1)..(207): unsure at all n locations
  Clone ID: LIB3827-002-Q1-K6-H4
aaagctgccgatgctgttgccgccgccactgacatgctaagctggacttacaatgtcaagtcacaggcaacagcatgcagctataattttgtcatttgatttctgttttcttttgtgggtatttttttttataattgaattgtatagcttaagatctttgtntgcacggttgaggattttaatggctgctttcccgttgctcgnngt

SEQ ID NO: 48254 - DNA, 422 bp, Gossypium hirsutum
  Clone ID: LIB3827-002-Q1-K6-H7
aacctgcgaaaataaaaaagagttttgggtcctgggaagggcctttggccaggcaaaatgaacctttcctaatttttggttgaaccaaatcggccttttaccctcgttgaaacccttattaagggttttgagaaaaaaaaattgggggaccttccggggccgaaaaaccggaaaaaaattttcaactctttttgggaaaaaaaaaatagaaaaagggcttaacttcacttaactggcctttattaccgaagggtattcccgaagtgacccttaaaatttattcacaaccgcggcttatttttccctttgagagtttatacaccaagagagattgaaagatctgtagagaaaacaaaaagatgttgaagttcaaaacaaacaaaatggtacacatgaaaagagtcattaccctacagccatta

SEQ ID NO: 48255 - DNA, 571 bp, Gossypium hirsutum
  Clone ID: LIB3827-002-Q1-N6-A9
gaagccaacgcgcgatggaaagagcgggtgaggaggaacccccagtccaagggcggcgaggaatgaggcaccatccggatcgtgtattccacgtacatgaaaaacaccatccccaccgcgaaaacacatggtatccgatgagatctcaccacgttaacaacgtcattgagtgtccacttcatgaaagagggtttcccagaatgaacgccgccattgaaaacgtgataatcagcaacattgccatgaacgcctgttttcttattacccataactttaacgttgttgcttttgcagttacccttatcgggaggtctataaggagaggtaagaagggtcgttgtggcgatggtactgaaaacattagcggaagatacccgtttcatggttgttaacagtgctaatagaacgaaacatgagaagaagatactgcgggatggatatatataaagggaaagggaaggaaaaatacaacggcaaagtttccaaagaaatgtaggtgagaaaattatcccagaaaagggagaaaactttggttttttaacgtttttgttaaaatttaagaaaagtttga

SEQ ID NO: 48256 - DNA, 474 bp, Gossypium hirsutum
  Clone ID: LIB3827-002-Q1-N6-B3
accatacagaaaatattcacacagatgggccaaagaacaaaaggtttggttcacaaacacaactgctagatgcctaatttgagatgatgctcgtaagtacaaccttcaaacagaatgcaaaggaagggttatgcaaactaattaatatcataatcacaccgattacttgtcagccctcgacagcttcattctgaaactcaaccaagcacagctctcaagcagcggaaaccgtctctgtattagttacagctgccacctttgggggtggcggcatttggggcttcaagtggggaggtggactgtgcttcagcttcacaagtatctgtcgcatccttgagagatcagttggctttccaggtttaggtccctgtatcacaacgatggaaggtttcttttctttatccttctttccccgcttttctatagttggcacctcatgcgggataagctctgcaattgccttccagtaatttt

SEQ ID NO: 48257 - DNA, 496 bp, Gossypium hirsutum
  Clone ID: LIB3827-002-Q1-N6-B5
aaaaataaaagtttgaagattaaattctaaatatacaaagagcacaaaaactttgagcaaattgtaacctttaaatttttacattataatttagtcaagaaacaaaaaattaacctagtgcaaagtgcgggtgaaaaccatgctagtactatctaaagtacataaagttttcgtacacatgctcttttatttgtactaaaattctttaaaatgatcagacactcaattaagatattggtctagagacaaataatttaccttgagatactaaaaatatttcaaataattaaaagtattatttaaattgaaataacattatttttcattatgtaaataatttgaagaaaaaaaacttatccgaacatatcacctataaagatctatcaattataaaatccagttgattaaactataaaacaattatcatagacaatattttttcataattttaataattttgaaataatcttaataattttaaaatcatttggtgaca

SEQ ID NO: 48258 - DNA, 581 bp, Gossypium hirsutum
  Clone ID: LIB3827-002-Q1-N6-F11
tcgcgatctagacaaagatgataaatggtttgcttttgagtcttcttgtagttagttccctagcgatgactgctaccttcggaagggacgatgttatattaaaagaaggccataggttcatagttgttgaatatgaccaggatggcaaacataacaccaaagtctcaatctcatccccgtcgctgcaccagcaaacagaccaagggcaatattttggcaaggaaactatgaaagatattgcatctgcgcttcccaacgttggccatgtagttgccacatcgcgtcactcctccaacactcgggaggctgagcatttacaaggaaatggcagtttttgttcccaagcagttcattacttctccaaacatgacaccatcaaacttgctttgcacaattttcttttatggcagcatcagcttttgttgattcttgaacgttatggtcttgaagggtttgtgttagcaagacaaagggagttgttaacagaagctctctctcaagcaaatttggcttctcgacagcaagataatgaaggtggctcaaaacagtctgttgagtctactcgctattcttagggtcct

SEQ ID NO: 48259 - DNA, 531 bp, Gossypium hirsutum
  Clone ID: LIB3827-002-Q1-N6-F7
aaaaaaaaaaaacataaaaaagggttaaagggaacaaaacaaaggcggggaaatgggggggcttaaaacaaatttccgacggggatggaaagggccattttgggccaaaaaggaccaccacccttaggggcctgggtttcaaggtttgggcccacgttttctaccagggccaaaatcccttttttgggggggccttttaaaactcggggggggggggtgggccttataaggggcttaaacccataattgggggaaaacagccccgtaaacccgaagggtcccgaagaaaagaaaacagcccccgccatggaaatggggatggggggggggaaaaaaacgggggtgaaaaaaaagaaaaggggaatggggattctaaacccgatgggggggccagggggggtaaacccttccaaaggaaggaatgggccccccccggggggggggggggggaccgcgtcaatttgggggggtgaagggcccttttaaacggaggggggggggggggagaaaaaaaagaattttggggggggg

SEQ ID NO: 48260 - DNA, 366 bp, Gossypium hirsutum
  Clone ID: LIB3827-002-Q1-N6-G4
ggaagcaagaacggtttttatttatttttgaaatatattattttataattttaaagtttgatatacttgtatcaatcaacaagcacgtttgctttgcaattattatcattattactacttaaggtgggagttacagttaaatagatagatttctagcttcacgccaacactgccgctatcttttcctcatgatgaaaggatcggtatctgccagtgtgagttttttcttcttaatgcgttaatgtatgcaggtatgtagataggtttatctgggaaattttctagtaattcacggttgctttgatagcatccaaaatcttgttcttggttggcatatagaagggttcaaaaacaagagggaatggg

SEQ ID NO: 48261 - DNA, 656 bp, Gossypium hirsutum
  Clone ID: LIB3828-002-Q1-K6-A8
attttagggattaattgtgaacattgtaaattgaggggttgaaatgtgaaataaatgaaaaatatgggctattaggggcactatggtaatttagccaagtatgggtcttgtagaattgtgtgaattgtgtatttgtgaaatagggactaaactataaaaatatggaactttaagggataaagcgtaaaaatttccaaatgtgtttgtggactaaattgagtgatttgatgaataaatgagttaatttttaatgtatatagatcaagaacgaaagaaatttagatcggggaatatcaaagattattgaatagtcgatccagtccctctattttgtcttcgacgtaagttcatatgcaaataaatgtttttaaatatttatttttcattgaattgttatgaatgttgaacgagtaaatacaagcaagtatcgacaaagtaatgttaaccgaaagtctcatacgaaccctgagaatagtataagatacgaatgtcatgacattaggactgccgagatgtgattacatgtaagaccatgtctgagacattggtattgtatggtgattacgtgtaagactatgtttgagatattggcatcgttatatgatttcgtataagaccatgtttgggatattggcatcgatatgtgataacatgta

SEQ ID NO: 48262 - DNA, 427 bp, Gossypium hirsutum
  unsure (1)..(427): unsure at all n locations
  Clone ID: LIB3828-002-Q1-K6-B10
gtaaaaccaaccctcttctcaactccaggaaattctggaggctcgcgagaaagctgagtctcatatttggacattttgngacactcgaagaagcacaagcttattggaagcaagaatttcgacatttaaatggtcgagaattgaaataatcgaaatagactttaattaagctgcatgttgcagacttacagctgagttttcttgttcttttcccctttaagttccagttgttaccttttaactattacaataaatcaataaatcagtgcaacagagagtagaggttcttttgtttgtgttaaaaaaaaaaaaaaaaaaaaaaaaaaaaaaaaaaaaaaaaaaaaaaaaaaaaaaaaaaaaaaaaaaaaaaaaaaaaaaaaaaaaaaaaaaaaagaaaaaaaaaattaaaaaaaaaagngtttttttt

SEQ ID NO: 48263 - DNA, 380 bp, Gossypium hirsutum
  unsure (1)..(380): unsure at all n locations
  Clone ID: LIB3828-002-Q1-K6-D1
acaaaaactatttggtacctaaaggaagactgggttagagtctgagctctaatgcgcctncgcaaaaagaagtataaaccgccaagtctcaaaacgggtgatgttccttcctaagaccatgctcagctcttctatatctactaaaaccatgaacaatacactccggatagataggtaaccttcttcagatcataactcggaaatactcaaagcagtatatcgcgaaaccaataagaagggaacagcattgaacatagaaacataaacagtccattgaaaatcaacaagcttttgctatagctttcgaacagctcgagatcgcgcgttggttgtgtaaagaacaatccgaaggggtcacaaacaacaaaaaataggctaat

SEQ ID NO: 48264 - DNA, 639 bp, Gossypium hirsutum
  unsure (1)..(639): unsure at all n locations
  Clone ID: LIB3828-002-Q1-K6-D11
gtcgagagagtcggaaacataaattggatcactgttcatacaaagccatgtccacagtgtcacaaacccgtggagaagatgggggttgtaatcttgtgagctgtatttgcgggcaagcattttgttggctatgtgggggagctacggggcgggatcacacttggtcaacaattgcaggtcatagctgtggtcgctacaaagaagatcaagcgaaaaagactgaacgagcgaagcgagatctttatcgatacatgcactatctcaaccgttataaagctcatacagattcttttaagctcgagagtaaactcaaggagactattttggagaagatatcaatttcagaagaaagggagtcaattcttagagatttcagttgggtaactaacggactcaataggcttttcagatcgagacgggttctttcatattcatacccgtttgcattctacatgttcggagaagaaatattcgttgacgagatgacaaataaggaaagggaaataaaacagcatttattcgaggatcaacagcagcaactcgaggcaaatgtcgagaaactctctaagattntagaagagccctttgatcaatacagtgatgataaagtaacggagatgagaatgcanatatcaatct

SEQ ID NO: 48265 - DNA, 506 bp, Gossypium hirsutum
  unsure (1)..(506): unsure at all n locations
  Clone ID: LIB3828-002-Q1-K6-D2
agtaaaaccacatgcacatatcactgagtcgtttaaagggggatgatggtttgcagtctctttgctaccactcatcattaaatctccaaaggtgttccatggcctcctctttttctatctatcttgttggaaggttgtaaatgtttattgttttgggttaatattgtgagttatattcatgngaaaaaacaaatgtattgatgatataagaggttctttgtggatgagttgcttaggaatgtcataccatagcagtaataaagagagttacaatgttgttctattcctcccaaaaaaaaaaaaaaaaaaaaaaaaaaaaaaaaaaaaaaaaaaaaaaaaaaaaaaaaaaaaaaaaaaaaaaaaaaaaaaaaaaaaaaaaancccaaaaaaaaaaaaaaaaaaaaaaaaaaaaaaaaaaaaaaaaaaaagggggggggcctttttagggaacaaatttttttcccccggccttgccaactaatattttttttttagggcccccaaaa

SEQ ID NO: 48266 - DNA, 604 bp, Gossypium hirsutum
  unsure (1)..(604): unsure at all n locations
  Clone ID: LIB3828-002-Q1-K6-D9
gcatgatggcctcttcagcaaacggctggacaagggtcattgtntgaaaagccatttggccgtgactcagagtcctcggctgagctanacaagatgtctgaaaaagcatctaactgaggatcagatattcaggattgaccattacttgggtaaggagcttgttgagaacctctcagtgcttcgcttctcgaatcttattttcgaacctttatggtcaaggaattatatccgcaatgtgcaattcatattttctgaagactttggtactgaaggacgaggaggttattttgataattacgggatcatacgggacataatgcaaaatcatctcctgcaaatactggcactatttgcaatggagacccctgtcagcttagatgctgaggacattaggaatgaaaaggtaaaggttctgagatcaatgaaaccattggaactagaagatgtcatcattggtcagtataagggccacaacaagggtggtagagcatatccaggttacaccgatgactcaactgtaccgaagaacagtataacgcctacatttgcagcagcagctttgtttatcaataatgctagatgggatggtgtcccttttctcatg

SEQ ID NO: 48267 - DNA, 544 bp, Gossypium hirsutum
  Clone ID: LIB3828-002-Q1-K6-E1
gattaataaattttcaataaaaaaaaataattatagtttggtacatgcgttcaaagtaaacattgcatctggtaacccccataacagattttattttactattgttccttgaaatacaagaagcaaagtttattcaccaaaaacaactcttccaaggtaatatagaatatgaccatgatgacattcactactgtcccacaaacttaagaaattactataacccttgattaaaaaggccaggaatatgactattcattatataatcttcccaatcaatactcttggaatcaaagttaaattcagctacatcaatgcctttctcttcagccaccctttgcaatctctctaaatttcggtcatcaaaaatccctgtgaagaatgcgtaaggcttgtaaaattctgctaatcgaagtataaacttgactctacgattaagatttgtatagattttctcgaaacgttgacaacaaagtttgttgatcaaataaaataccttcagtgggagcacatatttgattttcatgtataggaaaaactattaatt

SEQ ID NO: 48268 - DNA, 319 bp, Gossypium hirsutum
  unsure (1)..(319): unsure at all n locations
  Clone ID: LIB3828-002-Q1-K6-E11
gatatgacctggtttnnctttntggagactggagggagcttaggaaatcagtgtctctgtcccttccggtggaccgggctcagtcctgccctggtggttggtggctgggctttcccgatttggcggcttgcctttcctcctaacacctggggggggggggttgctttcttggcatcttgttggtcccgtgatcccgctcaacggccgtcttttggttctttcgtcataacactgaatgaggtcgctagttctgcgttgtcgctatgcgctccggtcctctgtctctgtgggtgtggttcgcttcccctgattgccgctg

SEQ ID NO: 48269 - DNA, 656 bp, Gossypium hirsutum
  Clone ID: LIB3828-002-Q1-K6-G5
gctatggccgccttgttggtagactatttgaaccaatctctgaacttgatgttggactcttttctctccttggtgcagcttcatttcttggtggcactatgagaatgacagtttccctatgtgttatactgcttgagctcactaatgatttattgatgcttccccttgtaatgttggttctccttatctcaaaaaccatgggtgatatgttcaacaagggtgtgtacgaccaaatagtaaaactaaaaggattgccgtacatggaggctcatccagaaccttacatgaaacatttaatagctcgggatgttgttactggtcctttgatcaccttttctggtgttgaaaaggtgggaaacattctacatgcattgaaaaatactggacataatgggttccctgtgattgatgaaccaccattttcagatgcacctgaattgtgcggccttgttctaagatctaagttgcttgttttgcttaagggaaaggctttttcaaaggacatggtacttgcgggcaacaaggttttaagtaaaatttctgaactagactttgccaaggctgggtcaggaaagggactcaaactagaggacctagacattcaagaggaggagtgggacatgtatgttgatctccatcctattgccaatacatca

SEQ ID NO: 48270 - DNA, 580 bp, Gossypium hirsutum
  unsure (1)..(580): unsure at all n locations
  Clone ID: LIB3828-002-Q1-K6-G6
ctcggnactgccatggctgcatgtgcccaattgctgctggtcaggtataaggaacagagtgatgggcttgtggcacgctgtgatgcagaagtcccaggatctattgtggtgcgcccaaaacggaaattagatcatgcctggatggtttattcatccttgagggatgacccttctgaagcaggtgcagcccaagtgtgtgaaactcttttgacattgcttgtggaagttgggcangaaaaaaagacatgaactctccatgaaagatgaatgaaatcaagcagctcaccttgttgcgacacttggttgtaataggttaactggttggtacaggttttttaaaactgtctggccatactacttcagtattgaagtctaatatttgatattgtatatagctgaaagttaggcagattcaaatgcatgacaatgatcaaagaataggatgcatgtaacgtaagaccaaagaaaatagaaaaagagcagcaacaagttaagacattctgatttcattgtaatggctcaataattatttgtaagatttatatttcgtattattatatatcttactttttttcttatc

SEQ ID NO: 48271 - DNA, 491 bp, Gossypium hirsutum
  Clone ID: LIB3828-002-Q1-N6-A8
acatctcataccatattgcaattcatactataaaccaaataccattccatcatcattattttcaagtcaaactcatatggctagatccacaactcaaaatataccataatgacattagcttatacatgtcatatacgatatttacaaaaattcaaaagtaccaattaattgatcgatagtgtgatgacgtttctcaacaatccctcagtccgagctagcttcgattatctataaaacagggaaagaacatacaaagtaaactttaaaagcttagtaagccatatacaaataaaaccatttcattaatcaacatcatttccatcaattaaacaaattatgaataagcaaatataagcttacaaactttcccaaatgtatacatattcaatttcataagtaaatttatcaaatacttcccttttcaatactcggatgaatatcatacgtacctgagtcgcttaactcatttacacattctttctaaacttgac

SEQ ID NO: 48272 - DNA, 467 bp, Gossypium hirsutum
  Clone ID: LIB3828-002-Q1-N6-C2
aaaaattcgaggaatgttattcctcaatactactaactgaattatggaaaaccaatagtagccaatgattcacaagtatatgtcatcatcctatacaaaccatacaacttttgtacacacaatactgaaaaggaaatgaactgaagtgaagtgctaacaagggcttcccccctgaaacatttgctgcagggcttgttgtaaattcaacacaatctccgcatatgcttctggtaagctcatggttctcaaggcatcctctgcataagacaaacgagctggaataggttgggaacccattgctccagctgagctcgtatggctcttcttatattgatgcattggccatgctagaacttttactcgtgttggaagtacagaaacaaggtctggatatctaaggcttactgtcaccttgcaatcagaatcttccagtacaaattcaatcatgtggtacggaagactatgat

SEQ ID NO: 48273 - DNA, 472 bp, Gossypium hirsutum
  Clone ID: LIB3828-002-Q1-N6-D11
cccaggaaaatctatgtatagaaaaaagtttcagaaaatatgaacaggcaaatcccattaagcaaaatattagtctccagttagatctgtacattatctaaaaataaaacaggaaagggaaaaaaaatcaattcctatgaagaacatcagctggcatacttatatcgaagaatacaccgccataagtctcctttttaggtcgtctctgggacgggcaaccactgtcttccgaactcccaaaaccaaaaggtcgatcccgtttgccgctagtgccagaatcagatgcaacacatttctcggtagtactcggtttactgttccaacaaacggcaagctcggatgctttctcgatgcccttagatttgtacggagctatgttatgtgtattacattggagagatcccaatagatcgttctcgatgcattcatacattttcttgcaaagcgtatcagtgatcacggtgagattgat

SEQ ID NO: 48274 - DNA, 411 bp, Gossypium hirsutum
  Clone ID: LIB3828-002-Q1-N6-F3
ggtttgggttttttttttttttttttttttttttttgttttttttttttttttttttttttaaaaatcttttcatgactaggtttatttttttttccttgattgggaaacaaaaatggggaagaagaaaagggggaataaaaaacaaacaagggggggagagagaagggggccataggatttactccacagggttatatttctaaaatattttttatttcccttttttttttttggtttaagcgttttgggtagggtaaaaagggaaacaggtattttccccggcagggttccataaaaaatgagcataattcggggggtaataagagttgctcggatctgcttaaaagggttccaagaagggttcctaaggtgcccaaaaataggtccttggtttcaaaaaaaaggttgg

SEQ ID NO: 48275 - DNA, 357 bp, Gossypium hirsutum
  Clone ID: LIB3828-002-Q1-N6-F5
gtgggaaaacaacctccggatattggtactggcatttaatttttgaatgcacctatttctaattaaaaataaaacaatataactattgctctaagggccaaacaggaaaaactgggggggttacaaaatacactcatttttttttacaggtatatgagtatgaaaataaaataaaattctatactatagttaaaattaaagggggacattatttccaaataatatttgcctaaggccatcttcagtcttcaagactgagctgtctatcaactctttgtatggtgtaggtacctctgctttctggcttgatcatgcaatggtaggccattgctgatgatgctgatattcattctaact

SEQ ID NO: 48276 - DNA, 447 bp, Gossypium hirsutum
  Clone ID: LIB3828-002-Q1-N6-G5
aattaatatgaagattttttactttttatgaaaaagaaaaaggcaacaatgaaaacaaaatcatcatcaccatgttcattgtaaaatgtaaagcctcctactacgccaacaacaaattccatggcaattatgttcaagggctgccaacaacaactttgcatgcactctaacatgaggaaaagaaaaccaaatgtttatatttgagggaaggctgaatgcttatgatgttttgcttcaaaaatgtttgccttgagatgatataagccctcttcctaaatactatgcttccaacaatgtttggatttcatttccagcaaggacgccaaacatccatcttcaacttaccataaaacattaatccaccaatacaaactcattagaatcatcactgttggaacctgatgtgagggtacagtcccagaatatgctctggctggaagtcatgcc

SEQ ID NO: 48277 - DNA, 493 bp, Gossypium hirsutum
  Clone ID: LIB3828-002-Q1-N6-H11
gagataatcatcatttttaattaaattgaaatttataatgagaatataagattggagtttgtaatttgattcgatgtttaaaatcatattctcaaccatctctgggcgttccgctcccaccacctttgcaccaagggggggatccaaaggatcaacttaataaaatccacgccagatgcattcacaaccatgtcaaaaccattagcacaacaaaggagctataatccatatctcaatatccaaacaaaatagagctgagtactatccttaagactacgaaaatcgataccccaaatcctttgttgccattcaacaatgcactcaactgattggctgctattgagtctattcctgttccatgggtgcaggttcttcattcttgtcttcatccatattatctggttcaacattagactcattttgaatatcagaaacctttttttcatctccgcctttagcggcattggtatcatcaccaggaattttcaaatct

SEQ ID NO: 48278 - DNA, 502 bp, Gossypium hirsutum
  Clone ID: LIB3828-002-Q1-N6-H7
caaaagtagtaatattaacgcaaaaaattgtaaattaaaatgaaataatgtttaaatagtcgtctacaagaaaaaggaatttagcctaaaaaaaaaaactaggaaaaaactagaatctcgagatgcagagaggaaggaagaatgagatatgagaggcatgtgttagtagattgtccctccccaattggactaaagcttattccctttcagccaacgcaaaacatgcataaatttgaagaagaaagtagtttggggatttgtcacagaaatatgctactgacggaacaatcatcatgaacgcgccaaatggtttcacccaacaggtttgccactgaaagaaccgtcaactgcgggaagtaattcttctctgccactggtagtgtatttgttatgattacttcttgaaacacaccacctgataacctctctattgcaggagggctgaaaactgcatgagtacagaatgcataaacttcccttgccccctcttggtgtaaaagtg

SEQ ID NO: 48279 - DNA, 617 bp, Gossypium hirsutum
  Clone ID: LIB3829-002-Q1-K6-B2
gttctagacgctcgcgactagatggaggaagtgttgatagaacctgatggctttatcccaagtttgttgctggaaggtgatagttaagatgaatattggtaaattgttgtggttcactctttagatattccgagtggtaattgtttgtggagttagaggagggaattgatggaagagatgtctccggcagtcgcagtaacacttagtttgggtaactctatgggtgacaactctggaatcacagcccatgtggaaatcacgccgatcaagctcgtaaccgatgcagcgagtttgtctaagatgttacccaagaatggaaatgggtctatcgctcctagtgaatcgatggttcaggaaagcgaggaagatgtaattttgtcagtggacactaacggaattataaatgaggggttgctggttttgaatgcaggttctgatattagcttgcaaaatgcggaaattgaaagtggtcgaattcttgctaaggctattattttggggagagtcgagcatcgagcaggtgcctacggctgaagtactgctcacaacagtgagttcccgatttaaagatttctggtgggtttgagttaaaggcttcagaagtggtaattcaactg

SEQ ID NO: 48280 - DNA, 538 bp, Gossypium hirsutum
  unsure (1)..(538): unsure at all n locations
  Clone ID: LIB3829-002-Q1-K6-C7
gtgtnntattgaagcattctgaagccaaattcctttttgtagattacgaattcctccatattgcagagggagcattgaaaatctatccaacacgagtgctaagctgccccaactagtcttgatcccggatcatgatcggcaagttccttccaggagcaacaccaactccacatctgcaaacttggactatgacagtctattagcaatggggaaactagattttgatattagaagaccagaagatgagtgggaacccatctcgcttaattatacttctggtacgacatcaagcccaaaaggtgttatttatagccaccgaggtgcctatctcaattctctagccacaattcttctcaatgagatgccctcaatgcctgtatatttatggactgttcctatgtttcattgcaatggatggtgtcttacatggggagttgctgctcaaggtggtacaaatgtatgtttaagaaatgtctctgcgggaggaatattttctaatattgctaaatacaggggactcacatgggtggtgcaccta

SEQ ID NO: 48281 - DNA, 631 bp, Gossypium hirsutum
  Clone ID: LIB3829-002-Q1-K6-D10
cgttaccaaggtccctctttgcttactgatctttctccttcttgtttcatctttcagtgagacggtttggttggtttaaaatctgggattttgttttcactcaaaatgggcaacttttattgcctgtatttggtgctgttgctgttttgttttgggttttttgtgaacactctgagtcaggcggattcgagttcagatgcaattacggctgtttacattgtgtctctcaagcaagctcctgccgctcattactttgaggaacagctaagaaggcataatcgtcatggtcatggcttccaccataattcttcttcttcagggagattaaacaggcttcacaaaccaaggaataattcaagatatcatccaagttctggttcgtatatttctcgagttcatcattctttattaaggagagccttgaggggggagaaatatctgaagttgtatagttaccactacttgattaatggctttgctgtgcttgtcacccctgaacaggcgaacaagctttcaaagagaagagaagttgcaaatgttgtgttggatttctctgttagaactgcaaccactcatactccacagttcttgggtctgccaaagggtgcatggtccccagcaggggatatga

SEQ ID NO: 48282 - DNA, 630 bp, Gossypium hirsutum
  unsure (1)..(630): unsure at all n locations
  Clone ID: LIB3829-002-Q1-K6-D8
cccacgcgtccgttaactttngattatcagattcagagaagtggtagccaaaaaataaatcaaaaactaacaacagtcaactagttttgcctaacaaggttactgttctctgctgtggtgttgaaggcatatattacccaagcctccactcctttttgggatgttttttgtaaaaggcaaacttatctgctactggtgatgaaacctagagggacaaggaagctgctgttttggctcttggtgtaattgctagaggttgcatcaatggtctttatcctcgtttgtctgaggtagtactcgtttagtttttgagacagattatggaatgatgcatataaaacattcatctgtttttgttaaaccatgttatgctcctaaattgatcattgttgttaaatatgtttatgtgtgcagattgtggcatctctaattccccttttaaatgctgtgtggttgtcaatacttttttctaatttagtaatgaatgattaataacccctttgaccgactatagtttatgtgtttgcatcatataccaatcatttgttgttcttggtacatactgccgataaacttcttttatcggtttctttggctttggattttatgttgagaattctcatgtttcat

SEQ ID NO: 48283 - DNA, 514 bp, Gossypium hirsutum
  Clone ID: LIB3829-002-Q1-K6-E11
gccccactggcccatataatgatcgctggggctgttgacattgcggacccctatagattccatccatgctgcctaatacacctgcttgctatgctatatgctacactatctgatagcagcctctactggtggacttgctgacacactcaatgaaagattcacagggatgacaaatgggagctcaaaatggagaatgtaatgaagagtgtccaaaagatgatactaatgaggtaaaaactgtcaagaaaactgttgcaacatatgggactcaatctctgaaagaaatgatccaaaatagtatgcaacatgatttttcatagaatggaccatcaaaggtaccataaaagatgttgtagaacctcttggtgactctcagtgaacctggcattgaacgagacgaggaaggtcctgttgccaatgaaaatgccgacacaccctgagcctcatcataaggctactatggatgaagctaaggaacctgcttacttacacaaccaattacacgtacctgtct

SEQ ID NO: 48284 - DNA, 404 bp, Gossypium hirsutum
  Clone ID: LIB3829-002-Q1-K6-F11
ggtacacgtggcccaaactgaccacatggataactgtcttgagacgggcacatcgtcatcgtacacggtgcttggggacacttcattgcaggatggtgctatacagtgagaatcaaacaataccaagcgaaggactggacacctcactataagaagctacaaccaggaataccaccgcaagagcgacagggtatcttgtaccctagagatgtagcgtggctataccaacatgaaacctagtacgaggacgaacacaaggattcgctcacttggatatcaagctgaggggaaaaggaacaaacgcctagataccgagcgctcaaatctgactgaacacctctaggccagagatcaggctaaaaccaacggacactcaaaaaaaaaaagaagaagggcgagcagtg

SEQ ID NO: 48285 - DNA, 606 bp, Gossypium hirsutum
  unsure (1)..(606): unsure at all n locations
  Clone ID: LIB3829-002-Q1-K6-F7
gnaaaaacccgagtgaatttatgcaaccattttgcgatgcggtgacggaagctgctaaaggtatcgacccaaagtcttgaaagaaggagaaacgcttcatgtgggatttgaaggcccttttgtttctcgtcgcgttactcccagagatcttctctctgaattcattggctccatggtatgcgtcgtgggtattgtcaccaaatgttctctggtaagaccaaaggttgttaaaagtgttcatttttgccctgccactgagaacttcaccgttcgggaatatcgagacatcacctccaataatggtttgccaactggatctgtgtatcctactagggatgaaaatggcaacttattggtgactgaatatgggttgtgccaatacaaagatcaccagaccttgtcaattcaagaagttccggagaatgctgcacctggtcagcttcctcgaactgtggatgtcatagttgaggatgacctggttgattcatgcaagcctggagatcgtgtggctaccgtagggctatataaagctcttccaggaaaaagcagggcagtgtgaatggtgtattcaggactgtactcatagctaataatgtctctctgctc

SEQ ID NO: 48286 - DNA, 251 bp, Gossypium hirsutum
  Clone ID: LIB3829-002-Q1-N6-A1
ccaaaaaaatgtttgataagataaaaatttccctttaaatcccgcaaaccggtgtacctttcctttccttggtggttccccttaaaatgcccttttccttgacaaaaaccccttcttccttggccagccaatccttatccttccatgcaaatcatgcccctaaggccctccccagcaagcatgtcctcaaatcccttgttaatctcaaaaaagggacctgagtgggtgatgaccttgccaagtccaagtcc

SEQ ID NO: 48287 - DNA, 570 bp, Gossypium hirsutum
  unsure (1)..(570): unsure at all n locations
  Clone ID: LIB3829-002-Q1-N6-B2
gcatccaaaacttaatacacattgatattatcattcattacactttggttcttttaaggtattcaatccaacaagctgtccttaaaaataactctacaacttttatcagttcaatcaatggataactggcttcaaaggaggtgctctcaggttcgacaagtcgagtgcagaatccagctcttcatccagttcaccaacgacacttatgttgtcacctcttattatgtacaagcccaacacaagttgctgaacaccttccttggtggagtatacgcgttcatgagattcatcgagaatgatatttgtagcctgatcaaagccttttaaaactcccactatgttacgtccatcattggtaatgaccgagatagtctgatctacaagagactcgagcccagggccaggtgacattttgatgcttttgaaagcaatgaattacaatatctgggaatggagcggcttcagaggtgagttanggaccgaattttttggtgggtcgggtttccaaaatttgtcgcttgcttaggtagtgagactagatcgcgaacgggcgccttttttttttttttt

SEQ ID NO: 48288 - DNA, 484 bp, Gossypium hirsutum
  Clone ID: LIB3829-002-Q1-N6-B4
ggtttggggtttttttttttaccagaatagactgaaaattctataattccagttacgttcttgcatatgaaatcctaaggaactctattaagggaataaagacaaaaaagaagaaaacgaaatagaagatatgaatcgatcaacgtgaacgggggggcagacataaggatcagcagaatacagttcaaaagtatattaaaatttggaagctttttatcgtacctgtgaaggcgaacaaagcaaccctgaagcatctgccccgaccactgcaagatcacacaccgtacacaattgtccaccctgggtaggtacaaagcgagcggtgcaatatgggcatgatacatccttctgtcctctgtaaattggcacataagttgccccacatgtcacgaatgggtttctgaaatcatagtttagttgagaggcatcggtcatattcctctcagcagcttgtagcacttggctcgcgggcttagcttgattc

SEQ ID NO: 48289 - DNA, 481 bp, Gossypium hirsutum
  Clone ID: LIB3829-002-Q1-N6-C7
aaccaaacagatttaattgctattgtttagattaagtctaaaatttctaaattcgaaaactacatgagctaaattggtcaactaaaattgaccaattcgaaaaatataagactaaattcataactgggggaaattacagggactaataaaagaatttaaaataaaatttatggttggctgctctctaattcaaagcagataaaattcgtgtaaattccatcctgttaaaataaaagcgtgaacaattgatgcctccacctttggatttataataccaacctcaacctgccacaaagacctcaccttccattaaaggtgatctacaatttgctcttactctttgacatgcttcctaatgccttggccttctctcgtagaacatatttctgcgtctttccagtcgaagtcttaggcaaatcctggaaaaccactgttcgaggagtcatgtagtggggcaagttatctcgacaatatttgataa

SEQ ID NO: 48290 - DNA, 594 bp, Gossypium hirsutum
  Clone ID: LIB3829-002-Q1-N6-D10
aaatgaaccgttacaatttattgatctttgtatttatagattacaaagtaattttatgcatttacaggataaattgaatgaaaaaattggttaaatccatagaagctgaaggaggcgaaggaaaaccaacacaaaagaacaccccatcccacaccaaaatcacaattttcttattcgtcagccgttaagaaaattttaaaatcactgataacggaatgttgagtttatggccttggtctccaaaaagtccaatcctcccaaagctggcgacagagttgttcattgttgcattaaacattatggtcaagatctgcttctctcccgtgccaataaagaatcgagttggagtgaccttcactgacaccccatacggagcactccagcccactttgtacgtttcattgccagcagtgttggtcactgttctttcaaccgttttagattgctgcagtctagaaatggtgattgatggcaggttgaggtcagcactaccaatcgtcgaattatagacccaacagttttgaccagtgtaattcaagaccactggaccagaaccattgatgccacaaagaaaagacatataatcttcataag

SEQ ID NO: 48291 - DNA, 445 bp, Gossypium hirsutum
  Clone ID: LIB3829-002-Q1-N6-D7
gattgaaactttttcccataaagtaacatagagatcaatacatatgcaagaaaattcaggcttataacccgtatttacagtaattcacacctgggagtgacctccatgatcctctaatgtaaaaattcctcctgcaaatgggggaaacctcaatgaacactctcaacatatgcataaattcaaagcaattaacaagagtctcacaatagtaaagactcactatcattaatcccagctaaggccaacaatctagcagccatttctctttcctcagcgtcctgaagcgctctagcaaaagcctcatcactcgaaaaagcagctgggtcgagttcagcactagggttgttatcctcatcaccatcctcagcatgtgcatgcacattaaacgcatcctcatcatcatcgggatcagtcccatcatattcctcttcatcttcatcctcct

SEQ ID NO: 48292 - DNA, 417 bp, Gossypium hirsutum
  Clone ID: LIB3829-002-Q1-N6-F4
attaaacccaaatttttggggggaaaaaaaatccacccctccccaaaatccatttaccccaaagaagagaaaaaaaaaataatgcccttcaattggggcattacattcattaaaaaaacttttggaaaaaaaaaaaaaccacccaaccccccaatggagcaaaaaaaatgattggcagtcccaaaaaaaaattctaaaagcatggggaaaaaaaaaacaatgcccaagggtgcaaaagggtaaaaccccccaaagcaatcatcaaaaaccccccatatggtcccccccaaaaggtttgccacaaaaaggacagccaactgaaaaaaaaagttttgctctaaaaccggaaagggggttggaaaaaaaacccctggaaaaaaaccacttgaaaaacttttttttgcgggaggaccaaaa

SEQ ID NO: 48293 - DNA, 428 bp, Gossypium hirsutum
  Clone ID: LIB3829-002-Q1-N6-G8
ggatcaagattgggcattgttttagcagctcctttaccttcctcccttttccgtccccggaaggggaatcaaattggaggacctgatccaatctgcctatgactttacccgggtgtgggaaaagaggagtagcctccaataatgaatcgatctcctcgcgaacaggtgcagaaggcattgcaatcccccttggacaaatcatccgaaacaaaaaaaaaatcaatcaacaatgcaaaacacaccctagctagaattgaacttacaacaaaatctagttgatttggccaaacaaacccaactggttacttaacagaaagaaaagagcttgagattggcccatgaccaaaagaaaacaaacgttgaaaccggtagagaaaattgaatctaagaaaggccattttaggaggagaaaaaaacggtcattcaaa

SEQ ID NO: 48294 - DNA, 483 bp, Gossypium hirsutum
  Clone ID: LIB3829-002-Q1-N6-H12
ggtgtttttttttttttttttttttttttttttttttttttttttttttttttttttttttttttttttttttttttatataaacaaaagcccaattaaaaattaaaacccacgaacgacctaattacaaaattaaaaatccaaagggggggggtaaattaaacaaaggcaaatgcaagactcagcggtcggggggccacctttaagtccctcgcagtacaaaatcgtttaaaggtggggattaccaaaaacagaagcgatcacctttttagttcaaaagcaaaggaccaatcacccttggccaaaaaatcctaattttggtaaaattttggggggttggacccttttttgaaccgttaattttgtaaaattttaggaatagttaaacgggtaaaagggtttggatcaaaaataccctaatcaaattccttgccccagatgaaaaccttgggggatagcggaaagaagccccccaaatttttt

SEQ ID NO: 48295 - DNA, 415 bp, Gossypium hirsutum
  Clone ID: LIB3829-002-Q1-N6-H9
attggggaaaattttccccattaatatatttttattataattgataatatacatacatattttaaagaaaagttaacagttactagctgcaaaaataacaagaagttaataattatggtgcaaatccaggtgaaatatgatatgattgtagaaaccccagatgaaaaatagcagggttttgttagggagcaggaaagttgtggttgctgcattgatggatgggcttctttcccaaatttataacttaagggcacatattttaagaaggacagctggattgtttccaaaatctggcagggagtccttgttgagggactgggaatgggccatattggatcccactttcagaacccaccacctcccacctgaattttgttactagatgatggatcaaaatgagagcctccagcttggc

SEQ ID NO: 48296 - DNA, 550 bp, Gossypium hirsutum
  unsure (1)..(550): unsure at all n locations
  Clone ID: LIB3831-002-Q1-K6-A10
gnaaaaagtaatagtacataagtaaggaaaccaanaagggcatctgaaaccacatgtgatatataatgtacctatagacaaggctgcataatggaagatattttgtatggaagatttatcaatggtggcccaaagaacatgtgaagaagaagacaaatcatactggaactaaaagtggttgatgtttatcatactttcatttttagtgctggacaaacattaattcatgccattcatcccccttctctcctgtcaataataaacaatccattaccaatcaacaaccttattctcatcttttttttttttggggggggggggggggttactttaacaggtgggaattgtaaaaaggtgatcagattatgagagtcgacatgagatccacttaattatcaaatttcttgggaaagaagggattatttatatctattcccaaaatccaaaaccaaaacaatccattctacatatgctgaagcttcttcaagcaacattaaacttcaatggtgaatattcttatgccttgctataaggtatatatgatgatggc

SEQ ID NO: 48297 - DNA, 691 bp, Gossypium hirsutum
  unsure (1)..(691): unsure at all n locations
  Clone ID: LIB3831-002-Q1-K6-A4
cccacgcgtccgctttttttcccctgaaaatctcagatttagctttaaaaaaaaagaacagaaatttatttcaaaaaaagaaaagaaaagaaaaaagaaaaagaaattagattcaaattcaatctttaataaacattcaaagtcttttatgaaaatttaattatctatttgtatttttttaattaatagcaataaaaaagagataaggatgcagcaaaacggtggttcggattcactaacggaacagaatcaacggcctcaacaacaaccgccgccgcaaccgcatccacagtgggtggctatgcagtatcctccgactgctgcggcggctatggtaatgcagcatcaaatgatgcaaccgcaacactttgttgcgccgccacctcctccgcctcaacactacgtcccttatcatcatcagtatcatcaccacggtcacgcgctgtcgcagcagcagcagcaaggatctggtggtggcggcgagaataagaccgtttgggttggtgatttgcatcattggatggatgagaactatcttcatagctgtttcgcttctactggcgagattgtgtccattaaggtcattcgcaataagcaaactggtttatcagaaggatatggatttgtggaattnttttcacatgcanacggcagaaaaagtcttcaaaatatagtggcatgttgatgccta

SEQ ID NO: 48298 - DNA, 630 bp, Gossypium hirsutum
  Clone ID: LIB3831-002-Q1-K6-A8
gctgaacaagatgaagaggtctatgttatgaacctcctcgctttccaagcttagatattccatttttcagctgtgatcttatatcaagtggcagcgataagcagcaagaatatagtccctttggtattcgccaactaatgatgtcatctatgaactgcatctctccatttagattgtctgattctccattatgggatgatagtcctgatgctaagctgaaaagtgctgccaaaactttcactggtacaccatccatattgaagaaacgccaccgtgacctattgtctcctttatcagaaagaagatgtggcaaaaagctggaaacagatatgacatccaatttgagcaaagaattctcttgcttggatgttatgttggatgcgagtgggactggaaacacatctcaggagtctccatctgaatgtaagaccaagtctggtgtcttcattgaagaaaaagaaaacctgtgtcaagcagttgatcaggaacaatacaatggggtagatcacactgaacctttagatgatgaaggtcagaagaaagattctaatggaattaattcccaaggagacatagaaaaggaagcctgcgttactgatgccaaggacaaaacatatgctaacgcttctg

SEQ ID NO: 48299 - DNA, 639 bp, Gossypium hirsutum
  Clone ID: LIB3831-002-Q1-K6-B7
aagatgccaaagtgcttatcattcatatagacagggcatccacccacctcctacatttggttcgtcttctaatcttgaagctgttgctcttcaagcaagaatatatcatgttgaagatggaggaagtgctgtcaattcaacctcaggtcctttccggcccatgcacgagatcaccttttcaacaggtgaccgtccaaaactccttagtcagcttacttctttacttgcggagattggattgaacattcaagaagctcatgctttttccactacagatgggtactctttggatgtttttgttgttgatggttggccttctgaggaaattgaggagctcaaaaatgcattggagaaggaaatttcgaagtcgaagctgcaggaacaatcttattctagaaagagttcagttatgactgagcatgtcaaagaaagggttgtctccttacctagttgtgttgaaatccctactgatggaactgatgtatgggaaattgatgccaggcagctcaaaatagaaaacaggattgcatctgggtcatatgctgatctgtatagaggcacgtattgtagtcaagaagtggctattaaagtcctcaagcctgagcagatcacaagagaaatgctgagagagtttagtca

SEQ ID NO: 48300 - DNA, 637 bp, Gossypium hirsutum
  unsure (1)..(637): unsure at all n locations
  Clone ID: LIB3831-002-Q1-K6-D4
ctgttgcccgttggaaagaatccctcactggaacactttctcttactgctgacgacattgcaatgatcaccgatggccagtttgcgattgacttattttcccatattaaagttcttcaaatcactgaatacatcaaagattcagtagttgttccgttccatttcttccgaagattttccaatttacaaaagcttaaaatggttggttgcaattttaaagagttttctccctatgaaggtgatgttggtgaggagagagacgtggtaacgatgctcccaagaattaagaagttaacattgcaaggtgttgataatatggaacatctatggaagcaagactctcccttccatcacatttgtgcaaatcttgaaactcttaaagtttccgagtgtgacagcgtaattagtttatcatgtgcttcttcatctttccaaaatcttacaactttggatgtttggaactgcaaagagatggtagagctaattacatcttcgaaagcccaatgtttggagcagcttgttacactgaagataggaggatgtgaaatgatgagagaagaattgcaagtgatggagatgaagcacacatcatgagattattttcaaggagttgaaatatttggagctntatgatctac

SEQ ID NO: 48301 - DNA, 511 bp, Gossypium hirsutum
  Clone ID: LIB3831-002-Q1-K6-D7
gccacgccaacggtccacccaatggtgctgagaaccctggagggcaccctaaggggttcccaatgcctccagcttcacttgcaccttatcctgaccctaatcctgacgctatgactgctcatggacctgtgcataggcaccagcggaagctcctcctcatgtacctcaacctttaactgcaggctgtggggctgggcgtgctaatggcggtgctcctatcgcacgccatcttggcacaccagcaaagcacacaaactatcatagcaactatcgaatcttctttgaacaatcctaaggagaatccatacaggcaggcatccttgggtggtccattatctgagaccgaagttcacaacactggccaaaggccgagtgaaactttccgagagggatgaataatggaaggaatgttccatgactacttgagagatgactgctaaagtcaacgctaacatatccctgataacattacagatgcttctacacaggcttatgatagtggatacgctgc

SEQ ID NO: 48302 - DNA, 694 bp, Gossypium hirsutum
  unsure (1)..(694): unsure at all n locations
  Clone ID: LIB3831-002-Q1-K6-E5
gttttgagtaatatgatgattttactggttttcatagtttgagagttggataggcaatgtttgataacttagaattgctttgaggttcccgaaacaccgatatcttgataatttgtgtcggtttaattggtttcttgatatatgttcggtcctccgagactgagatccatgaatacggccgattccgaggcaaggcctgtattgggaccggcggggaataagacaggttctttgcgtgcaagaaaaccaggttcaaagccttcgaggaagattgaaaagtgttcagctgaggccactttagcagaggagaaaaatggccttccatcatccaaagttaattcccattctgttagtgttgttccttcagtgctacgccgccatgaacagttactacattctaacttaacgttaaacgcttcatgttcgtctgatgcttccacggattcatttcacagtcgagcatctactggtaggttaatttggtctaatagtgtaggaactaggaggaagccattcccatcaactccgacaagtgttgtttcggatggcgggttggattcactgcctggtgattcacataggaggaagagatgcgcgtgggtgacaccaaatacagatccgagttatgttgctttccatgatgaagagtggggagttcccgtacatgatgatnaaaaactgttcgagctactcg

SEQ ID NO: 48303 - DNA, 627 bp, Gossypium hirsutum
  Clone ID: LIB3831-002-Q1-K6-F3
atctttctctttcgattttagttttgatcgccatttttggttcttgttggtctcgcgaggtggttagtgacaatgatgatggtggtctgtatccgttcattgggactaacagggaaacgttagagatcattatcggcggcggcggcggtgaagctcctgctccgtcgcctgaagattgtcctcctccgccacctgaacctgaatgtccacctccagcatctccaccaccaccaccaccaccaccaccaccaccaccaccaccacaaatacgaaaaccaaaaccaaaaccaaaaccaaaaccaaaaccaaaaccaacaccaaaaccaccgccaaaaccaccgccaagaccaccgtcgaaatgtggttaccggagcagcaacctctgcttcgaaaacgaactgctcgcaacatcttatggagtaatccaaaagttcaagaagctaatcaaaccagacgaaaatggcaaaagatacacaaaaacatggaacggtcccaacgtttgcaaatacaaaggcttcaattgtgatgtgcgaccggacgtgaaaaaaaaacagtcgccgccgtcgatttcaacggcgctaagctctccggcatcaatggttcccttccactccacgatttcatcga

SEQ ID NO: 48304 - DNA, 171 bp, Gossypium hirsutum
  Clone ID: LIB3831-002-Q1-K6-G4
gctgatcattacgaaccattaattgcccatgcttcttcacttgtttcctccgagaaggttgctctcatactggggcaatgagttgagtcctacagttttgcggcggcgtagagatttaaagtagaagtagttcattattttccctatatattgtatcctattctagctgtg

SEQ ID NO: 48305 - DNA, 658 bp, Gossypium hirsutum
  Clone ID: LIB3831-002-Q1-K6-H5
ttttaacttttggcctaatttcatacctggttaggctttgcctttgtgaaccagaaaagtgccatgcatgacacttttttattttctttgacccatggtggtggcataatatgtctcttgatttcctcctattttcctatacttaacctatattttcaactacctaactacaaagttgcaattctggtggcatgtgctatctagccaccaaaaattaatgaaaacaattattattagttttcagaagaatttgttatcaagaaacaggatgttcaagggcaagcgagcccatctctgtgcaagagatctctcataatggattgttctttgtcttagaagggttgtgtcttggcaaagattacattctttaccttgtcctctctttagattttgcagacaaaggcttcttaactgaaagtaagaggcactcatctctttggttaatttggtaaattcctttcctctttgtttacttggtccagtacttttagatgctaaagtattatttactatcataatacctcatcagctctgtaaacatagaaacttatctgagaattgaaaatttcttggatattgaacttaagtgttgctggctagctgctcaaacttaactgttaagtttgaaattacattcaaggagctaaagacgtttgaa

SEQ ID NO: 48306 - DNA, 601 bp, Gossypium hirsutum
  Clone ID: LIB3831-002-Q1-K6-H8
cccacgcgtccgttattctctctctcgcttgaaaaaaaacagaaaagaaaaaaaactatttcttttggcttttcttgatgaacagtcatagactatttgtattttgattgagtaaaaatgtagagaaaaacaaggagagattgaagaacacgacaggtttgtaatttcttctcttgtaggtttgggttttggagggtgttttggttttcttggaagcttggcttgtttggtttttgtagcttccatttcttcttgtttttggatgggaactgtgttgaagaaggagaagaaatatgatggggaagtaattgagagaggacaatggtcgttgttatacagttgtaaactatcatattacacccttgtacaagaattttttgtttctctttttgcatgtcagaaagtccggcaatatccataacaaacatcctttggtcaccttaagaagaagagatctgttttttaaagagtgttgttttcatcaataatcatgaaaagagttggcagctcacattccttgggtgctatgatgtccatctgcccaatctcagatgacaaccagatttacagtagagagtttcagtcgattttagatggatta

SEQ ID NO: 48307 - DNA, 353 bp, Gossypium hirsutum
  Clone ID: LIB3831-002-Q1-N6-A11
cctgccctcgtaagctgttttaacgctctttttttggttgaaatggggaaatattttaaccctataaaatgtagttttttaaattattacagagcaaaaggaaaaaggctaattgagatccagtgagaaattgttgctataggccacttgttttcagtttgagcttgttacattgttttcttcatcatattttgctgtctcattgactcaaagcttcccttatactgaaatgtttgctgatttttttcaaagtgcagactgagaaattgtgtgggtatgaatttgccaatctggtttaagagaattcttatttttccacagtcttgtcttttttttactctaaataacttgag

SEQ ID NO: 48308 - DNA, 405 bp, Gossypium hirsutum
  Clone ID: LIB3831-002-Q1-N6-B7
gggagatagcaattgtaacacttaaaaacggtttttaaggaaacggtaacaagagtttcaagaactggataacccttttattatgcataatgctggacatcccccaaccccaaaaaaaaaaaaaccaaagaaagaatttcccaaaccctttctttttttctttcagggaaacaacacttttttttaaaaaaattcttttttttacgggggaaaaaaaagctttaaaaaactttattttgcacccatttttccccttatttggaaccttttttaaaggtaacttccccccttaaaattgttttttttgactccactaattacagttcctaatttcccattaatacctttacctttttaactttttgtttaaggatttttataatttcaaaaaaattaggttttttg

SEQ ID NO: 48309 - DNA, 321 bp, Gossypium hirsutum
  Clone ID: LIB3831-002-Q1-N6-B8
aaggaaaaaaaacgattaaaaatttattgatactaaaatgggctaaaagataaattaaagattatccttttttggtagatggaaaaaaaaacctaataggaaaaaaaaaagacatttttttaagggggaatactaaaaaagggggttgatagggggacgaattaatcaggcaaagtttttaaaggagggaccaccaaatttcaagagggccattaaaccgaatacgagttacgtaatatttttaaattaggaacttttaaatgggattcttgagctgttgtatttggaaattaaaatgggttcctttatttgatgggaagg

SEQ ID NO: 48310 - DNA, 298 bp, Gossypium hirsutum
  Clone ID: LIB3831-002-Q1-N6-C10
ggagggagaaatcaatgaattcctaatgaagaataatgcttcaaagaatccattatctatctctttaccaggacactgaatgttagtgtcaaggggcgattgcaaagaggtaaatgattgaaactcgagttcaatttcgtttctcaacataagagttataagttgcaagtacacttacttccaagactttcagacccccagttcatcaatcttcatcatcagagcttccatcatcactactataatcactgctatcatcatctggatcaagaatgtcgagctcaacatgtcgcacctg

SEQ ID NO: 48311 - DNA, 521 bp, Gossypium hirsutum
  Clone ID: LIB3831-002-Q1-N6-D4
aataaagcaggctaatatattttatatgtgaggaaaaaagtctcctgttaaaagagatcaatttgtctgaaaacacaaagaatgcttgaattacaatcccaagaatataaaaccatcaagtctccaaagtcaagattcaggagttgcacacaagaaattgccatttaagaacctcactaaaatacctcaccttttggcttttcatttcgaaatcatcatctcacttcaattattcaacgaattacatcatccagcttcgtgcagttataggctatcttcgtccgtttcttcaaacggctcacattcttctttgttcaactgctcaatggtagcattaaggtcccaacatctcctaacacccctttctgtttcaacctcttgtagctttggtgtgcttaaagctccattgcagaaaatttccattgcgggacagaagctcacgtctacttcatccaatgatgggaacttcaaagtgtaattccctgaacaaaagcttttgaggttttgtagatcataaagct

SEQ ID NO: 48312 - DNA, 422 bp, Gossypium hirsutum
  Clone ID: LIB3831-002-Q1-N6-E9
aaatcgggggggggggtaaccaaaccccgttggggaaacaaaaagcttattcctttttttttgggggggattggggggaatggttaaattcccccctttttaaaagaaaaaattttaaaaaaaaaccgggggggatccctcggccaaattttttttttcccttccccggaggggggggagttttggttttccctcccgccccttgggccccttaaaccctccacccgaaaaaatcccgggggcccaaacctaaggggcttttttttccgtgggccccggggctccgggggggggtaaaaaattgggcggggaactgggtttgggggaaaaaaaaaagggaggggggggggccccacatgttgggggaaacgggttttcttttgcgggacccttcgggggagacgggacttttttgggggggg

SEQ ID NO: 48313 - DNA, 490 bp, Gossypium hirsutum
  Clone ID: LIB3831-002-Q1-N6-F5
acaaaccacacattttaaattaaattaaaaacttcagaataaaaaacatatattgtctatgtcatgtctgaaaaattaaaacctaggtgaatgtcaggaaattactttatcctacattaagacatgaatgatggggtaagttataaaattaaactgcaggcaaagaaatgtttatatcagtggctgaatttcttggctcctgtatgttggcccaattttctgttctgaaactagcagtagtagcaaagttttgtttcagggtattggaattttgttgtgaatgttgcacaccgatgccgtcctctttttctgcattcgatgcaggtaaatcgactgtggccgggtttggtgcaagagttgctggtaaggactcatttttctgcttcttggacttttggtcgtgctggttgcctggtacaaaacttcctatgacaacctgtacaggactggcagctatgagaaggcctgctacgcctccacctacaacacg

SEQ ID NO: 48314 - DNA, 170 bp, Gossypium hirsutum
  Clone ID: LIB3831-002-Q1-N6-G4
cacagctagaataggatacaatatatagggaaaataatgaactacttttacttaaaatctctaccccgccgaaaaactgggggagaagctaattgccccagtttgaaagcaaccttttcggaggaaacaagtgaaaaagcatgggcaattaatggttcgaaatgataagc

SEQ ID NO: 48315 - DNA, 411 bp, Gossypium hirsutum
  Clone ID: LIB3831-002-Q1-N6-H4
ggttggggtttttttttttacttccatacaacttaaattttctctcttagattcagttactctaaattaggcagagaaactgatatgatgcaatcccaataacaccatatacgtaaaacctaaatacatgagcagctaagctccactcgcatggggggttacacttacatgtctacccaaacactctcataaaatacactagtcttaaattagtttatttttctatgcacatgatgattcaccaaagagattgttgctttatcttacatgttgagaaggccctgtttggagaataacaacctatagatttaattcttctttcccataaatgcgctgaagttcgcgagttgctgcttgaaatgattctttccaaatgcgaaaagatttctgattaatcggtgcaccaaaaac

SEQ ID NO: 48316 - DNA, 561 bp, Gossypium hirsutum
  Clone ID: LIB3831-002-Q1-N6-H7
gttgaatgattttccaatctaagtatctgcaggtccaacaaaacttaaataccaagtataaaacctaaaatacacattaaagaaaaagaacctttcaaatattggtaggcaacggtagtttcttacaatcccaactgactgggaacttcaagaatggtctcagccgatttcctaagcctttgcacctcctcatcagtcaaatggatattggtgacgcccaagaccccacctctaccgagctgtgctggcaagctcaagaaaacttcaccaccgtcgataccgtaaaaccccttggcaaggactgagactgggtggattttccgctgatctctaagtagacttctagccaagttagccactgagtagccaattgcccaagaagtgtaccctttgagactaatcacctcatacgcactctcaacaacagctttgtgaatgttctcaagggtctgcttttcgtaggcaatttgctggttctttaggaagcttaacaccggcacttcaccaatactaatgctagaccagagtgctaccgagctgtctccatgctcaccaactatg

SEQ ID NO: 48317 - DNA, 574 bp, Gossypium hirsutum
  Clone ID: LIB3825-002-Q1-N6-A11
ttttttttttttttttttttttttttttttttttttttttttttttttttttttttttttttttattttttttaaatttttattttgttttatattaaaaaataaaaaaaaaaaaaaaaagaaaaaaaaaaaaaaaaaaaaaaaaaaaaaaaaaaaaaaaaaaaaaaaaaattccgtcgttaaaaaaaaaaaaaaaaaaaaaaaaaaaaaaaaaaaaaccccccccaaaaaaaaaaagaaaaaaaaaaaaaaaaaaaaaaaacacaaaaaaaaaaaaaagaaccgtaaaagcgcctcacaaaaccaaaggaataaaaaaaagaccagaacttaaaaaaaagacatggacaagaaaaacaggaacacctaaaaaaaaaagagccccaaaaagacgaaaaaaatggggaaagaaatggattacaaaacgggcggaacacaaaattgtccggacgcttggaaggacccgagaatcgcggccggaacccggaagcgtaccagcttgccaagaagggagtccaaaaagaaattggccctaggcttggcaaaaggggggaaaaggggaaaaacgttgtcc

SEQ ID NO: 48318 - DNA, 357 bp, Gossypium hirsutum
  Clone ID: LIB3825-002-Q1-N6-A3
cctacaagagataaattttttaagttcaagtttttgggcgggtttaggttacaaccccaatttgtttccatgggtcatttttaaagggttacaacgggaatttttactcatttcacaacaccacaattaattttttcctttttttttccggccccctggaactcaataagtaatcaaaaaactccatgggggtttttaacactaaatttgtcacatgagcttcaacctcaaatagctttttttttttggcccttttttttttactttaaatcagcttcatttttttttaggcagccccctttttggatgttacagagttgacaattgtagcaaattccggccccttcaaggaagccc

SEQ ID NO: 48319 - DNA, 348 bp, Gossypium hirsutum
  Clone ID: LIB3825-002-Q1-N6-B1
accaaacaatctagtgtttttgattttgtaataaaatttaaaaaattttaaaaaagggggctacaaaaaaaaaaaaaaaattttttttttaaccaacactaacaaccccaaaaaaaaagcaacaacccccccccccaaaaagaaacaaccaacaatctaaaaaaaaaaggccgcccgggggaaactaaagagacaatggaggaaatcagtcgccatacccaccaccccaaccacactaggctggatttaatgcataaaagccgaaaaaaaatccccactatcttcattttcctcaagcttcactgaaaatacaaaacttaacccacgcctccggggacgcacggggaa

SEQ ID NO: 48320 - DNA, 585 bp, Gossypium hirsutum
  Clone ID: LIB3825-002-Q1-N6-B10
ggcactaaaatcatttcaggtataacagtgaaattggtaaaaaacgaaagagagagagagagagacacaggtaaataaaaaaagcgtgaaggcaatggaatttcgttctttaaacgcagtagacattttcataatcttcccggattaactttccatttttttaggggattcacctcattgacataactaatatagggttaatgcccacaaaattagcaacaaggagtggaggccgaaccaatgattaaaaagacggatagaataaagtctaggatctcacatttcccgcttattacaatgtagtccggcgtaactgacaggtgaatgctgaaacttatgtcctccagaaagcctttttgatcattcgtgaaccaaactaacccagcattactgcacccttgaacttcccccctgcatatcaggaatggccaatacggacatgcaaggcttccccccatggcgataaaacaattagcttttcaattaaatttattccatgtgcttgtgcagggcatacacaagaaacaaatgagctttagcatatgttaccgtacaacaatttgacatttccatttctattgcata

SEQ ID NO: 48321 - DNA, 605 bp, Gossypium hirsutum
  Clone ID: LIB3825-002-Q1-N6-B7
gcaaatagcaccacttttgactataaattaaattagaccaaaatacatgtattacgacatacgactattctaatattatataaatatatattgggacatggacattggtcggtggtctttccatcccaaggctcatgcatttcccatatttgggaaaaatgcatgttttttttacttcaacacatcttttatatgcaccttcccccataatgccctcacaaacaaacttcaacccttgagatgcccacttataaacttcatgacttggctgcctccaccatatgaatgtctgctaaacaaagttagtcccagtacttaatcaagccatcccagccacaagtagcaactttactttgctccaaaggatgccactcacacccaatgcaaactccctcgtggcacttgagagtcctaaaaactttgcagctcttccagtcccagaaccagcacttaccctctccatctccagacataacaaagcgtccatctggtgaaaagttgacttggcaagcatagccggccacaatgtgcccagcaaacctttttttcttattaagctgaaatctttctctggtactgtaaataagaatttggttatccaaact

SEQ ID NO: 48322 - DNA, 243 bp, Gossypium hirsutum
  Clone ID: LIB3825-002-Q1-N6-D1
acaaaacccttttttaataatccctaattaaaggtccggcttagataaacggccctgggggggaacattaaataactttttttttggagaagggcttagccttgggttttccaggttggaggggttggattctccacttcacctttaattttttgggaaaaaagttttttgccgtttgttttggccgccaaaattaaaaggggggcctgggtgtttccttttttattaaaaaaaacccttgtt

SEQ ID NO: 48323 - DNA, 511 bp, Gossypium hirsutum
  Clone ID: LIB3825-002-Q1-N6-D4
gggcttaaatattactcgactgcctggttaaaactttaataacaatcgatcgagatcatcaaaatgcttaaatgggtacaaaaattgtttccatgacttgcatgccaaggaagattatttttatttatatggggtatagaaaaaactcatcctgcaaaaatcttcacagcaaaatttggcctttaacaaagcactccatgtgtactttacatctccaattccaggtttaccgttgtaggggaccatcagtactgatcagggagctccctccagcaacgcttttaaaaaccagcattagcacctaacttatccattaaacagcaagaaaaaaaaggcaaatttatctgcaaagttctatattgcatgagcagttttcagctcataccatgccatcaatgggatcagaaaaaccagaaagagtcgatcctccttcataggcacatctggaatatcaaacctgtcttcctctatagttctattgatcacagaaacaggtgatcctaataccata

SEQ ID NO: 48324 - DNA, 586 bp, Gossypium hirsutum
  Clone ID: LIB3825-002-Q1-N6-E3
aaatatctctgtttctgtttcttttacattgaagaaaaaccagaagtattgtctctggtaaaaagttagtcacaatggagaagataacatagtaaatgacatgacatgaacaaatctatgaggagttccaattagcaaaagcttagctatattcccttctatcagtagaaaattcaagttccaaaatgtttggtaacagccctgaaatgcctggaaaactatggcgtagccaaaggataaatgtaggtttaggggtagtgtggaaagaagcataaggaaaatatcaatcagattcatcattactgctgtcaaccatgataacttgtttgttggccttcttcagcttctttctaggaggtcttatttcactgctttcttcttcattcaacacctcattatttggatgctctgcattaccatacttttttacttcttcaagaattctccccccatacttctctgtcttcaactttccaataatcttttccaactcttcaattgaatttggtaaatgggcgcttatgctactgatctgttggcttgacaacacagaatgagggaatattcccttgtcatgagaagcgag

SEQ ID NO: 48325 - DNA, 607 bp, Gossypium hirsutum
  Clone ID: LIB3825-002-Q1-N6-E4
caagaaacaaacttgtatgcaaaataatgttaaaactgtccggcatgaggaatataacagctgagaaaaatttaacacaacaataccagaaaattttaagttatctttatgtctcgtagaagtcgggcagccatcgagccgtatcttcttgcataccattcactaagcttcccatcagggagtcttgtcaccaggagatcatcaaccgaagaactaatttcagtcttgttaacttggtcgtcaattccccaatccgttttctcctgcttctctgtgcaaactgcactgtctgccgtaacaggtgggggctttagtcccataatgaagagttgaatactcggatgttggtacttactgtccatcttggcttttgagacaatcttcacttcaaagaaatttttccaggtcagaagcatctgctcgtggacactagtagaacggatctcatgacccaacataattgtggttttggggcctgataatgtgattattgtctgcaataaaggtcccacgagatgctccgcgtaaacaacatctgtaccaataacatagtcaaatggtggaccaacagcttttatatgatcttcatttccccagtccaactcca

SEQ ID NO: 48326 - DNA, 596 bp, Gossypium hirsutum
  unsure (1)..(596): unsure at all n locations
  Clone ID: LIB3825-002-Q1-N6-F1
aagaacaaattttttatatcttttctttaactattttaatataacaatctgatttcatattagtagtaaaatcagagatcaacccttacacgaaaaaacagaaggggatttaaacagttaactataattttatgattctctaataacccaaatgggaaaagagaagacccaaaaatatatatatatcaaaagtcaaaattttcttggttcatcttcgattactgaagctaaaccagtcacgaacgtaatcccaatctgcgagctcttgggttttatttcaggtggcttccactcttctttctccaccttttccttctcttcttcttcagagctctcagacaaagcaaatatggactcacccaactcagcatcttcaaccgagtatttgtcctcggaattcaattcagtaaaaggttgctggtctttctctttagctttggaatcaaattcagattctctaagtgtaccanttgtgggtgtgggtgtgggtgtgggaagtaattgggaggaaggaaacggcgtggctcngttattaggagagagccatttggcgctgacatactcagctntacgccatggaggaatatgcattccct

SEQ ID NO: 48327 - DNA, 485 bp, Gossypium hirsutum
  Clone ID: LIB3825-002-Q1-N6-F2
agaaaaatgggaaactcatttactaagaacttttccatgagagtttacaacaacaggcgcagacagggataattttatacaataagggtaaaaagaattgtgtcaaaaagacaaaaaaaaaaggttgaaaaggaatgaaaaagcaatggaaaggagatgaaatatttacaatttgggttcatgggtggccagggaaaactttttgtttcaagaaattggtgaaacgattagcatacagctcgggttccacgacagatattgtcggggggccaaatttcactgatttgtatgcatgctctgcctttttttttgcattgtattcctgtaaaatatcaataattcccatatagagaatcacattatttacctcaaagagttcgacttcggctgaatcggactcattttggggaagcttgtgattagcccgtgccggcatgtttacttctaattgcacccgtaacctttcagtaccgggcaccataata

SEQ ID NO: 48328 - DNA, 378 bp, Gossypium hirsutum
  Clone ID: LIB3825-002-Q1-N6-F3
ggggggctggaaattttccctaaaagggttaaacgggggcccgggaactccccaaaaaggggggaaacaaaccccaccggggccaaaaaaaaaagggggggaaaaccaaacagggcgggaccaggaattgaccggggaccaacggtcccggtcccaagagagaaaggggacccaccccggccggggcccggggggccccccgggaaacccggaccgggccccgaaggggcaccacctttcccgggaaggggggggatcaaagggggggggggaaacgggcaaaagtgccccccgggggaaaagggggtgcccccacaagtccccccagggggcgccccggggggagaaaggggaaaacctgggggggccaaaggaggg

SEQ ID NO: 48329 - DNA, 375 bp, Gossypium hirsutum
  Clone ID: LIB3825-002-Q1-N6-F5
atggaaatgatgctgcagaaacgcatcgcctcttctgcaacaaactttccgttaatacacataaagctacaccagatacttgggtatgatactactgcaaaaacaaagtcccgatttttttcctaacccgaaaaagtacccttttttttaattcttttaatttttttattttttaaaaaattaaaattcccctaattaagcttgccgggccaacaccaccccccgaaacaaaatttcttaaattcccttaccaaaaggtgggaccaggttggtaaaattgcccagtccattaaatttaatggccccacaaaaaaatggggtttttaaaaacttaaaaaaaaatttcttccaaattttacttcattttaactttct

SEQ ID NO: 48330 - DNA, 492 bp, Gossypium hirsutum
  Clone ID: LIB3825-002-Q1-N6-F6
actcttaatctctttatttttcatctattttcattttagaattttatccttcatctcttcaattccagaaaggtgcctttctctttaatatttttggcatgttcagtaggaaataaatttactatgaaaagttaaaatcagaagaatttttttggttaaaaacttaaaactggcagttcatcacacccatactcaactgaccgacttaattataatgctaataccataaccataaatttcccaaaagaccgaaaccctaagacataccctaaagtaatttatcataaggcgatgagtactcacctcattaaatggaggcggctgcgaaagcattgaaccgattgcagtcgaagccgcacccacactgtggagactcgtaaaagttatcactagggaagttagcggaggcgatccctacggagaattccatctcgtccccatcatggatgacttgggacgatgtcaagccagaagaagagaaccttaacgctc

SEQ ID NO: 48331 - DNA, 316 bp, Gossypium hirsutum
  unsure (1)..(316): unsure at all n locations
  Clone ID: LIB3825-002-Q1-N6-G10
ggggntaaactattttggggcgattattgggcaaccccaaatgggttagaaagactacccgcaaaaaggggggcgcgcgggggcgcccggggatttcggggcggggcccgggggggggccacccttccccataaagagtgccctccataaccggggggggaaaggggataggggttttctgggggccccccctatttggggtgaattttnnagggaataaaaaaaaaaagggtaaaaagggaaaaggggggggggtaaagagggagggaaaagacaaaaaaaggggggggatgacaggggggtttttagaggggga

SEQ ID NO: 48332 - DNA, 586 bp, Gossypium hirsutum
  Clone ID: LIB3825-002-Q1-N6-H11
agcaattcataactagagtagaatactcacaactgatgatgtaccatgttatttttgcagttaattgaaaaacgaaaagaatggaaacaactaaaagtctcaaaccagatgagcatttgaattcaattgggatcacctgcatgccaagcgaaacaaatagaaatgtcatccatcagcagtactattcaaattataagagcttatcacctgctgagacaatatttacaaacatatatcatgctgaaacgagttaatttcatgtttggcccttaaactataacctaatatgcaatttggtatttataccaaaaaaatgtgtgaatgtgtagtatgtaacttcaacctaacaggctaacacgttgtgcacagtgttagacctttggggtcgaatgtatcacggtaaaatagaacggctacaattacagagttacacattatatttagtgcagatacctcattgcacattcgattgattgaagttcagagccaaaatttttttatatatttgaccaatagagcattctcaaacagcaaacaagataatctttcttgaaacattactctcttagagaaatgacggcaaata

SEQ ID NO: 48333 - DNA, 407 bp, Gossypium hirsutum
  Clone ID: LIB3825-002-Q1-N6-H3
acaaaagggcaattaaaaccgggaatttttgttaaaaaacaaccctctttggaaaatgacattgtgccccaataaacctgaaagggggaggaaccccctacataattccgttttcttttaccaggggaaaccaaaaaaaaactttaacctccaaaagttaggccaaaggccctatgcgtaaaaaacccaaggttcaccccccgattggatccccggattagttcattggggcgaacaaaaggcctggtcttcttaccccacaatatatggggccatggaaaaactacatttgcccaaataataccccgccgggtaactagaaaccaaggcgcccggtttatggtttccccaccggatatcaaaacaagacccgaatgtgacaaaaccaaaacccccgttattcccca

SEQ ID NO: 48334 - DNA, 573 bp, Gossypium hirsutum
  Clone ID: LIB3825-002-Q1-N6-H7
ttttttttttttttttttttttttttttttttttttttttttttttttttttttttttttttttttttttttttttttttttttttttttttttttttttttttttttttttttttttttttttttgggccccggggggcccccggggaattcgggcccggccccgggggggtttttttttttccctaagggggggggattaaaagctgggggaaaacccgcccaaaggggttcccgggggaaaatgggtttccaaaaaaaattccaaaaaaaaaaaaacccggaaaaaaaaagggaaaagccgggggggccaaaggggggggccaacccaaattaatggggggggcccaacggcccgttttcaagggggaaaacctgtggggccagttgttttaaaaaatcggccacccccgggggaaggggggtttgttttttggcccccaggggggttttttttttccccggggaaaggggaaaaaggtgtttgcccttaacccccgggccctaaaaaaattgaaaaaaggggcccaccctggttgcccccacaggggaaaaaccctttttggggggggg

SEQ ID NO: 48335 - DNA, 582 bp, Gossypium hirsutum
  unsure (1)..(582): unsure at all n locations
  Clone ID: LIB3825-002-Q1-N6-H8
aattccaaatataacacatttcagtttcttctgtattttaagccaaaaattctattcccgacaattccgcactgaaaggggttaatagtaatatacataagatcacctaaaactgagagaatttgttaacaaatgattgcactagcatactacaaatggtgggatgaatttttttagaggttaaacaagataccaaagaaaaggaaaaacatgaccctctggtgcacatatccgtggatgaaccaacctcacaaattttgggggaaattgtttatttgtctttcttccaaaacatctttgttgttcgtcttgtacgctatccttacgcgcatgaccaacgatttcttcccatgttggctattagtgaccttcaaattttgtgtgatggatccatcaccgcttgcaggcaaagtgttgctgctagctggatccaagtgcaactgaagaaactttggaactgctgcctggaaaagaaatcattgtnaacattagatgacaaatttgtaaaagtagcctggatcaacgttgtttgagggcttcctcgttgctttgaaaagttgaacatcactcttaangagctgc

SEQ ID NO: 48336 - DNA, 118 bp, Gossypium hirsutum
  unsure (1)..(118): unsure at all n locations
  Clone ID: LIB3830-002-Q1-K6-A10
gattattcgagnagcagctgactttcttaaagagaagccaatgagcatcacgaggataagcgagcatcgagtcatggctcggatcaagcaaaagggagatggaagagacgtcattttt

SEQ ID NO: 48337 - DNA, 339 bp, Gossypium hirsutum
  Clone ID: LIB3830-002-Q1-K6-B5
gtatcccaataacgtcttgtcttttcaatgcaccagcacagctcttaatagcagaacccttcaaatcccataaaatcttttagccttctgttacacatttccaaatgaccatttcatttcatcaatctggagcctgtggtcttctcctttccagtattctccaaacatgctcaggaactcttccatccaggtaatggccttcatttactttcaacgcttcctttgcaatcacatgagcaaagatgttttctgactttggaatatggtggaagtgtagtttttggagaaatgcttcatatcttgaattttctttatatagctctaatattgagttatctc

SEQ ID NO: 48338 - DNA, 566 bp, Gossypium hirsutum
  unsure (1)..(566): unsure at all n locations
  Clone ID: LIB3830-002-Q1-K6-D12
gcctattcgcatgcatgccactgaaggtgattcaaagccacatcatgagcttgtagtcgctgattcacctgagcaagatctgatagctacanaatggaaaaccagttaaggatgaatatgtgctcgaaccaattgaaaacatcacttctgcgaactacgtgcttggagacccatacctggatgttactagttatctttcaaccaatgatgaacttttcttggaagctaatgatttttcaaacccgatttacccagaatctgaactttttgacatcaatgagtatctttcattcgatgatgctgatgatcagtctttggcctttgattatgatgaaattgtgggaagtgagattcctgtttctggccaagaacctcttactgaaacgcatacaaatgaaggaactgaacaagatcttaatgctggtgaacatgttgaagaacatggcaatagtgatgcatcctcttcaaagcaagagctggaggctacagaatttgatcttggtaccaagtatccatttatgaaacgggctagtcacatgttgggtagcctccctgctcctcctgca

SEQ ID NO: 48339 - DNA, 645 bp, Gossypium hirsutum
  unsure (1)..(645): unsure at all n locations
  Clone ID: LIB3830-002-Q1-K6-D5
caaacccaaaacaaactaagtgaaaactcacaaaaggtttccagaacacgagatttcattcccgaaaacatgcatctcgaagataatgaagaagaagtaggattcaacctcaaatcctcagctccttctcgttctcatggggttcaaccgttgggaaacctttacttcaacccaggcgctatcaactcaagaaacatcggcttaggtactctccaaatcctgtctgacgagcttgttcttgagattttaggccttttggaaggtacccagttaggtgttttagctactgttagcaaatcattttatgttttcactagccatgaacccctttggaggaatcttgtattggataacctgaaaggacgatttttttataatcggtcatggaaagttacttacatatctacatttcatccttcatttgatgtttcaaggagtgcccgttcttcgggtttgagagtaagggatttttattctgactatttgtttcagagttggctgtgcgctaatcttgaaatgaaacctgaatggcttgaaagagaaatataattcgaaaaagaggattagtgttgatgattntctgacaaacttcgaagaacctaaaatagccgttntgttggaagggtgcatggactaattggatgc

SEQ ID NO: 48340 - DNA, 627 bp, Gossypium hirsutum
  Clone ID: LIB3825-001-Q1-K6-A11
tccgaaaaaaaaaaaaaaaaaaaaaaaaaaaaaaaaaaaaaaaaaaaaaaaaaaaaaaaaaaaaaaaaaaaaaaaaaaaaaaaaaaaaaaaaaaaaaaaaaaaaaaaaaaaaaaaaaaaaaaaaaaaaaaaaaaaaaaaaaaaaaaaaaaaaaaaaaaaagggggggggcttttttggggttcaaatttttggtcccggtttttgcaaattttttttttttttttgggggccctaaatttaatttagggggccgggtttttaaaccttgggggtgggaaaaacctggggtttcccaattttattgggtttggggaaattcccttttttgcaggtggggttttttggaaaggggcccgaccgattgccttttcaaaaaatttggcaaccttttttggtaatggggccccccttttttgggggttttttagggggggggggttggggtttccccccagggggccctttttttttggaggggctttgggggcggtttttttggtttttttccttttttttttggaacttttgggggtttttcccgttaagtttttaatggggggctcccttttggggttcaattttattgttttggggctctttcccccaaaaaaatttttttggggggt

SEQ ID NO: 48341 - DNA, 644 bp, Gossypium hirsutum
  unsure (1)..(644): unsure at all n locations
  Clone ID: LIB3825-001-Q1-K6-A12
aaggtcttgcttacacggtgcagtcctatatgtttgccaaagttgttcaaggacttgaaggataagaagatagatactatccttcatagtattgatatgggcccgttgttgcaaatgaaatctcgatcaatgaggagggaggtcataatatacttgattgagaggttcgatgctgaaaattgtgctataaaagttgacagtcataatattactctcactgttgaagatgtggccagtatcttggatctaaagatgatgggatcgatgtgtccactgttttgaggaggaatcaaggacataaattgagtatcccaaaggatgttaggtttgttaaattagtgcagcatatgatcactttggaggctgaatctgctaaattaaaggccatggtgcttgcatttatcatcggatgtttcttgtgtccatcagtcttccctttcccagcgaggagtactagaattgtttgtgcgatgaaggcctcaacggtaagttgaattgggcaaaacacacgcatgaggttctgattcaaggattaagaaattatgtcttcggcaataggattggaaagaaatccagtttattgcagattcggttntacaattacctggctggattggagagcaagaaatttggcaattctgaac

SEQ ID NO: 48342 - DNA, 615 bp, Gossypium hirsutum
  unsure (1)..(615): unsure at all n locations
  Clone ID: LIB3825-001-Q1-K6-A7
cctttgatcagctcatgggaacactgccagctgccagttataaagctttgcctgaagaatatgggaaactgatgactgatccatcatcacctatctataatttctatcccaccgattttgagattgacatgcatggaaaacgctttgcatggcagggtgttgtcaaattgccattcattgatgagaagaagttgctttctgcaactattatatcttgaagctactttaacggctgaagagcagattcggaacagtgtgatgcttgatctgctatatgtccatccccttcatcctttggcttctcaagtgatttcgtattatcaaatgtaccatcatgttcgcccccatgaaagattcttatggccaatcgacacaaatgctagtggtggaatgaatggatttctttggttatctgaaaggaatggttggcaacatgtagtctcttcccctgtcaagggtttgccgcatatagaatttaaccaagtgttgaatgttacatatcttaatccttcacaccatagacacattccaagacttccacagggtgttttggtacccaaaaaggttctaacaccattggacatcaaaccttttnctgtattatggcatgaagac

SEQ ID NO: 48343 - DNA, 633 bp, Gossypium hirsutum
  unsure (1)..(633): unsure at all n locations
  Clone ID: LIB3825-001-Q1-K6-A8
accctaccaaacgctcccttacgccaccgaaacggcggagcctcctctctttttttcctctcaaattttccttcgctttctcgatctttcctctctctctctctctctctctctgttcttcaacatcgtgtttagatccgttcctccatccttgaaagattccgtctttgacccttcttcgttgaatctatcaaacaaattagggttccgatctgttacctcttgtgttcgtttttaaaaaaagaaattttttttgcctcaaaaattcatcttccaaaaaggaaaaaaagaagagagagaggtttcgattttccttgattttgcttgagatttatgttctaatctgaaattcattaccttagtgatttgctatatcggttcgatctccattacgattgcttgattttgttttggatttggggttaaatccaagcttgcgttttttttgagggtctggttagtggtgaaaccgatggagactcagagcccgaacggatctttgcagaaacaatcactgcctccgaagaattatggaatcacgaaaccaatatcactcgcggngcctagtgaggctgatattcagcggaatacggaattagagaagtttctgatagagtcggngctttacgagag

SEQ ID NO: 48344 - DNA, 641 bp, Gossypium hirsutum
  Clone ID: LIB3825-001-Q1-K6-B11
ggaaagaggggccaaaattgttggtgttttgcatggagatgaagctgctgttatattgcaaacaaatcgtggaaatctggagtgcatctatccaagaaaattggtgctagcctcaattgtcaatgctttgaaccaaagacgctttagggatgcacttcttatggttaggcggcacaggattgattttaatgtgattgttgattattgtgggttgcaagtgtttactcaattagcttccgagtttgtcaagcaggtcaaaaatttgagttacataactgactttgtttgtgctattaaacatgaaaatgtgacggagaaactttacaaaaagtttctctctccacctagctgcaaggagcaaaaggatctgttaactaatgatttcaagggttctgatgctagtttagatgcaaataacaaggtctcattggtgcttctggccataagaagggcacttgatgaacaagtacctgaaagtcctgcaagggagctctgtattttgaccactctggctcgtagtgatccccctgctcttgaagaggctttggagagggtaaaagtaatccgggagatggagttatcaggttctgacgacccaagacaagtaaattgcccttctgctgaagaagctctaaaacatc

SEQ ID NO: 48345 - DNA, 241 bp, Gossypium hirsutum
  Clone ID: LIB3825-001-Q1-K6-C2
gtgggacccacgtcgttcgcggacgcgtgggttgaaattgaaaccctagcctgctatagttttcttgagccgacccttagtgattactttagagcgccagagtcgccagcatgaacggggaccagcgtgcgcggacctataggtgacattttcaggctgaagagaccctgtatacctcttttttcacggagcagaagggactccctggtattggtgaggtaagcttggcacatcccttgta

SEQ ID NO: 48346 - DNA, 619 bp, Gossypium hirsutum
  Clone ID: LIB3825-001-Q1-K6-C3
gacattgcatactaaatgaggtgttggtttgtattcgattgttaagttagaaaatttaacatggagaatgaatctcttagtaaagtggaggataatgcggccgttcgtgcatggtcagagaagttgcaaaccgagaaaggggatagcttgatagaaggatatacatcagagttacagaactttacccgcattattgtaacacagaactaagctgcaagagttgaaggatatatggactagttgggatgagggcactaaacagttgttctaccagagttatggtgatataccgtacttgctcgatgttaaggtggataagcgattgttccgaggtatggctcaattttggaatgctgcttataattgttttacatttggagaagtagatttggttcctaccttagaagaatacactactttgttgaggagtccaaaggcccaagccaggaaaatttatgctaagcttactaatagtcaaacttttgcgaagaggttggtgaatatttcagggatgagtgaatcttgggtcactgctcaaattcaacaaaagggggatagcaagtgtattccttaggaaaatttgagagatttgattttgacgcacccggatgagaagaaa

SEQ ID NO: 48347 - DNA, 638 bp, Gossypium hirsutum
  Clone ID: LIB3825-001-Q1-K6-C7
caaacttttgtcataactattgtttgccatgttttgggtcatttttttggtattgtcaataaccttaaagattatgtagaaatttttgtgtctagtttcttaaccacataggacaatcatgttccattcctaattcgtatggcccagagctttgcttgcagatgatactgtatgacactccaggtgttattgagaagaaaatgcacattttttattctatgatgatgaagaatgtccgaagtgctgccttgaatgctgactgtgtacttgttattgttgatgcatgtaaagtgcctgaaaatatcaatgaagtgttagaagaaggcgtaggagattttaagtgtacactgccaactttactggttttgaataagaaagatctgataaaacctggtgaaattgcaaaaaagcttgagtggtatgagaaatttactgatgttgacgaggttatacctgtgagtgcaaagtatggacatggggtagatgatatcaaggattggatactgtcaaaacttcctactgggccaccttactatccaaaggacattgtaagtgaacacccagaaaggttctttgtatctgaaattgtcagagaaaagatatttatgcagtatcgcaatgaggttccttacgcatgt

SEQ ID NO: 48348 - DNA, 617 bp, Gossypium hirsutum
  Clone ID: LIB3825-001-Q1-K6-C9
gaaacatataacacttgccaacacatcgtttaacttcagccatcttcacataatcagtattttgtctgatcatccattattctcctaatttcacttcacaaataactcatctactcattacattaccgtcgcccaaaatcttcgtggtctacccacttcgatggaagtagagaaagggaaaggaaccgacgtttcagacgtacagggcgaagatgacctcgacgaggaacctggggaggaaattgaatcagctccgcctcttaaggttggtgaggagagagagttgggtaattccggtatcaagaaaaaactcctcaacaatggtatccattgggaaacgcccgagttcggcgacgaagtcacgggtgatttccattatatttatttcaagacttcaatttcttttaaaaaaaatatccttgttttgggtttatttttagtttttgagtaaacagtgatcgaaactatgcagttcatttcgtgggtactttgcttaacgggataaagttttgttccacaagggataatggtgaaccgataacttttgagcttggtgaaggtaaagtggctaaaggtttggataatgggattacaactatgaaagagggggaacgtgt

SEQ ID NO: 48349 - DNA, 633 bp, Gossypium hirsutum
  Clone ID: LIB3825-001-Q1-K6-F5
ccttatctcatcctaactgatgggatgcaatgatagagatgattgctttagatggtaatggtacttgggaattggttagtttgccgactgaaaagaaggctattgaatgtaaatgtgtttacagtccaagttaatcttaatggttactcagatactttttctccagtggctaagatggcttatgttcgtttgttcatttctatagcggcaacatatgggtgatccttgcatcaacttgatataaaaaaaatgtctttctgcatagtgatctacaggaggaggtctatatgaaggacccatttggttttgttgctcagggggagagtgcgaagttgtgtcgtcttcagaaatctctatatgatttgaaacagagcctatgagcatggtttggacgattctgtgaggtgatccacttagaggtaggcatgattctcttagtagtttatgttgatgattttgttattactggaagtgatgatacaaatattcttgctttgaaatcataccttcatacttagtttcaaacgaaggatttgggacaattgaaatattttcttggcattgaagttactaggagtaagaagggtattctcttgtctcagagaaatatacccttgacttacttgaagaaac

SEQ ID NO: 48350 - DNA, 600 bp, Gossypium hirsutum
  Clone ID: LIB3825-001-Q1-N6-A12
cgcagaacctataattatttattcaaaggaaaatttcttacatgatattcaaataaaaaacctgtcattttcgaggggccgggcaatatgaatctggcaagtcaattaaaacgttactagtgcgcataatgtcccagtcttcaccttctttgcataatctatttccagaatcttcatttgatttggcctcttccctgaactctataatcttcttttaaaaacatcgttcaatttcccttccatccagcgcactatttccttcagtccgctcacctcaccttgcacagaaatcacgttttgattgactctctcttccaatcaacgcaccaagtccttcactgcagtaagctaagtcaccaatgcctcaaaaaacacgtcaaccttacttgtccacttcaaaagggttgacatttgcctttgaacattgtttagtgaggacttgacttcaacaagatatttggccttcggatattcttccaatggcttctgttgaggttcatcctcggttaaagcaacgagctgtaagatttctttatgtcacaccatatttcataattatttaagggtaacaaatctaccttccctttgattttggggtag

SEQ ID NO: 48351 - DNA, 586 bp, Gossypium hirsutum
  Clone ID: LIB3825-001-Q1-N6-A7
gaaatgagaaaataccaatcacattttctccgttcagttacaaaacacaacaggcggctttgccagttccggctcttgccaatgctatactgcaaactgagatctacaatatgatgatgcctctacaatatgatgatgcctatttgtacaatttgtaatttaattgacactatcaacataacagtcctagttttggcggtgtgatgggaacctatggtttaaactacgcaacggtttgcatgaactataagttaaaaagttgacaattagtgaatgtacacgcctgtgtgaaagaaataggcaacaaccccatccgatatcatgatcactgctgatttacaggagatggacgagtcttaatctgataaacctttcttcatctgcttctcataagctccacttgatgcgttttcttgttttaagcgacttccagggtttacattaactggtttacccatccatgtgttgggtggtaggggagcagcacccgtgttctgctcagacaggagatctagattttgcaggcacctagaatttggcattttcgaagactctctgcatgtgctctacctctggcacttccctc

SEQ ID NO: 48352 - DNA, 463 bp, Gossypium hirsutum
  Clone ID: LIB3825-001-Q1-N6-B11
aaatcaaaattcatatttaattttgggatttggctgtttcttttaccatgtcctttcctttcttatctttttattatatccccattggcacccttttttttttttttcaaactgggctatagtagacaattttttattccaactaaagtaaaaaaaaactgaaagtccaaaccctaattagccctcttttagcagaactcaaaacaaaaacctaatcaagcaagccgctggtacaaatacaaaatcccaatgaagggatcaatgtcaaaaaaattgggaggggggattttgaaaggcttcttccataaaataaataatccaatgcctgccctatctcctgaacttctcaatctcaaaatgcatagcagctatggggtatacagttcctttatgcctgtcaaggaaaaaggaatactccacagccccatgaaaaacatctgaatccttaagttccgtctttact

SEQ ID NO: 48353 - DNA, 579 bp, Gossypium hirsutum
  Clone ID: LIB3825-001-Q1-N6-C3
ctaattcaattccttttagaaaatttcactataaaataattctttacataaaactgagttacaaatacgacttcgccctaacactcagggtcttgattttcctaagtaatgaagctagttcctatcccctatctgactccaactcatactttacattaatacgtctgtctgtacttccaaggactgcaagtagtcagctacttctcaaatttgcgttacagcttctcccgtgatgtagtccctgtttctcacctggtcttgagaatgatgaagctaattcttccattactcctcatttgcctccaagaactcaatcctcatttcacaattctgtaaggccgtctctaactcttctattttccctttcatctcctcaatcatatttaaacttgctttcaactctgtcacagaattgcaattccggtataaacacagatatctctcaagttcagctactctggctcttaattcatctttttcattcttactctctgccaaacttctttccaaagtttcattcttagcttgagcctcctgaaacctcttttccaattgatctgccttagccctttcttctcg

SEQ ID NO: 48354 - DNA, 585 bp, Gossypium hirsutum
  Clone ID: LIB3825-001-Q1-N6-C6
caagctgaatttgaatagcttgcaacaaagtatctcgtttacaccctactagaaacagtgaaattgctggattggccctcctaaactttagacagattatttttgtgtattttccatcagagaggcaacaataacatagactgttgctgcaaatattacaaagggacctaaatatttttttaccaaaacgacctgcttgcccctatcatcattttcattgaaaacaaagacaaaaaactattatacagtgtgcagcaaagaaatatttgctgctgaggaatttggttttatactacctgcgaatgcgcatgtcccccttacctctccacgactcttattccctcattatgctcccactctgtccaccatactgctccgttttggcatactgcatcctaagtactgctacaggatcagaaagatttgggcaggagccccctacaacacctcccactccagtccccacaacattaattccaaccataccccttccctggtgctgtaaatttgagattgcatcaaacccatttcgcctttgcatctcggagaaatctcccgtcgcttcatatccatggcaaaaggcac

SEQ ID NO: 48355 - DNA, 322 bp, Gossypium hirsutum
  unsure (1)..(322): unsure at all n locations
  Clone ID: LIB3825-001-Q1-N6-C8
aaaaaaaaccgaaggtgttaatgctaaattgtaaaagaaagttaaaataagagactcgaattataatatgattctctgacgcactaattaagctactatatattgtcaatagtattataacttctgtagctctatggcggagacccactttgtacttttggaaaangcnacccaaacaagaaacccacaaancggannncaggacgggcctgcctttgcttatnngntccccacgcccacaaagcccagcattgtccctaaggaaaaaaaatgttgttcgattcttgttcttgaacccttgttgcattctccaaatgggttc

SEQ ID NO: 48356 - DNA, 489 bp, Gossypium hirsutum
  unsure (1)..(489): unsure at all n locations
  Clone ID: LIB3825-001-Q1-N6-D10
aagggtaaagttaggggtgaaaagagagtaaaaaaaaggaaacccctgccaaaagggggggggggggaaaattangtttggtttacaacccgggccgagagaaaaggagaacaaaaaaaagaaaaaaccccccccccccccccggaaggataaaatatggcctgggggaaatgggagatataaaaaaaaaaaaaaaaaaattcactacatgggcttgggcaaaacaaagagggggcaaaaaagaaaggggggcgccgcatggggggtaaagaaatcgccccaagggaagaagagtcgaggcaagcaatggcgtaaaacaagggggggggaaggggaaacaaaactttgttggggaggtcaaaacggacacgagcgggagggggggcaccggaaaacggggtaaccaacttaagaagaggggaaggggggcggggggggggccgggaaggccggaacgaggagggggggggcccagccgccccgaagggg

SEQ ID NO: 48357 - DNA, 583 bp, Gossypium hirsutum
  Clone ID: LIB3825-001-Q1-N6-D2
gaaaaagaaaaaaaaagatttatcagcaataaaattcagggttcataaaaaagtggtactacaagcttttactacctgccaaggaatgcaactcgtataagaggagattcaatttactattatctgcattgtgaactttgggtcagtcaaatagcatctgcaccgtgcacgctcattgcttgaagttcatatccagggaaccttccatctcggtttaacataccatacgcactcaaatggggagatccttttcattcaagcaactcactgcagccaaatcagttgatgactattttatacaacctttgaactacatatacactcagggtatggattttcatagaaggattcttcggtcctaaaacgtgctttgccttttattccaggtgaaggaccttttcgttttcttggagctccttgtctgtttttgtgcatttgctgcacaagatcggaaaagaggatgtttctctgagctgtccactttctaactcatcaaaaagcctgactagtcctttcctgtctggggtgattgtcttccgatggcctaagatctgcggtgcccctcactgctcgtgccatgtta

SEQ ID NO: 48358 - DNA, 495 bp, Gossypium hirsutum
  Clone ID: LIB3825-001-Q1-N6-E3
aaaggccaaaaaaaaaacccccctcattaaaaaaaggaaaaagaaccgaaaagaaaaaaaaaatttttttttaggggggggggtaaagcttaaaaaaacccaaagttttgaaaagcccgcataaaactaaaaaaagcccttgggggctttaaattcaccccccagaaaatccaaaacccccaaacaaaaggccaaattttccccccccatattaaaaaaaatcctttggggaaaaaaaaataaattgttttaaaaagggggttcaaaaccaaaatccacaatagatcgaagcacctccggtttaaaaaaaaagtttttgaatcccaaacggggatttccaaaaaacccccagggtgttaaaaccacaaaaacaggggaacatcaggggatttaaaccggctttaacccaaaaaatttttaaaaagggaaaccccatcctttatggcccaaaaaaaaaaaataaacaggcggtttcaaaaaaaaaggtggggcccc

SEQ ID NO: 48359 - DNA, 612 bp, Gossypium hirsutum
  Clone ID: LIB3825-001-Q1-N6-F5
ataaggaaagtaaataaaatcaaatctctaatatcttgccataatccactataatcaactatattattctatgtacatatcttaacacttcccctcaagctagagcatagatgttaatcatgcctagcttggtacaaatataatcaatttgagttccactaagagatttcgaaaagaatctcctaattgatctcctgttttgacataatctgttgatatgagcttttgttggatcttctcatgaatgaagtgacagtcgacatcaatatgcttggttcgctcatgaaatactggaagggaggatataagaagagcagcttgattttcacaccacaattttgctggtgacgactttttaaatcctagttcttccagtaactattgtaaccacataatttctcacacagattgtgtcaagaaattagatagttgatcctctatccatctttgatcctccccaatttgcattagtgaagcattcaatgcctatgtgaccacaattctaatatagaagctcacagcctagagctccctttaggtaaaataagatttgctctagtgtcacccaatgtctaactgttggtgaaagaatgaattgtctcacacactcac

SEQ ID NO: 48360 - DNA, 510 bp, Gossypium hirsutum
  Clone ID: LIB3825-001-Q1-N6-H7
aaaaaaaaaaaagggaattttttttgcccaacaaatttcatttttacagggggggttagctaacccaaaaatattttttggtaaaaaacttgacattacaaaaaacctttattctattcagggttgagaaattttatcattattagttttaaaaaaaagggggtgtaacaaaggcgaaattgccccaaaaaaaaacactcccccggaaaaaccaaaaggctaaaccttttttggccttcacactttattattgcaatcttaattataaagctcaagaacaaggggaggggaaaccaatgcttaaagcgggggaaattaaatggtgggaaaaccaactgggccagtaaagtaaaaaaaaccattggatggggttaaaaaaaaaaggcgggcaaaaaataaaaatgggcaagtttagcatatggggggcaaaccatgttccaggacaactccccctaccactgccaaaaggcatcaattaaaaatgctggcccctaaatccacattttgggg

SEQ ID NO: 48361 - DNA, 525 bp, Gossypium hirsutum
  Clone ID: LIB3825-001-Q1-N6-H9
tttttttttttttttttttttttttttttttttttttttttttttttttttttttttttttttttttttttttttttttttttttttttttttttttttttggagggggggaaccaatttataaattgggaaaaaaatttttggagggggggggaacatttaacttgggtaaccgggcctgtcccaaaaaaaaaatttaaaaataaaaaaaaggcccccccccttcccccaattttaaaaccaaaaatttgtaaacctttttggaaattgaacatttttatggacccagtaaaaattgccccaaaaaaaactggaaaattaaaaatcacaggggcaactaaccccaaaaaaacatccccaaaataaaaaaaatttttaaaggcccgccccactggttaattggcccccctttaaaacatgggggttatatccccaaactgggaaacaaccaatccatacaagggccaaaaaaaaggaaaaatccaggggcccccccccccccaaattggcaaactagggcggggg

SEQ ID NO: 48362 - DNA, 314 bp, Gossypium hirsutum
  unsure (1)..(314): unsure at all n locations
  Clone ID: LIB3825-002-Q1-K6-A8
gcaaacgccgaancaccannncattcggnggccgacaangcacgagcagcgnaccaganccaccgacgaaggcaccanncaaggaaaccnggnangcnannnnannnnnncnggcggggggggggaaaaaattacccttgttttaagacggggcanncaagaaaagagaagccaaaagaaaaaacaccacagcacccgacactcgnncanancncaanannnnngagaaannngggacnacaaaggagaagaaacgagaannnngnangcagagganngnaagnaanncgaaagaaaaagaaaaagaacaagaa

SEQ ID NO: 48363 - DNA, 604 bp, Gossypium hirsutum
  unsure (1)..(604): unsure at all n locations
  Clone ID: LIB3825-002-Q1-K6-B10
aattcaaggcgctcacttttctcctgcaaaaaaggtatgccaaaggtttcttaattttattgaattttaatatttcccctttttgttatgtcattaagaaagagtacgaaactgtgggtgttgaagtgaatggagaaggaagcaaattgtcacagtggaagaagcttaattctcaggatcttggaattagcatnnctanttttccaagccaacaaggaaagttcttaatgggctcaaaacaaaaggatatgacgtttaccttgtaggaggttgtgttcgggatcttattttgaagcgaacgcctaaggacttcgatattattactacagcagaactcagagaggtggtgaaggcattttcacggtgtgaaataattggaaggcggtttcctatatgccatgtgcacatggatgatacaatcgtggaggtttcaagttttagcacatctgcacggaattttggtaggggcctaacctatgaaattgaaaagcctgctggctctgacaagaaggattttgttcgttggagaaattgtttacagcgagacttcacaattaatgggttaatgtttgacccatttgctaggataatttatgactacatg

SEQ ID NO: 48364 - DNA, 358 bp, Gossypium hirsutum
  unsure (1)..(358): unsure at all n locations
  Clone ID: LIB3825-002-Q1-K6-B3
tttttcctcanaaagaagagaaagcataagaagttaattctgaattggttcttgagccccttgagctaagtgcctgatagcttatccatgctttacttatatatccttcaacattgctattcaactgaggagtactacaattttaaatctaggtatatgaactctagaatagcgccaagcagtcagtatagggacctttcccttagaagctaaggttcaagttcttgtaatgaaataaaacatgtctgatcttaaacctgtttatgtaatgaaacaggtactattcagctgtaaaaaaaaaaaaaaaaaaaaaaaaaaaaaaaaaaaaaaaaaaaaanaaaaaacaaaaaaaaaagaa

SEQ ID NO: 48365 - DNA, 683 bp, Gossypium hirsutum
  unsure (1)..(683): unsure at all n locations
  Clone ID: LIB3825-002-Q1-K6-B7
tttttgcgtgggtttgcatcctcctgcctttttgcttctcaaaattgaagctttggaaaaccacgcaggctttcaagaagccatatcatggatagtctccaaatatacgcagataatagtgatgaggaagacctaagtcaccagccatctactctgtctgcagactcttcacctccacggctcatcccctccaattcngtgcaccaaaggttgatgacacaatgcttgccctaactgcagcagaagcaccccacccccaatcaaggcccattgatccaacccagcatgttgttgccttcaatccaacctatgaccaactctgggctcctacctatggcccagctcatccatatgctaaggatggcattgcccagggcatgcgcaaccacaagctgggatttgttgaggatgcctccatcgactcttttgtttttgatgagcaatacaacaccttccacaaatatggttatgcggccgacccttcaggaagcaactatattggtgatttggatgctttacagaagaatgatgccatttcagtctataacatcccacaacatgagcaaaagaagcgaaaaattgagagggagaaggatgaggatgagggtgatccaacgnagatcgataatccagctactgatgtttggttgatgaagaataaaagagtccttgggcaggtaaaa

SEQ ID NO: 48366 - DNA, 145 bp, Gossypium hirsutum
  unsure (1)..(145): unsure at all n locations
  Clone ID: LIB3825-002-Q1-K6-C10
ggtgttacaccttttacttgattcgcgcgtggaggggggcgcaagnaatgaacgggacatgggcccctaggtttgaactcgtcgcccgctcatgtgataggtgtgggtcctagccgcgtggggcggcccgggtgctgggggccgg

SEQ ID NO: 48367 - DNA, 424 bp, Gossypium hirsutum
  Clone ID: LIB3825-002-Q1-K6-C12
cttattcgtccgattttcttatgagtcgggcgtgagaacgtagttaactaaagtttttttccctttaactttcaattaatgcttgccttatatcaaaatcataattagcataagcgtattaattaagcaattgcgtagtttgtttcagagggaagttatacctttcaagccctacacacaccggggggggggactttttttttttttagggaggacaacccccctctggcaccccaacaagagagccccaaccccccccaatggcccggcggcctactcagcttatgggacatccacacctcagtacaaatggcttgaaagggagcttcccaaagtgaacacgacacaaacaccatggctcatatgatcttatgcattctcctttttacaacagatatgtacatcattatatggaaggggagtc

SEQ ID NO: 48368 - DNA, 617 bp, Gossypium hirsutum
  unsure (1)..(617): unsure at all n locations
  Clone ID: LIB3825-002-Q1-K6-D4
tctttacagaaattcgcaaccttttctggcagatggcgattccgttgcctcctcaaagaaacgctccaaagctcctaaacaccaccaaaagcaagacaaaatgctttcgacgggaataagctcgaaattcttgaaagaggcgcttcttcagcagaaggaaatagaagatgaagcctcaggagggaacgttaggatcgcatttggttcggntaaagaagagcataataagcacgaagaagaataagaagaagccccccagatattgacaattttggtggatttttttgagacccaaagtcaatttggcaactacgaagatgagattgatgaggaagatgagaaattgcttgaggcattcttatcgaaggatgctggtccgcaaaggacacttgctgacattataattcaaaagatcaaggagaatgatggaaatgttgcttcagaaacacgacctttgcccaaaaaccttaaaactctggatgtggattaaatatgcaatgttgccaagtttctgaacaaatacacagctgggtaaatgcccaaagcctttaaacacattccttcaatgcaactctgggaggatgttttgtacttgactgaacctgagcagtggtctc

SEQ ID NO: 48369 - DNA, 353 bp, Gossypium hirsutum
  unsure (1)..(353): unsure at all n locations
  Clone ID: LIB3825-002-Q1-K6-D8
ggtttggaacaatgccaaatctcagcgacaaggctggacaaatagaagtctgagccatttctttctgtgacatgaagccgggcctcaatagggtacatggaacctttcggttgtatattccttttgatgctctgtcattgaaaaagtagagtaatatatcaacaattcaatgttttactttatgaaaggcaactcnnncctganatatnggccttaatgaaaagccagaaaaaaaaaactttgtgaaccatccccccaagcagatacaagatcaaccatttgctctaaaatgctttctggccattcatttactgttaatttaattttggccttgatgttggcaattaggttca

SEQ ID NO: 48370 - DNA, 651 bp, Gossypium hirsutum
  unsure (1)..(651): unsure at all n locations
  Clone ID: LIB3825-002-Q1-K6-E3
tttttgatgttgcgattttgtaagccaatgttgccacttagggaccagtaagcttggtcttgttgatgttggttgaaaattcgttgttctttctagttcagtgacgattttcaggttgtcgagtcacacaccatctgtttgtctttattcccatttgatatatctcactggggatggcttttgcttttgttcngtttcggtaacctcccatttagggatattaacttacgttaattgaagttgctcccccagaaatgccaagtgctcacttttcgttattgtctagtttaaatatataaattaagaaaactagttctccatctaaagacccgatttctggtcatatatcccctatacaagcaccacccaaccaaggggacagggaaagctaaaggcccaggccaaagttcattttatttatttatttattttctccataaaaaaaatggaagcagacgagatagcagaggagctgcaaaacattgagtttgagattcatgatgttgaagaacaaatacgggagttaattgagaagcaagagaagttgtacgagagacggtcggaactgcaagttttactggaaacatgccctatagatgtcaaagatggttccgctccgaccaatgtacaagcggaaagatggtcaaggtc

SEQ ID NO: 48371 - DNA, 477 bp, Gossypium hirsutum
  unsure (1)..(477): unsure at all n locations
  Clone ID: LIB3825-002-Q1-K6-E6
tttttaatcatgcaagaagccttgaaacatcccggcgggcaggcattagcaacatacagaggccacaatgtgttgcgtactttgattcgttgttacttctctccagcatatagcactggtcaaaagtacatttacactggctctagtgatggttcactttatatatatgatctggtgacgcgggcggaaggatttgnttttnttttcaggaaaaaccggnnagggangggaggggggacccaaaaccccacagcccatcacctgcggcnggggaggngnganngcgangagggaannnccgggcagagaagaagaacccncagaggcaggaggcaggagaaagagaaagagaaagaaggccnagcnnnngaagaaaaggganngnnngacanacnnngggagnnannngnnacagagaaancanagaggggnngcnggggnngcncagcacnnccaaanaaaaacaaaagggagcca

SEQ ID NO: 48372 - DNA, 575 bp, Gossypium hirsutum
  unsure (1)..(575): unsure at all n locations
  Clone ID: LIB3825-002-Q1-K6-F11
tgttattgtctaaaaagggtccgattcagaaaaaaaaagagaactctcaacaagctggaactaatcaagatcaataggaagaggagttagctaggaatctattgacaaagttcatgcacctatatggaagggctgttttgttgatgtattcctgtcgagaatgaagaagaagaaaaagagcggtggggaaccggtccgttcnantattacgaaccctaaaatttcttcagatatttttatttcttttattccccctatttttttacttttcttttggtgctgctactgttcaactctatactaacattttttaattcctatcatcatcgtcgcagcttgcgagtttgaggaagataaggtcgattcgatggaggtgcagcaagccctccccccggtgccggaagcttctgagccactaccactagctcaggagcctgtttctccttcgtttgaaatacaagctgctgaagtcaaccaagaggtcatctggagggagttggagcagcaggagcaaccggcaccaacgggggggagctaagctaacaaggcctcacatttgcagatactcaccccat

SEQ ID NO: 48373 - DNA, 254 bp, Gossypium hirsutum
  unsure (1)..(254): unsure at all n locations
  Clone ID: LIB3825-002-Q1-K6-F12
gaaagaangggagnancnnaannnaacncgcananacacaaaaccaaaagggangaacccagacnanngaagaccngnnanccngncancgaagagaagggcgggggaggatttcngtacnttttggcagaaagacangcnnaaacaaaagaaggaggcacnngnaccgggcangacgcgcaaaacacaagccncaaagagnnggcaaggaccaagaaccngaggaagaagaagaagaaaagagcaccaagaaa

SEQ ID NO: 48374 - DNA, 458 bp, Gossypium hirsutum
  Clone ID: LIB3825-002-Q1-K6-F3
ctttcgcgtgggttccacttctgtcttgtaacataattacttgatcctgtgtaaatatctagtctagcacagtttggttttgcaacacttgtttctctgtactgcgaagtaaatgtttttatactttttagtaaaattttcagttcacaaaaaaaaaaaaaaaaaaaaaaaaaaaaaaaaaaaagagaaaaaaaaaaaataaaaataaaaaaaaaaaaaaaaaaaaaaaaaagaaaaaaattttaaaaaaaccccccccccccgggttgtttttataaaaaataaaattttaataaccctgccttaaaaaaaaaaaaaaaaaaaaaagggcccccaaatttaattgggggggccctgttttaaaaaagcctaaacgggaaaaacctgggagcccccaaacaaaatggctttaaaaaaaataccccttttccaaaggggctttaaaacaaaagggcccc

SEQ ID NO: 48375 - DNA, 189 bp, Gossypium hirsutum
  unsure (1)..(189): unsure at all n locations
  Clone ID: LIB3825-002-Q1-K6-F6
gcgaccgcgtttgcgngggcggacgcgngggcgcgaagcgggggcggccnngancnagacncccngccagcgncacgggcnncagccaacganaagcnancggcanancaagggcnncaacagnacgacnncccagcaggcancccccccaagggcgngagngggnacgaannngaaagaggcacgggg

SEQ ID NO: 48376 - DNA, 563 bp, Gossypium hirsutum
  unsure (1)..(563): unsure at all n locations
  Clone ID: LIB3825-002-Q1-K6-G9
tactctttgcggttatttttgaactttcatccatatttgctgtaaagaaggaaagatttcatctgcatttcgagttctcaaggacatgngagaaaaaaggatgtaataagagtgtacagacttataattcactgatacttggcttaggaagtaaaaatcaaatatttgaaatttatgatcttggcgatgagatgtgagaatgatttatactcctaatgtttgcatatacaataacattattcagtctctttgcaaaaatgggaaaatccaggacactacttctatcttggatgacatgctgcaaatgggtataaatcctaatatttctaccttcaggatgttaatagaagctttctgcaaggcaagtgattttggagtagcgaaggagttattcgagattggtcttagtatatgtggtcacaaggaagccttttatagtttaatgttcaatgagttgctttctggtgggcaactttcagaagctaaagtgatctttgaagttgcattagatagatcttttcatctgggaaacttcctttataggatctcattgaaaaactttg

SEQ ID NO: 48377 - DNA, 501 bp, Gossypium hirsutum
  Clone ID: LIB3825-002-Q1-K6-H3
ggttgtccaacactggcactaaacgagtcaagccccacggtctcttccaagtaagctctttttggtgggcgggagagctacgatgggcaaacatgaactaccgaacgtccgcctcccaagttatatgctcagcattgacgactttactgggtggtcaggctttaatagcaccgctgcaagggcatgaaaaggataaacggcatccttttgttgagataacaataaatgcaaactgtgatctattaaaaggacaccggcaactggtcacccggctgttacctaacgattcttgatctataaaaacatgtgagaggggaagaaacggtgatttcacttatatagatgcctatgatgactatatatgcgcttgtacagatataaaccccacctgttgaagctccatacccatcatgactatatgagtgcactactattgtaccatggacatataccgagaggtaagaagagaaaaacattggtacacgcaactgaataaacaga

SEQ ID NO: 48378 - DNA, 455 bp, Gossypium hirsutum
  unsure (1)..(455): unsure at all n locations
  Clone ID: LIB3825-002-Q1-K6-H8
ctcactnncngcaaagccacggcgccggcaaacgccgcnnccaagangggannannnggagggcgnggcccnggnccncaaagncngaggaaaagancaagcnnanccancnnnagnngcanacgagagcagcnccnnaagagngangnncaacnnnncaaagcagcgggggggcccgctttttttttttttccaggcgacgggnacaaannngncancgaagggggacaanngaccccgcggccaggcagcagnnncaaagnnncnncagnngcacccgganccagcnagcagcaacacaaagccagcaagcggngangganccancacacaaaannngaaggncacnaanagccaacangggaagaaancgnnggncangcgcgnaagganagcgnacaagacgaacaacanaagagnnnnggaagaaagacaaanaaacaannncccccaaa

SEQ ID NO: 48379 - DNA, 638 bp, Gossypium hirsutum
  unsure (1)..(638): unsure at all n locations
  Clone ID: LIB3830-001-Q1-K6-A4
gntctcttcagcagntaagttgcttctttcctttctgctactgttttcttctggtgtttcctgtagtgatgagattgctgcttgtggttctcataatatatctcgtgatcaatatccttcatgcttgaaggttcaagagaaaaggacctccgccttgaattgtttgcatttgagcttggtttctcatcctctacattatccgtataactttcatcatcaccgtcggtgccatccacaaccactcctttagttggcatgctcagtgacttgaacttgaaaagtctctgatcttgacaatctgcttcttttctccgggaagaccgtaactcctctatgtcatcaagatagacaactacttcctcacaaaactgaggcaaagtttccgaggaagatggtgcttttatcctttcatcatcatcctttcgtttcctagtggttgtacaaatccggctgatgttccggttttctgcttttatgtcatctggtggagaacaagtaagggaagcaccaatggtatcagaatttggataggaataagagtgacattggctgatcaaatgagtggcagtctttgccaatggatcaacttgtatgttttttccttcccttctcactaccatctgaatctgcaccaatgt

SEQ ID NO: 48380 - DNA, 663 bp, Gossypium hirsutum
  Clone ID: LIB3830-001-Q1-K6-D10
cggtcgcgtgggctgtgcgagttgggaatatcaaaagcctttgcatacgagtaatatatggagtctctccacaattgtgtattcgctttcatcctgtaaataacaactttctttcagttggcaatgcaaataaagagattactgtgttcaatttcagcacggggagagttattgccaaatccatcttcgatagtgaggttacctcaatggaccatgatcatactggtcatctcattttctgtggtgatgcacagggatgtatatactctgtaactatggactcccgcacaggtgcgttgtcccgttctcatcgttatagaagtagcagtaaacagaaatttccaatcacaactgtgcagtaccgaagtttctcgttactggctggtggcccagtgctgctgacatgtactaaagatggaagtctttctttctttagtgttgctttggaagtacaaggttacttgaccctgcgttgctcgcttaaattaactccgagaatacacagtattcgagcatccttctgccctctgctttccctcaataagggagaatatatagttgctgggagcgaggattcaaatgtctatttctatgatttaactcggccgaaacaacatgcgtaaaaagctacaggtcatcgttttccggttttagtagtagctt

SEQ ID NO: 48381 - DNA, 620 bp, Gossypium hirsutum
  unsure (1)..(620): unsure at all n locations
  Clone ID: LIB3830-001-Q1-K6-E2
gttaaatanagctggttcatgttccttcaactgtgactattttctcagtgggcaggaccttggaacaaaatgcaacacagcttcttcatcgttggcaatacgttgcacccaatcttccgaatgatgtatacccagtcgttacgatatcaacgacgaacgccagtgaaaatgggacaaagacggtccttgccacctttgtttcattgttccaaggtggtgccaatgagtttattccattgatgcaagaacgattcccggagcttggactcgttaaggaggattttattgagatgacttgggtcgaatctctattgtttatgaacggactttcaaatgaaacatcggagattttgctcgataggagcaacaggtataccattcttcctccttttgtcaaatcaaaatcagattacgtgagggaaccaatgcctgaaatagcattacaagggctattgctccaccttctagaggtcgacgaaggaggcacagcagttcaaaacttttatgcttacggtggaataatggacgaaatctcagagacagaaactccatttccacatcgaaacggcaccttatacaagataagctacgttatcgcttggcaagaagaggaaaacata

SEQ ID NO: 48382 - DNA, 641 bp, Gossypium hirsutum
  Clone ID: LIB3830-001-Q1-K6-E4
ctcgattctttatcgaagttgagaagagctaatgccgatacctatcgaggcaaactggtacaatctcgaacaatccgtgcaggacaatcgaaacaataaggaagtaaggtttgccagcaggctacatttgagggtctgtttagatggaggctatcatgttcttgatgagtccatttattacagtagtgatttcagggcaacatccaaattcttatggcctcctgccattggtgtcttggagctcgggatcttgaacgcatctggtttgcttccaatgaagtcgaaaaatggacgtggaacgaccgatgcttattgtgttgcaaaatacgggcctaaatgggttagaacgaggacgattgtcaacagttttgctccgaaatggaacgagcaatacacttgggatgtctatgatccttatacggttatcaccatcggagttttcgacaactgtcacttgcaaggaggaagtaacgctgtagattcgcaggaccggagaattgggaaggtaaggattcgattgtctacgcttaataccgatcggatttacacactttcttatccacttatagtgttggaacccaatggagtgaagaaaacaggtgaaattcaattgtcagtgagaattacatgctcatctacat

SEQ ID NO: 48383 - DNA, 595 bp, Gossypium hirsutum
  unsure (1)..(595): unsure at all n locations
  Clone ID: LIB3830-001-Q1-K6-G5
ggcactctagctcaagccatccaccgctcaatggagtcggagctgaggatgagtttgagcctgagcctgagcctgagcctgtccctgtctccgcccctaccagtggaaccacaagtgaaagctctgaccaagaggaggaagacaaaggcggtgttcgaaatgaagagatgcgtggtgagaagggagatggaaacagcatttactatgacaaaattgaaggcgctgaatccatcgatgaaacttatgaaatgcaatctgaaattacaaaaaccttgaccatggaagtcagtcatcaaacggtgagaaatgtagaggatcagaaaggctttggtttgagccctgccccggttgaacatttacatgaagaagcaaatggaagcttcaagcattttgaaaaagagccaaagtagatgccaatgttgacttaaatggagaaatcagagaggatttgtactgtccaaatggaagtttcaagaacattgaggaagagaccaaagatgctaacattgacttaatcggagaaatcgaagaggatttgatggacttagatgttgaaaggggttnntagagaaacaaaaacacatngatttgtact

SEQ ID NO: 48384 - DNA, 587 bp, Gossypium hirsutum
  unsure (1)..(587): unsure at all n locations
  Clone ID: LIB3830-001-Q1-N6-A4
cttcttcttcttcttcttcttcttcttcttctgcatgttgtttgcataaccttgtggtattaagtatgatgttgggataggctattttcatcctttagttttgacacttaaattttcaggctgagcagcttcttaaagatgagaatataattgctgnttatgagatactggatcatttctgtgaatttgtcaacattcaattatcatctcttcgcagacacaagtattttttttccctcttaacaacacttttcctcttttaatcacttttttcaagtttctgaccatgaactgaattggttgtcctgtaattgtggtattttagggactgccctaatgatatcaatgaatcagtttcaagcctcatattcgcctctgccagatgtgcagatctccctgagcttcctgcgattcgtaagctcttcggggagcgttacgggcataggttcacgacagtggccgttgaattgcttcctgggaatctggtcaaccgtgaggttgcccattctagtgctaactgctgatttttcttgcttgtgatcagttttttttttaatcatcaattaacatgaagaattttgataaaa

SEQ ID NO: 48385 - DNA, 575 bp, Gossypium hirsutum
  unsure (1)..(575): unsure at all n locations
  Clone ID: LIB3830-001-Q1-N6-D10
aataaaaagaaatcaaattcataacaatgtaattctacaatttttggcgcagtgactaaaattacacaaagcagaaaataaactaatctacatgcttttcatccccccccccaaatctggtctaccccaagtttgtagcattggggtcnnnttcccccctaaatttcctcaacatgtaactaaaagaaaaatatcccgcattacaaaatttgagttgaacaatgatcacacggcttactcatcaatggcagacaataaaacataggaacaattcaatactcaaatgaaataaacaaagaatgatcaatctgagcgaataaagccgattttccttgttcagtttaatgcatctatatgtatgtgtttgagagtgttttttttaccttatatcgttgtataatgtttatatattgcctttttaactcgtttttgctctcttccatactataacaacgccatacaggtctgctgaagccaaaaagttctccccgtgattccaagctactactaaaaccggaaaacgatgaccctgtagcttatttacgcatgtatgtttcggccgagttaaatcatag

SEQ ID NO: 48386 - DNA, 469 bp, Gossypium hirsutum
  Clone ID: LIB3830-001-Q1-N6-E2
agagaataagggggatctcacagagactaatctggtcgattttattaaaggtgattgatcaactggtaagaccggaaaatttattatttctaaaactgaaaacagaattaatggtttattaagtcctgaaattgcctaaaatagagtacttactggacaaaaacaacggggatgaaaaattattaagtcctttaatgaaaaccagggggaatgctttgttcatgcttaaaaaaatttttggaacaatcttcgtcttgacaaaaacaagcctatcaaaaatattcttgaaatatttacccccccaaatgcttgcttgcttaaaacttggcttgccaaaaaaattattgcttcccaaatcgaaaactctggaattaacaaacccttctcggggagatttcaaaacaaaaggacccatgtagctataaaggttgctcatccagcttatatacccttggaaaatattggtttc

SEQ ID NO: 48387 - DNA, 582 bp, Gossypium hirsutum
  unsure (1)..(582): unsure at all n locations
  Clone ID: LIB3830-001-Q1-N6-E4
gatcaacaacatacattcattttatatggaagatataataagtccaaaacacacacagagaccaaagtttgacagtaaatgtaaagaatttgcattactttcttccaacatcgatcaggtcccttgtcctcagtctcatatcatactatcggttcnngtggcaatcttttgaagaagttttggggcattgaaggaatgctccttcgacaccgaggatgtctcatcccgaaaaacccgaatcctagtgcaaataagcgccaaggaaccaaatagaatgctatgcaagctattaaacaaaatgccataaacaatgaagtagctctgggatctctccagcttagcatagaattaagcctctcagcttgagttgccaagtctccgattatagtcatcatcctccccgcaatgcttctcagccgatcatactctttttaagaactttcacgttttttgaagttgggaatgtgtcgaactcctcatcgaaatcatcggactgcacggactcaacgagtgacaacttagtatccatgtgtggaggatgtcttggccttttcctgtactgtgaagctncatgtacaacac

SEQ ID NO: 48388 - DNA, 496 bp, Gossypium hirsutum
  Clone ID: LIB3830-002-Q1-N6-A10
gaactcatgagattaggcaagtcctggtcatgcttttcgaccagaatcaatgttattctaaaatcttccacataagatcttccacttttattttgtatgtgagaaaccttctttggtaccagatttctttcatagagcccttttggaacgcaactacgacagaaaaatttggatcttcctctttgatcaggacaaaatccaacattttgaagggatggaaactcgacttcaaatgggcaaagctatgctgactcaacgagagaggcattgccctgataaagaattacatcgttcgcactgtaaatttctgatatcgtgctgttgtgcaagttttattataagaatcaaggtataccctggtatgatcatacaaagacatctttgaactctagaggcaactcaacaaggtcttgcttcgtctctgtggtcaggtcaattctagtattcaccaagctcacaatttctaatgattccttgagaggtaggatctgtttat

SEQ ID NO: 48389 - DNA, 480 bp, Gossypium hirsutum
  Clone ID: LIB3830-002-Q1-N6-B3
ttgttttttttttttttttttttttttttttttttttttttttttttttttttttttttttttttttttttttttttttttttttttttttttttttgggcccccaaacaggttttattattattttaaaaaaaaaaactttttatatggggggggagaccttttttttaaacaggaacgggaaaggccccaacattgcccaaaacaaaaaggcccccaaaataaaaggttcttggtggcccaagcccataaacaaatccaaactaaaaaaaaccccccaccgggactttttaaattccaacaaggttatgttaccacgggccccttttttttgaaaccccctttcccaaaatggggcccgaaaaaaaaccctcaaagggcccttttgataaacccaaatgaaaaatcaggggctgaaaaaaaaaacccgaaaaagcaaaaactttacccgggccaaaaacagaaaacggggatggcttt

SEQ ID NO: 48390 - DNA, 571 bp, Gossypium hirsutum
  Clone ID: LIB3830-002-Q1-N6-B5
acaaaagatactcggattcctagtaataatattatacaggctgaaaatgtagctttctacagaaaactatggggtttacacatcccttagaaaattaaagttacaatttggaaagtttcctggaattatatccctacgcttgctaatcttaatccgctgccttttacaaataaagtctggtgtcccagatgtcaacagtttgaggaccatccccctcctctctcttagaatgtgtcctacaacgacgaaagtttggaggtatttagatttctcttgggtgcttaataataatattcagggcatttgggtgtggtttacttgggtcttcaatcgaggaacaagagagcagtgcagattgttttgctgtgggctttggcttatctggtcaaacagggaccaattgctttatgaaagtaaaaatagaacaagcagagagatctcacgataaataagcagttatatctcagagttgcaaagcttagaagagaaactacttatctctgatataggaagggtttttactcatgaagattggtgacgagggtagtcatttcttttgatggggcttttg

SEQ ID NO: 48391 - DNA, 545 bp, Gossypium hirsutum
  Clone ID: LIB3830-002-Q1-N6-B6
aatatgtgtgtgtatatatatatatatcaattagatttcatctcaatatctacatcctcattagaaacaattccagagtcatcctcaggaaggaggccaagtagcggcaaaggcaacaatgaactgagattgcataggattatcattaggtaagttgtcaaattatccttggttacaccaaacacctgggtgagtactgcacctaactgtccccctacaaactgcctccgtttgatatggacatcaaagttgcaaacagtgttgcttccatcccttccggacatagcttggctgcaagtacaagaaccggcatgaaagaaacctgaccaaggacagttagaatcaatgaatccccaatcgcaaaccactcatcacttattcctaactgccggttcaatccagttaccagcaacacctgagtcattccaaaggctgtaccgataattgttgtggcaagaaaaatcttccgcaatggaactctttttaaaaatccattatacaatccaactccgaccaatgatgcaaccgaagtgacaagttttaca

SEQ ID NO: 48392 - DNA, 631 bp, Gossypium hirsutum
  Clone ID: LIB3830-002-Q1-N6-B7
agaaaagaaatcctaacatggcttgataactgaaatgcatggaagagttttttatcatctaataaatgatgcagctcagcatttgatcatatgaagattgcaaaaatatgaccttttgtaattgaccatggggaagcaagagtggtaattaatcacctcgccttctggttcatcgctgcgcaatctaattgatgccattacatcaaatccccctttttcttcagttgagagatggttcaacctttcatcaagccctgacaaatgagaactacttaataaatcaatcagactccacgaagatctccacatctgccaaaggttcaaaagtttttttctctattgtgtcaaacactataagtccactaattctctggactccgagtttagttgcaaccaggttcaaatggaaatcagtggaaccgaatgcctccactgctggtaatgccattgtctgaagaccattgaacataacaaacttctcgtgtgcactattttttgataaccagacctcaaatgggcccaactctctgtctgtatggtttgtgagattcagatgtacagagaagggcttatccaaaatgattaaagatggtatccccagaacttgcagctcaatctctttgcaactact

SEQ ID NO: 48393 - DNA, 584 bp, Gossypium hirsutum
  Clone ID: LIB3830-002-Q1-N6-C4
aacacatatttatatgtgtatatatccaaccaatatcaacttatcatcttatttacaatcaatccacaaaaatgattaatatttagacaccctaggtacatgccgacacaaaaagaaaaacatcaccacgtttgagtttgggatcgttgttgttcctgttttggtaaaattaagtacctaacctggaagaagtagctgctgccatggcacatttcgaactagactggagatctttggcaggtttcgattctgcactgatggcaatcttccccattccaacctccattgcctctctctcatccatctccgtcttctttttctcagatacattagcgtccacaactcgactatgcgatgaagactttgatggctctaaaagtcgagggcctgcattgatccatggatgttgaaggcactgagtagcagtgggacgcttttcaggtacaaaatcaaggatgggaaccaggaagtcggtcatttcatttgcatcttgttcgctgaactcgtacttctcaacagggaccttattcaagggccagaaacgcaaccttcgtatgtgcctcaaatcaccatatcgattaaat

SEQ ID NO: 48394 - DNA, 445 bp, Gossypium hirsutum
  Clone ID: LIB3830-002-Q1-N6-C7
attatctaactgtttttttcacattttttttttttttaacaaacacaaacttttttaaaactttttgcgttcacgaacagacaagcggaaaaataaacaaacgaacggggggaggaaaacttttttttttgactcgaggaaggaaaaacccaaaaaaccaggcttgcgttaaaaacaacaccaccccccccgggcctttaaaaacaaaaaaccgacagaaaagaaaagacccgaaagaaaaaaaattgaacacaagcggatcagcaaccaacccttgtgacctgaaaggggactcaccaacggggggggggggaacccaccccgggaaagaacaaaccagttttctttaatccccctgcagagagaaaaacaccattccaagactgggtgctaggcgggcccacccccatttgaatgtggaaagagggtttatgccccgggggaa

SEQ ID NO: 48395 - DNA, 538 bp, Gossypium hirsutum
  Clone ID: LIB3830-002-Q1-N6-D5
gtaagggcttgttgagcacatgttttattttaatgcacagaactaaaacataatgaatttctttactttagaagaatcgattctgtgttttgaatataatgatgccaatggcaggcaatgaaaagagttgctgggtctggaccagaggagttccccctcggttttcacgggcgaccatttccgatggcttttacagacagttctagcctcgcccagcctctccatagtacccaacttgtaatcaggcactgaatcccagaaagacattattttctgctttgctttcagtctcagtccatcaattgttccagggaaagaagcctctatagcattcttaaaattatcatacaagtttattctgtctgttgtcccagaaacaagcttgctagcattcggcttcttaagaaaatcgagaacgttcaataaatttctcctgctaacatagttctgtgtaatggcaacagattcttctaggttaatcactagatgccaccatccatgttgcacaaagatcacttctgcagccttacaaatacac

SEQ ID NO: 48396 - DNA, 574 bp, Gossypium hirsutum
  unsure (1)..(574): unsure at all n locations
  Clone ID: LIB3830-002-Q1-N6-D6
aacttcatcaggttcaaggctgactcgaaatctaagccataaaaccaggtacaattgaagtttagcagacaaaaatgcctttgatagcaaaactgaaattatgaacgtgtacataagattttgacaaggatactccattacttatttcccctcgcntttaaaatagtatacttcccctactcttcatcatcgtcatattccgcccccctgctctcaaagaataaaacgaccagattctcagtgtagtgcaaattatgggaactttatggtttcaatgatgacgatgatgtttacttctgcgctctaaacctgagttagaataatcttcatatccgcatgatgatgaaggcttatgccgactcttttcacctttaagatgtctataagcatcatcttcagatgaataatgatgcttaagtcggtacttttccctcctactattatgcctaacaatgtctgaatcttctgagttgtaaggcttttgcatagtctttttcctaggctcatgcctacagcagtctgagtcttcggatgaataggaatgcttgtttttgcttttcctatcatgcctatg

SEQ ID NO: 48397 - DNA, 449 bp, Gossypium hirsutum
  Clone ID: LIB3830-002-Q1-N6-F2
gttggttcttttaatgaaaccaataaaaaaaccagggacccgggccaccgaagccaaaagccaggaaaccggaaaacaacacaaaaaaagggggggggggggggaatttccccctcaaataaagggggccccggggaaaaaccaggaaaaaccggacgggacccgcccgccccccaacctttcctaaaggggggccgaataaaacctgggggaaaaaaggggaaaggcgggccccgggggaaaaaggggacccgccacaaatcccaccaacaaaccggacccgaaaccaaaaacgtaaaacccggggggcccaaagggggagccaacccaccctaaaggggaaggacccaaccccccctatccaaacgggaaaccccgcctgcccactggcaaaaagaaaaggcccaaccgccgggagaagcaggcaaccgaacgggccgcgggggggg

SEQ ID NO: 48398 - DNA, 219 bp, Gossypium hirsutum
  Clone ID: LIB3830-002-Q1-N6-F4
aaaccaaataattactacaccatataacaaattatacaatatcatgacaaaccacataataatttccatttgtcgtgtttattacaagaatctttagaggggttgtagatgttttgggggtcctcaaatctcaaattggtccaccaaattcctcattgattattaaggacctaataaaagccgaataggtttaacaaacacattattgtagacccatac

SEQ ID NO: 48399 - DNA, 364 bp, Gossypium hirsutum
  Clone ID: LIB3830-002-Q1-N6-F6
ggaaaaaagaaaggccattgggttccctggggaacccccgcccccagggggacgcgccccccccccctcccctcccttttggaaaaaccaacccggcaagccggggccccgaagaagggaccccccaacccccccccccccctgggggggcatcgcccaagaaggggggcctttctgggagaccaaaccttaccgggtccctctttcggggggtcttcggaattttttcctgcggcccccccctcaggggccaatctctcccccagggccctagcccccctttctcttttcccggagcccccaaggggggcagaacccattaagggggccccccccccgggatacccccggccctggggggggg

SEQ ID NO: 48400 - DNA, 547 bp, Gossypium hirsutum
  unsure (1)..(547): unsure at all n locations
  Clone ID: LIB3830-002-Q1-N6-H1
aaatgtgttattatttttatggtttaataaaacatatcttgttcaagttaaaacttgtcacattaacataaaatcgaagtgatatccacagaaatgaaacttgaaaccctaataacattcatttctattttgtttgccttatatcaaactttnctcctttacaaaacttgttcctcaaatccagctctcgggccagatgcgttttgctcaggtagaatctttttgtattcagcaagcagtttcggaacatcattcatccgtagctgagaaacatttttcaagtgataaaacttgtaagcttcttttcccgataaccatgaatcaatagactgaaaatcagatccactatttgctaaatgatgacgcgaaatcagtcgttgatagtcacgaagcaaaggtccaagctccttcagtggtattgaacttggcgtagatctccgccaatgatcacgaagcaactcaattgtctgattgagcaaaccctggttgttactaggaactctntctccaatcaaccttgatcctagttcaatgaattctttgtctt

SEQ ID NO: 48401 - DNA, 183 bp, Gossypium hirsutum
  Clone ID: LIB3146-046-B4-F4B
gctggtgctcaggctgtcagtaatgtgcttatgttttgcactactactagaataaatttgacagcctgttgacttatatctacctaccgctgttttcttatgcatctcctatatattgtgcgtttgctatgtgtgaaattctagtgtaataataaataaataaataaagtcttattttgtcct

SEQ ID NO: 48402 - DNA, 444 bp, Gossypium hirsutum
  Clone ID: LIB3149-025-Q1-K1-G3-F2A
gggagtaagttaaaatcatcttataattccaaattcaaaattttacaaagcaaacaaatcattgtctaaataggattgaaggcagaaattacttattctcgaccaaaggtatctgccaacacactaatatagtgaaaatttacacttctgtggtaccactaaagggggtgactgaaaaaaataagccaagaaagaatccccaaaagctcctataacaagaactctcaaatccccccctctagaaaaaaactagggttttcatctaatgtgatatcactaagctggtaatatttcccttgatttgcagcatcatcaaaaagccatttctcaagcaatgaaagttggggactaagatctggctttgtttcatcttgcaaactaaggcttgcctcagttgatatggattgtgagaaatcatctgaatttgaagaatcaaaagattca

SEQ ID NO: 48403 - DNA, 446 bp, Gossypium hirsutum
  unsure (1)..(446): unsure at all n locations
  Clone ID: LIB3272-035-P1-K1-D12-F2A
aaccccaaactttccttccttatttttcttcattaataaaagctggaaacgaaatgaagctaagagagaggaacaaagaaggtaaaaaagaaaacacttagaagactgaagacagttccatcatctgattcatctcttctacttgacctgaagaactctcatcaaaaagccacttctcaagaaacgataatggcggattattcttattattgttgttgttgggatgatcaactttttgcttcttataattctctggggccattgcaacattgaccttgtnaccaccaccaccaccaccatnatnatcatcatcatcatcatcaccatcatcgtcatttcctgaatcttgacaagcaccctttgatgtagattcacaagtagacttgtcccatacaacattgttaatgttctcaaacgataaaatcgacttaaactcttcatgggag

SEQ ID NO: 48404 - DNA, 643 bp, Gossypium hirsutum
  unsure (1)..(643): unsure at all n locations
  Clone ID: LIB3543-044-Q6-K6-A6
cggccgcgtgggcgngatcggagtcctggcaggtttaatagtgcttctggacgtgatcattccccagtgctcagtttccacgagctgatgatgaaacgtaatcagcagtagcagggaaggtctggatatgctgatggggcctcgtacatggtttcagggacgagtaggaaggcaatgatatctccaggtgataactaatctcttttgacctcggaattgagggattttggtagttatataaagacttaagatgctctcttccgtcacggtttttgttttgttcgtgctgcatacatgtgtagggcggtgtgcagtggcaaggcaaagtgaatttttttggtatgttgatttgatttctaaagcttttagaagatgagaaatcagtcaaagttgaaatgcaaaaagtaaatgaggagaagaacctttttttttattttttactttttgatgttttggattttgttgtgtagttcttaggaaatgtgttaaggatagttataactatgggctgtaaagtttaaaggctaatttcattcaagtgctttgccagcttgctttcttattgggggtgggggtgatttggtaatttaccttcaaagggtgagatggaacgggattgataccaatggaaagttgaatgaaa

SEQ ID NO: 48405 - DNA, 621 bp, Gossypium hirsutum
  unsure (1)..(621): unsure at all n locations
  Clone ID: LIB3543-044-Q6-K6-B6
gnaaaaaaaaanaaaaatagctttcacaattattatttttattatttgatattttctctgtgcaaaaccagagaaattgatgagaagaagaagaaaaagaaaaagaggcatgcaagtgtggaggctactactacactatgaacgcaaaggcgagcttcgatcgcgacttagcgaaaacgcgaaagtttcttctccgaaacgtttcagtgatccgcatgttcacgagcggattcttccgcagtaaatggcgatccattgctggtaaacgtcgcatcttgagcatggatgctcgagagaaatcgagatccacgatactggaatcatcgaaagataagagggtgcctatttttgtaatgatgcctgtggatatattcactcttgatgcctctgggtgtccaagaattagaaaactcaaggccttaactgtatctctaaaagcactcaagttggcaggtgttcatggaattggagttgaagtctggtggggaatagtggagcgtttctcaccttttgactacgattggtctctgtatgaagagctgtttaaattgatttctgattcagggctgaagttgcatgttgctttgtcttttcactcaaatattcactcaactcatggaa

SEQ ID NO: 48406 - DNA, 586 bp, Gossypium hirsutum
  Clone ID: LIB3543-044-Q6-K6-B7
cattgataaaatctcttcaactttcaagtccctaaaaacccctttttttctcttaaatttttcgttgttctttttcctgttactgtttgtgtttttttcctcacatgatgagcaatttacaagattggcctgaaccaataatccgtgttcaatccttgtccgaaagtggtttaccaatgattcctgatagatacgttaaaccactttcagatagaccatcgtcaaaccggcccgaaaacggcgaaaacggcgacgctaacataccgatcatcgaccttaccggtttaaccgacgacaaaaccgagctatctcgatcaacaatggaccggatttcttcggcgtgtcgggattggggttttttccaggtcgtaaaccacggcgttagccctggtttaatggaccaagctcgggaaacttggcggagcttcttccatttgcctatggagattaaacaagcttatgctaactcaccaaagacgtatgaaggttatggtagtagattagggattgagaaaggtgccattcttgattggagtgattactattatcttcactatcttcctttaactcttaaagattcaacaaa

SEQ ID NO: 48407 - DNA, 591 bp, Gossypium hirsutum
  Clone ID: LIB3543-044-Q6-K6-C7
aactcttgagctaaaagaggtccttacagccgagccatgtgggatttcagttttcaggctagatataaggttgttctaaatacaaagagcctttccaccgaactaaaagtaacaaacacagacaacaagccatttacattcagcactgccttgcattcgtattttcgtgcatccataacaggggtatccgtgaaaggtttgaaaggttgcaaaactctgaataaagatcctgatcctaagaatccgattgagggtagggaggaaagggatgccatcacttttcctggatttgtagattgcatttaccttgatgctcctaatgaggtgcaccttgataatggcttaggtgatgtaatatccatcaggaatacaaattggtcagatgctgttctatggaacccacatctgcagatggaagcatgttacaaagattttgtttgtgttgaaaatgctaagattggaaccatccagctcgagcccgaacagtcttggatagctaaacaacacctcagcattgcctgaattcctcgagcataggttgtacagtttccaaagtaaatggaataagtgcagtcccttcttttgtttttg

SEQ ID NO: 48408 - DNA, 630 bp, Gossypium hirsutum
  unsure (1)..(630): unsure at all n locations
  Clone ID: LIB3543-044-Q6-K6-E8
ccccgcgtccggttgtttttcatcagcatgcatgaaacgacggcgtttccttcacctcttctcctctcaaaatccctctctcacaaactccagcttttcagctcaccggaactcgtcacttggcgtttcaactcattgactcgctcaggaatcgcttcaacaatgtaaaacatcactcgactcagttcaatgtgtcagctcagtccgagttaggagttcgctcgagtaccagaagatctcccttgttatgctttgcatcggtgtctctcgcagctgaaaaacaaagcattggtagatcgcctctactgtattccgctttcttgtcgttgactcaaccggactcgacagagtcgactcaggatggacatttggcaacggcaggtccgttcggcgaggagagagtcctagttggtgaggttctggttaggaacaaagatggagaggaattggagaggaaagacctcgaaatggaagctcttaacgcgttgaaagcttgcggagctaactcagcattgacggcctgngaggtacaagaagatgtggaccggatcattgatagcggctatttctcgtcntgtatgcctgtggctgttgactcgcgggacggtattagattggtgtttcaagttg

SEQ ID NO: 48409 - DNA, 629 bp, Gossypium hirsutum
  unsure (1)..(629): unsure at all n locations
  Clone ID: LIB3543-044-Q6-K6-F3
agtctctaggactcagattcaagaaaggcaagcaagaattggaaaagggaaagagatgaaaggaatttacttaggaacatttgatactgaagaggaagcagcaagggcttatgatgtagcagccattaggctgaaaggtgcaaacgccatcaccaactttgatatctttgaatatgatttgatgaatattcttcaaagctcaaagctacccattggaaaaggagcttccaagcttttgatgaagtcttcaatggaagatgtcattagaaagaaaaagaatctcattgggaaaacctcatttgcttgttttgaagatgatgatggttcagccaaccctgaaattgctcaaggattcaacagctttggaaatgatatgaacattgatttcaatgggattcaagcaatggaacctgttggattcccaatggacttatcaggcatggataataatagccagcatcaaaattcaagctttttccctgttattaatggttgccaaaacccagttgagttccagggaaattcttctgggatcttcaatggaggaatatcttttccaggtaaggnngatgttgaaactgatgattttcagacaaattttgacaactttcagagtctgttaggtcttg

SEQ ID NO: 48410 - DNA, 420 bp, Gossypium hirsutum
  Clone ID: LIB3543-044-Q6-K6-F7
ctcataccctactgttagaggatttacagcaattggaacaggtggcgatgattttgtgcaagctatggttgttgctgtggaatctgtaatacaacagccgattcctgagggtcgggtgaggcagaagttatcatctagggggaaatatgtatctgtcaacattggtcctgttcaagttgtatctagtgaacaggttcaagccgtatacaatgccatgaagagagatgatcggatgaaatactttttataatgtgatatgatcctcattcttgttttgagttgaatgtgatcatgtcgaggaggtatctttatcctggttggtctgtatttttaaccaaaaggcattctgatggttttattttatgttatattatttgtatatgatagtttatttattaatcatcattgaggccttgacat

SEQ ID NO: 48411 - DNA, 204 bp, Gossypium hirsutum
  Clone ID: LIB3543-044-Q6-K6-G1
aaataagttgaaccaaattttcacatgagattcttttaagatatgaagaatgaagctcccacaaaaaaaaaagccataaaattgctccccatgtatctttaccatttgatgtatgtatgcatgcaaaagaaaaaaaaaacaggctgttttagcttgttataaatgtgtaaatatacagttcccagttgttatgctgttttattc

SEQ ID NO: 48412 - DNA, 506 bp, Gossypium hirsutum
  unsure (1)..(506): unsure at all n locations
  Clone ID: LIB3543-044-Q6-K6-G7
cccacgcgtccggttgtttttgatacagcattgcatgcacacaacgacggagcatgccttcacctttcttagcgctaaaagggcctctctaacaaactccggctttatagctgacgcggaacctcggactaggggatgcaactgattgcactcgctcaggaatgggttcaacaatgtaaagcatcagtcggctcagaccattgcgcaagctaagtgcgagttaggagttcggtcgaggtccagagatctaccttgtatgctgtgcataggtggatcttgcagctgcataaacaaagaatggtggagatcgcgctgtactgaattacactgtcttgggatggactcaaccggactcaacagaaagtactcaggaaggacattggggaacagcaggaacagctcggcgaggagagagtcctatnaggagaggtgctggttaggaacaaagatggagaggaattggagaggaaagacctcgaaatggaagctctaaacgcgtggaaagc

SEQ ID NO: 48413 - DNA, 637 bp, Gossypium hirsutum
  Clone ID: LIB3543-044-Q6-K6-H5
cgtcgtccctgtaaccccccatgcgacccgcctcccaaatcgaagttcaacctctcaccgctgtccaatccaagcctattccccccaaagaccttttatccactgccaagcgccgtcgcgacgaagatgaccccacggccgcctacgatacaggcgaatcggctcccaaacgacaggccaaagcccaggacgtcattttccgaatcgttgttccttcgaggcagatcggtaaagtcatcggcaaaggaggtcatagaatccaaaagattcgtgaagacaccaaagccaccatcaagattgccgatgcaatcgtccgacatgaagaacgtgtcatcattataagctctaaagattgtgagaacatggtttctgatgcggaaaatgcacttcaacaaatagctaccttaatcctaaaggaagatgatggtagtgcggaggcagcaaaggtaggtgctgtcagtgcgggacatgttgctgcaaatacgataagacttttgattgctgggtcgcaagcaggcggcttaattgggatgtccggtcaaaacattgagaaactgaggacttcctcaggagcctctatcacaattcttgctccaaaccagctgccattgtgtgcatcagcacatgaatctgatcg

SEQ ID NO: 48414 - DNA, 427 bp, Gossypium hirsutum
  Clone ID: LIB3543-044-Q6-K6-H7
tccactcgtacgggacactacatgaggtttgtctggtggatcattatcagctaaaagtctagagacatgttgttgtgaagattgcatgtgtcggtgatatgcaaaaagacgataggaaggaaggctcgatgctaagcctgcataactaccccattgataactgtgaccttcaaacgttgagtgtcagcgcccaaaatagagatcttcatctttggtatacaagacaagaacaatcacggacactcaaaacatatacccatgaaggctatctatgcattatcctaactcagcccttgcggaaactgaatcgttacatggtctcttagcagagtgcttacctttatcgatttgaagctccgattgccgaaaaactcacaccaagatatctaacatgcccagaattaaagagaaagatgcttacaacctg

SEQ ID NO: 48415 - DNA, 600 bp, Gossypium hirsutum
  Clone ID: LIB3543-047-Q6-K6-A5
attcctatgaaattgaaatccctgttgagtgtagacagtgcggtggagatagagggaaagaaaggagtcaatacggggagtaaatatgatgcaatagttatagggtcagggataggagggcttgttgcagctacacagttggctgttaaaggagccaaggttttggtactggagaagtatgtgattccaggagggagttctgggtattaccagagagatggatatactttcgatgtaggatcttctgtcatgtttggattcagtgataaggggaatctgaatttgataactcaagcattggctgcggtcgggcgtgagatggaggtgattcctgatccaactacagttcatttccatctaccaaataacctttccgttcaagtacatagagaatacagtgaatttatcaatgaacttatgagtaaatttccacatgagaaggaagggatccttaaattttatggcgagtgttggaagatcttcaatgccttgaactcgttgcaattgaagtccctcgaggaaccaatctaccttttcggacagttctttcagaagcctcttgaatgtttgacacttgcttattatttgccccaaaacgct

SEQ ID NO: 48416 - DNA, 643 bp, Gossypium hirsutum
  Clone ID: LIB3543-047-Q6-K6-A6
cccagcgtccgatttgatatctgctactgtaaaggactgtagtttgatgattagttttagaccaatggttgatggagatgtgctatctgaatcttctcacagtactgtatatctaggatcaactaagcaagtttttgagtacaaggtgtatttcattgatctggatttgaaacctttgaagaaaatggaggactattacaagttagataagaagattgtcaactgttattgtcagatggcaaaaactgagcataaaaggtgataaagctgctagaagggacacatatgaagaagtattgacataaacgatgtgctttaaaagacattttcttttcctgaagatttgtactggagtgtggattcattccatgaccagcgggagcttcacaagagagaaaaagagaaaatgataagactgcaagggtttgggctaacagggaaaatgatgtatcaactatcaaccacttaccgccattatatcatgagcccgcacagccaattaattcatacagctggatattgaaattactgtttttagtggaagctttgatggtattttatggtgatgaaaattgaagttattagcagactttcttaaatgcactcttcctttgaagcttatcaaagcagaatattttttgtg

SEQ ID NO: 48417 - DNA, 629 bp, Gossypium hirsutum
  unsure (1)..(629): unsure at all n locations
  Clone ID: LIB3543-047-Q6-K6-C8
ccccgcgtccngttctgcaaaaaatccgatctttttttttctgcaaaaggtgggatttgtgtttttattttggtcttgtcaatggcggaagactttgcaaaggcagtggaagatggtttaaagctagcgaaacggatatatttaggtaaagacaaagcagttatgacggcgccgaaaccgccgtctccacctgttcaaggtttagccgattattacttaccatctgcgccgatggtttacgcggttatatccgacccggggtttgttgataacccagatttccctagttatcagcctcacgtgtacggcaggtgtgatccaccggctttgattccattacagatgagtggggttgatcttgaagttaattgttatggggatactgcttttgttcaaatttctgggaaatggagggtccattgtgttatgggtagtcattcttgtgattgtcgtattgctgtccctatgggaaaccagggttcaattctaggtgttgaggttgatcttcctaagaaatcctattctactgaactagtaggactagaagaaagtaagtgtatcgaaaagatagcgagaccgcaagatggtggttttatgaagccgcatatattcatgttaacgataccgca

SEQ ID NO: 48418 - DNA, 634 bp, Gossypium hirsutum
  unsure (1)..(634): unsure at all n locations
  Clone ID: LIB3543-047-Q6-K6-D9
ggtatatttcttgctttatgatttgntcaatgagagaggaattgattggaaatatacaagttccattcttttttcataatgtgggttgaagggtgcttgtcagtgcagtgaatttagagcttgttgtgggtagtgtagaggggttttaaaaataatccttcttttttggtaccttgagaatctgtgttgctttatctcttttttttcggaaaaagaagggcgggtttcaaagatgcccatgtttcaaccctcaaagacggatggggtggttgttgctgcatttgatggtagtggtgatgggcaagttctggatctggatactgctgttaaagatggggttttgggtggtgttggtggntggagtcattggtgctgccgttggtgagaaattagatctgaagaaaatgattgaagagcttgatttacctgagattccttctgtgtttatttgtcccatctctcttgagccaatgcaagaccctgtaactctttgcactggccaaacatatgagaggtccaacattctcaaatggttcaatttggggcactatacttgccccactacaatgcaagaactctgggatgattctgttaccccaaatagaaccctttaccatttgatttacacttggtt

SEQ ID NO: 48419 - DNA, 621 bp, Gossypium hirsutum
  unsure (1)..(621): unsure at all n locations
  Clone ID: LIB3543-047-Q6-K6-E2
cgcgnatcatttatttttntctcaataattatcttcctctttgtttggtagaactaattgcagtgatgaacaattattctgtgtaccagaggattcatctatgacggtaacacaatccctctaagaagttctgagctcacaaaaatccgattcttcctttaaaatttttaaaaaatgtcttcttttttaatttttttaaaagaaagggagaatcaaaagcgatgagatgatagaaactcgtaattcactgatctaataatttgatgttacattgaagttccgacaggttctgatcgctttttatttcccctcttttttttttgaaaatttagggttttttaacttgaaatatattctgggtgtctgatgaatctcaattgtttaatgggtaatttgggtctgaattagtatttctttgatggtaaatcagcttggagacatgatacccgcttcttttctttttttttttactgttttttagaaatattattagctaaataataccaaatcttttgtttagttcatagagccgtttatcaaatttaatgatggctatgcatgtattaatcatgttttagatgctttcattgaattgcatgctattaattagaacattattat

SEQ ID NO: 48420 - DNA, 364 bp, Gossypium hirsutum
  unsure (1)..(364): unsure at all n locations
  Clone ID: LIB3543-047-Q6-K6-E4
gtttccttttccagnagnanaaaccanacccttttagggtttcctcaaccctcatacgccgccgcttagcctcgcgccaaggttccgattgcgacggagatagcgccgactcgacgaatctggcgagagaagtgtacgtgcgcgcgtagggaggatcagctccgagacgtacgtcgcatggagtccgctggaggcgttgcggctagggttgctgcttctgcatgtttgctttggaccatgctaaaatcggtcctgggttttgggctggttaatgatattgggcttgtaaaagaaaatggactctttatttgggtttttttgttcattatttttatatgtgggccaggcaaataattggtattac

SEQ ID NO: 48421 - DNA, 637 bp, Gossypium hirsutum
  Clone ID: LIB3543-047-Q6-K6-G5
ccccgcgtccgataatccctaacctttctattgtagaactcactgtttcagtctttgtttgaaatctattgttgtgggtctgtctgtttctttttggttgctttgtcggagactgatttcagaacgaacgattcaatcagatcgagttttgggcttggtgagcgttaaacgcgccgtcgcatccgctcccaaatgtagaaaatcgccatcaatggaattcataacgcaatgcaaaccaagaacgaatggttcaatcagagcgggtttcgggtttagtgagcgtcaaatgtgctgtcgcttcggctcctaaggtgtggaaaatcgtcttcagtcctgtatgtgtagaaaatcttttcttgtttttgcctagcagaatattttttgtaatatccgctgaataattttcctctctgtttttagttgatataattttcttttcttgtttttgcttaatagaataattttgggttttggtttttttgggcctaaatcactcttagatttcggcttttcatttatatttttgtcattatagttcattttccaaataacatgacactagttccattgctctcaagactcaggaaaatatctgtataatatttttgtaatttctgcttagcagaatattattcct

SEQ ID NO: 48422 - DNA, 257 bp, Gossypium hirsutum
  Clone ID: LIB3543-048-Q6-K6-A3
gcgatcacagccaaccctataaagtgtagcatacagggaaggcgccaaacaagaaatcgaagatgatattgtgcattaccaccgattatattccgacacaaaaagtgccaccactgcagaaacttccttttcctacacaccactaccaaacagaacctacaaactcttaacctcctcttcatcttcttacagaacgttgaaaccatgcatgagaggcaagatctttaagagcaccaaccagccagtgactcgcaaaa

SEQ ID NO: 48423 - DNA, 644 bp, Gossypium hirsutum
  Clone ID: LIB3543-048-Q6-K6-A5
gacttgaaaagactgttgagagtgttcctttgcttaagccttcaatggcgaataagaaccgatcatcaccttcttcagcaacacccaaactcatggaagccagtgggttttctctaatgaatgaggatcttcttcgaaacatactttcaaggctacctgccatctctttcgcttccgctgccaccgtctctaagacttggaacgctgcttgctgtcacatcctctcgcgccctaagctctcctccgccatctccctcaagcctttgcctcttgttgctttacaagaagtttttgacaaggttatgtcagaaccaattcgacctcattttgctattgcaagtgttggtcctgggtttgaaatcaaagatgttctgcaatttatggtagaaaaagtgcgatcaagaactccgattattgtatcttctgttaaaggaattcttggacgagatgcactttctcatgaatttagagaggttaagtggattgatggtaatattgatgaagttcctgtaaatactggcatcgtattgactgttggatttgttccgggactcaaagtcgatgtgatccctcttttacgacagagaaaggcacctcaagggtcaatgattgacaagttcgtgctggatattaagtcttacaca

SEQ ID NO: 48424 - DNA, 527 bp, Gossypium hirsutum
  Clone ID: LIB3543-048-Q6-K6-A6
cccagcgtccgcccagcgtccgattgctcctcaggaagatattccctcccctgtaagagaaaatacccacattcctcagtgcaacacagaagaggagaaatatggtgaatgtgactgttatatggagaggaaacaagtatatggtggaaatggattctggtgcaaatctcaaggagctaggcgatgagctgcagaagttgactgatgttaagtcggatactatgcgccttattgttccccaattgtcgggcaaaggctcgcgaatgcttcaccctttctcagatgagcattcatgcttaagtttgcaagaggcttcagttttcatgggaaaatctgtcaggatgatgggggtatcagaggatgaagttgaccgagttatacaaaactcgaaggtagacatgagaataattggattcagtgaagaggaaaggagactgaggcagcgaatgtcagatggaccctccaatgttccaataagacttcctcaaggaccttatatcttttgtgattttcgcactcttcatatt

SEQ ID NO: 48425 - DNA, 645 bp, Gossypium hirsutum
  unsure (1)..(645): unsure at all n locations
  Clone ID: LIB3543-048-Q6-K6-B5
gnacaactgagnacagtggaactccttttattccttgtctgctcatcttcatttgagatatattcttgtctcgggttggtgcaggtttcttcaccttttatcctgaggtcttgagaaggagaatgagcaacggaggattatccctggagctaatgttggtggaccttggaggaggctaactgggaaatgtttgaaaatttttgaagttggtgatggatattttggcaagagggatgttctctagcttgatattttgggttttgtggtgaaggatttattcggttttgggatctataggtcaattgcaatttagattaatagttccgccctatatttatttggttttggtgaaggattcacttgattttgcacatatatctatgcaagaaaaatatctgtttgtgtacattctgtaagttgataatattctatttgcgacaaaagcatgtggcttctgattcgattttattctactgaaactaatgttctatatttggctgctccaaaggtgacattgaagaatttttctgattgacgtttatagatgccttcagattgattattttggtgttttctagcatatctgtttgcatgaaattgacttctggttgttggattctgctttacaaatatctaattgcttca

SEQ ID NO: 48426 - DNA, 547 bp, Gossypium hirsutum
  Clone ID: LIB3543-048-Q6-K6-B6
ctctactttgattcttccacccgattcgtcgaccattattaccgtgcctataacgctcgatatagctgctaaccatggtgtcattgtggcgttaaaatccgagatttttgatgaaagttacacggttagtttagtggataatttacttcagaaacctagtgtagatgagcttgttaagaatcaggcgatcctggatgacggtagagcattgctagatactgggattatagctgttagaggcaatgcatgggtggagcttgttaagcttgcttgttcttgtcaaccgttgatttccgagcttttgaaaagcaaaaaagagatgagtttgtatgaagatcttgtggcagcttgggtacctacgaagcatgattggttacaacatcgccctttgggtgaagcattggtcaacaaattgggaaaacaaaggatgttcagctactgtgcttatgattttttgtttttacattttggaacttcgagcgaagttttggatcaccttaatgcatctgattcagcgcttgtaggccgaagacacttatgttctatt

SEQ ID NO: 48427 - DNA, 614 bp, Gossypium hirsutum
  Clone ID: LIB3543-048-Q6-K6-E2
cccacgcgtccgcccacccgtccggtcacggaactcgaaaggaattctgctgcttctgggactccatcgctggctggaagcgctggcatcagactagcatgtgccactgcagatgtgcactgttatgatgtgtcaagtaataaatgggctaggatcacgccctttggagagccacctacaccaagggcagctcatgtggcaactgccgccgggaactatggtgcgttattcagggtggaattggaccaactggctcggctgctgaggatcttcacgttcttgatctcacacagtcagcgaccactgcggcatagggttgacgtgcaaggccctgggccagggccacgttatggacatgtgatggctactgcgggacaaaggtatctcatggctattggtggaaatgatggaaaacgacctttggctgatgtatgggccctggatactgctgccaagccttatgaatggcgtaaattggaacctgaaggggaaggcccacctgcatgcatgtatgctactgagagtgcacgatcagatggtctccttctgctctgctgagggagggatgctaacagtgtgccattggctagagcatatggacttgcaaaacacag

SEQ ID NO: 48428 - DNA, 613 bp, Gossypium hirsutum
  Clone ID: LIB3543-048-Q6-K6-E7
ccccgcgtccgatttacttgggtgctgaaagtcctacacctggccacccaagagggtttttcatcccacatctgtcaaatattgtcgacatatagagtgcaggcaggatataatgtaatgtaatgaaatgctgttttggtttggttttgttttttttggttgcgcagccattaaaaattgctgggtgggcagtcggacgatgagatgttgacagtcctcccacgggtttcgcatattgctaatggaaacacaagagataagcatcaatatctgttagcgttttacataacttgtacgagcagtctaccttttctttcttgcatttccagttacaggggcacctgattttcttcataatcaagtcaatatcaagcaatgcaagactattgaagtcaagttggagaaatttgattaccccctatgaaaccagctgattgcaaggttgctcccattcccatgtcgcagcagcggagcaccaccccttcgagctttagagttaactccaagcctaaagatcagtcagcagctaggcccaaaagtgtaccccctgacaccaccaaaaacagtaggaagtctgtgatgatgatgaacagccctaatctggggacaactg

SEQ ID NO: 48429 - DNA, 624 bp, Gossypium hirsutum
  Clone ID: LIB3543-048-Q6-K6-F3
ccccgcgtccgccccgcgtccggcctttagcttcaccctgcatgcaaaaccttcaacggaggaacatttggaatgaactgtttcagtcttctgatggacagttggaaacaagatcagttgctggcggaattgatgtgaaccaggcaccggccttggctgaatgcgaggaagaagatggggtctcctcgccttacagcaccgtttcaagcataggtggaaagagaagcgagagagaccctgtgtgcgatgaaaccgaggctgagagaccgtcttgctctcgttccagtgacgatgaagatggcgggggtgctggtgacgatgcctcgaggaagaagcttaggctttcaaaggagcagtcgttggtgctggaagagaccttcaaggaacatagcacccttaatccgaagcacaagttggcactggcaatgcaattgaatctgaggcccaggcaagtggaggtttggttccagaacagaagagcaaggacaaagttgaagcagacggaacttgactgtgagtatctaaaaagatgttgcgacaatctaacagaggaaaacagaaggcttcagaaggaagcgcaagagcttcgagcattaaaactctccccacggctctacacccaca

SEQ ID NO: 48430 - DNA, 645 bp, Gossypium hirsutum
  unsure (1)..(645): unsure at all n locations
  Clone ID: LIB3543-048-Q6-K6-H5
nccttttcaaggttaactcatcaactctcctcaagattctggcactgcaagtgatgcttttggtggaccttcatcatcatctctgagtgcttgggagcaaaagagaatttctggctctacacaaggggttttaaagcgcaggagttcagtattaggcaatgatataggatcagttggccctattcggcggattcgtcaaaagtccaaccttctttcttcaagaaacttaagcttacctacttctgccggcccatctgctcgcatagctggcaatagttcagctgctctagatactctggctgagaatggggataacagctctcctggctctagtgttaccactgttccatccaagtccagtcagacggcttcaaaaattttacagcaattggacttgttggtgtcgccaatggaaaaatcaccaactaagttgtcaccatctatgctacgtgggcaggctcttaaaagcattgagaatgtagattcttcaaaatttctggagaacctgcaagatactgacaagttgagtggttcttgcactgtactgcctggtatttgtgagtctatgtcaggaaagcatgataaggctagggaaaatggctcaacaatgatggttgctcttcctgacaaggtggttcctgcagt

SEQ ID NO: 48431 - DNA, 623 bp, Gossypium hirsutum
  unsure (1)..(623): unsure at all n locations
  Clone ID: LIB3543-048-Q6-K6-H6
cggacgcgtgggcaattttttgcctcatttctgcaatttgacgcgaagaactctgaggattgaagttgcttgtctactgtgtaaggttggctcggaggactcggatcatttgatatggtcctgtgggatacttanatatgtataggcagccttgaaaataacgattccgttggttggaaacttgagttgttgcaaggatcgttttgttaaaactttctctgcagcagaagaacagcaaaaacacttcattgtaatttccatatggagtctatggtatcgaagaaacaaaatgatccatgaaggagtaaagctatctctacaggaattgttgggatttattaaagggtatgaacatgagcttagatttattcaggagacttataatttgtcttctagatctatggcaaaagaaatttggagacccccagaagctagagttattaagattaattttgatgcggcttttaaaagttcaaataaacgtgcaataacagcagccctagccagaaattcatcaggtgatatgataggagcagagacttatctctttgaggatgttgttgatgcctttgtggctgaagcaagnacatgtgaaagagtgttaatttttgcaggaataatgg

SEQ ID NO: 48432 - DNA, 151 bp, Gossypium hirsutum
  Clone ID: LIB3543-049-Q6-K6-C4
tgtctgacggttgtttcagggttcgttttagacctctgtcgcgttaaaatgtatgcccattgaatccgttgtcgaagccgtggctcgtgccgttgcttgagagcttggttcggtgtttgtttctgggtcggtctggttggggccgggttct

SEQ ID NO: 48433 - DNA, 546 bp, Gossypium hirsutum
  unsure (1)..(546): unsure at all n locations
  Clone ID: LIB3543-049-Q6-K6-E1
tgttccaagtgtgtccaattgtctccacttgggcttgcctacatatcctcccacctggcgcaggtgctctgtctctgcattcatttatcatgcatcaacagggnagctccccattctgtgacatctcatgttggacactactcaatgccagatacagcatccatccaacagtggcagaaccagctgacttccccagagggtttacagctgtctgcagagaatcatattccaccatcccaaactgatcaaaagcttgggagctcagatgtaaagtatgagtatgacttgtctgtcaatggacaagccattcgttcagactatctagatcatatgaaccaaggggcagagcccaattctgtgatatcatcatcttctgggaaagctcaggttgatgagtcaattaatgcaagttaccttgtggactcccaacctgagccagccatgccgcaggcctcttcacaatttcatggggctctaagattgagctctgaacccatgaacaaaatattctgaatatgaataatcctgtgccagaggatcaaatcc

SEQ ID NO: 48434 - DNA, 396 bp, Gossypium hirsutum
  Clone ID: LIB3543-049-Q6-K6-E6
ggcatgttccctttcatgttggcgtgggagggacctttggacgaactgtaacaagcttctgaggggacctgttcccatgtaccgctgcacacccgacatccttgttgacggttgttacccgttctccggagacctatggcctgggatttaactctgccagttttcatttcagggtgtgggggggtgctcccgcttgctggtgcctccaatgcttcgggcaccgtttttgctggtccagagccgcatgttcctcttttgaaatacaggccgtgttacgtgttgcgaccggccggtggcttcagggaaagagctattttgggctggacatggtttgcggggataagtggactgttgggaaggcaatattggtttcagtgggagatcctatatttgtcc

SEQ ID NO: 48435 - DNA, 409 bp, Gossypium hirsutum
  Clone ID: LIB3543-049-Q6-K6-F5
ttcgcccacgctgtccggcctcgcgtctggggcggcgcgtccgtggcttcaattttctcatcccttgttttgcttctaagccaagcgatctctatccattcttgatatctggcgccctaggccggttaaaatcaggcgagcacgacgcctgcggtggttatgaaagccgttgctgcgggcgtggggggggggagtactcctgggctcgtttccaaagcttcccccggctggcggggcggctgccggcccctgggcctgtggcgggttcacaggagcgctgtgacctgcatgacctaccttttgctgggcctggtgcgcgttcacctctttcattgggatctcgtgcgtggctgtggggctcgtgtgcggtttcctctgtgttttctttgggaaccttgctccagacgcc

SEQ ID NO: 48436 - DNA, 275 bp, Gossypium hirsutum
  unsure (1)..(275): unsure at all n locations
  Clone ID: LIB3543-049-Q6-K6-G3
atgaatgggggggaagggagaggtattaaaattangaattttaagntttnaatntgtaattttatgtttaatttttttaattttttttntttttgttttggattgtgggggggggggagaaggattatnagaatgannanaagttnagtgtgaggaggaggtttntaantggagttgntattanntntgngggaanaaagaaaggggaantntttttgggtgntgttaanangnagttgaggaatangaatgtnananntgatattaaagtggat

SEQ ID NO: 48437 - DNA, 641 bp, Gossypium hirsutum
  Clone ID: LIB3543-060-Q6-K6-A2
ggagaggggggaaaagaagtagagaaatggcgacgagagggagtagatcagaaaggtgaagaggattttccagcaattcgacacgaaccgagatgggggtcttaatagagatgaaatggcagcgttagtcgtcgctgttaaccccagagtcaagtttagcgacgaacaaattaacgccattctcgacgaagtatttcgaacctatggggagttcattgacggcgaaaaggggttaacttatgacggtttgttgagaacttacgacgacggagctggtgacgtggaccgtgacttcgacgcgctggggctcgagctcaatttcgacgaaaacaaaggcgcatctatcgtgtccgaagcatcgtcgtcgtcgattgcggatgagagagtaatagagtcgcagaagaagcaacggacggtggcgtgggcagtgtcgctgcatcacgggatagttttcgacgacacgtggaagctcgttgatgatttggagattttgctcaagaggttgaaagcaaagcaagcgaaagacgcgaaatttagaaatgataattttgatgcgtattcagatgccgggtggtcaagggaattaggagcctctgcagagctttcagagaaagggtatattgggaagaatcagggcctga

SEQ ID NO: 48438 - DNA, 603 bp, Gossypium hirsutum
  Clone ID: LIB3543-060-Q6-K6-A4
tttccctgcttcgatggtcaaaccaccacaatgcgagaaaacaaagttcttaaagagagaagatatgctgatatatctgttttaatagagataaatatagaattatgatttcttagctacccctttccataatttttttcctttttcgattaacctaacctaaccctagttttttttttgtttgttaatttttattctttttttttctccgtttaaaattaacatgaaactttagatctttttgatcttttttgacgtgatcgaagatttgatgtgtatgaattatcgttgaggttgattcggtgtttcgtgtcgccgtataatttcctcgtttttttatttgggggatttttctaagttagggtttcatattgtgtagttagagtttcgatatatatatatttacttattttaacttgaattaatggagcctcgtgtcggcaataagtttcggcttggtcgtaagatcggtagcggttcttttggagagatctatctgggtacaaatattcagacaaatgaagaggttgccatcaagcttgaaagtgtgaagacaaagcatcctcagttgttatatgaatcaaagttatacaggatcctgca

SEQ ID NO: 48439 - DNA, 628 bp, Gossypium hirsutum
  Clone ID: LIB3543-060-Q6-K6-B3
gcatcctgggattgaagacatcgatgtctatgcatttggtgtttatgctaatggggatgatgtaaagaagtttttgagtgagaaatatgggaatttatctgcttttgaacttaaaaacagtaaagattttaataatgatcttatggaagctgatatatccatgactgttagacttcaaatcgtctacagcaaattgagtatcaaatccatacgaagcgcttacgaagaatcagttggaagcagactccaaaagtttagtggatcagataataaagaactacttcaaaggttcacttctcaattcaaagatgaatataaactaccaaggggatctttggtagagctctcaaaggagccaggctatgtacttaagacaaaaattgatggaaaagaaatgggaagtatagagagcaaactcctatgtagatcaatattggatttgtacattggtgaagatccatttgatagacgagccaaggatgatgttgatctcaatgttgcttctttgttacaacaaaagtagatacattatgacattgatgatggagggttcataaaaaaaaaaaaactaaaatcctcctttcacccttttgctggttcttatgttttaccctttttttttttgtgt

SEQ ID NO: 48440 - DNA, 632 bp, Gossypium hirsutum
  Clone ID: LIB3543-060-Q6-K6-B4
cttgtcctgaaaagcaaccactggctcttatgtaggaggaggtcagaggtggggttttaacgaggggaatccgaaagtagaagattctgactgccacttcgtatctgggagctcaagctccttggctgctgctgctgatgatgaaattgatacccgaatggagggtgatgacgggattgttgaacataaccaccaacctatttcttcaagcatgacagactccttaaatggctccggatcgatgttgcatagaagttcatcaagctctcagagttttgaggatgcagaggatacaaaaccaaagacaatttcagttgatagcagctcaaaaattaccgtgaaagctacatataaagatgacactgtccgcttcaagttcaagccatctgctgggtgcttccaactatatgaagaagttgcgaaaagattcaaaattcaaattggaacattccagctaaagtacttagatgatgaagaagaatgggtactgttggttagcgactcagatttactcgagtgtctggaaattctcgagtatatcggaagtcgtagcttgaaattttaagtttgcgatataccttgtacaatgggcagctctgggagcaggaactgctttttgactggaggctcat

SEQ ID NO: 48441 - DNA, 587 bp, Gossypium hirsutum
  unsure (1)..(587): unsure at all n locations
  Clone ID: LIB3543-060-Q6-K6-D1
naacttgttaatgacaanaaagnattgtttgcatgacgatgataatcgtacgtataaggccccgaagaacaaaatcccatctaaaacttcaaattctaaacgtggatgcattgagtgcccgggtgcaaggatggcaaaggtggagaaacttggtggacaacggaggccaaaaaggagcatcctgtaggagtaaaaaccgatccaacaaacgaatcgagagttgccaagcaagtcaatgttgatttcccgcgaccgagatcccctctgtcaatgaatccgactaaaagctatagaccttccatggatgtaccatcaagcttcagtgaagatgaaaccgcagacactagttcatcctcgggttgacacaacgtgtatggccgactggttcgtagagaaaaggtagggattatatcgacccctcggaggcctgtaaaaatcgccatatggagtttttgtacattaggctgagagagcaattttgttggttgtattttgtatatttgctcagctgttaatatatgtacaaatccccatcttcacattgcaagatatgaggtttttaatattttcaatttattttatttttt

SEQ ID NO: 48442 - DNA, 507 bp, Gossypium hirsutum
  Clone ID: LIB3543-060-Q6-K6-D8
ccgatcatacgtccggtgagtcagatccttcatctcgagtgacccgtcgcatccaacgtttgacttttcaccttattccactttcgtgccttcaacgtgcacctgagttggacatgctgacatgcgccgggtcaataggcatgatggctgcgtaatactccctttcaagactacatgagtagggaggcattatggaaattcaaggaggaagatatttgatttttttaactataaggctgaaccgtaaacccaaagtgactattgcaatgaacgaacatagggagctttgtttgaaacagcttttttggttggttagagaagcaatgatcaggcctcttacatatgtgggggaagacactgctaggtatttggctatttctgaggcggatgggagtattgatctatcacttggtatcaaatatggtgaacaggatagattctggagaggttctcggtggaactcatgctctaaaaagcaacgatattattgttgtgatggtatagaca

SEQ ID NO: 48443 - DNA, 645 bp, Gossypium hirsutum
  Clone ID: LIB3543-060-Q6-K6-F5
ccccgcgtccgatccttcccgcgtgaacaccctcttttccccgctatccatggtggcctcgccgttgacggcgattaacggcgagagagccgtggttttcttcttcgtcttccgtgttctctcttctctccccctttctctcctccctcatgccctttccctctctctcctctccgttttttctctcttcgtcgagatccgcgccgatggttctctctccctcttcaaaaccaggccaggtgcttcatcaggaattatgttaggtgcagttacgttgcctactgtgatgctgtcgaagttgattcagctttcaagagctttctctttgcaacaaatcgagattggagagcttgaacatatgacgatgcaattttgggctgcatcggcttgttgctgcggtgtgcttatatttctctccattcttatgtggtgcgctgcctacaataagaatccacatttctcctgtagtgtttgggatgcaaagtttagcttaagctgtgtcattttattttcggtggtttgctgtatatcgcttgctacaatatctcatactggttttaacacagcattaaagttactgtggttgctatgtcatggatttgctgcagtgaaattaattcaacatcttctcaatacgttcccttg

SEQ ID NO: 48444 - DNA, 648 bp, Gossypium hirsutum
  Clone ID: LIB3543-060-Q6-K6-G1
ccccgcgtccggcggtttttcgtctgcaccaaaaacatagcacaccatttgaagactgttcaaagctttgttaactcatctgtttaatctccttcctttccttttttcccttctccatagtttctttcccggttaaattctctgggaaaatagtgggaaagagaaggaatattttttaggaaaaaaagagggatgttgtcaaagtaaaggcgctgattccaaagctaataggattgctcggtggcgatcaactggcattgttgctttacgtgatgccaaattgaagacatttcccgatgaagttcttgagctggatagatctgtgcgtactcttgatttaacgcacaataaattagttgaaattcctgtggatatcagcaaattagtcaacatgcagcgtctgattttagccactaatcttatcgagcgactaccaattaatatcgggaagcttcagtctctgaaagttatgatacttgatgggaatcaaattacttccttacctgatgaattgggccagctggtaagacttgagaagttatcgatctctggaaatatgttaatgtccttgcccgagactattggcagcttgcgcaatttgtcattacttaatgtgtctaacaacaagttaaagtatcttcctgaatc

SEQ ID NO: 48445 - DNA, 647 bp, Gossypium hirsutum
  Clone ID: LIB3543-060-Q6-K6-G4
cccagcgtccgctcagatctgtttcttcatcttcctctttcaaattatatcttgaatggaatctcttcctgatgccatagttcagtacattttgtcacacttgaacaatgctagggatgttgcagtttgtagttgtgtatccaagagatggaaggagtcattgccttaccttaagagtctctactttcctcgtaactcatttgatggttacaccggcagtgatagcccggacattgttatctggaaaatgctttcgtcaatcacatgtttagaggagcttgttgtttacagtccattcaccagttcaggccttgcttcatggctattgctggtgcattcatcgctcaagcatcttgagctcagaatggataatattactgattataaggcttgtgttgatagtccatccaaattggactgcgttagtgcagctaagaatttggagtctttgaagctttggggtgtgctaatggctaattcacccaagtgggatgtgtttaaaaacctaaaaagccttgaaattgtcggagcaagattggaggattctgcattatctgctgcactaagggcatgccctaagttgactaacttagttctgcttggttgtcaagggtttagatcagtttcagttgagttgccatatttag

SEQ ID NO: 48446 - DNA, 648 bp, Gossypium hirsutum
  Clone ID: LIB3543-060-Q6-K6-H1
ccccgcgtccgcttaaagctctctctctctctttgtctttgactcgcttcaacttcacgatcttctctcgtcacacttcgaaggttaaacgacgacgttcagtttcgtcttctccgatcagattttgtttttttggtgagaagtgaatgttgaatgacatggaaaatggaagaaggaataataataagaacgaggattcaagaatgcgagggtttaggcctagtttgagaggaatgatgcttgtggttgcggtgatatggattggtgtagctgctttgtatggtttattgaagcccatatcaaatggttgtattatgacctatatgtatcctacttatatcccgatatccaccacggagggtgtgtcgtctgcgaaatacggattgtatttgtaccatgaaggttggaaaaagattgactttacagaacacttaaagaagctcaatggaattcccgttctttttattccgggcaatggtggtagctacaaacaggtgaggtctttggcagctgaatgtgatagagcttatcaaggaggtcctcttgaacgtacattctatagagaagcttatctagcttataaggagggagggaatgcggaaaatgctgacattcaattaccggatcaatatgctaacaggctagact

SEQ ID NO: 48447 - DNA, 630 bp, Gossypium hirsutum
  unsure (1)..(630): unsure at all n locations
  Clone ID: LIB3543-060-Q6-K6-H6
cggccgcgtgggcggccgcgtgggcaagttacggtcttgacgccatttccaactgtagaattattaagttggtgatgacaatggcaacggcagtgggtatctcagcgtgtggggttagtcttcagtggacgaatcccaactcttattcgtcaggtaaaggatgcaaatatgctggtcaatccgtgagagcgttacctattcgaatcctaacggtaggngaaaaagaggctccctggtgtacaattgctggtggatgaatatattgcaaagctcaaaagttattgtcatgttgatgatgttcaaattcgctccaatcctaaaaatgcgcgcaatgcgatggctcaggttgatgatgaagacatagctgtcatcaaccttatcacgtctaatgattgggtggtgattttggacgagcgtggactagatcttagctctgagcacttggctgaattgttaggggatgctgggaatacggcagcttcaagattatcattttgcattggtggaccatatggtcatggacaacgagtgcgaaaacgtgcaaatgtgtcaatcaagttgtcgtcgatggtattgaatcatcaaattgcacttgttgtgctcatggaacaaatttataggaggtgatgt

SEQ ID NO: 48448 - DNA, 598 bp, Gossypium hirsutum
  unsure (1)..(598): unsure at all n locations
  Clone ID: LIB3543-060-Q6-K6-H7
ctttngattgatgaatttgactgggtggggtgggtgggggtaaaggcctcaggtaacaatagccacagcaataatcttttgtcaccggttctttattcgacaatcacatgtngaaaaatgatagaaggaccattgctactgtgtgtatgttcctagctgggaaagttgaagagacacctcgggggggaaaggatgttattcttgtttcctatgagataatacacaaaaaagatcctgctgcagctcagaggatcaaacagaaggtgttctttaacttaatggtgctttcgccagtttatatgtattcctcgtactgatgctttgaccacttttcctccttgtcgtgtatcttgctccctgacttgttcagtagttcttttgcctgttcttacttgccattcatgatctttcttattccattttttctctttcactcgttttcttattcatcggacatataagactaaccccatattttcttcttagaaagcctaatgagctaaaattcccatgcacggttcggtatgaggacttcacctttgagatgttaggcacgtgtaatatttgtccaatctgttgattattggttgatatattg

SEQ ID NO: 48449 - DNA, 353 bp, Gossypium hirsutum
  Clone ID: LIB3543-061-Q6-K6-A5
gaacagatgccgaacaaatattcttcaaaacaaattgatacctgaaaaacgtgatgcccaaggcaggtttggaaaccctgtggaaggtaatgatggagatagggaacatgtggatgcaaatgagcccttacggtgggcgaatggctgagatttcagagtccgaaacagcattcgcacatagagctggaaccctttatatagttcagtacactgcgcactggtcggaagggagcagtgaagccaccaaaaaatacgtagagttaatgagaaaattgtacgctgagatggccccatacgtatcgagttaaccaagggaggcattcctcaattacagggaccttgatataggcagc

SEQ ID NO: 48450 - DNA, 623 bp, Gossypium hirsutum
  Clone ID: LIB3543-061-Q6-K6-B3
ccccgcgtccgttctggcttcttcttccctttattttcttctcattttcctttccatttcttctttcacccttttatcacaatcccaaacaagttccaagctaaacaagtttgttttgccaattcaccaagataacaagaccaatctctatgttgccaacatttataaaagaactccattattgcaaatcccatttgttgtggacttgaatgggaggttattatgggttacttgtgaacaaaactacctttcttcgacctaccatgccccttgatgctattcgacataatgtgctagagccaacacacactattgccacacttgcttctccaaggccagaccggggtgccacaacaacacatgtgggctcatgtcggtgaaccccgtgacgggcctaactgccatgagcgagcttgcacaagatgttctgtcaatctattccactcaagggtctaaccctggtccccttgttaagatacctcggttcttgttcacttgtgcaccttcccttttgctgcaaccagtgttaccagggaatgttcaaggggtagctggattagggtattcccctatttctctacccactcaacttgcctcacactttggatatgctggctttgccc

SEQ ID NO: 48451 - DNA, 621 bp, Gossypium hirsutum
  Clone ID: LIB3543-061-Q6-K6-C1
ccccgcgtccgtgtagtgtgagaagacaggggtggtagtggatgttggagatggggctacgcatattgttcctgttgcagatggttatgttattgggagcagcattaaatcaataccaatagcaggaaaagagttactctctttatacaacaactgatgcgggtatttttgtttttttcctatgacttgtgatctgaaatcattgattgctatttattcaattgtcaagtacttaaggttattatcatgtcttgatgagaaaaaacatgcactccttggcattactcagccttgtccatggttggatttattggtgttctcaagttcttcacctaggcacacctatgctatgtgccttagcgctaggcaacaaaagcacctcaaccctttcaggcgaggcacatttgatcaggcacatttctggtgctcttaactgcattcttttttgtaacactatggttggatttatcggtgttctcaagttttgcacctaggcatgcaacaaaagcacctcaaccctttcaggcgaggcgcatttgatcaggcacacttttggtgctcttaactgcgttttttttataaggtgatatgcatacaaaatgcttgccttgattgatttgg

SEQ ID NO: 48452 - DNA, 626 bp, Gossypium hirsutum
  Clone ID: LIB3543-061-Q6-K6-E5
ccccgcgtccgccccgcgtccgtccacgcatccgcccacgcgtccgggcgtctagagctattgttcctcagcatgaaaacatggagaagtgaagctgaaaaagcattagcagatggaaggaaccgaagagttcttcaagacattggcaattttgtcaatgaacgagcagcagcacaaggaaagaaaccaatcaccgaaggagctgttgtggttgcacaagctgtgaaaggagtccaaagaaagcaggttgacaaaccaaaaccagagaacgtgattgtgataagctctgatgaaaaatctgagaaaagtaaacatgttaccaaaagacaaggatcttcaaggaaggatgtcaaaaccctcacttcaatcctctctgctcgaagcaaggctgcttgcggacttgtcaataagcttaatgattcaattgagaacattgatggagctgatgctggtaatgagttggctgttactgaatatgttgatgatatctacaagttctacaagctcacagaagatgagggtcgagtacgcgactatatggatttgcagccggatatcaatgccaagatgagatcaatccttgttgactggttgatcgaagtccatcgcaaattcgagctcatgcc

SEQ ID NO: 48453 - DNA, 173 bp, Gossypium hirsutum
  unsure (1)..(173): unsure at all n locations
  Clone ID: LIB3543-061-Q6-K6-E9
cagtctcttctctatacacccatgtaaaaaaaagagaaatttgtcagacggtgaaatgggtggccttgaactganagaacacacagntgggctgccagattccttcagngtattgtctccttaccttacctcttaggacactgtcctgaggtgtttcgttaagttatgtgctg

SEQ ID NO: 48454 - DNA, 496 bp, Gossypium hirsutum
  unsure (1)..(496): unsure at all n locations
  Clone ID: LIB3543-061-Q6-K6-F3
ggctttctnaagtanaaaaaaaaaaaaaaaaaaaaaaaaaaaaaaaaaaaaaaaaaaaaaaaaaaaaaagggagaaaaaaaaaaaaggggacaaaacattaaaaaagcgccgcatgtcaaagaacgacgagccttgctatagggaaaccctctaatttaagggcctgcgccgaagaaattacaagggggcggggctggtgaaagggctgccgatttcccaaccccgggggttgcgccagcattattcctttttgtgggggccccctatttaaccaggggggcccgctttttccccgtcccggccgggggaccccccgggctgccccccggtatgcgcggtggggggggcccccttttgcggcgggggttttgtttcgggggggggcgtaccttccccttttccgaccggttgcgccccctggttgggaatgggggccccccttttttggggccttttccgggggggggggggggggtctccccccggggggccctt

SEQ ID NO: 48455 - DNA, 395 bp, Gossypium hirsutum
  Clone ID: LIB3543-061-Q6-K6-F7
gtcaattaattgttgtttccaagggggaggaacgattggctttgattgatttcttgaggggactagttgagtttgatctggcaaaacggtggtcacctttctaggcttccaaacacccttttgttactggggtaacctttcacacgcccatataggcctccccctgagacccctcacttggtaagggacttacgcatgcagctctgcaattgaagaagattgaaccttatgtcataaatcatagatttctatttgtattttgttagatttctagtgtagtatgataagtgcggtattttgtttggcaggatgtatttatatcatagattattcttcttctcaatattttgataatgaattttaattttttttatgatataaaaaataaaaaatat

SEQ ID NO: 48456 - DNA, 633 bp, Gossypium hirsutum
  Clone ID: LIB3543-061-Q6-K6-H3
atttgctaaggcccgttcatcaccagttcaccattaaaattggtgagtgatgtagaagcagcctttacttcctccgaaacaacattcaaagaccattctcacttgataattcgcattgctaaccccgatttcaacggagaagccaagggatctcatcgatacatttaaccaaggtaactttctcgcttttcttgatttaaaaaaaaaactaaaaacatgatatatgcaaaaaaggaaaaaaaatattgaagacggaagaaaaatcttaaatcgcctttctaatttttttcattctcagtattggatttgcgtagtgtgcgtagaaaaatacagggtacaaacgagggctttctatagcctaaatttacagaataaaatagcgaaaaataaaaatatttcatgctgtcattttgtatattctgttagtctattccttctcgtgtattctttacaggatcatccgtacggaggagcggggagaggcacgcgtgaaagaagccgtgcgaagaaaccgctcgtcagacccgaccccctagcactgttctagcatgttccagaagcttctggtgcttggttgctgggattccttttgagtttgggctgttcgggctagggattttagtatagccctct

SEQ ID NO: 48457 - DNA, 631 bp, Gossypium hirsutum
  Clone ID: LIB3543-062-Q6-K6-C5
tgttcttcctcctatgcggttgtttcagctggttctgtaaattcagcatgtactgcaggtggtgggcagttgtatatgtggggaaaaataaagatgctggtgatgactggatgtatcctaaaccactcatggatttaagtggctggaacttacgttgtatggattcaggcaatatgcaccattttgttggtgcagatgcctcttgcataagttggggccaagctcagtacggagagttgggatatggtcccatgggacagaagtcttcagcagttccgaaaaaatagacattttggagggcatgcatgttatcagtgttgcatgtggtatgggccactcgatggtcattgttgatagagaaaatgtcggcgaccgtcttgatcagctggatgtttacgacggcaaagctactgctgaagggactgaggtacctgatgccaatgctacgtttcccaagcaaactaacaaaaggggagccaagaatacttccgattctttgaagaacttgaagaggaagaagtcaaaagattcatctgattcagaggatgaagaagagaacagtgatgttgagagtgacagcagtggagaatacataaatggtaaggctcccggcaaaggccgaggtaagggt

SEQ ID NO: 48458 - DNA, 338 bp, Gossypium hirsutum
  unsure (1)..(338): unsure at all n locations
  Clone ID: LIB3543-062-Q6-K6-C8
cggacgcgtggngcggatcaggaaccgatgaagactatgaagaagaagaagagaggaggagcaatacgacgacgctttaagcgatcatcaaaacactcaatcttcatcttcaacttcaacttcttcaggtactcaaaaaagcctcgacgatatcgatgctaagctcaaatccttgagattgagatacaattctcagcaatcaaaccctaaccctaactttcgttcctacttccaaaaaccaacagttctcatcattatcaccattttccttagtgtaactattagaagggagcttttcggagattacccatttcggtttgggtgtgttgttgctgtgt

SEQ ID NO: 48459 - DNA, 296 bp, Gossypium hirsutum
  Clone ID: LIB3543-062-Q6-K6-C9
atacgtataaacgctttaatgttatactaaagttataacctgtattcttgtgatattgatgattgctagtttgtcagtgaatgaagcctgcatgctcttgttaccttgtaagcatctctgcctgtgtaaaagttgtgaaagtaagcttagtttttgccccctgtgtcagtcatctaagtttattggtatggaggtctttatgtaatgatatacgtataaacgctttaatgttatactaaagttataacctgtattcttgtgatattgatgattgctagtttgtcagtttgttgttc

SEQ ID NO: 48460 - DNA, 626 bp, Gossypium hirsutum
  Clone ID: LIB3543-062-Q6-K6-E1
gtcaagttcacacctccgatggaaaaagagaatattttttctgttacctttcctgatgtttttattctcgctatggtgattgatatcaatggtgacccaccaggggaggggatcgatatccacattaagaatgttccgctttttgattaactcgaagaagtgaaacaacgaagacaaccaagggctcttttgagatattgaagttgatgaacagcttggatttttatcccatggtgcatatgcaggtgaggtggttcactgttgatctctgctattgaattatgaagttatttctttacattttatgaagagagcaaatacttgtaaatcttggtcatttgggcttaggacctgtcttttggagatctttatcattttgcagcatgcaatctttgagcagctttgaagtgtacatggtttgttcaactcgagttaatatatagttggctcatttgatcaaaaacctagagatgtgaaggtgccatccccgttatctaaacagcttggacacctctggttttcatttcccagtggtatttggttcattccggtaagctggttgaagaagttgctgatgacccccgattgatttccttatttcaatcttatctttctctccttgtcaa

SEQ ID NO: 48461 - DNA, 631 bp, Gossypium hirsutum
  unsure (1)..(631): unsure at all n locations
  Clone ID: LIB3543-062-Q6-K6-G6
gaaataaagctcaagccccaccgttggaagaagcctcgtcaaaattcaaaacttcaaagaccagnanacaagnaaaaatctgtcaaagcttccttctcccctctcccttgattcttccgtgtctttactaaaaaattaaaacccctggaattcttcaagaggaagaagaattgtccacttttgtccttttgtttttgggttccttcatggtctgaccagtcgttttagtttctctgatcgggtttggtccccaatgtcggacgatatgttgctacatttctcttcgaattcgtcaaaccaatcagaccattctttgcccaccaagattgcaaagctcgaagctcgcttggtaggcaaggcctcttctgcatctgctgctcagcaaccgcaacaacaacagcaacagcaacagccgccttggtcttcgctatcatcggcttcgaaatttgtttccgctgaggacttgcctgaggcttctagttctagtgattctgatgatgagaatggaggagagtttttaatactggccaatactcaaaagcggcagaaggtgcaaggagatgataatttgctagttcttaaacatgctgaggcaatttctgaagggaggcaaaagattgtggaagctgtg

SEQ ID NO: 48462 - DNA, 385 bp, Gossypium hirsutum
  Clone ID: LIB3543-062-Q6-K6-G8
aagcttcaaaaatgtagttatagtgcaagcacagtgcaccatcaagtatcccattgagcagtaagtttatatagtgattagactctatgcatgtgtattcaactcatttatttcttattaacagaagtaatgaaatgatataataaaatcaatcaagttgccagcagcctttcttcttcgagaattaacatgagctatagttggaactgaaaatccgaagctaagaactcggatgttatctccttatggtatcctcctttttgaagggtatttcaacattgttgtggtaatggctgtaagggagatgttcaattattctctctgaagttttctgtttgtggaatttattcaccatcttattcagtggtattcgatcatcttatcc

SEQ ID NO: 48463 - DNA, 602 bp, Gossypium hirsutum
  Clone ID: LIB3543-062-Q6-K6-H4
gtcagctttcttcaacaattgaccttggctgtgtaaccctcctttgtttttctttactctttccccttctctcaatcgctctttcatctactaatgaatcagcttgttttcttcttcttcttctttttgtttggaaaactttgtctctgtgatccaagagctaccgaggctgctttgatatgcaccaacacaaccgcttcaataacggcgcgcaaatccttcgtggcgaacttcttggcggtgctggacagctttacgccgctcatcgtgcgccagaggtacgccgtcgttgtcaaaggaagcggtgacaccagagtgtacggctttggcgagtgcatgaaagaccttgagcaaggagactgtaacatctgctttgctcagtgcaaagcgcagatcatgagatgtctcccctttcagataggcacgcgtggaggcaggcttttctacgatggttgttatttaaggtacgatgattataacttctttgacgaaagtttgagtgaaacagaccgaactgtttgtgctacaaaggatgttggcttgagtaacgagacaggttttagagcaaatgtaatgcagttggtaagaaacttgaccgtgga

SEQ ID NO: 48464 - DNA, 632 bp, Gossypium hirsutum
  Clone ID: LIB3543-062-Q6-K6-H9
aacctagctgtagccgcctcggttacgcgttttgctttcttgaagagtaagaatattaaaaaagcttctagatctataagttctacggatactgagctatcttttctttactgattcttagttttcttgaggaagttcttgggatttcgaaaagaaagttcttgggatttcgaaaagaaaatagctgataatgtcgcggtgttttccttatcaacgtccggcggggtatttaagagagggattgatcgaatcgattaaggttcgttgggcaaaagtatttggttttcactttcgttgctcaactgcatgcgtttgtgatacttgattatgattttatatttgtgtatttgtagagtttgtaaaaactgaaatatgacatgaaccgctttaattactgttgttaatatagctttgtaattatgaacaacgaggatctgtgcaaagaactatggtagttattcaaatatattaatgaacctttttgggtttacggttttttaaaagaacttctgggttcctttttaaagtttggtgcttgattttgatttgattatgtaaatgaatgaaaagcttggtaattcgtgtctgtttagaggagtgggaaagtctgattgatcttgatagaaccctaa

SEQ ID NO: 48465 - DNA, 655 bp, Gossypium hirsutum
  unsure (1)..(655): unsure at all n locations
  Clone ID: LIB3543-063-Q6-K6-B2
gccgcgcggnacccaactcaaccgtaaaatctcatcttccagtaagccaaaatttgttccccctctgcaatttctcttcttctattcctcgagggtttctttcctctctataataataataataataataataataataataatangaaaaacaagatctctctcatttttcacgatgtggcgctcgctttggcgatccatcgatcgcttctctcttcagcatttcaaactattgtttaagcaatgactatgtcaacaacattgtagcacatccatataacttcgatgcaggagatcttgctctttattatgtgtcttttttaagagcagtgagtagcaaaataagcagagatacactttgccttcttgttaaggttcatggggatgtagtggtctcctttcccatgtacactgaagctcttaaatttgctcaacatgaggaaaagatgattcaaacagctatacgagcattaactctcaacatatacaatatctgtgataataatgtctatcagtttataacaactcctccagcctcgatttacttctcagacttggtttctagtttaaggaagcaatgtctacaactagatgcccttgtcaattcctcagaggataaatgcactcatcaaaggaacaaggacatatttctgaa

SEQ ID NO: 48466 - DNA, 631 bp, Gossypium hirsutum
  unsure (1)..(631): unsure at all n locations
  Clone ID: LIB3543-063-Q6-K6-B4
ccccgcgtccgccccgcgtccggngatgcgctgcaggtaatccatagatctcttatcatctattgatcttggccctggagttcaccttctctttgatatggacctctattgttggttcttgaccaacctcttctatttccttataaacaaagtattttagtaaagtggccttagcaagtgacatgttgaccattatttaagtttcaaccgatatctataacgcataaagccaatttttaagagggtctaagttctttaaaacatttcaaagataaagaacttgtgtagacatggactaagcttggtcttcatacaggtttaaacaaaagccaccatggccatggttagcaataactacttcgattggcatccttgtaattgcattacttgttggatatatatttcatgcaactgttaaccgaattgccaaggtggaagatgattgccataagatgatggagctaaaaaaacggctgaggcagctgatgttgccaaatctcagtttcttgctactgtttcccatgaaatcagaactccaatgaatggtgttctgggaatgttggatatgcttatggacacggatttagatgttacgcaactagattatgtcaaaactgcacaagctagtggg

SEQ ID NO: 48467 - DNA, 537 bp, Gossypium hirsutum
  Clone ID: LIB3543-063-Q6-K6-B7
ccccgcgtccgattttaaacaatcctgcaagaagacttgtcaaaatctttgcttatcaaagaactccgaagtttaaacccaatcgacccggaacctatttctccttcaaaagaatgaggaagagaagggatttggctgatattagagtcttgttcagcaaccacctcgatgaagatataattaaacagcagaaaaagatcttggcccgcctaggcatctctgaggcatcatctattttagctgcaacacactttgtaacagataaatttgtgcgtactaggaatatgttggaagcaattgcttcgggcaagccagttgtcacacatttatggcttgaaagcgttggacaggttaacattcacattgatgaagaagcttatatattgagggacatcaaaaaggagaaagagtttgggttttgcatgccagcttctttagcacgtgcatgcaggcgacctttattacagggccgaagagttttaatcaccccaaatacaaagccaaataaagaaacaattgtgcatttggttgcagtgc

SEQ ID NO: 48468 - DNA, 635 bp, Gossypium hirsutum
  unsure (1)..(635): unsure at all n locations
  Clone ID: LIB3543-063-Q6-K6-D2
ggaatgctgaccctgaccttcctgataacgatgggcgaagccctttcactgggctgcctataaaggttttgccgattgcattcgtcttcttttatttcttgatgcacatagagggcgtcaggacaaggagggttgcactcctctccattgggcagctatcaggggtaatcttgaggcttgcacagtcttagtacaggctggcaagatggaggacttgacggtcactgataatagtggccttacacctgaacagctcgcttctgacaaaaatcatagacaagttgcttttttccttggaaatgctagaaggctgcttgaaaaacgatgtgatgggaatagccgtcttggacgatttacaagattaagacttgcaccatttctttggtgcattatcttgctactattagcgacctatattcaatctgtcataatggatgcaaatctgccaaagttgacagctggatttagcttcatggcttggtttggtgttatcttggcatctactggtttagttatgttttataggtgtagcagcaaagatcccggttacatcaggatgaatgtccatgaccctatgaatatgaaagatgatgaacccttactgaagattgagacaaataatncttctttgctag

SEQ ID NO: 48469 - DNA, 644 bp, Gossypium hirsutum
  unsure (1)..(644): unsure at all n locations
  Clone ID: LIB3543-063-Q6-K6-D9
cccagcgtccgcggnaaatgatggtaaatttgccggatgctgcaaatagagcgaaaatactaaaggtcattcttgcaaaggaggacttgtcccctgaggttgattttgatgcagttgcgagtatgacggatggatattctgggagcgaccttaagaatctttgtgtgactgctgcacaccgtccaattaaagagattttggaaaaggagaaaaaggaacgagctgctgctctagcagagggcaaacctcctccgcctttgagtgggagtgctgatatacgttctctaaacatggacgacttcaaatatgcccatgagcgggtatgtgccagcgtctcttctgagtctgtgaacatgactgagctgcttcaatggaacgagctctacggtgagggtggttcacgaagaaagaaggctctcagctacttcatgtgaagcccctgtcggtgtctttgtacaaatggttcgtacgtatcttccaaaatttctctctgctcttcttctaaaggcctgtatgcaagtaagtttactgtgctggtacatgtccggtgtggctcactcgtattttgtctgtataatgaaagtataggttttttaaagttatgtttcttacttaatatcatcaggctgggtccgggatggtcg

SEQ ID NO: 48470 - DNA, 388 bp, Gossypium hirsutum
  Clone ID: LIB3543-063-Q6-K6-E1
cggccgcgtgggcgagtctcggcctttgcgcattcagcgcatgtcttctaaaaaaagattatcgagctgcctcaaaggttgatgctgaaatcagaagagaggaataccatctaagagcgaaagatggaaacttacaaagccgaaccatgctactgaatggaaacattttaagtgtggattcatctgggaatatacctcctctggagcctttatatgtaaactcagcaaagccaataacggtcgaacctttatccattgtgttcattcacctgtcggatgttattctccctgcttgcaaggtataactctaaagggaaccaaaagcggttccttattgctaatcaaataagaacacattgcaaatgtaccatttttatccatagtgaag

SEQ ID NO: 48471 - DNA, 647 bp, Gossypium hirsutum
  unsure (1)..(647): unsure at all n locations
  Clone ID: LIB3543-063-Q6-K6-E6
gtggtccgctaacgtctctgcatttgcttgctttaagagaattttcagacttccctcccatcaaatatcaataacaaaaaccagtngaaaaagagatgcaaaccaattgtgaggttgacttcttttcaaccatgggaaaatgacccagaaatgattctcttgggaaaagaagaccatctttcttattgggaattcgtgaactcctctgattatgatgatgatgatgatgatgatgatgatgatgatgattctggtgatgttatctctgtctctgatgatgattccctttcctctccaaaggacaccctcacccctcgcctgattcaaggatatgcctgtgatggggatggtgagcaggaagtggatgatggtgatgatgatttggatgatgagttggtgccacgagcattcagtgggaaactgggaatgcaaaggatgaggaaattagggaagagggtctttgccaagatgcatacttccaaaaagtcgccctttttgtatatgaaacccgggtgtgtttatgggaagcatggccttggattcaagcatagtttctagagaacaaaaaaccagcgtctctgtactggactggaggtgattcatgccattaccatgcgccatcttcatttgattttacttgtaattgc

SEQ ID NO: 48472 - DNA, 603 bp, Gossypium hirsutum
  unsure (1)..(603): unsure at all n locations
  Clone ID: LIB3543-063-Q6-K6-E7
ngaacggnccttctccttcatttttcaatgctggtgtctcttggtctcctctcctccgattcttggcaagcgaaatctggaagccctcctaccagactgcttgcaaccctgcatgcgcttctgctataaatggatttgcaatttcggagtggataatcgttttttatgcaataatttgtccttcctcgtcccgtacaaacaatcctgatgccgatctgaaggcttgttggtcgtaggccgcgtcgaagtatattgcgactcctggtctccttctttcctgtacaacatttccaatgggttgaacgataagtctcttctctttaatcccatttagctcagaaatatagctccataggccgcaacaaaaataccgaatctgctcagtcgttccttggctaaagatccagggcactgctgaaaaagatgatagctatcttcctcattttgtctgaatcgagggcaaatggcgttaactactactttcttctgcttgaggttaactaatgacggaatgaagttccaagaaattctccagactgttaatgtgatttttgaaggaatatgtagcttccaccaattttctgtaaaaattttagactcggt

SEQ ID NO: 48473 - DNA, 615 bp, Gossypium hirsutum
  Clone ID: LIB3543-063-Q6-K6-F6
ccccgcgtccgccccgcgtccgccaaatgctcatcattcaattctgaacagctagatttactgagcattgccacgcctccagatttagaagcctggaccaggatggcagaaacttttgataatctcactgattctgtgaggattgctatggttgggaaatatgtaggtttgacagactcatatttatcagttgtgaaggcacttttacatgcctgcattgcatgctctttgaagccatctattgactggattgcagcttcagacctcgaagatgattctgccgaatcggccccagaagcgcatgctgctgcatggaaaactttgagaaatgctgaatgtgtcctagttcctggtggctttggagatcgcggtgtaagtggaatgatattggctgccaaatatgctagagaaaataatgttccttatcttggcatttgcttgggcatgcagatctctgtaatagagtatgccagatctgttcttggttttgaaagggcaaacagtgcagagtttgataaggagacacctaatcctgtcgtcatttttatgcctgaaggatcaagaactcatatgggaagcacaatgagattaggatctcgaagcacactatttcag

SEQ ID NO: 48474 - DNA, 652 bp, Gossypium hirsutum
  Clone ID: LIB3543-063-Q6-K6-F8
gagaccataataagacagtgatgcacaattgcgaaattacagaagctgagtaatcatcaggccagcggagcagagcagccaaatagtcctatgaatcgaggaaaacaagttccatttgccgtgttgttgcctgctttactgcctcaacttgataaagatagagccatgcagcttcatactctgtatggtaaactaaagaaaaatgaaattgcaaaagacggatttgttaggcacatgagagatattgtaggagatcagatgctgaggttggcggttaacaagttacaagttcagatgagttccaatcaattcccattacagtccccagcaggattacggcagaatactcctcggatgccctctgttggcagtgccacacagttcgctggcccacattcattagctcagctgcaccaaaagggtcctaattctcctgccaattcatctcatgccccctctacaccagtccccatgcagactaattcaagttatttatctggtgaaaacaaggctcaaaaatctcaagacatggattgccaatcagattctcgctttggaatgctaggtagtcaaatttcttccactggttcaaccactgtgaatcaagaaagaggtcgtccttcaattccggcacaaggaattaacaagcaac

SEQ ID NO: 48475 - DNA, 542 bp, Gossypium hirsutum
  Clone ID: LIB3543-063-Q6-K6-F9
cggccgcgtgggcgccgctacggtcaacgggcgagtgacgaaggttaggcttttcatcccctttttaagctcggtggtcagtgaccggtgatgagaggccaaatgaggaaaagaaaaaatctacccccttttaagtccgactccgatgacggcgaagggacctccgtcgatgagatcgcgaggcgattccaatggtagcagacacgtgggtagcagcgataggcgaacggcggcggtggctaggcgacgttcgaggaggctggcggctatgggcagacctaggtgcggggcacctagggtttccttcggctgaattttttttagttttgggctagggtttagtttgggctgagggttaatttgtatttgggcctagcataattgggtttgttgtaattttgggattgtatttgtctgatttgagtgtgttgggcccggactaaatttgggctgtataaatatgagatctattaaaaatatcttttaaaatcaattgattaatcatcacaagatattaatatattaactcttttggagttttc

SEQ ID NO: 48476 - DNA, 636 bp, Gossypium hirsutum
  unsure (1)..(636): unsure at all n locations
  Clone ID: LIB3543-063-Q6-K6-G7
ccagtttgccaaaaanaaaaaggagctgaggttgatcttcaagaaaaaaggatcttgcaagtcccaaatgctttcaagctccacttttgtttccatctaatggggaaccaggggtggagactaatgcaagcctttatggacaaagcaatggtaaccccttcgcagacacattttcagacgccactttgtaagcttaatctcaaggagacatctgagtttgtcaagtcatttccaatggcggtttcaaacaccaccactaccaccaccaccacaggtttagatgtttcaatgcaaaggaggagaggggtgaactcagtgacaacacaaaggagagttttggaaactccttgtacaccaggtaggccagttttcagcttcagtggtggcaatctagctagaaagagctttccttcaaaatgggacgatgcagagaaatggttaatcagcagctcttgccatgaatctcctgctcataccattaagtcactccttgagtcatcaaaggtaactaaacaatgtgataactttaagcaacaagctgaaatatttgctgagaaatcaaggtcactgaggaaaaaatacagagttgtaaaaggccagtttcattgggacatcataatccaaccaggagtttta

SEQ ID NO: 48477 - DNA, 628 bp, Gossypium hirsutum
  Clone ID: LIB3543-063-Q6-K6-H3
cccacgcgtgcgcggccgcgtgggttggaccatatgatgagtgtaaagcacaaggacaggtgatattgcaattggcgcagtcaacttctttcttgggccaggttgatctattcaaagtacgcgggaaatttgcattatcagatgcatatgaggatcatttcatgctaccaaagggaaaaactattatagttactcatcaaaggagtactattattgcaccaaagctctaacataactcataggaaattgaatccgatgagggatccatgtttagtattgtgggatgtaccatggaatgatctggcgacaatggaattgactcacggaaagaaagaccaatctaaagcgccacctttacagctcatgctttacctatggactacaccatcacatacaaaagaacaagctcgcgtcctaaaatgcaatcgagatactcatcatgctcctgaagtttacacttcaatggaaccagcagtgcagacatatggacaaaacattttaaaggagatggtgactaagaagttactaaaccatatttaccagtagcactgccgttgaaatgagtctgaaagaaggggtcccacctgggctcctcaacaggtgcctacatcgagaacaacttttggca

SEQ ID NO: 48478 - DNA, 621 bp, Gossypium hirsutum
  unsure (1)..(621): unsure at all n locations
  Clone ID: LIB3543-063-Q6-K6-H5
gtctcggnagcagnagaagatgattgtgtcgaggagaagaactcctcgctaggttacaccatcggcatctagttgctctaagaggattttgcattaaaaagcgcaagaggtttctaatgtatgagtacatgtcaaatggatgcctaaaagatnncatcttcattcccccgngaaaaactccactgagttgggaaaccagaatacaaattgcgattgatgtggctaatgctttggagtaccttcacttttattgtgatccacctctgtgccacagggacatcaaatcaagcaacattctgttggatgaggattttgttgcaaaggtatcgggttgcagattttggccttgcacatgcttcaaaaggtggctctatttgcttagaacctgcaaaaaccgacatccgtggaactccaggttatatggatcctgaatatgtggtcactcaagagctcactgataaaagcgatgtgtacagctatggtgtgctacttttggagatggtcactgcaagacgagtcgtacaagatggtgtgactttggtagaatcaacccaaatactgttggcatcagagtcaaggctaaccgagcttctagacccccatattaaggactccttcaac

SEQ ID NO: 48479 - DNA, 623 bp, Gossypium hirsutum
  Clone ID: LIB3543-063-Q6-K6-H9
ccccgcgtccgcggccgcgtggggcgggtttggaagcaccattcacggaagggaatttattgagctctaaagctttctgagtgtcactgctagcttaaatgatgtgaagcggcaactcgaatttctaagatcggagtcaattgaagactactcagaaggaccgggaatggttgtttcaagtgacgacgaaactgatccaacagaagactctttaaaggaatgtgatgtaaatgaatactcgacaaagtcattcagaatagcagagagcagggatttctcctatttagtcgatgtcttgactgaggcaggctttcatactagaaaccccgatatactcaacggatggcactctgctgaaaccccaataagcctctcggttttcgagacattagagaagaagtacggtgaacaaatatcttggaaaaggtcagcaaggaggctactgttcgaccgcataaatttgggtttaatcaaaatcctccagccatgcttacgagaccctatgtggacaaaacctgttgcaagaagacttattagctacgcacagaacttgaaagaaattgaggaagagctgtacatgttattggttagccaagaaaatgaagcgaaaacgaactcatctg

SEQ ID NO: 48480 - DNA, 567 bp, Gossypium hirsutum
  Clone ID: LIB3543-027-Q6-K6-A3
cccagcgtccgcccagcgtccgatcaggacagataagtcgactcccaatgatattaatacttacaggaaggttatgcaaagtataaacgacaatatcacagaagaaatcttattaaacgagatcaacgagatcattcgcttgcccatttatgctgatagaataaggatggacagcaaggcccacctgcatacaaattcagcacgacggaggtgattgatataacaaactggttgttatgcagccgatcaaggtactgaatggttcgatatgcttttctttagcttgtgttttaaaatacttctaggtttattttggtaggaattaggcgcataattgagttgtttgtatcatatcatgtatgtaattagctatacccttctttagtcagtctttatagtgtttgtgtgccatgctggtgagttgcatgatccatagttaactattcttcttatagttgtttagattagaggattagcattagcattagcattaggattaggataatcatgtatgtatattagtgataatatataaattaatcaatatctttttccctttatctagag

SEQ ID NO: 48481 - DNA, 420 bp, Gossypium hirsutum
  unsure (1)..(420): unsure at all n locations
  Clone ID: LIB3543-027-Q6-K6-A8
cggncgcgtgggtttcgactcagctctccatgccgccgccgctgccggtctaggtcgatccacggcctccgtcatcccagcctccgatcgcgacggggatgggatgaatcccgacaaagccaggtgtacgtgagggaacggcgcacgtggaggaggccgactccgagtcttgctgcgcttggagaggctgctggaggcgggggttgctggtggaatttagtcagtgggctgttggggttgggcttagggtttattctgttttaagttattgggttgttgtaattgggttttaaaaaatgtagatggtttatttattttgggttttagattgggcctggggcaaaattggttactacngtatgttaaaattattgcatgtaatgttacattctagaagaagattatcttatttggattctc

SEQ ID NO: 48482 - DNA, 530 bp, Gossypium hirsutum
  Clone ID: LIB3543-027-Q6-K6-B12
aaactatcttatatactctggctggagggggaggagcgtttatttctctaactccttacttacctgctaatgcactggagctagtatcggctactaccaatacaagaagaagagtcactatggccctagactatgaaacgaattgcacgtatgggcccctattaataaaactagagggatggggctgaaggagtatgactgagcgataatgttgaccaattgcatacataaatctacggccttaaggcataaacaccatccatcgacgtgaacccctttgaacgagacgagtaaaataaacgactattaacataccttacatagcctctttatataccagtggcctgatgaaaaaaaggcctcctaataccttctacgatcaaagcaacaaagctcaaaaaaacccctacgaatgaacaaacactatgcaaaaacaaagctggtacgctgataatgaatgctaaagaataacattgcttacgctgggatgagaccaactctgaacgcatgctaagagatgaaactaaaac

SEQ ID NO: 48483 - DNA, 333 bp, Gossypium hirsutum
  Clone ID: LIB3543-027-Q6-K6-B4
gccgaagcctctgtaaatctcaatggtttgacgtaatcttattaatgctgttccgatccttcaaaggagagaagggactgaggataaatgctatttcaaacaaacactgttccaaggatggttaccggataagtcccttcctcctgtgtatcatgtattccatatatattcattctggaaacatttggagttttatgaaattttattttccatgaaattgcttaaacttgttattttgaattgatatagccaacagatctgaaattgatattttgaatcactccaatactgtacaactattatatattaaaaaaaaaataaatgtccaggcgg

SEQ ID NO: 48484 - DNA, 633 bp, Gossypium hirsutum
  Clone ID: LIB3543-027-Q6-K6-B5
ccccgcgtccggtcttatcgaagttggtcttggtgatgatgatcaatgtattgaagatgatttcactgcatggagagaattgctgtggccagagttagatcaacttcttagagagaagatgatgaaaattcgcctctaccccatatacagctgctattcctaaatacagagtagtgattcatgatccctctatgatgcacattgaggataatcactcaaatacggaaaatgggaatgcttcacatgacatccaccatccatgcagagttaatgttgccgtccagagagagctccacaagccagaatctgatcgctcttgcatacatctggagttcgacatatcaggaacttctataacatatgaaactggcgatcatgtcggtgtttatgctgataatagcattgagactgtcgaggaagcagacggattgttgggtcaacctcttgatttgctgttttccatacatactgacaacaaagatggcacgccctccggaagctcattgccacctcctttcagcggtccatgtacacttaaaacagccttggcacgatatgcagatctcttgaaccctccgcggaaggctgctttggttgcgttggctgctcatgccactgaacccagtgaagcgg

SEQ ID NO: 48485 - DNA, 554 bp, Gossypium hirsutum
  Clone ID: LIB3543-027-Q6-K6-B6
atcagacctcctatcagaacttccagtgtgacatggtctctggctgtcctatgggtggaaaaggtcgtgaatctgaatatcctgatacgccgctcttggagttcactgtataaatcacccccttcatgtccgcttcaaggagatatggatatccaactgttatgcagtctgggactgggacaacatcatgactctccagaaacgaccatataacagttggtgaccttgcgactatatctcagaaacttattgtgacagcttacaagagcaagtcaaaaagcttaaggaaagggcaaaagagaacactggagattactttgaaagagaggtcagtgataaaagcactgccgatgtcctacaacctgatcaaacaatgcttagtacctgaactggaacttgtgttgagactcaacctagccccacccgatgatgcatttggacaagtgcttgtactggggatggatacaagccttgacgaggtggtaacacagtaatgtctactgtgatacagagagggtacttgaggcaaattgagagggcaattcattactgga

SEQ ID NO: 48486 - DNA, 616 bp, Gossypium hirsutum
  Clone ID: LIB3543-027-Q6-K6-C10
cgctaaagaacgaactattcatgacttacattgggtgcatgaagaaggaccggtgatcactgacctaactgaatggtatgagaaatcaggacatctgattggaaatgagtatttcttgcatgcttatggtcctatctatgttctctctgcagaggtggtggcttcattggcaggtgctaggaatgacagtttgaggatgttcaacaatgaggatgtcactattggatcatggatgctagctatgaatgtgcatcatgaagataacagagcaatatgtgatcctagatgtactcctacatcagtggcagtctgggatattccaagatgctcaggtttatgcaatccagccagcaaacttaaggagcttcacaagatcggaatgtgctccaagagcccaacattgccacctgatgacatataattcctctttggcttgattttagccaggacctcgattgcgcaaggtaggttagtttcttaaagcaacctccgaatgcgataaatgttgtgttcttattgtttaaccagttaaatcattctatattcttttgccacgtgccggcatgaagctcccggaaatagaaaaagaaactcctaatgaaattacatcataggt

SEQ ID NO: 48487 - DNA, 631 bp, Gossypium hirsutum
  Clone ID: LIB3543-027-Q6-K6-D6
gcggcaggaaagctgcagctatcgcagcagctgatgttgcagtgatgatacagggaacacgacctcgggctgtacattacagtatagcagcgggaccttcagcaactcttcaacaggagggacctcaggctatacattacagtgtagcatcgggactttccatgactcaaccagagcaacctcataccatacattacagtatagcagcaccagcaccttcggctactcctcaacaggagcaacctcaggccatacattacagtttagcaccaggaccttctgcgactcctcaacaggagcagcctcttaccatacattacagtatagcagcaccgggaccttccacaactcctcaacagaaggcatcacttcaatagtgtgacagtcattttcactggcaagaggcttcggtggtgaatgcggactccagataatgtgtctaatatgggcctattcaattttcttttgggcacttgtaatcaagatgtccctgctagtttcagcactgaacctctacgatatatatagtgaatgtcaagggagttgctcaggagaaaaacctcaagctcattgatgtgggcgttctggttgtagggggacatgctggtatcaccattttaccattgctgtc

SEQ ID NO: 48488 - DNA, 643 bp, Gossypium hirsutum
  unsure (1)..(643): unsure at all n locations
  Clone ID: LIB3543-027-Q6-K6-E7
anactttcaaggcgttgagcaaatcccctggtgaatagttgcttcaacgaagagtcagttgaagtcatccttagaggttcccataacatcggaattgccatggctactccaaacggtttagtggtgccaaacataaagaacgttcagtctctttcgatcttggagattaggaaggagctttcacggttacaacaattgtcactggacaataagctcagtccggctgatatatccggtggaacaataacactaagcaatattggagctatcggtggaaaattcggtgcccccattgttaacttgccagaagtagctatcattgcaatgggtagaatacagaaacttccacgagtggctgatgatggagatgtttattccgcctccatcatgactgttaacataggtgcggatcacagagttttggacggagcaactgttgcgagattttgcaatgagtggaaacggtttatcgagaaacctgagctcctcatgttgcatatgaaatgaatgggtaggggctttgtgacaatgaataagcctccagagccaataaaatagttttactggaagcagagacagatgtaggtagtagtgatcttggggtttaaaagaggtccngtagctgtgattgggagaagattgc

SEQ ID NO: 48489 - DNA, 604 bp, Gossypium hirsutum
  Clone ID: LIB3543-027-Q6-K6-F10
ggaagaatacaggtttggagtgccaggatcagaattctgaaagatcttctttgttaaatgcctggggccttgcagggattgtggctgcaagtgtctttatcatttttgcttcagcctttgttgtacgcagatggattatgcggagtggccagctgagtgatccagaagaaattgaggaagagcaaattaaacaacttcctggatcaaaatctctgcttcttgagcagcagcagcaggtcaaaggagccgctgagcatcaatatagcgacatttgagcagccactcctgaaactcacactcggtgacatccttgagggaacccatcacttttgcaagaccaacataatcggagatggaggctttggaactgtttacaaagctaagttgcctagtgggaagactgttgcagttaagaagctaagccaggccaaaacacaaggcaatcgagaattcatagctgaaatggaaaccttgggaaaggtgaagcaccaaaatcttgttccattgcttggatactgttctttgggtgaggagaagctccttgtttacgaatacatgatcaatggaagtttggatctttggttgagaaatcgcagtggagctc

SEQ ID NO: 48490 - DNA, 533 bp, Gossypium hirsutum
  unsure (1)..(533): unsure at all n locations
  Clone ID: LIB3543-027-Q6-K6-F11
tggcctactattatcttagagggcggtgggtgacttgaagggttgttggccaatacatcctgtagacctatttgtacaacatggaaaaccatatcaatgttcagggtcttctagctgacaagcgggcagtctgtacagaaggggaacggagggaccaattttaaagaagcactggcggggggtggtgacaaccaaagtgccgtctacgcaagactacataggactaactacaagaggcgataggcattactcatcccaatcatgacagctggggaccaaagatctggtggagacccatgcattgcatcaacagaaaaagatgatgattctgatgcatgaactttaaaaaactgggaatgacatcttgatagcacaaacaagcaaactatagcccagggtgaaaaggatgacatcataggtaggcgatatgaaaatatacacagaattnttctccatggcgagaagttaaaaaagggacaactatatccatcttcgatcaaatgctatttaagggtgaatgaatactgattaac

SEQ ID NO: 48491 - DNA, 642 bp, Gossypium hirsutum
  unsure (1)..(642): unsure at all n locations
  Clone ID: LIB3543-027-Q6-K6-F2
ccccgcgtccgctttttaacttaaccaaanaccaaactaaatagacctaattattatctgaatcaaatctgaattgaattgctgatccatttcttcccaatcatctctaacaattattcaatgtgatgatatactctttgaaaatttctcattgaagaccttttattgatagggaatttaacatatctggttattgagctattccttttcctgcctgatctgtgtctttctccaggtagacaatgcttacatgctggatttggatagtcttggattcaatgtcaaggttttaataacttttaacccttcatattaaatctatgttattggctaacagaaagtaacgttctccattactttgaagtcaactgatagagatttccaatcactatgccttgtgagttgtgaatcagttcttactgtattcaatttcttgctctatgaatctttttccctgcaggctggttatcaagggaatactttcaagcttcgagttccttttcctagacgtgcagaagatagaaagtgagatatctttatattaaatactttttggtctgaagaaactttccttgatatcttacttgtcatctgttgtttagtagatattgtttttacattntattcaaggcatttgctctg

SEQ ID NO: 48492 - DNA, 645 bp, Gossypium hirsutum
  unsure (1)..(645): unsure at all n locations
  Clone ID: LIB3543-027-Q6-K6-F4
ngatttatgcttttcaagttctccagtcttgatgttgccttattggattaggttcactaactataaatatggtgcacaaggaaggttgtgactcgatgctttgcagattttaatgttttaaattgagcagttaagttgccttatatttatctttctgacttcatatgcacattccatttgcttgcaagttttgcatggttatcaccaagcacactgtatgacagtaattacatgaatgcaaattagttacactttcagagattcaggcattgtattcaaagtgaagaactgtctatcagactattgcaatctgttagggatacatcctcaagtgatccctaatttttgagggagttttatttcatttaatgcaggcattccactgtggttccctttatgctctggtttttcttatttcatgtttttggctgacttatttttgtttgttgggttcagatccaagttatgccactttccatgatgaagagtggggagttcctgtacatgatgacaagaaattgtttgagctgcttgtactttcgggtgcattatctgaacttacatggcctgctatcttaagcaaaaggcaaatgtttagggaagttntcatggattttgatcctgccgctgtatcaaaattgaatg

SEQ ID NO: 48493 - DNA, 622 bp, Gossypium hirsutum
  Clone ID: LIB3543-027-Q6-K6-F6
ccccgcgtccgcccagcgtccgcccagcgtccgatcacactctcacactgctacgctatatctacccaaaaccaagccaaatcccaccttaaattcctttgaaacattcaatcctcaatcttcaggttctgatatgatcccatgattccatttcccattaccagttcttttcacctcagtactcttccaacacattaaaacaacctcttatactaatatgctacaattattgtctcccaccatctcctatccatctccacttttccatctaacttcccatcctttccctccaaaaccccacttctgttctacccacaggttgagcttttacctcccaccaaaaatggcttctttttctgggtttttggctaagtctcagatgggcatgactgctggtggtggtggtggtgatggtgcaaatgggttctcttcactgatggactatgttgggaaaggaggactagatgtaggagatgatttacttgttttgctttatcatatacagtttgcttgcaagagaattgctgctcttgtggcttctccctttaattctgctctcgggaaacattcagctctcactggtgccacatccggggccgctgcttctgatagggataagcca

SEQ ID NO: 48494 - DNA, 625 bp, Gossypium hirsutum
  unsure (1)..(625): unsure at all n locations
  Clone ID: LIB3543-027-Q6-K6-G10
cggnaaggacaacctcctttttgccacactacgccgcaaactctctctctcactctgatgctttccttcattgccttggctcttctggctcacgccttaccaatcgaatgtcaaaatctacttaaacataaattgaacataattatcctggccggacaaagcaacatggccggtcgggggggtgtagccaacgaaacatcgaccggcattgggacatgggacggtgttgttcctccacagtgccaacctaacccttccatcttccggctgagtgcggacctggcgtgggttaaagcccgtgagccaatccatgctgacattgacgccaggaagacagatggggttggacctgggatgtcttttgccaatgcggtgctgaccaaggaccccaactttggggtggtggggttggtgccttgtgcggttggagggactaccataagccaatggcagaaaggggagtttctttatgagcagttggtgaagagagctgagatggcgcagcagagcggaggagtttatagagcaatgctttggtatcaaggcgaggccgatacagtcaatgaagaagatgttgaattgtataaaggtagattgaagacatttttcgacgatttacgttctg

SEQ ID NO: 48495 - DNA, 632 bp, Gossypium hirsutum
  unsure (1)..(632): unsure at all n locations
  Clone ID: LIB3543-027-Q6-K6-G3
cttgnactgttttgttcgcccaggttgatgtcgcaactgaactcggtctttcttcttatatatacttaacctcaaagcatccttcttcggtctcgtgctgtacctacaagcgctacatagacagaacggctcggaatttgaatacccgaaccccgaaaatccaaacaaggatcttggacatttgatcccaggatttgcaaatcctgtcccttcacatgttctgccttcgctcatgttcaacaagcatggaagttataccgcatttgtcaagattgctgaaaggttcaaggacgccgaaggtatagtgataaatacatttgaagagcttgagacttatgctcttagttgttttgtcaacggccaaaaccctccaatttatccagttggaccagtgattcaccctgatagtttgcctcaccctgaattggagcagctccaacgcgacaggatcatgaaatggcttgataatcagcctgaatcatcagtggtttttctttgcttcggaagccatggatgccatggaccaccccaagtgaaagaaatagcacttgggttagagcagagtgggcagaggttcttatggtccttgcgtatgccagaaacaccactaaatgacgctgcaggagcagtta

SEQ ID NO: 48496 - DNA, 549 bp, Gossypium hirsutum
  Clone ID: LIB3543-027-Q6-K6-G4
cccacacttgcttgaggcatggaaacgaggcacttagaaaatcacattgcacagctacaattgcatctatgagctgatgtctgaggcactagtttatgtactatggattattgcttggttgaatgcctagctgcaggaactatctatccaattacggagacacaaccgctaaagctttaagtagaaacttaagtccaaactcagaggcaaaagctaaagaattgattctcaaaatatgcacatacctatggactggctagcatagattataattgcgatcaatggtgttattaccaagcttcctaaactgaataacttgctgatcctctgatcgatacttcatttgatacaaaatcaaccacttaacctaaaactaagttcttaactaatttactgaaactaatacggagacaagaccggcataaacacagccatgcttcatcacttgctaaatctgatcatgtacacgatcctgcaacctatacttcaagcacaatgagcgactctgtgcccatggctagtcccctgagtgataggcttacaactaca

SEQ ID NO: 48497 - DNA, 565 bp, Gossypium hirsutum
  Clone ID: LIB3543-027-Q6-K6-H10
tccatcctccatcccgcattcggggggggggcgacccgacccactgcttttaatgtgctggcctaaatacaacgaccaatctatcaaagaaaagagttgaatctaatctggtaacaggcgatctagcgtaaccaaacacaggaaggtaaataatcgacagaatttaaaagcttgcttggtggggggaggcgtgaggaaatccacttatgatgcataagccaattatgtaaatacaaagaggccactagggatattcattctcttcttgctcacacacaatcaatatacactactcttgatatgaaagcgaaagagtgtgagaattagcctgtcagaactggtgaacaaggtgctgaaacaaacaaggtgcaagccatgggccaggaattgaaagacatagatgtggagttgaaatttacatttactatgtacagacatgaatttactgattcaatagatgttttcaaagctatggattcagaatacaaggcatgccctcatattcaaagtctgaaatcttaacttgatgagcaaaatctagaattacatgttaagacggctaatg

SEQ ID NO: 48498 - DNA, 612 bp, Gossypium hirsutum
  unsure (1)..(612): unsure at all n locations
  Clone ID: LIB3543-027-Q6-K6-H11
ngatttgtacatcactngatataggggggggatgtgtgggcactgtgcttaatatttgggcatcgaataggttacttgtttacaagtgatgaggaagtagcaaactccgtggcagacctctctttgttgctttctttctcagttttgctcaacagtgttcagccaatcctctgaggggtgcggggggtgctggtagacaaaaatggttgcatgtgttaacatctgttcctattatgtggttggtgtgcctttaggaattcttcttggatatgtagccaaaatggaagtcaagggaatatggattgggatgataattggggttgcagcgcaaacatttgttctagcctacattacctcaaggactgattgggaagaagaggttaataaagcatcagagaggctaaacaagtggctattggagccttcagagacatcttatgggaagcttagtggtgaaacagtgaatgaatgactcaacaaccatttcactatataagcttatagtggtctgaaacgtatgcatatttttacacgtaatcaaagttttgtttttttattaagttaaattcatggaggaaaagtcagaaattttagtaagtatcctatcttctg

SEQ ID NO: 48499 - DNA, 476 bp, Gossypium hirsutum
  Clone ID: LIB3543-043-Q6-K6-A10
cttatggggatgtgaccctcaagtctatgatccgagcttgcattttgaagcatgttattatcaggcaatcgaagcggctatcgagttgaatctaagcacagtagaggctggagctcagggtgagcataagattcagcgaggctatttgccggtgccgacttatagctgtcattactttatcgatgaaggtttcgagcaggccataggggaatttctggttcgagaatcaaatcaggttgaccttgttatgaaactatttcatgaatctggtccctttaaggagggcatacactaacggagagttgctggaagtttaattgaaaagccattgtacataataacattgaaagggattgtgagaaatttgtatgcaaatttagactgtttattttacgtggtagtagaataattaatgttaatgtaattagagatgttaacaagacatttatgtttgtgagttattctagtttggttct

SEQ ID NO: 48500 - DNA, 508 bp, Gossypium hirsutum
  Clone ID: LIB3543-043-Q6-K6-A3
gggggcccattttcacccaggggatgcggggcataaagaaaggggtctcaaaaatttgaacaattggaaaacacacatttgggaagagagaaaacaatagttatacaagatgggggtcagttttttaaaaacaaaaaaacgagcttccatttttccaagaacctataaggtcctacaccaagcccacgcaaatggacaccccaagcccttaatcctccggtgcccatttggggggggactggctagccaaccccccccccatgggagttacttaataacccatgggggggtcgtcaacaaaaagggcccccttgataaactcccgggagggggggacgggccaaaaaaaacccctggggatgatcccgggggggagctcaacgttaaagatgatcccccgcatggggggctttttttcgccccttacgggaaaaagggaactggggcccacccaccccatccaacccgggatttaaaagaaaaaccccccggggggataaactccccc

SEQ ID NO: 48501 - DNA, 641 bp, Gossypium hirsutum
  Clone ID: LIB3543-043-Q6-K6-B3
cccagcgtccgcggtcgcgtgggcggacgcgtgggtagataacctactggttttaacgcttcgaacatcttgaatcttgtgaaagggagggccgcttatctaaggtatttgaaacacttctccagtcatttcgggtaacagttctaagtgcctacaagtcaaaatttgctcagtttgttatgttctatgcttgtgcattagatcctgaaaactgtggtatgagatttgccacaatgctggcagatctatttgttcaagactcacagccccaaccaaccaggatgagtgctgtatcttatcttgctagctacttatctcgagcgaagtttctggctgcctcttctatttctagcatgttaaaaaggttggtggattggtgcctggaatactgcgaagcccatgatggtgatataaatccaaatgcacatcgagttttctattctggatgccaggctattatgtatgtcctctgctttcgaatgaaagttttcgtggatgttccacgcttgaagtcagaacttctcataccattggaacaagtcctaaagcacaaattgaatcctttgaaggtatgccttccatctgttgtggaagagtttctccgacaggcaaaagcagcttctctattcactgtgtgtaaa

SEQ ID NO: 48502 - DNA, 134 bp, Gossypium hirsutum
  unsure (1)..(134): unsure at all n locations
  Clone ID: LIB3543-043-Q6-K6-B6
cccacgccgtccgaatagnatagatattatgttttggatttatgttcaagtcatatgtggatcaacaacatgtattgttagaaattaccttgcatggtcgttggggatcaaatcaatgatttcattgctggctc

SEQ ID NO: 48503 - DNA, 588 bp, Gossypium hirsutum
  Clone ID: LIB3543-043-Q6-K6-B8
ctggagtctcgaaaagggcagttggatttaatcggctatcattctttaatttggtaaagtgaaaatccaaattacagggtcatgccaatcggtcctatttgaagttctctatattgctatacaactggagatgttttggtggggtctttaggagacaactcttaggtcagggtatggaaggaggagaattatagctggtggtcaagagtggcttctgaaaaaccagtggggtttgtttactttcatgatttgttgggtaattgaataagaattggcagtcagtggtgtaacaggttttggaccgtagtggctgctgcttgcatttgtcaaatcactagtctgtttatttccatattcgactgatatgctacatttggattgttgttcttgtgggtattaaagccaaagcaaatcttctgtctttaacctgtgagaggtatttggtctggaaaacattggctttgttagcctcaaaccccttgtgatgaaggtaagcattaagtaatcatactttagtagtaattaacaagcattgtatttaattttttttcattgcccttgggaaccaattgcaagggttgaatatag

SEQ ID NO: 48504 - DNA, 662 bp, Gossypium hirsutum
  unsure (1)..(662): unsure at all n locations
  Clone ID: LIB3543-043-Q6-K6-C1
cacatatcggtggagcaaatgaacactggttgaaaatcgggtattggaatgcaatattcggaatatgcatgctcctccatcaccgttagtagagaactacctgcgggaagcgagattttggcacgtggcgacggtaggccggggatgcaagttggagtcgaaactgatcagtgcgttgatcgagaggtggagacctgagacgcacacatttcatcttccatgtggagagtgcactatcactctagaagatgtccatctgcatttgggattgccggtggatgggcacccagtgaccgggtctgcccaatctagcaattgggaggcggtgtgttacgagcttttgggcgccgttccggataaaatggatggaggtaaggtggagatgggctggttacgtgccaccttccccagtctgaatgaaaattcaaccgagattgaaagaatccgatatgctcgatcatacattcttcaaataattggaggctatctcatggccgacacatcacggagccgtgtacatctaaggtggctgctaaaactcgttgattntagagcagccggtgaacttagttgggggtctgccgtcttggcaacattatatcgggagatgtgcggggcgaccaataccgagagagcaaaaatcggagttgcctgtcactact

SEQ ID NO: 48505 - DNA, 648 bp, Gossypium hirsutum
  Clone ID: LIB3543-043-Q6-K6-C10
gctgaatattccaatcatgagaaccactgtaagaaaggaggaactctctgccaaattgttggaatttctggaatctccctgtgctacaactgacattctgcttgctgaaaaggaacagaagggtaaaaagcgtaaagctacaccaagcaaaaacattgcttctggtgaaacatcagagaaatcagccaagaagcgacaaagccaccccaggtggggaaaaacgtaagcgttcatccaaagttgaggaaaaagatgaagatgttgaatcccctgtcagtgaagatgattctcatgaggatgatgttgacactacagtcaaagaagagagtgatgacgaagagactaactcaaaggaagaagaagacgcacccaagaagtcaagccataaaagtacctccaaaaagattgcaatggatcgtccagattcaaaacttaaggagacatcagcatctggaaagaagcttacctctgcaaaatctagcagaaaatcttctggatcaacttcaaaacagggtgctagtgatggtgataggactccaggctctaaattaaagggttctgcatcaaaaaagcaaaaagttggaaaggaaggctctattgatggtaaattgtccaccaaaagtgaggttcctggcaagaagcaaatga

SEQ ID NO: 48506 - DNA, 334 bp, Gossypium hirsutum
  Clone ID: LIB3543-043-Q6-K6-C5
ccatacctgttggtggctttaagtatgaccctttaagctatgctcaaaactttgatgatggctatggtgatgatgacccagaggtgctctttatcatggattttcttctagatatgctgctccttcatcaagatcagttacagacaagtgaaaatggctttggaggtgaagcactgaagatttttcatgtttttgctgtatgtgtatagtgctttagattaatggttttatgaactttttatatgcagaaaaggaaaaaatatatatagaaacatgatatttttcatagttccttttctttttgttttcatttcttatcgagaaaagtgttaat

SEQ ID NO: 48507 - DNA, 635 bp, Gossypium hirsutum
  Clone ID: LIB3543-043-Q6-K6-C9
cagtaaccgatagacgatgatgaatccgcaccctctaagatgctaaactatcgtctcccaaattcttcaacgcgttcgagttcatttcctctatgtcgtcggggttcgatctgtcgggcttgttcgaggacaagagaaaatcggggacgatgtttacgtcaagatgttcagccagtgctataatgtctaaagtcgaagctgttgcgaaggggttgaacttcagggtggggaaagccaaagacttcaagatgagattacaagggtcatcggaagggaggaaagggcggttgtttgtgaccgctgaggtgttcgaggtggcaccggaggtagcggtggtcgaattctccaagtcagcaggggataccttggagtatgctaagttttgcgaggaagatgttaggcctgcattgaaagacattgtttggacatggcaaggtgacagtttcaatgaggcagaagaacatgaaaaacaagtacaacaagacacagccgagcctaacacattgtagaaaatagggaaaattttctgtgtttacccttttttttttttcttgtgtgtgttctgttttggtggaggatgagaatctgtaaatacgtattctgtgattggtacaataatgcataatatgggtttg

SEQ ID NO: 48508 - DNA, 636 bp, Gossypium hirsutum
  Clone ID: LIB3543-043-Q6-K6-E1
cagaatgaaccatgtggcatgccatatctaactgtctgattatcctatcagccacgtcagtttttaacagctgaaatggatgaaatttttaacacaaaagaaccagtttgctatttgatctatcatacatggactaatttgctcattttttgagtaaaaggagcaaaatacaatctagatcttagtataggtgactccatggtacgtttaccagaaaatctcttattttggatcccagaattactagcaatttcaaaagctttgtgccaagaaatttacatgcaaagtgtagcttcttctagaacatcctctgatgaactatttctgcatataatcctttcattttacagtaccattgatatttttggacgtcaaaagtgccctaagtaggtctataactacaagccttctctttttcgttctcatgtccggcgtaatatttttaaagatatgcatctttcaaataggactggttggcttgtttttggctgatgtgcatatgttcctttttgtaggccctggatacattcaatgccacacttgtttctccggtatattatgtgatgttcacgacttttaccattatcgctagtgtaatcatgtttaaggtgaaaaattttaattcatcggaacacg

SEQ ID NO: 48509 - DNA, 657 bp, Gossypium hirsutum
  unsure (1)..(657): unsure at all n locations
  Clone ID: LIB3543-043-Q6-K6-E10
ggnaatcgcataacaactcattaggaggggagcgcgggaaagccgtcagatcacacaggtatatggattctatgacgaatgcctgcgtaaatatggctcggtgaatgtttggagatattgcactgaaatctttgattacttaagtctttcagctcttatcgagaacaaaatctttagcgtgcatggggggctctctcctgcaatatctactttggatcagattcgaacaattgatcggaagcaagaagtaccacatgatggtgccatgtgtgacctgttgtggtctgaccctgaggatattgttgatggatggggtttgagtccccgtggtgctggtttcctgtttggcggcagtgttgtcacttcgttcaaccacacaaacagcattgactatatatgccgtgcacatcaattggttatggaaggatacaaatggatgtttaataaccagatagttacagtctggtcagctcccaattactgttatagatgtggtaatgttgctgcaattctcgagctggatgaaaatcttaacaagcagtttcgcgtgtttgatgcagcacctcaggaatcaagaggtactcctgccaaaaagcctgctcccgattactttctatgaaacagatgtgaagctttaccttttctagttaattacac

SEQ ID NO: 48510 - DNA, 637 bp, Gossypium hirsutum
  unsure (1)..(637): unsure at all n locations
  Clone ID: LIB3543-043-Q6-K6-E11
caggnaaccttaacacctggtgtgacattcaaatcgatatttcgggtaaatgattcctgttccgtgccttcatgattgtcgtctttctctacgagttgttatattcactttttaacaacattgtttccatgttcatagagtatttcaatgcccaatctgagtctggccccgaggctgttcaaaaacaggcaactcaaacccctaaaaatgttgttttcaaaggtaggaagtcattcatatgtcctcccactaaactgccatcttcaattgcctacccatttgctttcattaaaccctgcggtttccacggagacgtgaccctcaaggatataaaccagcgaatccaaacacccccaccgtcaaaaccgaaacaaagcaacgaagatctaccgacttcagctttttccgggaagcttgttgttggcaaaactaaaatacgtaccgaaggtggtaaaggcagcatcacgattatgagaaccaaaggataagtattcgcggccctttccagccccctctcgattatggtggttgatcatctctctggttattgctgactctgactagcatagaatctgatacagggtacatgttgatgatatatatatagtttacttgtagtggaagcataaggttttac

SEQ ID NO: 48511 - DNA, 585 bp, Gossypium hirsutum
  unsure (1)..(585): unsure at all n locations
  Clone ID: LIB3543-043-Q6-K6-F12
ccnccgccgtccgaaactggagggggggggggggggggcctcaaaataacgaatcattgagccggcatctactaattctcgtgattagcaacaactaagcgaatcgagacataatggcgacttcagtccatgtgggaaaaacggactttctgctctgcggaaactattcctaggggggggggggggtantcccttaccatactcttccagcttatgggatatcagtggacactattcgtcccagaaagaatgccagcgaaacttaccaaaccgatattcatcaactttccagtcatgaaacctataccaatactccgggccacattttcacactaaatgcctacatttgaagatatagaccatactaacatatgacggataagatatagccgctagacaaactactgaatatatggcgttggatgcattcgtattgaacatggttcacaatattggtaattctggaaagcctgttgattcaatttgacctggacaattgatattagctgctgccaacgcagatgagggtctaaaaagtactgatttccctgctgttggacctacacttattgccgctggtgcatt

SEQ ID NO: 48512 - DNA, 634 bp, Gossypium hirsutum
  Clone ID: LIB3543-043-Q6-K6-F3
tttttaactttgtaactctaaaaaaaaaaaaaaaaccatttttgtagtagtccaggaacatttagtggaactccgacgagcaagcaacttcaccaccaatctcagccgtcgcagctgcaatctcttcaactgggcgtcgcctctcgattttttgaaatctcgcactgcttcactcttctttttcgactgttagacactattagttttgctataagtgttagatcctagatcttcacattcaaccaaactccgccattgccacctcacacggagcttttgctactgttgtacgaagagagagatctatgaattctccaaatcagttccctaaattctaaccccaaagaaaatgggccctccgaagaaacacttcgtccctttcctcctcctccttgccttctgcatcctcctcctcctttactcgcctcgcccaaattccatctctacccaattccctctaaatccccactctatcgccaccagtactgccacctctgcctccgcctcctcaaccttttcccttactatcaaagtccttacttttaaccgtctcaactccctcacccgctgcctcacctccctttcaaaagcccactaccaccccgatcacccagtccacctccacatcttcgtc

SEQ ID NO: 48513 - DNA, 647 bp, Gossypium hirsutum
  Clone ID: LIB3543-043-Q6-K6-G4
gacaactctaaggctgattttgttgaaaaatacttggaagacgctgcagttgcaagggcactgactgagggatgcgaaagacaagatggaaggccttttaggcaacgactgttggtagtggccaataggcttcctgtttctgccgtgaggagaggtgaagattcatggtcactggaaataagtgctggaggccttgtaactgctctcttgggtgtcaaggagtttgaaacaaggtggattggatgggctggtgtgaatgttccggatgagattggacagaaggcacttactaaagctttagctgaaaagtggtgtatcccagtattccttgatgaagagattgttcatcagtactacaatggttattgcaataatatattgtggcctctatttcactaccttggacttccacaagaagaccgccttgctactacaagaagtttccagtcccagtttgctgcatacaagaaagccaatcaaatgtttgctgatgtcgtaaatatgcactatgaagagggggatgttgtctggtgccatgattaccacctaatgtatcttcccgaatgcctgaagaaccacaacaataatatgaaagttggttggtttctacatacaccattcccttcttctgaaattataggacactg

SEQ ID NO: 48514 - DNA, 636 bp, Gossypium hirsutum
  Clone ID: LIB3543-043-Q6-K6-H6
cccagcgtccgtaatgatcccatgactgacgggttgatcacttggggtaaagctaataacagtttcatagtcatcgaccttttagatttctctcaaaggatcttgcctgtttacttcaagcatagcaatttttctagcttcgttcgccagcttaatacttatgtaagtggatacaattcttttaagttggacttacttcaatttttttatttatataattcatataattcttggtattggtgtttagggtttcaagaaggtggatccagataagtgggaatttgcgaatgagtggttcctgcgagggcaaaagcatttgttgaagaacatagcgagaagaaagcataataaaaatccattcatgcaactgaaagctgaggatttagaggacgaagaaatagtgatggaaatagcgaggctaaaagacgagcaaaagtcgttggaagaagagctgcaagggatgaacaagcgtttagaagccactgagagacgcccgcaacaaatgatggagtttctttacaaagtcgttgaagaccctgacctccttcctcgtatgatgcttgaaaaggaacggacaagacaacttaacgccgacaagaagcgacggttgacgatgatgccctccaactcatcatc

SEQ ID NO: 48515 - DNA, 588 bp, Gossypium hirsutum
  unsure (1)..(588): unsure at all n locations
  Clone ID: LIB3543-044-Q6-K6-F10
gtttgatttcatctttgttagggccttttacaactcatgctgttggttgtgaggtaattggtgtacttgtttacttgaaccttgacttgaattccatgtctgatttgttgcaaccagctaaaatatctttaatggtggatattctaaatgaagggtctattgagactaagataaattgtactagattgattggaatgttgatagaagggactgattttgcttcccaaaatgttgcaagtttgagtcttttagtcggattgttaaggctagtgaaagacaagaagcatccaaatggtgtagtagctggtttgaatttgcttaaaaccatttgttcgcatgaacctgttaggaactcatttgtcaatgttggtgcagttcctcaattagttgagttgatacctggtatgaacaatgaatgtttggaattagtccttcatatattggagcttttgtcaagtacacctgaaggaagattggctntgaaagattgtccgagtactataccaaatgtggtgaaactattaatgaaagcttcnngaaactgtactcagctcgcgttatcgatattgtggtccatttgtaagtttg

SEQ ID NO: 48516 - DNA, 613 bp, Gossypium hirsutum
  unsure (1)..(613): unsure at all n locations
  Clone ID: LIB3543-044-Q6-K6-F11
cggccgcgtgggcggacgcgtgggttcgatcgctgtngagcgganaaaataaatttattgctaatccaaacaattcggctgtcagcgtcttctctgcctccatgctagattcaggcaattttgtgctctacaacaaagacaatcataccatttgggagagtttcgagcatcctacagatacccttttaggtggtcagactctattaactaatcacgagttgatctccagttcatcagagaatgatcactcaggtggaaggtttcatctaagtatgcaaggagatgggaatctcgttctataccctcgacagtccgaagattctgctataaatgcctattggagcacaaatactttttggatgggcttgtcgctccgcctttttcttaacgctaccggcctcctccaactcatcaacaacgatgattcgtccatctacgagacaattaatctttccttttttccagagccgacctacaatgactacaacgaaagcagcagcaacaacaacaacagtactgttttcagtgcaagccttgatgttgatgggaatttccggttatatgctcatctgtttgagcgaaatggggggtttcagacttatccactgttgag

SEQ ID NO: 48517 - DNA, 621 bp, Gossypium hirsutum
  Clone ID: LIB3543-044-Q6-K6-H11
ccccgcgtccgcaataatttcaggtggcctccttcctcaattcattttatgtttcgattcgaagtctaattcttcgtttcgttttaatctcttatagaggaaattgataaaaaggaggaagatgggcctgaagcaaactataagaagcctggatgcgtttcctcgtacggaggaacattggttgcagaagacgcaatcgggagcacttggtgagttatcctttctttttatttatttatttcaatttaatccaaaaataatgcttcttattcattaaaagcattgctaatttcatctctctctctttttggggggggtaaaattctgtattatagtctcgattgttggtttagtgataatggccacgctgtttactcacgagcttacgtattacctaacaacatacacggttcacgaggtttgcatttttttctaattttcatcagttttgctacctgtttttgtagattaattgttgggatggaatgattgcattgttattttgttgaatttcttaatatttttgtagaagcaaaactcaaattaacatgtttagaattagaccttctgggtcctaatcttctgtttctagccgaagtgtgtcatagaggcttaatgttc

SEQ ID NO: 48518 - DNA, 622 bp, Gossypium hirsutum
  unsure (1)..(622): unsure at all n locations
  Clone ID: LIB3543-047-Q6-K6-B12
ncccacgcgtccgggnatctataggtggtgggtgcactactagcagctcgtgcttttggagcaccaagaatcgtcaccgtggacggcaatcgactatcagtcgctaaagaactaggtgctgatggagttgttgaagtctcaactaatatgcaggacatacccaaagaagttgaaacaataggtgatgtgatgggagcaaaagtggatgtaagctttgactgtgcaggccttagcaaaaccatgtcgactgcactgagtgtaactcgagctggtggcaaggtttgccttgtgggattaggccataacgagatgactgtcccactcacacctgctgccgctagggaagttgatgttattggggtatttcggtataagaacacctggcctttatgcattgagcttctaagaagtggtaagatcgatgtgaagccattgataacccacaggtttgggttttctcagaaagagattgaagaagcttttgaaaccagtgctggtggtggcaatgccattaaggtcatgttcaatctgtgatattcaacaagattaaagatgctaataaaacagtgtcatgtataacctctggcagtatatgtaataaatttgatgtttgagtaccctt

SEQ ID NO: 48519 - DNA, 603 bp, Gossypium hirsutum
  unsure (1)..(603): unsure at all n locations
  Clone ID: LIB3543-047-Q6-K6-G10
cccagcgtccgctcagctcgtacaacaacaatcacaaatgggacatcctcaaatgcagcagccacagcaacaactacagcagcagctgcaacaacaacctcaaccgcaattacaaccacaacaatcaccattgcatcagcaacaacagcaatctccgaggatgcccggacctgcaggccagaaaactctcagtttaactggatcacagcccaatgcaactgcatctggtacaaccacacctgggggaagttcaagccaaggaactgaagcgaccaatcaacttctcggaaaaagaaagatacaagatctagtttcacaggttgattcgcaaggaaagctggaaccagaagttgaagatctacttctggagattgctgatgatttcatagactctgtgactacatttgcatgcagtttggcaaagcatcggaaatcttcaacattagagtccaaggatatcttgctacatttagagaaaaactggcgtttgactattccaggattttctagcgaagagcggaaccaaacaagaccgttatcgagtgacctncacaagaagcgtcttgagatgatacgggcactgatgggatcgtcacagcccga

SEQ ID NO: 48520 - DNA, 628 bp, Gossypium hirsutum
  Clone ID: LIB3543-047-Q6-K6-G12
gcgttcgccccgcgtccgccccgcgtccggccggcgtgcgcgacaaaccccaaagctaaaacccagaaagctccttattacggttttaatgaccgtacagttcgggaacaactgatttagagtcaaataaacaatctgggtcttttcttttatgccggaaagtagaaggctttttacgagaggagggagaaataagcgagagtgatgggtcaggcatttcgccgagcgactggtaggcttcgatcgatggaccaatctcaacccacaaaaccaagaagacctttgggtcccaccgatgaacagaagatatccagagtttcacagcatgaaaatcttgatcatgcaagtgttgcaagaagcaatcctgagaatgtattggaagaaagagatcccaagtatgatgcaatgctaagtcaaatggtcggtaggatttcagctaagcctggtggcaaacttgagatgggtgaggcttttgtggctgaaaatcctagcaggcctttgccaaaattgcggaacacaacggttgagtcaggaagatatgaagaaaggcctgcacctccgggaaccttgaatgtgaaacagctacgtcacatcatgcttttacatcagggcaaggccgatgatcatg

SEQ ID NO: 48521 - DNA, 252 bp, Gossypium hirsutum
  Clone ID: LIB3543-048-Q6-K6-C11
ccccgcgtccggttctagatcgttttaacccctcaggtactgttgattcttccaaagatgagcttattaagattagctttggtggtttgaagaaacttgttttggaggctatcacttttggttcttttctatgggatggtgaaagcttcgtagattcaaggtaccattttgttatgaattagatatttttcaattgcgtccctgttaaagtaaaaactttgtagtggagttcttactatattatggtttaat

SEQ ID NO: 48522 - DNA, 494 bp, Gossypium hirsutum
  Clone ID: LIB3543-048-Q6-K6-E11
aaaaacctaaaacttttgaggaagtgtggtgagttacgcctcatcttctgccttttcgttggacgccgcctccgtcaaagatcccacacgccacggccaccgtagacacgagcacgactccggttgtgaggacgtggaggaaagccggacgtgggcgtgcaacatgcgggctagggggggtgcttggtgtaccgacgtgcgtggtggaggggcgttgaacgcgggctgtggcccaagggaaaatggaaaccctagggtttccgaaattccaaaaaacctgagcttatcgggcatgtttaatctgggtttgtatttgggtctattttttggggggttagtttcattttttgggtttgttattttgttttttatgtgtatgggctgtaattgggtatttgggctaggactaggtagcccgggtaaaatttgtgtctcacagtacaaatgtattaattatatttgttattaaaataaatattttataattattaatt

SEQ ID NO: 48523 - DNA, 393 bp, Gossypium hirsutum
  Clone ID: LIB3543-050-Q6-K6-A12
tatttgatccatatatgtatatcaacatctccttatcaatagcataatacccaggagggggggaggggcacataaatgataagaaaacttaaaaaaggcctcacttcttcaacatagatacaaatatctctttttaatagaaaaaatggtcaagatagtctattgatcttttattctaaagagaactagtcataaagcaaaaaactttattcctatctactatcaaacactaatgctatatgccatctcaccaaaccctcaaattacactccaaaccactacaaagttccattaattccagatcttatgatacatatctctatagcaccagattaatggtttctgatgatctaacctacaataactaataggttaatttttaaaaagaataag

SEQ ID NO: 48524 - DNA, 628 bp, Gossypium hirsutum
  unsure (1)..(628): unsure at all n locations
  Clone ID: LIB3543-050-Q6-K6-A3
attttaaaaaagatgaggagttccaaaacaaagtatttactgccctaaagtgttttgcttcatgggcctcctgggactggtaaaacactgctggccaaagctattgctggtgaagcaggactaccattctttgcagcaaatggcactgatttcgtagagatgtttgttggagtcgctgcatcacgtgtgaaggacctgtttgccaatgcaagatcatttgcaccttccataatttttattgatgagattgatgctatcggtagtaagcgtggggggcctgatatcggtggtggtggtgcagaaagggaacagggtctgcttcagatactgactgagatggatggatttaaagtttctacatcacaggtgttggtcataggtgcaacaaatagactggatattcttgatcctgctctcctgagaaagggtcggtttgacaagataataagagttgggttgccatctaaagatggcagattggccatattgaaggtccatgctagaaataaattttttcggtctgaagaggataaagaggctctcctggaggaaattgcaatgcttacagaagatttcactgnggctgagcttcaaaatatattgaatgaggctgggattttgactgcca

SEQ ID NO: 48525 - DNA, 492 bp, Gossypium hirsutum
  Clone ID: LIB3543-050-Q6-K6-B11
gctacccgttcgacccaacgtggggggggggggaggggatctcaacattaccgagctctgacagtacctgagctcaccggagcattatgtgggacacaaagaactgatgtgtgcttgctggtcctagaaacggacctttcttgactgattctgctatgtctccatgctacaaatgagcagcggggcagagtggatcagcaaatgttgaatgtccataacaagaactgctatactttgattagtggtatcccagaacaatgagaaatctaccgtatgtgacattcctcccactgctctgaagatggagttagcattgattggcattgcaacatccatacaagagatgttcaagcgtgtgagtgagcaagaaaaagcttatcgttaggatgaaagccttcttgagttggtacacatgggaaagcctgtatgaaatggagttcactgaagctggaagcagcatgaatgatctggcctacaagtatcaccagtacc

SEQ ID NO: 48526 - DNA, 490 bp, Gossypium hirsutum
  unsure (1)..(490): unsure at all n locations
  Clone ID: LIB3543-050-Q6-K6-B4
ccccgcgtccgcggncgcgtgggcggacgcgtggggcaaaatccaaccgtgtgaaatcaagcggaggggaggtggacgagatccaagggttcgatttcgcggagtggttgaaaaacactgtgacagagagcgatttcgtggtgatgaagatggatgtggaaggaactgaattcgatttgattccgaggcttttcaaaacaggggcaatctgtttgatcgatgagatattcctcgaatgccattacaataggtggcagaggtgttgtcctggtcaaaggagtgctaaatatgagaagacatacggccaatgcttgcaactctttacttcactccgtgaaagcggggttcttgtccatcaatggtggtgagtgagtttcattagccttcctatgttgtgagtcaactatataggttcttacgttcattctgggttttagcttgttacatctgttgttcagttcattcatttaaatgggaatgtgggttcaaa

SEQ ID NO: 48527 - DNA, 636 bp, Gossypium hirsutum
  Clone ID: LIB3543-050-Q6-K6-D3
cccagcgtccggttattccttgcatagaccaaagctctgctgactcacacaatacctttgcaagtgatttgataaagcagtttaacaccattgagcaacagataaactcagttactcgtggtgtaagcaagcagactggcactgctacttctggaattgaaggtcctactaataaaattaacaatcgcaaaggcataagaggtggtagccctggattggctaaacgaacaccagctcctgtggagtctgctccgcctccttcccctgcagctttgcgagcttctatgtcattgaggttgcagtttattgtgagattgctgccaatcatatgtgcagatggggaaccatcagcgcgaagcatgaggaatatgcttgcctctgtaatacttcggttactcggaagcagggttgtgcatgaggatgttgacctatcttctaatcttgcacagttgaagagggacatggagctgatgccaattgttgcatccacggaaatgtctggagatagtctttttgatcgcttattgttagttttgcatgggttgttaagcagttgcaagccaagttggctgaagtcaaaggatgccaaggatttttctggatttgaccgtgaagcagtggagggtctgcagaatg

SEQ ID NO: 48528 - DNA, 599 bp, Gossypium hirsutum
  Clone ID: LIB3543-050-Q6-K6-D7
cccagcgtccgcccagcgtccgcccacgcgtccgcccacgcgtccgcccacgcgtccgcggacgcgtgggtggagaagggaaccattacagtcctccgagaataatgaatccacatgcagctgagtttgtacctggccaaccttgggtggttcctaatggctaccctgtctctccaaatggatttttggcttctacgaatggtatgccaatttcgccaaatggttacccgatgcctccaatgacaccaaatggtattgctgtgacacaaaatggatttctcacatccccaataggatcagtagaatcaccagctgttataactgttgatattgatgctgaaaacagaagcggagaattactagcggagcagactccggagatttcctccacatatgttgaaggtgaaaatcaatcaagtgagcagaaaccaccagaagatcaatctttagacaatgaaagcaagcttcttgaaaatgaaggaaagcctgcagatgtggttcctgtgactggtggtgttactctggcaaaagaagcttgcagtgaaatacaggttgatgcaaaattgagtaagtggttggggagattatagtgacggtga

SEQ ID NO: 48529 - DNA, 407 bp, Gossypium hirsutum
  Clone ID: LIB3543-050-Q6-K6-E1
aggacgcatagtcgtaagcgttgctttaactcactaaggatagaacccaaaatgggccataaacatattaccctattacgaatatattgatcgagagaaatcattaaccataaaactatcattctataatcaaaggcggacgaagaaaataaacctggtgacaccagaagaccaagatccaagtatgtagaaaagaatagagaagagccaatattaggaagaaaggaaagctgagaagccctttgaggaattgcatgctgaaactcccgatggagaaacacaccccatccccagcagaatacatcgtatgagagcatataacccgttcacatgcgacattacatgtgggctaggaaagttcaccggtgccttaacggcttacattgctaacaagatgcaaagactga

SEQ ID NO: 48530 - DNA, 460 bp, Gossypium hirsutum
  Clone ID: LIB3543-050-Q6-K6-E11
cccacgcgtggcgaaaaaaagtagggggggggggcttaaagaagattaaagccgagcttatagtactgacttacctcaccacaggggtttgagaggctcttacactctcttttctactctggcatatacggtggtcagaaacctactattttactttttccgagcatatagagtggggcggtgggttttatttaatatgggactggatatatatatttaaaaaatatacacatttaagaatgttgatcgactatggtacttaaatgtgtatatatatgtataaataaactatgtattgaatttatgagagaattgctcctaaaaaaccgtaccttacatacttcttattaactctttttatggtcactgaaaataaaaataaaaatattcacaatttttgatttattgcactaccatatttgtgtcgcctgtgtcgctgtctttccatgcaaacaggggt

SEQ ID NO: 48531 - DNA, 624 bp, Gossypium hirsutum
  Clone ID: LIB3543-050-Q6-K6-E12
ctctatttctctcaaattcctgcgtgggggggggggttaaaactctctttaattattttaaaaaagctctaattttatttttttgaatttttttaaatcataaaaatttgatcgtgttagcaatggccagagaattaattcgtctcgataacaagcacatatccgtcgaacaaataaggggggggggggatcggatattgcaatgttatatccgtaatatgcacggtcttccatcaccgttgatcgagaattacctacgggaagcgggtttttggcacctggcgatggtaggccggggatgcaagttggacccgaaactcattagtgcattgatagagaggtgaagacccgagacgtacacattccatctttcatgtggagaatgtactatcacgttggaagatgtaaatttataattgagattgccggtggacaggtacgcagtcaccgagtctgttcaatctggtgattgaggagcgatatgctacaagcttttgggtgctattctggataatattaacgaatgtcggatcaagatgggctggttacgagacaaattttcggagccggatgatgattctaccgaactagaaagaatctgatatgctgaggcatacattcttg

SEQ ID NO: 48532 - DNA, 657 bp, Gossypium hirsutum
  unsure (1)..(657): unsure at all n locations
  Clone ID: LIB3543-050-Q6-K6-E5
ccccgcgtccggggnaaagatggatgcagataaggcattggagttactaaagagcggagctacgcttctcctccttgacgtccctcaatacactcttttcggcatcgacactcaggtcttttctgtggggcctgcttttaaaggcattaaaatgattcctccgggtgttcatttcgtcttttacagctcttccaccagggatggcaaagagttttcaccaattactggcttctttatcgatgctggatactctcaggtggttgttcgtatgtgggatcaacaagaggaacgcttaattaaagtaccagaagaagaggaagagagatacaggcaagcagttagaagttttgaatttgacaagcatctgggcccctatgatctaagcctttatgcagattggaagagattgtctaattacgttacaaaaagcactattgaacgattagaacccattggaggagaaattacggttacatatgaacatgggatgctgaagaatacttataagagtgctatggagagagttttagatgaccagttgaggaatagtaaattctcttcacctgctgagaaacatccaaaaagaggatgctattatacaccaataccccgtatcataaagcgcaaaggaattggaagtgaacaacttacttcttt

SEQ ID NO: 48533 - DNA, 630 bp, Gossypium hirsutum
  unsure (1)..(630): unsure at all n locations
  Clone ID: LIB3543-050-Q6-K6-G1
tcaatctgcaggnatcacgctggtgggaatgataagataaagcagttggtgccagggatcaaggtatatggtggttcccttgataatgttaggggctgcactcatcagctccaaaacggcgataccttatcccttggctctcatctcaacattttggctcttcataccccttgccataccaagggtcacattagttactacatcacaggcaaagacggggaggaccctgctgtttttactggagataccctcttcattgctggttgcgggaagttttttgaaggcacagccgaacagattatcaatcactctgtgtaacactgggttcactgccaaagccaactcgtgtctactgtggccatgaggtacagagatttaccgttccccatttattatctgtctctgtagtctatgctgaattgtttgagatattcaccatgtatgcttgtcagcatccagtgtccacaaaggtcctagctaaggaaaatttttgggtataatacttaggcatacaatgttttattatccatttcatatggtcaaatgcctagtcatttcttgaaagaataaacttggaaaaaactagtttgacagtacacgtcacatatatgattggcagtcatattgatg

SEQ ID NO: 48534 - DNA, 497 bp, Gossypium hirsutum
  Clone ID: LIB3543-050-Q6-K6-G4
cgaaaaaaaaactctcccccaaacaaaatacaaactacctatatcaattgtcaaaccccctaggattttatcttagtagccttctctctatctctctagggctctgccttgatggctccagctcataagcagaagcttacctactgcatacttagtctctctccgattgacaaaccccgacaggccttcaatctgtgaaccggttttctgacctccaatgccctcaacaaggccttctcttgctctttgatgaggcggaaacttgagtggataaagaaccggataatggttcaacgtgaggcttcacctgtggctgaggaaaaagccgcagagacctgtggggagaaaattgactaccaagcctaggttagccgactggtggataagatagttcgcggactatacaggcataaacaggtctttttgagagagcttgtgcggggaacatattgttatattgctaaaaccatgctatttcttaatgaagaatcacatta

SEQ ID NO: 48535 - DNA, 572 bp, Gossypium hirsutum
  Clone ID: LIB3543-050-Q6-K6-H1
gttcctactacagtaaaacaacatgtccttctgaggtcggcagaacatgctaatgtatttcttgtgaatgactttcaaaaccccctgcagcgaactttgtcttccttggagcttcccagggcagtttccctttcaattgtgccatcaatgcctgtttcaggtggggagtctgcttcacaggaaaatggagagaggactgatgttgatgtccttgatggaagtcctagtattcgtcagttttatcgaagagaaaggcaaaaggttcatgatcctgctcgagacatatcaatgcaagttttggagaaattttctcttgtaaccaagtttgcccgagaagcaacttcacagttattttgggaaactcctaccaatgcttttagtcattttgagaggggaagctctaacctgtctgccattgattctagtcagaaaccacgtgatgatgttctggaacttcctgttcctccagatcctcttgagttagacaaactctcgctagcatggggaaaaccccgacaacctccattgggattggaagagtgggccaccttcttggattcagaagggcgagt

SEQ ID NO: 48536 - DNA, 510 bp, Gossypium hirsutum
  unsure (1)..(510): unsure at all n locations
  Clone ID: LIB3543-050-Q6-K6-H10
ccccgcgtccgggtaaattggggagccgtgggagaggcaaagttccttacttttgaaacctatctttcgttctcactttcgctcctccgtgttttcgatgagctaagaatcaaacatcatcagatgggtcaacaaacgctagaccctaaattcagnntgaatatggaatgctggggaggagaggggggactcacccatttgtgatgagcaacctccagttggtgtgaagaagacaccattgagagacctccagaacgaaaatagaatcgtgcccaactctacagggagctctccatttcctaaagatagagggcctgggattgatcctatcaagggttctggaactaagagaccatcccctgaatgtcctgtgagcccctcgcaatgccaatctccaagcagttgtgctgcaaatgggcaccttgtctatgtccggagaaaatgcgaagctgaattaggcaaaagcagtgtttttgactgtaccagcacaagtaattgccaacaaatgag

SEQ ID NO: 48537 - DNA, 664 bp, Gossypium hirsutum
  unsure (1)..(664): unsure at all n locations
  Clone ID: LIB3543-050-Q6-K6-H3
ggtgatttcgtttccaaaagaccctttttctggtcggtttaattgcattcatttcttttccagcagaagctgctgtaaggaagtaccagtttgatattcaagtgaagaatgttagcagactgtgccatgcaaagccaatcgtaaaggtaaacgggaggtttccagggcctacaatctatgctagagagggagacagagttattgtcaatgttacaaaccatgcaaaatataacatgtccattcactggcatggattgaagcaatatcgaaatggttgggcggatggaccggcttacataacacaatgtccgattaagacagggaatagctacgcttacgacttcaatgtaacagggcaaagaggaactttatggtggcatgcacacattctttggctaagggctacggtgtatggagccattgtcatcatgccgaaacaaggaatgccatatccgttcccgaagccgaacatggaacagcttgttgttttaggggaatggtggcacaaagatgttgaagagattgtcaagcaaggaaataacatgggattgccaccaaacatgtcggatgcacacactatcaatgggaaacctgnacctctttttccatgttctgagaaacatacatttgcaatggaagtcgaatccgggaaaacatacttgct

SEQ ID NO: 48538 - DNA, 550 bp, Gossypium hirsutum
  Clone ID: LIB3543-050-Q6-K6-H4
gccaagcctacaaaagcttccgggttgggggtatgggcgtgtttacaccgtggtggtggtgaattgcactttcccagtcaacccaaaccaagacaaccttggtggtaagctgatgatcaatgcctactacggtgagtccccaaggaagtacgagaggttcacagcgttggaggagacccctggatcttacaatgccgccaagtaccggccaccatttcagtacgaatatttgtactgtgggtcgtctctgtacgggaacctcagcgctgacaggatgagagaatggatggcttaccacgcctggttctttggggcaagctcgcatttcgtgtttcatgatgcgggcggggtctccccggaggtcagagcggctctcgaaccttgggtgcgtgccggaagggctacgattcaagacattcgggaccaagagcagttcgatgggtattattataaccagtttttggtggtgaatgattgtttgcatcgctatcgacacgctgccaattggactttctactttgatgtggacgagtatatctatttacctgat

SEQ ID NO: 48539 - DNA, 623 bp, Gossypium hirsutum
  unsure (1)..(623): unsure at all n locations
  Clone ID: LIB3543-051-Q6-K6-C12
gcctttttctttctctactagagcgggggggagggggaggctgcccgangtgaagactggtccttggagataacggcgtcgtttggatgggcggcgaagaggaagaagaagatgcgatttcttcttggacgcggaacaacaacaacgacggtaacgccaataatgaatttgagagtgggggggacgacttggctatgtctgctgcttctctttcctccttcaaatccatgctggatgctgattggtacattagcccggctatgaaccaggaccttcagatcagagaacttggtttttgctccaaccaggtggataacagtctccttcttcaccaccagattgattcctctgcttcatgttctccctcccaggccttcacgcttgacccttcccagtctcaccctttgttgcctcctaaatcttgcttctcttctctcctcaatgtttcctgccacaacccttttgataatgcctttgatttcgcctccgaaccggcttttctcgctcagtttcagccgaatcccaccccgaatttgatggctttcccccagactcaaatgggtactcctgagttcagttcgagctctgagtttcaaggtacgagattgttcgcaggaactgaa

SEQ ID NO: 48540 - DNA, 555 bp, Gossypium hirsutum
  Clone ID: LIB3543-051-Q6-K6-C7
cttgcatccctgaagtggaaataaggctcctggagagcatcttagtgaggtgacagtgatgttgagaaccaagtttagaggatacctgcaggctgtcattgaaaacttgccgagaataccaaattacagaactcgacaaaattgaaaaagattctccaagattctaaagaaactatgggagagtctgatattcgagtcagaatgcagatgttaaaagaactgctgagaagtacaataaatcaccttcatacagtttttgagactcaagttttcattgcaatctgccgctggtactgggatcggatggcacaagatgttcttggcttcttggaaaaccggaaagaatatagatcatggtacaaaggttcccaaatcgctgtatccattctggatgatactatcgcatcacagatgcaacagctcgtcggcaatgcactcccagcaaaagaccttgagccaccaaggtctatcttggaagtgcggtcgatgctcggtaaggatgcttactactagaccattatttgtgcagattacaatgagctactggcacacaca

SEQ ID NO: 48541 - DNA, 544 bp, Gossypium hirsutum
  unsure (1)..(544): unsure at all n locations
  Clone ID: LIB3543-051-Q6-K6-D11
cccagcgtccngagcacttctatggggggggggctgtatttgaaaaaaaaaaaaaaaaaaaaaaaaaaactcggaggaatttatagaaattgttcccaccagaattcactttgagccatcattataatggatgaagttacaaaatgccacttcctatgaaaacttgtccctgtattctggaaaaaaaaaaagagaggggggagggactcncaaaaatttatagaaattttcccaccagattcactggatccatcatttaaggataggttacaaaggcacttttatgaaacttgtccttatttgaaaaaaaaaaaaaaaaaaaaaaaaaccctgggggattttttaaattttccccaccaattcccttggccccttattaaagggaaaagtaaaaaaggccttttttaaaaattggtcttttttgaaaaaaaaaaaaaaaaaaaaaaaccccctggaaattttttgaattttccccccaaaatcccttggccccttttttaagggaagggtccaaaggcccttttttaaaaattggccttttttg

SEQ ID NO: 48542 - DNA, 643 bp, Gossypium hirsutum
  unsure (1)..(643): unsure at all n locations
  Clone ID: LIB3543-051-Q6-K6-G11
aacaaagnagctcagtataaaggggggggaggggatcagtacactactcagccacagctgcagtggagatcttttactggggaagttgaggaagtgggaacaaaagacatagcatcaactgagaagcaaataagcaaaatcgagggttctggagtgcctaagatgaagtttaagggagagggtgcagtaggatctgaacagagcaagaagtcacagggtaggagggaagaaggtggttctgtttatgcaaataacaagtctgttcctggtaaaaaggttcttgagaatgaagagagtttaactaccccaatggcttcagtagatcaaactccaaggataaggcagactaggggaaaccaggagctgaatgatgagttaaaaatgaaggcaaatgaacttgaaaagctttttgcagagcacaaacgtcgggttcctggtgatcaattaagttctgcaaggagaagcaagcctgctgatgagcagattgaacaggaaggaagctcacagtacaacaagcctgtggcagtagatgtatctcctctgcagttgcctgacaaaaactcaacatctgaatcagtggggagcttgagtaatattgctaacttttgtactcctcctacaaagatggtcaataaccaggact

SEQ ID NO: 48543 - DNA, 589 bp, Gossypium hirsutum
  Clone ID: LIB3543-051-Q6-K6-G4
attgaggtggctgtcgttgaagaagaggttcagcatcattatttggcaaacatgaagatttcaacacgctttctgctaatgttttttgttgctttgggtatcatcttcatgtgtgtgtatcaaccagcacacttgttcgggatggagtttgaagttcgtgttatcaatggcttctccaacaactcatcgctgcctttagtgatctggtgcatatcacagcaggatggagatatggggggccgtgccctgcaggaaggtgacgattttggatggaggctcaagaccaatatctggggtaattctcattacttgtgtacaatgaaatgggatgccaagaggaggagttttgatgcctttaaggttcctagagatagtcaacggtgtgctcctcttaacaaatgttcttggctggttaaagaggatgggttctactttagcagtgatgaagtcaattggaagaaagacttctcctggtcttgattttgcatgccaacccatgcttttgcgtgcagataaaaaccttatcttgtctgtcaatgtaaacagaactttggttgtcctttccccccccccccccccccgctattgc

SEQ ID NO: 48544 - DNA, 608 bp, Gossypium hirsutum
  unsure (1)..(608): unsure at all n locations
  Clone ID: LIB3543-051-Q6-K6-G7
cagtgctaaaccaaattctaaaggcggggggggggtaactgttcaaatcatcttcaaccctcatcccttaccatcgccatagccattaacccattactttaccgaaaaccaacacacccacattactatcattttctgaagctctacccattattaaacccatcaccattgccctggggggggtcaccaaataccagcaccagcactctgctcgctccgtttgtggcggcgctcaatttctgttttgctagtaggatgaaccagagaaaaaaaaaagagccttttcagttaagcccagcagcaacattactttgggctttgatggctgcatctttttgtctcgtttctacttctaatagtctgggaatagtgatagtaaacaacttggtgacaccagttgaccggggtgttcgacatttgtttcgtttccgtaaaattgtttgtagacctcaatgatcaacgacaaagtctgatcacagaataagctcgagtgcaaaatactgttgaaacggctganaggtatactcaaactcaagtaatcgagaaatatgtagaagattggctgactgatgcaacgaatgtcttgaaaatgtgggagactttggacg

SEQ ID NO: 48545 - DNA, 595 bp, Gossypium hirsutum
  unsure (1)..(595): unsure at all n locations
  Clone ID: LIB3543-058-Q6-K6-B12
cccagcgtccgcccacgcgtgggggggggggggggggtgtaaacaagtaaagcaaaggaggctcacnaaaagcactaatgggtgacatcttaatgtacagtcacagacaataacccttctttctctcttcttcttctctttcctatgagcaaaaaaataaaaataaaataaaagtgtgggggggggtgtccatattttncgcttataattctctctcttgctttttaccctaaaaaagcattgattttgcttcttaagagaccacccctcttcttccccaagtgtttttcaagcctcggagagtgaaaggagattgcttcagcttcactcttgagaatatcatatttgtttttacttacccttcttcaattcttttcactacagccccacgttcttgtttgagattttggttgtgtgtttttgttagcaatggcaccaagttttgattgtgcggtttctagtcttctatgtgcagaagaaaacggcagcgttttttatgataacgagtactctggttgggttggtggtggtgaagttgaagggtttgagggagcaacatgggatcatcatagatattatcgaaacttgaatcaaa

SEQ ID NO: 48546 - DNA, 559 bp, Gossypium hirsutum
  unsure (1)..(559): unsure at all n locations
  Clone ID: LIB3543-058-Q6-K6-B3
gcacgtgctcnctgactcggtctggctggctgccctcaaagacaacggcaataccatcattttgtttattttcttcttaatgctcatccatttttgtttcttacaaaagataccaaattctttgactgtctgtctatattattttgttgttttaaacttttattttatgattaattttgcagaagtttaattttgtttcctttaaagtcaagcaagaatcttaacaaataaaaaagaaaaggcagtaaagtaaacaatcccataaaaccttcatctttaagcccgttttgatttattcttttactctgcaattctcaagcatgtcgggtagattaagggatagaagttccagccaagccaaacgacacagccatcatcaaacgacgaccacggtggcggcggtggcaatgcctaatttcttgaccgagacgctgccgtgtcctttcggggagttggcgacgaatttgtcggattcggcgctccgtgagacggcttatgagattctggtcggagcttgtcggagtaccggtgggaagcctttgacttacatatcgcagtc

SEQ ID NO: 48547 - DNA, 294 bp, Gossypium hirsutum
  unsure (1)..(294): unsure at all n locations
  Clone ID: LIB3543-058-Q6-K6-C10
cggccgcgtgggcggacgcgtgggtggggattaagctattgcagggttcaagtttgccaagcttggtacacaatgttcaaaagcacagcagctgtattttatgtaaataaatataaatttcccggcctttgtaacgggtttaacagtatcataaggtatagatagatgcaacacttcgacgctttttcccctggtcaaaaaaaaaaaaaaaaaaaaaaaaaaaaaaaaaaaaaaaaaaaaaaaaaaaanaaaaaaaaaaaaaaaaaaaaaaaaaaaaaaanaaaaaggggggac

SEQ ID NO: 48548 - DNA, 555 bp, Gossypium hirsutum
  Clone ID: LIB3543-058-Q6-K6-D10
gggaaactaatgtgaggtgaaagatgaggaggaaaatgaggaacaagaagaaaatgaagatgatgatggtgatgctaatgctaatgctgaagctgaagctgatgctaatgctaatgctgaagataaaccgattccaatggagactcagaagtctccttcagtatcaaagcaacctagacagtggtctactgaggaagtaagctgggatggagagcctgtaagcaaaacaagctctgataagcctctttataaacgagccattgtacatggagaagtagttgtggttggaagtgctgtttctgttgaagttgatttgtatgaacttcctgcaatctattttgtggagtacatgtttgaaacttcaaaggggagaaaaatgtttcatggacgaatgatgcagagaggatctgaaactgtacttggcaatgcagctagtgagagagaggtgttcctaacaaataactgtggagaatttgaattggaggatgtgaaacagactgtggtggtagatattcaattaagaaccttggggatatcagcataggaaagataatg

SEQ ID NO: 48549 - DNA, 607 bp, Gossypium hirsutum
  unsure (1)..(607): unsure at all n locations
  Clone ID: LIB3543-058-Q6-K6-D6
tccgccccgcgtccgccccgcgtccgccccgcgtccgccccgcgtccgcaatctcatccaaaaaagactannaagtactcttccagcgaataatgtagcagcaatttccagtgaagctagccaaaggatcttttgtctaatggcaatagtgatgctagcatcaacatgcctgatatccttactagaaagaaagccaaacgtaggagatcttatacatccttactgatgacaagatcaaagctattagagggaaatggagtcaaagaagaagaaaagctacctggcattgataaagatgacaatccattggaagttgctcaatatgttgatgaaatttatcagtactattggactactgaggcgttgaatccactctctggaaaattatatgtcaatacagaaagatattacgcctcatatgagaggcatactgatcaactggctgattgaggtgcacctcaaatttgatttaatgcaagaaacgctttatctcatggtcactttgttggatcgatacctctcagaggtccaaataaanaagaatgagatgcagctggttggtcttactacacttttactggcatcaaatatgaggatttttggcatc

SEQ ID NO: 48550 - DNA, 618 bp, Gossypium hirsutum
  unsure (1)..(618): unsure at all n locations
  Clone ID: LIB3543-058-Q6-K6-D8
cggccgcgtgggcggacgcgtggggggagaggttaaaaccctctcttttcaatttttatctgtgcgacaagtatatagaactaatcatagattcaagagtgcgggttttgacgaagaagggcaagagcaaagnagaaaaaagaatggacccttgccctttcgtacggcttacagtggggagtgtggcattgaaagtgccagttgcgtctaaaccggctcggtccgttgttcatccatcgtggtcgccgtgtttttgcaagattaagcttaacaatttccctttacaaaccgctgttgttccgtacattccgtcggagaatcatttccccgataaccaaccaccatctattgccgctactttccacctgagcaaagcagatatcgataaactcgctgcgaagtcgatattttccgctaagctttcccttaagatcgctgtctataccggtcggagcggcgctacttgcggggttaactccggtcgtttgttagggagagtgtcggtgcctttggatctgacgggaactgattctagggcttgtgttttccacaatggctggatttcagtcgggaaagaaggtaataaaaattcctccgctcggtttcacttgaatgtta

SEQ ID NO: 48551 - DNA, 620 bp, Gossypium hirsutum
  Clone ID: LIB3543-058-Q6-K6-D9
attggttcacttgaagtaatgactaacgatctatgattctgatcattttggtaaaagtgtttggttgctgttcatcgtattcaaaggttggtatttgactaccaattacacttgctacattttgctacatttggaccttgaagatttttgtctggtctatttgtttcaccgtgtgaatgtttatttgtgtcttttccaggcataacatcttgcttcagacaatgatgaatactttgatagtatctcatgtaaaatgtaatctagtgattggtctcatatagatgcatgtttattagagttccttctaatgatgttaaattgttttttcttttctagaggactgttatggaggcagtgacagcgatactcggaggtggattacgcattggtgtacttcttcaaggaaaaaagttagagatgacaataaaactctgttgcaaacgggaatttctcgtgataaccagatggatgcactgggttttagcctggagccgaacccttcgcaaacctttccatcgcactgtcctggaggttctcccttgacgtttccctgtgacacgcctctacctttagctaggtatccagcaactcctggtttagttgctcgggttacacatgat

SEQ ID NO: 48552 - DNA, 623 bp, Gossypium hirsutum
  Clone ID: LIB3543-058-Q6-K6-F12
cggccgcgtgggttcaaacagggggttagacacgcggttcccttttcctcctttcggttagggtttctaaacccatttttgccgccgtcatcgtggctctttgaagccgccgaggcttccaccgtcgacagtggtcagggccaccaagatccaggtgagtttttctttttggggggtgatgggggaacgatttataatgaaaataatgagattaaatcaaaagaaaacaaaaaaaggaaagaaataaactaaaagaataagagaaatagagattaaaatcaacatttctttcttctgttgttttgctttttgattttcaatatacttgtctaacagtctttttctttttttcaaaacagaataaccaaagaaaatgaaaaaaaccaaaaatccctcctccctctttacatggtaaattcggcttttatagtcgtttgtacatgtcatagctttttcttttttacttttcttatttctctgccttgttactattcaatcactgttttgtattgtcttgcttttgcttgctattgtttctttgctaatttggtcttcttttgcagggatggcagagggtggttgaaggtagaaggcccttagtgcgacgcacctagggtttgaaa

SEQ ID NO: 48553 - DNA, 647 bp, Gossypium hirsutum
  Clone ID: LIB3543-058-Q6-K6-H8
cccagcgtccgcccagcgtccggggggggggcgcatggattttgggattgtttcataagtagcttgaattttttttaagtcactttaatacccccaaaaatttgttgttgtttcagttttgtactcaaaaaattgaaaaaaataaggttttaagagcatgatgaagatcatgagacgccatggttggcagcgacctctccatcctttacagatggtgggaatggcagtctttagtttcctagttgtggcattttatacatttttagggcttttgcttgggaacagaatacctgaaatcactatctcaacgatcttttcctttgtggcactctcagttgtgttcctgtttgttaggtgtactgctattgatcctactaataaaaccagctttaagaagaagaaaaaagggaaatctaaagggattttgaagctaaattatgggttcatattgacccagattgttgtaacgttttttaagaggttagagaagaagattctaaggacttttataaggaggaagtatttggatccatggaaaaccaatttccaaatggaaccattattaccacttccccttgtcatgaaagatgatgcagtttcacctgatgttaaagaggatgataatatctcttatttttctctatgcg

SEQ ID NO: 48554 - DNA, 524 bp, Gossypium hirsutum
  Clone ID: LIB3543-059-Q6-K6-A4
gacagaatgatccaaaacgaagaacacccacatttactcttcttttctcttacgtgaaaccccaaacagcaagctttctctctctgtttcactaacactgagaaaaggacactgttttcccttttttttatttcttcatcaggtaccttccttcgttttacagcaacagcccactcatgcaatcaacattttctctttatagatgatatcacagaagacaagttaataagctaagggtatttcgtttttaagtaaatgaggtgtaaggaacatttaactgacctcagtagcagcgtcggcgtctgcgccacttgtctccgggagcgtcttcttgcggtcgtcgccgctcaggctcaggctcaattagcacgctctgctgagagtcgtcggaaacctgacccgccgccgttggttttccctcggtccgtttctccttacgtcagtcgacggaaatttgacgacgacggtgacaattggatccaccaccagcgattctacagcactcctcaggtgggtcctaccta

SEQ ID NO: 48555 - DNA, 517 bp, Gossypium hirsutum
  unsure (1)..(517): unsure at all n locations
  Clone ID: LIB3543-059-Q6-K6-A7
gttattccggtgagggtcccatgcgcgggcccgccgctccagtttgtgccgctcggtaatgggtttgcctattcttgcgtaaatgcggtgccttgttggggtggtgttgctgggaatgagaagggtgctgtgcagccggtggcagtggcggtgaatggcgggtttccgtcgtttcagacgggtcaggatttgagggtgaatggtggaaatgggtatttttcggaacagaacagtagcagggatgaaaggaagaggaaaactgggtcaaacgggtctcccatgtatagttcctctacggcttcggatcttcatagctcttcttatcaaggtggttgcagcagtgaaaccgcaacccacacaccacgaataaattgttcagtagcgagcaatctaaatcgccagcagtctgaacaaagtgctacctctcaccaaaccgactctgcacaaagcattgataaatctagaaaaggtatcgaaaacacgctttcatcgactgccaccgactncacttcattga

SEQ ID NO: 48556 - DNA, 627 bp, Gossypium hirsutum
  unsure (1)..(627): unsure at all n locations
  Clone ID: LIB3543-059-Q6-K6-B2
gtacccactaagctagnagttcttacaggaggtgtagtaactggtgagcagactctctcaggaaataaaccagaggagggcactacaagcactccattggtttttgaggaagacaatgaagaaaatatatgcatagaagaagagaaaattatgaagcagacatgattccagacaagatttcagaagatctttcagttgcagatacaacggcagagatatgcctggaaaaagaagaatttctcaagcttgatgatggtaaaaatgatgacactgaaaaagaagatgagaaaacaaacgaaggggaactcataagaaacgagattcaagaagatgctaaggaggcaaagacagcattaaagatatgctcacaaaccgaaaggtctgtcaaaccagaagctgttgcagaagatgaaatggcagtcagtgagactctcactaagaagacatcagatgaacagattcagaatccaacctctgccctgccttcaaaggaagaggaatgtgaaagaactataacagatgagatgatagngaagtgtgaaaacacaagattataatgaagaagatgcatccttgcagaaagaccggcttcaagaggatgaagctcttgcagtagatgacaatgct

SEQ ID NO: 48557 - DNA, 360 bp, Gossypium hirsutum
  unsure (1)..(360): unsure at all n locations
  Clone ID: LIB3543-059-Q6-K6-B6
catatttgcatagttttctatggaggggggtaggtgtagtctgctcccgcccattagtaggctgttcggtagctatctcggctgcggcagaccttgttgtctctctatcctcttcactgcttcttctcagagtggttgggctttcctttgttgcaggcttctctctctcttctggtggggggggggggcgtcttacctatctcgcctctgcgctctcgggtttgaatgctggttcaacgtgtgacgcttctgctgttccgctgccttagctctacggaccttggttgtggctcctctgcctctgttggctctccctcttcttgttgcnggggatgctccgatgggaacccgggctcggcc

SEQ ID NO: 48558 - DNA, 183 bp, Gossypium hirsutum
  unsure (1)..(183): unsure at all n locations
  Clone ID: LIB3543-059-Q6-K6-C12
cccagcgtccngatgcattaaaaggggggggggaggtttttacaaggtatatttctaatcactggtgcacacagcattgcgagtgttactacttatctggtattgcttgtaaaggtgcttcatcttcattttgctaataagataatactgttggtttgggaaaaaaaaaaaaggggggggggg

SEQ ID NO: 48559 - DNA, 646 bp, Gossypium hirsutum
  unsure (1)..(646): unsure at all n locations
  Clone ID: LIB3543-059-Q6-K6-C8
ngagctttgagttattctgccctgattgaaatcctcaatgcccaatttttatgttttgcttgaatgattttatgaatatttggacgcaagtttgttattctgaaaaaagagatgagaatttgggagtcgagttataatttaatttattaatgaaatcttcagtgctcaatttagggatttggttgatgttttgcttgtatgattttatgaatcttgtgcacacaagtttcttatctgaacataagagatgaggatttgggagtcaagtaataatttcatttatcaaagaaatatcaattgagcatgtgccagtttataattgttgtaatatttatcattcagcagatatttcctttattttgtttgatttgttttatacattccaattattttcccttggtttaatactctaattggcggcttgaatctgttggcattatacttaagcttaggttaataatggaattgagttgattggaatttgcaggatacttaatattgaagaaaaatatctcatcgcaaatttgagcatccaaggcatggctctttgggatttctcccaggaaaagagcctcccgccatagaggaaaagtgaaagcattcccaaaggatgatcctactaagccatgcagattaactgcgtttc

SEQ ID NO: 48560 - DNA, 564 bp, Gossypium hirsutum
  Clone ID: LIB3543-059-Q6-K6-D10
gcagataaacaaaataaagaggggggggaggagaacgaagaagcgagctataagagagcagcaaagagcctgcttcggcctacgcctccgtcagtattatagtgttcggagatatttataaatggcggggatgttacccggggattcctcacatcattcaacatctgatactgggcgctgctagaaattctcaagaaaagcaagaggaagtaggccgttggtatttttcaagaaaagaaatagaagaaaattccccgtctagaagggatggtattgacttgaagaaagagacatacttacgcaagtcatactgtacatttttgcaggatttgggcatgaggctaaaagtgtaagttcatggattacattcatgtgcagtattcttgtggttagattctgcaaatgccggatttgtcttttgaacttgaaagttgggtttcattagtagtggttcttatcatgaagcatcatttaaaaggcctagcctatgtgtagatgcatgccgcttagttccagcggtgggcgatttctgtattcaattctctgtaaagtttatagcatgaa

SEQ ID NO: 48561 - DNA, 629 bp, Gossypium hirsutum
  unsure (1)..(629): unsure at all n locations
  Clone ID: LIB3543-059-Q6-K6-D5
ctttaaaaaaatttgtctttgcactttatcctcccattaataatgcttaaaacctcctttggttcacaaaataccagaaggaaaaactttttacttagnaaaccaanaattccgtgctttatggtatatagttaagcaaagataaaatctgggtttttgttttgggagttatgtctagcatagtttggtttagaagggatcttagagttgaagataatccagcactcttagccggagttagggcaggccctgtttttgcagttttcatatgggcacctgaagaagaaggccattatcaacctggaagggtttcaagatggtggcttaaacatagtttggctcttcttgattcttctttgaggagcctgggaacttgcctcataacaaagagatcaactgatagtgtttcatctcttctccagattgttaaatccactggtgccactcagctcttcttcaatcacttgtatgatcctatatccctggttagggatcatcgagcaaaggaagtattgatggcccatggtgtagctgttcgatcgttcaatgcggatttgctttatgaaccttgggatgtaaatgatgataatggccgncctttcactacttttactgctttctgggaaaaa

SEQ ID NO: 48562 - DNA, 564 bp, Gossypium hirsutum
  Clone ID: LIB3543-059-Q6-K6-D9
tgcatgaagtgtagcacatgatggggaggggggggaggactctacatttcttgatcagaaaacgatgtggatgatttaccagtaacggttcaatccactccagtacaaagcattcagtttaatggggttgagcttacaagtgccgcagatgaaggtggactgaatttcttgagtggggcgcgggagaacaccaaagaaataaaacaagaaatcgaacccgatgaatacaagtcattaggcaaatccattgtgaaagaagagcttccagccatgaactccccaagaagcgatgataagaaacggggagatgcaactgcacaaggaaaacagattgctttacgtgcagcggcaatgttcaaacccgataatcctttctgcagggttatcctacgaccatcctatgtgtacaagggaatatgtttacatatccctcgctgctttgctctgagatacctgaaccgacttgatgggattgttacacttcaggtgtccccaagggaaaaagaggcccgtccgatgcatttatcggcagcacagttgggagttttagcaaaagatggggcc

SEQ ID NO: 48563 - DNA, 310 bp, Gossypium hirsutum
  unsure (1)..(310): unsure at all n locations
  Clone ID: LIB3543-059-Q6-K6-E1
aatagaaatagtggtttccgttcaattgagatagcatcgataacatccgcttcagccattgtttctgttcttctggctcttgttattttattcctatttacgaggaagtggaattcaagatccaaaatcagcaccaccaaaaaagaagtgactattttcacagaaatnncccggtgncnncgttgacatttgacattgttgtgcaagccacaggngaatttcaatggcccagcaacctgtgattttgggaatggaggtttcgggtcaacttataaagccgagatctctcctggagttntagttgcaataa

SEQ ID NO: 48564 - DNA, 653 bp, Gossypium hirsutum
  unsure (1)..(653): unsure at all n locations
  Clone ID: LIB3543-059-Q6-K6-E2
tagnaacatatttgacatctattcggtaggcattttgaatcgttagcaatttcgaacattttagcagtgtaatattttagtttgatcaatcaaatagcaatcagcaatgaggaaagtagcctagttctctccttagttatagttttaaacggatggtgggtatgagactttatctgttatttggagaaacttgagggaccatttgtttgtatttattttatcttgcatacaatgatgaaatcgttgttatcttttccgatcatacccgacttctcgatgaggtaattgattgagctttccattctgaaaatggagttgttggatcggggatacgtttaccatgttcttttgagttaaaatgtgaacttatgatgctttgatggaagctatcaaaatggtttttttctagtaactctctcctctcctctctaaatctttcggcatccatattccgatcatctttacctttttacggctctccaccttccaaaagaatggtcgtaaactgtcacaacctcctctttgtatcaacaaaaacgaaactggcccttcacatttgagtgaggaatgcattcagggtgggggggagcattgcaatttgcaattggagtattttaaattagaccagagtaagatatttaaatatatgtaac

SEQ ID NO: 48565 - DNA, 616 bp, Gossypium hirsutum
  unsure (1)..(616): unsure at all n locations
  Clone ID: LIB3543-059-Q6-K6-E6
ngattactggtgatgctacaatagaattcccaagcactcatcaaatggccagaggaggaatcttggcagatgctatggggcttgggaagaccatcatgactatatccctcttagcaacccattcagaaagaggtgggctatcagatagtcaatcctcagatcagccttctgatcaaggtggtgaagccattgatgtattcggccaatcaccaaattctgtgaaaactgcaacgaagtttcccagctttgataagttgtcaaagcaaaggaacaaacttgctaatggtggcaatctgattatatgtcccatgactcttcttggccaatggaaggcagagattgaaactcatgtgcagcctggatctttgtctctatatgttcattatggtcaaagtcggccaaaggatgcaaaacttcttgcccagaatgatgttgtaatcactacatatggggttctagcttcagagttttcagcagagaactctgaagataatggaggactgtactcggtgcgttggttcaggattgttcttgatgaagcacataccataaaatcctcaaaaagtcaaatttccatggctgcagctgctntagttgctgatcgtcgctggtgtct

SEQ ID NO: 48566 - DNA, 662 bp, Gossypium hirsutum
  unsure (1)..(662): unsure at all n locations
  Clone ID: LIB3543-059-Q6-K6-E8
gnactttgatgagtttgacatctccttcaaatcaaagcctgatggactccctacttttctccttgttaatcgtggagattgtttcttcaccttgaaggcatggaatgctcagaaagctggagctgctgcaattcttgttgctgacaaccaggatgagtccttgattaccatggatacccctgaagaaaagaatgctagtgctgagtacctgcagaacatcaccattccatctgccctcattagcaaatctctgggagacagtttgaagaacggcataacctttggggaaatggttaaaatcagtctggactggaccgaatctcttccgcatcctgacgagcgagttgagtatgagttttggacaaatagcaatgatgagtgtggaccaaagtgtgacagccagatggaatttgtcaagaacttcaaaggagctgctcaagtactcgagcagaaagggtacacacagttcatcccacactatataacttggtattgccctgaagcttttcttctcagcaaacagtgcaagtcacagtgcatcaatcatgggaggtactgtgccccagatcctgagcaagacttctgtaaaggatatgatggtaaagatgtcgtgcttcaaaatctcgccaagcttgctttttaaaagntgctaatgaaagtag

SEQ ID NO: 48567 - DNA, 618 bp, Gossypium hirsutum
  unsure (1)..(618): unsure at all n locations
  Clone ID: LIB3543-059-Q6-K6-F5
atggacgctatgccgccttcttcttcccctctttctctgcaacctaacggatcctctgcgtgcgcgtccattattccgtacaaacatgatgtcgaatccaacactcgataatcatattccatcttcgaagcccctcatcagaaagaagaggaggaaaactgttgacagagatgcaccctcatcttcttcttgctctgcttattcctcttctgttcagaaaggaatgcgtttgtcgtctaaacgccggaatcttagggttcggttcggtccagttcggcgagccgacgttcgtgacgttgactccattgcgctgcctctaggaatgtccttcgcggccgttgttgctcaggttctggaaaagatagatgttgcaaatgaaaggctgcctcctgattatctctcactgatctgcacttcagctgtcagagaatctttagccaatgtttttggagacaagtttgattgttttgcgaggaattttgagaaatcatttggaagcaccttgaggactcttagattgattaatgactcatcgaagcacaaggaaaagcatccatcaaaccccatnatgtggaaagttcttcagatgaaactagaagcagaaactcatttgacata

SEQ ID NO: 48568 - DNA, 669 bp, Gossypium hirsutum
  Clone ID: LIB3543-059-Q6-K6-G1
aacatttaaaaaaatatataaaaaaaacatataaaaccgttttaaaaaatatatatataaaaatttgaaagatatatataatagtttacaataaataatatataaaaaatttaaataaataatatgtaaaacaacttaaaaataaataatatatataaaaacttaaaataaatgatgataaaagagcatttttttaaaataaataaataaattaaatggactgaggacgagattgaaatcaaattaaaattcagggtataaattaaaaattagaaaaaaccaataaaacaaaaataaatgttaaaataaacgcgcgaaggaaggacagggaccaaatatgaaattatcccaattcttgggacacggacgcgagactaaattgaaaacagttaaaaaaatccagggcaaaaattataaataaaaagtgtcaataggactaaatgaaaacaacccaaaaaggcggaaggaccgaaagggtaaataactcaattatcaaaaacacgcgaatcttccttgcgggtcgggtcagtgtgcaagttcggcctcaaacgatgtcgttttggtgcctgagaagcctgcccaaacgacgtcattttggatgcctaattaaatcaattttttttgggaaaaaatatttaactccttgttttaaaaaaaaggaactttaaa

SEQ ID NO: 48569 - DNA, 570 bp, Gossypium hirsutum
  Clone ID: LIB3543-059-Q6-K6-H1
ctttctcctttctcttcttcaaccttcttcaaccttcttctgttatctctatctgctaaggtcggcatatcgcaaaagatcggccctctgctaagagtggttccagttgatttacctccccatttttgagttttcttctatccactcttttcttttttctcaattttcctatggttgaatggaagtctggaagggaaggagtgggaattgaaattttttaatttaatcattaaattacaaataattgacttctaatgaatttttaatatgaggttaagtccattttggtttaatacataatattaaaaaaaaatttcttgttttctcttttgaacttcatttttaaagttccaaaagaagtttcgttttgaagaaggttatatgttagactaagctgggttttatttatttatttatttattactgagttttcgttcttttttcttctgttaattacgcgtttaacttttttttaaaattaatttcggtttttattttaattgtttagttacttgagttaaaaaaatcgttttcaggcgttttgggtttgtcgatggaggatggtggtcg

SEQ ID NO: 48570 - DNA, 626 bp, Gossypium hirsutum
  Clone ID: LIB3543-059-Q6-K6-H5
agcgtccgcccagccgtccgaaagcatctttctttctacatctctctctctatatatcctttctctttatcctttcccaattttgttctactcttatatatatatatcaagaacaagataataaaaagatttgggtttatgtttatgctataccaccttgctcttcactttgatttttcatttatcttcttcaaattgtgaaattttgttaaagctttttttctttttgtttgttaatggctgttcaagcagctcaatacccttccaatgtcttcctcttaagcagaaatggacaagatggacaacaaggaggaggggtttttgttgatcaatctcatatgttcttcaacaatggaagcaacggaaccaacaataatactaatatcaatatcaataacaatattaatcagaggaagagagggagggaattagttacaggaacggcggcgataacgacgccgatgaattcattcactttgcaaacaccaccgccgcagatgatagacctttctcaacttcatcaccaccaccagccaaatgtagttgtctccaccggtctccggttatcgtccggcgaccaacagcaaagtcaaaatcatgggtatcttcaacaacaacaacaacca

SEQ ID NO: 48571 - DNA, 629 bp, Gossypium hirsutum
  Clone ID: LIB3543-059-Q6-K6-H9
ctcagaccctccaacacctggggggggggggtaaatgctaataacatgattcttgcctattaaatgcaaatctatctattttctatgattttataaaaatattttattacttaattcataaataaagtactggtttttacattgaaaatgttttgtgagcatctctcgttcgtgcaggggatcaagatgagtgagggaccttaaaaattgtctttaggtagtttttttcaagactttatgatagttaattggatggacatgagagcgtatattgttgtgaaagattgaatttagaaggaagttgtttcatttggagttagaggagtgtagggagttgtggaaaaagatggatggggccggtaaatgactttgaaagagagtataaacttgtgtggatgtcggctacaaacacaagatttgtggtcagttgtatggtgcaggaattggaaaaagcaacaatacaatgatcgctctcaattatattggaaaatgccggcagtcgtagtaagcggctctggtgagaatcaagaatttgaaggcaggataacagtgtatgtcatagtttgtgtgatcatagctgcctttggaggcttgatgtttggatatgatattggcatttcaggtggagt

SEQ ID NO: 48572 - DNA, 648 bp, Gossypium hirsutum
  unsure (1)..(648): unsure at all n locations
  Clone ID: LIB3543-060-Q6-K6-A11
ngattccctctatcccctttcggtgtgggggggggtggggtactttgagagcaagaaaggaaaagaaagttaatgatttgattgattctgattattctccctcaacaaggatatagcaaagaacaaaaacaacccatggctgtgtctccatgtttgagtggtaatgatcagaagaggcggggggggcttaccaatagaaagcttgtagataagtacattaaggatgcaaggtgcctcattgcaacgcaagaacacaacgaggtagcttcagctctcaatcttcttgatgcagctttggctctttcgcctcgtttggaggttgctcttgaactcaaagcgagatctttgctctacctaaggcgttttagggatgttgttgacatgcttcaagactatattcccagtctcaaaatctcaaccgacgactctggctcggtttcctctgataactcctctcaccagctctccagggagcgagtcaagcttttaccttctaatgactcgtcctctgactcatcgagtcgtgacccgtctttcaagtgcttttctgtttcggacttgaagaagaaatcatggcggggttgtgtaaaaactgcgacaaagaggcaaatggaagtacttggttctaggccaaacatgttgccacct

SEQ ID NO: 48573 - DNA, 632 bp, Gossypium hirsutum
  Clone ID: LIB3543-060-Q6-K6-D10
ccccgcgtccgcgatccccagggagtggggggatcgatctcggattttctcatcgttcttcatcaaatctgtaaatcacgttgtaaatgggatttaagcgcccttttgacagtgaggagttgcaggaacttcctttcaagcatccaagacagtttgacaataacaacaaattgactgagggggctgatactatttcccatagctatacccatcagaatccccatatttcagttgatgttgagggtggatttcgtaaatgccaatgggatgaagcatttgaaactggtggtcttaatgatgaaagacctttggttgataaggattttgagactagtgctcccttgtctttgatcactagcatttctagtgaggaagatgtagatactgggccggcagcaatttcacctatttctccagaatattttgactttgatttcccaagaagaatgttgggccctgttgaggatgcctattctttactcttggatcggtctccccgaaaacaggttctgcttgggccaaatgattaagccaatgttcctttattgggtagggacataaaggacaaatttgttcaaaattgtgcattagtacacaatggatatttggttatgaagagaattatgatgggg

SEQ ID NO: 48574 - DNA, 650 bp, Gossypium hirsutum
  unsure (1)..(650): unsure at all n locations
  Clone ID: LIB3543-060-Q6-K6-H11
ccgtccggtcggnaaccaacctttaagccggaggggggtgaggcttcatggccaacaagttccgtcccttcctacccaacttcctgatagggcaggtttacctgcctgcactgattacaccgatggtggatctcaatatccaaaactagaactcccagggactgattacatgccgttggctcgtgaggatggtcggngaaaattcatctaaggatttaagtcccaatatacccaaattatccgcaaatgggagttctgctaactccaatggatcatcagctgctgtcacatcacggggttctttttcctctggtcagcttctagctcagagaaaactatttgcagaatctacgattggaaggtccagcttccataagcttcttgagccaagttcagctctacgtcctggaattgctccttatcgaattgttcttggagatatcaaggaaaagctcatgaaaactcgaagacggctggaacttcttctggaggatcttccctgtgaatatgatccctgggattactatgagacgaaagatcaatttctggaaccactgcttctatgttatgagtctctgcaatcatgcgnggcagggattctagctgatggtcggcttgctgacctgattcggagagtttcaacatttggg

SEQ ID NO: 48575 - DNA, 632 bp, Gossypium hirsutum
  unsure (1)..(632): unsure at all n locations
  Clone ID: LIB3543-061-Q6-K6-A12
ngagatatggaaaattatctgacaccctgtggggcagcatggactggtgaaactcacccagttagcgtacttcctaaggagaatggttgcagtgttcctgattcagctgtggcggatatgtcagctgcagtaagttcagatccaggaaatcgtgctagtggtcgtggtgaaatggagggggggcgttctcctcagtctgatctgcctactaaaggacttgaaagtatggagaagtctatgagctgggaaagcatgccatttccaaattttcatgactcatttaataagaattcttcattcaatgttcaaaaactcaatatcagcgagtataatccagtctatgtctcatcatttagggagttggaaaagcaaagtggtcccaggttgctacttcctattggtgttaatgagacagtcgtgcctgtttatgatgatgagcctgctagtattatagcctatgcacttgtgtcatcagattaccattcacagatctctgagctggagagacgaaaagatgctgttgattcagcagtttcgtcatcactttttgattcaataaacctgctctcacttaattcttttagtgacatatctgatacttacagaagctttggttctggtgatgataatat

SEQ ID NO: 48576 - DNA, 565 bp, Gossypium hirsutum
  unsure (1)..(565): unsure at all n locations
  Clone ID: LIB3543-061-Q6-K6-C12
agcaatctactctcaaaccatggctggggggagaatgancatttcttcctgatcgaaggggtgtaatctgatctgcatggacctatttatctgtctgtgaggctgaacatgcttgtatctacatactagagctaccactgaaagcgtggcaataatcaatacaattactaactgtgggggggaaatggctcatctcatatgatgacgccgatgaacattgctaacatcaacacaatcagcatcatatataagatgctatacctcatacatcatgaatgtgactcaagcatccaatcatatttgtaaaatgacttttggacactgggccacaactcataatgtacccatatctaactgcatcaatcaaaaaacatgacagtcaatataccactaatgtgggtatgggaatactaagagcatccattccctctatcatacctaatggaaaagctccctcaatatctataggtaccacatctgcttaaccaagccaaactaactgtgactaaaaccccatggctgaagacaaaactgggaaattaattagcaatgcagtggttaaaat

SEQ ID NO: 48577 - DNA, 660 bp, Gossypium hirsutum
  Clone ID: LIB3543-061-Q6-K6-F10
ccccgcgtccgcccacgcgtgcggggggagtgggtgagagcaccaactcttgctgctcctttgctcaggctccatttccatgactgcttcgttagaggatgtgatggatcggttcttctaaattccactaaaaaccaagctgagaaagacgccatccccaacctaagtttacgaggttgccatgtaattgatgctgtcaaatccgcagtcgaacaagcctgtcctggtgtggtttcttgtgctgatatccttgccttagctgctcgagattcagtttccatgataaatggaccttcttggaaagttcctttgggccgaagagatggaagggtttcaaaattgagcgaggcactcgcaaacttgccttctccctttttcaatgtaacacaactcaaacaaaattttgcttctaaaggtctaaacatgaaagatttggcagttctatcaggaggacacaccattggaacatctcattgcgttgcctttggcctccgtctctacaatttcagtggcaaaggcgacgccgacccatcgatggatccgacctatgtcactcagttgaagcaaaaatgcaaaccaggagacatcacatcactggtggagatggaccttggaagcttcaagacctttgacgaagcttactacacactcgtctctaaa

SEQ ID NO: 48578 - DNA, 638 bp, Gossypium hirsutum
  Clone ID: LIB3543-061-Q6-K6-G11
ccccgcgtccgaataaagttgctgctctgctagggttttgcttttaacccttgagcgccgtcaattgaagcttccagatctgcgcccttggccctcgcctaacttccgatctattaggaaataaacaagtgactgttagtagttagcagttagtagttagtatcagttgtggtttgttacaacaatagttaagtaacgatagtttgcattatatatatgtactctgcatgagaagttgatcagattgaaaaatacaattttgttttctcttgagtattctgtaatcttagcatggtatcaagagccaaggttttcttggtgttcttatcataaaaaaagaagaaagctatgttctgcccatctctcatggccactgatgcggcagttgatacaacacgtcactcatccaacaccagggaggctgaacactcgcaaggtaatggtgttcttggtacaccagcagttcattacttctctaagcatgataccataaaactcacttcgcacaacttcctcctatagaagcatcaacttctgttgattcttgaaggctatgggcttgaagggtttatgtaaggtaccactccctaccctcctcagtttgttattggttctgatgggtagcaagttgagaatca

SEQ ID NO: 48579 - DNA, 647 bp, Gossypium hirsutum
  unsure (1)..(647): unsure at all n locations
  Clone ID: LIB3543-061-Q6-K6-H11
gngttgaaatggacggtatctggggggaggatggtggaagtttaatgttccggagaaatagacgaagtcatttacaagagttgggaggatcagagcaagctatccttcttgcagatggtgttttaggtacaagagaggatggatcaagtcgattctcacttgcggaagagggagaagtggggcacgagatcccagatggttcacaatcggaaaatgattccatcgagcatattaagactttgcctgaacaagatgaagttgctgacatgggcttagatgcaaaagggcgatggacactaactagagtggctaaagttagcctgtcaataagcccattttggtttcttgctcaactgacttttaatctctcactgaagtacactactgtaacatctaacaccatcttaagcagtgcgtccagccttttcacgtttttggtatctttggcattcttgggtgagaagttcacttggataaagcttgtgagtgtcctcctttgcatggcaggaaccattattgtcagcttgggtgactctagcaactccaagaatctaagaataattgcttcaaaccctattcttggagacattctggctcttctctcagctgctttctatgctatatacgttacacttattcgtaaacag

SEQ ID NO: 48580 - DNA, 583 bp, Gossypium hirsutum
  unsure (1)..(583): unsure at all n locations
  Clone ID: LIB3543-062-Q6-K6-A10
cccagcgtccngtgaaaaaaaaaggggggggggggcgcagaacaagtgatgattggttaccacctggttggaaagtagaggtgaggcaaagaaggaatggtaaaaaagataagtgttactatgctccatgtggtgaacttagattcatttccagggcagaagtggttcgttatctcgaagaggtggggggctaaaacagaagagaaggaaaaagttccgagcaaacaatcttcgaaaaatattacagttgagaaggccgaggcagaagggttacctccaggatggactaaggaagttaagataacaaagaagggaaataaagtcagaagagatccgttttacactgatcctgtgagtggatatgtgtttcgttccatgaaggatgctcttcgttatgttgaaactgggaagcttggaaagcttgctttcaagcctaaggagaatgaaagcaatgaagaggatttggaagaagatatctgtgagcctgtaattgtcgagagcaagaaggtagctgtgaatggaacgactgatgaagtagagaaacagactgctgaacatgtttcgaattcgagtgggataacaa

SEQ ID NO: 48581 - DNA, 406 bp, Gossypium hirsutum
  Clone ID: LIB3543-062-Q6-K6-A11
cccagcgtccgcggccgcgtgggggggggggggcggtcttatcatggacgcaaagaatttatatgaaggacttggtcgcctgttgacaatttcttcaacgaaagaacccccaaaaccagttagtaacggagaggaaaagacagcatccgaaatggtgacctgccgtctcaacctggggggggaaatggtggtgaaccggtcaataatgcagcagatgagaaggaacagaacagtcccgcattgcatactgatgaaaaaaagttggtgaagcatcctaggaaagatccattctttaaactttgatttgataatgtttgtagaaaggaaaaggtagtgtttttttttttttatatgtattaagcaaatttcaggccaaaaggataaaatgagaaaaataagtttttat

SEQ ID NO: 48582 - DNA, 647 bp, Gossypium hirsutum
  Clone ID: LIB3543-062-Q6-K6-D11
cggccgcgtgggttcgaggacgacgatgtgtgcctgttgcaaatcagcattcttctgatacctcagactagctatcatacgacgaccagcgccgaatccaactctttctaaaagaccaaattcctacatggttttctgttgcaggttatgtaacaattgctaccatctccaccataggtcttccattcatctttcccgaactcaaatggtattacgtattggtcatttacatctttgctccaacattggctttttgcaacgcatatggaactggattgaccgattggtcccttgcttcgacctatggtaagctagcaatctttacgatcggagcttgggctggtccgaatggtggtgtccttgcaggtctcatagcatgtggtgtaatgatgaacattgtttcaacagcttctgacctaatgcaggattttaagaccggttacttgacccttgcttctcctaggtccatgtttgttagccaagtgattggcacggccatgggctgcatagtttcaccttgtgtcttctggctgttctacaacgcattcgatgaccttggacttcccggcagtcaatatgccgctcctttaggaatcgtttatcgcaacatgtctgtcctgggagtgcaaggcttctctgctttgccg

SEQ ID NO: 48583 - DNA, 539 bp, Gossypium hirsutum
  unsure (1)..(539): unsure at all n locations
  Clone ID: LIB3543-062-Q6-K6-G10
ttttctttttgttattgaatgggtggacnnaaaccaccaggnnaatctatgnagncanngtgttgtgaagggagggcatnngaatgtaaaagtnaaattaatggggtnaaacaagntnngggggttatcaactgnnaaataccaggcttttttggggttttcccttgatggtggggtggtatgggagtaattttnncaaatcaaaacaggcgccttttaaaaagatctgtncatgggatcacttaaaagttgtangaaccagcgtgttctggtcctggggttttgaattcatgaaaagcatttcactccttttntttcttgtgtaagaagcaagtgttataagggcagatggatgaagaaagcgaaatttgtggtgtcatggtctaatggatgtttcgatgtacaattaaaagtgactagcttttatttcaatgtggtttgtggtggtttggtgtgtgcttgtcttgtggtgtgaggattcgctcattgggaatcccgaaaagggttggatgaggaaatggttgtggtaattttcgtga

SEQ ID NO: 48584 - DNA, 652 bp, Gossypium hirsutum
  unsure (1)..(652): unsure at all n locations
  Clone ID: LIB3543-062-Q6-K6-H11
gccatttgctccttcacctgtggggggggggggctggagacatgcaactgcaagcaaacatgaacttgctcaatgggaacgcaggctttcctgggaacattgctgcttcttcgagaacccaagcaggttcaggcatgcatacaccattttcgtccatggggtaccctcaactaaatgggggtgggcaatatggacagagacagcaacacttggccgaccgctctgaggcctggaggatggcgaattatggcccaatacattatgatcattatggtgctccttctactgttcgagacatggacgccttaatgagaggcggtaatcctaggcctgctcaatttccacaaaggttgggagccattgctgagagacaagctggtcatcattctcgagtctcactctcgcctataccattatcccaatttgccgctcaaagaagaagaaggctgctatatcaggttcgcaattacttgcgacttttacgtagggccggtaacttacgacttgaggatgcaatgctgctcggtcgttcatatttgaatagaatgcgtgacttggacgagaataatgatgagatgcgggttgatgttgataatatgtcttatgaggaactactggacctgnaagaagcaaattgggatgttagcactgg

SEQ ID NO: 48585 - DNA, 637 bp, Gossypium hirsutum
  Clone ID: LIB3543-063-Q6-K6-C12
cccagcgtccgcccagcgtccgggggcgcgtggggcaggatggcaggaaaacattcaaggaaattagtgatgcatctgttgtgatacaatcagttattcgtggttggttggtcagaagatgctctggaaatacaggattactcaaatacggggcctctaaggggaatgaatcagatgaggtgatggtcaagggctcatttcttgctgaactacagcgccgagttcttagagctgaggctgctctgagggagaaagaagaggaaaatgacatcctccatcaacgggtccaacaatacgaaagccgctggtctgaatatgagctaaaaatgaagtccatggaagaagtgtggcagaaacaaatgaggtctctacaatccagtctttctatcgcaaagaagagcctagcagttgatgactcggagagaaattccgatgcatctgttaataatgcaagcgatgacagagagtatagctgggacacaggaactaatcacaatggccctgagagcaacgggttgagaccaacgagtgcaggtttgagtgttataagccggttggcagaggaatttgagcagcggagtcaagtttttggtgatgatgccaagttcttggtggaagtaaaatcaggtcaggttga

SEQ ID NO: 48586 - DNA, 534 bp, Gossypium hirsutum
  Clone ID: LIB3543-063-Q6-K6-E12
gccaaacccttgggcattgacgggggcggggagggctgcttatttccccctttattctttcctaggattttacctttgataatcccctatgtggctccaaagaaagattcaaatctactgggtcttatgctaacctttattataaccttggaatgtcttatctattttttaaggtgggggggtatggatattgatattgcttttatctctgatgatgttatggggcatgctaaggtgattgctgaggaatggaaaccaaaattggatgctcttgacattgctgctaacattggtgcttcatttgaagcttattcgttacttcatctttttctcactcttgttattgcttttgactttaatgatgaataacttgcaaagctgctaccaatggtctttccaatggtgtatacagctgatctatcacgtgacctttgtttgtccctaaaaatgcctgagaaattccagttctgattaataatgtaaggcatattgatacggataatctggcttttgcatttgatcttacattgcatc

SEQ ID NO: 48587 - DNA, 490 bp, Gossypium hirsutum
  unsure (1)..(490): unsure at all n locations
  Clone ID: LIB3543-063-Q6-K6-G10
gcgttcggnaatagctcacatttgtgcagggagtgcgcggcgaggaaagacaagcgactgtggggaagccatctatgcttggaggcctcttcaagtgggttgcatcttcagtttcttggagtcggagagctcgccgaagcaagtacctgtatggattatcaccaaacaatgtcgggttgctaagggtggggagacaagggccctcgactgagacaatggagatgcctttcaagcacacaagtgtgaaaggatacaaaaccgattctttcacttgcatctgtagatgaagctaataataatttcgttaattgtgtgaatggtgaatgggttttgatgaaagctataatgtatttaactttgcatccattttttttttacggatttcttggtgcagaatttggtattgttctgcagtgttcttttaatttacttcttttttgtttatatatttttatttttcgtaattgaatacaatgcaaaaacatggatg

SEQ ID NO: 48588 - DNA, 623 bp, Gossypium hirsutum
  Clone ID: LIB3543-064-Q6-K6-A5
catagtcactacagagtagtggatgatgctgcagtgtatctttgttttggattctcccattttttccctctactagcaggattcacttgattccgacccaagcttttgtcgcgttcacagggcacacttgcaagcacagacaggattggcaacgtcaaatcagaaattaaaaaaaaagaagcttttatgaagtagtaaaattcgtaagacatgacataatagaaacgtgcgatgaatccttccctatcataatcagtaggcgaataatgtgacttttaaaatgactatcactttggtttttaccctccacagagacaaaaacacaaaagaaataggataaagtggactgcagatagatttaaaagtgtgaaaaagaatattaaatggtctagcactggaatttttacctgttcaatcaagaaagttatgagccgtaatggctctcagtatgattggcactaatttggatactctgcctcaactctgtttgcaaattttcttaaggcgagtgaatatatcgttttctttttccgttgagttacttttagttcagccaccaatttaagtagttactgcctgcaatgcacatcatgttttcttcatcactaaagcaaggactgttt

SEQ ID NO: 48589 - DNA, 637 bp, Gossypium hirsutum
  unsure (1)..(637): unsure at all n locations
  Clone ID: LIB3543-064-Q6-K6-A6
tagnanaatctgtttgtatgcatgctgggggggggggagactgtttttattgtgatttcctgcttcagctagtctctgattcttcattgtattttgctatttctttctttctttttaatattgatgaatagcaaaagggaaaacaaaactagaggttgggtatatgaatctatcgagggtgctaacatgagaatctccgccaagtacaccataaaaaacttaacgggagattgagtgtttatatgtgggtgaaggatgaagcccttgtgttgtttgttttggccattgtgctaatatagtagcttacctggtgatttctaatttctttaggtggagatatccctttagctgctaccttgataaaagggttcttgagaatccctgtcttttatgtattattctttgaattttaaaatccctttccacagtgtccaccagctttggaagagaatgagtctttaacacctcatcgtggatcagcctctgcaatgactgctgttctggttaatttggatctagaagtacctgatacatttagggcacctccagcacccttgccatatgatgtggtctttggatgtccacattcagctgattcagagtctttcagggaaactgtcagtggggggaagttttg

SEQ ID NO: 48590 - DNA, 642 bp, Gossypium hirsutum
  unsure (1)..(642): unsure at all n locations
  Clone ID: LIB3543-064-Q6-K6-B2
ctccttaactcctngatgacttcaagctctcttcttttcatctaataaaaaaccctttaatcgttttttgcttcttttttcactgtataatcaacgaagggttttctttttttctttcggattttttagggaaaaaacgagctgcaatggagaaaaagcaaggttttttctcatctctcaaagaagacgtgattcgcgggctttcaccttcccgttcccggtccaacagtctggcgagaaccggttcacccatgtccggtctcttgcggagaaagaaaaccagtaaccagtactacgcaggtggcggcggttacgtggcgcaaccggagccattgatcgcgagatccgggagcttaaggccagtcggggaagctttggctccactcatggaaggtcctgatcccgacggagtcgaaatcggggactcgaaacgagtcgggtcgggtataggacaatgggctaaggggcagttatcgaggaacccttccgttactgcttcgtataagaagtctgatctgagattgttgcttggggttatggctgcaccattggctccggttcatgttaactgcaatgaccctttgcctcatttgagcatcaaagatactcccattgaaacttcctctgctcagtacatattgc

SEQ ID NO: 48591 - DNA, 630 bp, Gossypium hirsutum
  Clone ID: LIB3543-064-Q6-K6-B3
cggccgcgtgggtttgctttggtgaggactgagcaaccactgactttcccttcctcagacaaaagacatgacagataaatcgcgatagattgatagagttatgatatgagtgaaagttaaaaaggaaaaaaaatcatgataatggaatgggaagatcaagagaatcaaaaccagagagagattttgaatgtaaatgtgaataatggtggagtaatgtatgtcaaagtgatgaccgatgaacagttggagactctcagagagcaaattgctgtttatgccgccatttgtgagcagctcgttgagatgcataagaacctcactgcccagcaagatctcgcaggtggtaggctggggagcctgtattgtgacccgttaatgacatctgctggtcacaaaattactgctagacagcggtggacaccaactccagtgcagcttcagattctggaacgaatctttgatcaggggactggaactccaagcaagcaaaagatccaagagataacctcagaactgagccagcatggccaaatttctgaaacaaatgtctataactggtttcaaaatagacgggctcggtctaaaaggaagcaactggggtcatcatccaacaatgctgaatcagaacta

SEQ ID NO: 48592 - DNA, 381 bp, Gossypium hirsutum
  unsure (1)..(381): unsure at all n locations
  Clone ID: LIB3543-064-Q6-K6-B5
gtttgcttccngacagnatattggtggtagtgactttggcaaatatgaaaatagcactcgcagctcaacgtttacggttgttttaatattatatccgcaaccgtgataaatgcaattcaaatcaaaatgcattcctagttgcatacaaggggtgaccagataagctcttggaagttagaggattcagtttgtatttttctcatatatatatagggataatataccaaatggtacctgtgcttggcttgaaggttgaatgtggtacctgaaactttttccaattgggtaacttacttttagttggcattaattatcatttgtctgcctatacctgtatcattaaaaaaatcttgttatatgaagtttttttctttttagctc

SEQ ID NO: 48593 - DNA, 301 bp, Gossypium hirsutum
  unsure (1)..(301): unsure at all n locations
  Clone ID: LIB3543-064-Q6-K6-B7
tcggggcaaaaaccgttcgtggccgtgggacagangagtggagcgcacgtgcgttggggaggctgatggcgtttgcgccgctggttgttgcctagggttggccgtaagtttggttgatgttttgggcctggggtattttgggtttaggtttattagtttgggtttattgttgggttagggggggggggaggactanacttttaaattattttggttttttttgttttattttggttttggtgtaagcccgggcaaatttgggcctattcaacattaatttggattgtttgccatttctgtt

SEQ ID NO: 48594 - DNA, 651 bp, Gossypium hirsutum
  unsure (1)..(651): unsure at all n locations
  Clone ID: LIB3543-064-Q6-K6-B8
gnaaggaaggaactaactagttaggggtgggggcgtgggactgtgattccgaatccgatccatcgtcgagaaggggaaatgtatcagtggaggaaattcgagttcttcgaggagaaattgggaggaggcaaatgcaaaatcccggaggaaatcagtggaaaaatcgagtgtgcttccagcggaagaggaaagctcgtgatcggctgcgatgacggcactgtaagcctcctggatcgcggccttaacttcaatttcggcttccaagctcattcttcctccgctttcttcctccaaatgctcaagcaacggaattttttggtgagtattggagaagatgaacaaatatcacctcagcaatcagggatgtgcttgaaggtattcgatcttgataaaatgcagccggaaggatcgagtaccactagtcctgattgtattggaattttgcgtattttcaccaatcaattccctcaagctaagatcacatcatttctagtcttagaggaagctccgccgatattacttatagctattgggttagacaatggttgcatttactgcatcaagggagacattgcacgtgagaagataacccgattcaagctccaggtcgatagctcatctggtgaagggaattcatcagttactggacta

SEQ ID NO: 48595 - DNA, 624 bp, Gossypium hirsutum
  unsure (1)..(624): unsure at all n locations
  Clone ID: LIB3543-064-Q6-K6-B9
ggaacanagtaacccaggactggatgaacgtgagggagaagagaagacaaccatcgacaaaccagaagaattaacgaggaatcagaagttgttgaggaagctactgagctgaagagaaaaagatgaatcgagagagttttgtgataacgaggaatgtctgcatgaatcagtgcctgatgtagagtttcatgatacgaaagaagatgaaactgaactaagatttggtgaacagtgggaggaaactgaagagaacgtgtgcaatgaactagaaccatgtgaaaggaaatcagaagatccagagcaaccaatagaagatgcgaaaaaggttgaaatggaagaagtaaaggatactgacgacttggagagattaacagttgctaaggaaggggtggatatgaaggagaaatatcaatataagattgaacaggaagaaaatgtttccgagaaggaagagaatgagatgctgttagaagatgtctctgtacaggaaaaatttgaggagatatctgaagaagcttttgagatatcagaactgaaggaggaagttagtgcggcttgtaaaccagaagaaaacagtgaagaagaagatgcttgtgatagagaagacaatgagcaaatgtctga

SEQ ID NO: 48596 - DNA, 645 bp, Gossypium hirsutum
  Clone ID: LIB3543-064-Q6-K6-C3
ccccgcgtccgcggccgcgtgggcgggcgcgtgggtacgaaaatgaagtgtttgtcccgtcttcatgaagagacaagccgaagaacaaaaacagagaacaggctctgtttttgaaacaaagaacctagccaaatcacaagactattcagattccagtcaaacatcgaaatcattccaatcttggaagagtatcccagaattgtacaaagagaaacagcaaaatttaagggttttctcgttggaagaattgagcgatgcgaccaatggtttcaataggacgttaaagatcggtgaaggtggatttgggagtgtttataaaggcacgattaaaccactcggtggtcgaggacatcctttagttgtggctatcaagaaactcaacacgcacggtttacagggtcataaggaatggctagcggaggttcaatttctgggagtcgtcaaccatgcaaacctggtgaaacttttagggtactgttgtgcagatggtgaaagagggattcaaaggctgctggtctacgaattcatgtcgaaccgtagcttagaagatcatcttttcaataaaacatccacattgctatgggaaaacaaggtttggagattatgcttgggagcagctcaaggactgggcttattttgcatgaa

SEQ ID NO: 48597 - DNA, 652 bp, Gossypium hirsutum
  Clone ID: LIB3543-064-Q6-K6-C5
catattcatcaccatccactcttctccaagcctagcgtctcgaaactagaaattcaaattcaaattcaaatccattgaatatcaagtgttttgcatcgacttcacagtccaagtcccaatctcaatcgccgccgccgctaccgccttttaaggacgaaggagaggagaggaagttctctgacttaaacatgttgtttcgtagattctggaaggtggctgctccttattggttctctgatgataaggttcaagctaggcttcagttagctggtgttttcgctctcactcttgccaccactggcatcagtgtcggtttcaatttccttggccgtgacttcttcaatgcgctagcaaacaaagacgaggaacaattctccaagcaacttctgtactatctttgtggctttgctggtggaattccgtttttcgttttgagagattatgcaagggaaactctttctttaagatggagatgttggatgacaagctatttcatgcaacggtatctcactgatcggaccttttacaaaatccaatctcagtcaattattgataaccccgaccagcgcatagtggatgatcttagttcctttacttcaactgccctttctttctcattgacgctcttcaatgctgccgttgatttgatatc

SEQ ID NO: 48598 - DNA, 641 bp, Gossypium hirsutum
  Clone ID: LIB3543-064-Q6-K6-E2
attacccacttaagacctgtgttaattcagctctttagtgtttctatgtatattttattttggcataatgataaatgtagtcctcatcgtttacattttctatcaatttggcctttacttttttttttttggagctacatttggcccttaacctttcaaaaaagagtcatatcgctttttttaacgaaaatggtggttaaaacattaatttttaatgttgttggcatgacaacctgcatggcagtccatgtgcatatcatgctaacataacaatttgtcttatatctcacatcaacaaataatttaaaaattataaaactaaatcaaaattaaaattaaaaaatataaaaagttaataagaagtcaaaaaaaaaagcatggagtacatgtggattgtcatgcaggcttccatgtttaaaaatctaacatttaagtcagtattcttgttaaaaaaacatcatttcaactctttttcaaaaggttggtcaaatttgacttttttaaaaggttgagggccaaatttagctcaaaaaaagataatggccaaattggcaaggctaaatttgacattatgccttttattttccccatatatctatggttgtttatatgtgtacaggtatattagcttgtctattatt

SEQ ID NO: 48599 - DNA, 632 bp, Gossypium hirsutum
  Clone ID: LIB3543-064-Q6-K6-E9
cccagcgtccggtggcggcatttggagagagatacccgacgactaggccgaatttcgtcggtgagggtttcatggacgccttgcagaggtcaaggaactcctttaagctgttgtttgtgtacttgcactcgccggaccacccggattctcctgtattctgtggaaggaccttgtgttccgaggcagtggctgcctttgtgaatgagaattttgtggcgtggggcgccgacattagggctagtgagggttttaaaatgagtaatagcttgaaggcatctaggttcccattttgtgccgtggttatgcctactacgaaccagaggattgcactccttcaacaggttgagggaccaacatctccagaagaaatgctcacgatgctgcagaaagtgcttgaagaaagttctcctgttcttgttgctgcaagactggatgcagaagagagaagaaacaacatgcgtttgagggaggagcaagatgctgcttacagagcagcacttgaagctgatcaagctagagaacgccagaggagagaggagcaagaacgtctggaaagggaggccgccgaagctgaacagaaacggaaggaagaagaagaagctcatgaaagagcagcacgtgaagctgctgaa

SEQ ID NO: 48600 - DNA, 643 bp, Gossypium hirsutum
  unsure (1)..(643): unsure at all n locations
  Clone ID: LIB3543-064-Q6-K6-F5
cttccctgnataatggggataaatctactctgcttgtatcagttcaacatggtgtttctgcagagagatctcaccttgttgcgaggctgctaattggcggggacattgttcctgacagacttttgattttggattcaattcagagccagaacttcaggggaaagctctcaccggatgaaacttatgcgtttaagctggagacgctagccgaaagaaaaggattgggtggtagcaatgtagcttcttcccttctaaagggtttagactattttccatcaggtagtatgattgatggcttggctgctgctctgttaagtcgatgccaattaaagaacataaagggaacactgtgtgtttcatggcctgaattcagtagttctgtggtggctctgattagatcgctattgcaaaggaatgtgctgcctagcttggacttgagctttgcgcgagaaatgcaggatcaatacgcaaggttcaatctaattaagcatcagccttatgatactgaaatgtatacatagtgaacaaggtttttgattcacacaccaaaaaaacaaaattatagctttatgaaactttatgttttagttttgaaagagctgtatgagagtgatttgtcatatctgttaagttgaattataaa

SEQ ID NO: 48601 - DNA, 634 bp, Gossypium hirsutum
  Clone ID: LIB3543-064-Q6-K6-F9
atcctcatcccctcgtcccggactgcgcgccctctccgctgtcctcctccgtaaaatcctaactcccgccgctgattactcctttctctttcccctcctagctgaatccacacgcgccgccattaaatccacgcttttatcctccctccagaccgaacaatcgaaagctaacgtaaaaaaactctgcgatacaatttccgaactcgcttcttccgtcgttgctactagaggctggccggaactattgccattcctcttccaatgtgtgaattctaagaatcccaacctcgaagaatctgctcttttaattttctctcgattagctcaaaacgtcggagaaacaacggaaaccctaatccctcatttaaacactctccattcagtcttcttcaattgtttatcaaatccgtcaagctgcgacgtacgaatcgcagctttaagcgcctcagtcagtttcattcaatgcatttcaaaccccaaagatcgggacgctttccaagatttgttgccgttgatgatgcagacgttgaccgaggcgttgaactctggattagaagccacagctcaagaggctttggaattgttaattgagttagccgggactgagccgaggtttctaaggaggcaaataatg

SEQ ID NO: 48602 - DNA, 581 bp, Gossypium hirsutum
  Clone ID: LIB3543-064-Q6-K6-G10
tcgcccacgcgtccgtccactcttacgggggcgggggggggggtattaattgtttcacatagtggatcctagaattcctacatcataacagaagacacccataagctaaggaatactagttaaggaacaagaatctaagcctaaagcactctaaactttgtcagggtgacataaatccactccgggggggcggaggtcgaacctttacaaaaactctaaataaaactcatctcactaagagatccaccacagacccctctgagcattccgataccaccgcctatcgtcccgtatacgatacaacaaatgatgatgctgagcattctaatggattcctaaataacataagaccatgagcaccaacacaaatttgaaaagcatgctccacaccacccaaacaactgtttaatcaaacccaagattatcaccataaagctaagaatctactagaagaagatctaactaatgatacacaaggagatactcactacctcttagcttacttcaagaactcattgatatacaatctcgaacaaaataagtactaaactgaaccatatctaaactataaactcactgac

SEQ ID NO: 48603 - DNA, 430 bp, Gossypium hirsutum
  unsure (1)..(430): unsure at all n locations
  Clone ID: LIB3543-064-Q6-K6-H11
ttcctttacaacaatctctaccanatnttccacctacaatttctgttggggggggggggggaantnantttttncccaatcttantntnggaacaccatgggagactgttgccaaagaagtcagcaatacattaggtgtagactcgccagttgttcgtgcagaaatttcaaaggacgtaaacacacttgtggacttgatcatttcctggatggcttcaaattcaggtgcaaaactcttaaacccttgatgagtaggatagatacccaactaaatgaactctatctaataccttcaattatgaatgaaccctatgtactaggtcaaaatgaatgttgtatttgtgcccctactattcccttccccccccccccaacaacaatctacaatttcattaaaaacccactcancccttacaaaaaccacttacca

SEQ ID NO: 48604 - DNA, 649 bp, Gossypium hirsutum
  Clone ID: LIB3543-064-Q6-K6-H2
cccagcgtccgcaacattaccgtgttggacatgtgtggaaagttccaataataagagtgttgcagaggatgttggcaaaagcgaggaaagttttgcttcaaagaatgatactgttgataataacacttcaaacaacaatgccccagatacaggccttggtccaactaatattacctcggagaaaggcgttgagacaaatatcagtgctcctgttgtgtctttcaattccagtatatcttcagtggagcaacatgtgacaccaagtttcgacaagaatgaaaaaccgaaaccgattcagaatgatttcaccaaaccaagtgataattcttctccccgtaaagctcctaagatgaagaaaaagcctgagatgctaccacctgcagtaactacaatagctgatatgaacaatttgctagatcagagtcgtgtttcatgaatctccgacaccaaaatggtcttcaagagcagacaaagttctactagaagcaagattgcagatcgagaatgcacccattataaagaatgatccacaactttatgcacctctttttcggaacctttctatgttcaaaaggagctatgaattgatggagaacacactcaaagtatatgtctacaaggaaggaaaaagacccatagtacatacacc

SEQ ID NO: 48605 - DNA, 637 bp, Gossypium hirsutum
  Clone ID: LIB3543-064-Q6-K6-H8
ggttaatgctgatgctttggggtggtcagccggggggtctcaccttatcaggaaaaccctagctgatactcgatgttcaagagatcttccgtagcttcggatgagtcacgaccagcagttcccaatgatgcaatagatgaggatctgggtactgcaacacaacatatggatgtgggggggggggagaaagatgaaataaaaatggagggttatggagatgttttcaataaagctgttgctactgaagctcctcaagaagattctgtatcaggggctgaaactgaaagctttatatctgcagtcgaggagatagatgataacagtgatattgctctgagttcagctgaaaaggaagtcacttctagattgaatatcgagaggcaagatagcgacactcagatgtacttttcttccacttctaattcagaacatataagtgggtgtgacttcacctttgctgcgtcttcttcagctcaaagtcaactatcatcaccaacacgctatcaacgaaagaagaattcggctaaaatttcttttgatactccttattccggttcaaatgtgagaattccttgtgcatcgtcttctgcacagttgtctccttacactggagcttcattgcatttatctcccctac

SEQ ID NO: 48606 - DNA, 622 bp, Gossypium hirsutum
  unsure (1)..(622): unsure at all n locations
  Clone ID: LIB3543-065-Q6-K6-A8
ctaccaaccgggggggggggggaagnaaagagaaaagaacaagctaagggttcggccatttttgagtttgattaaggtatgtaactaactcggtttttgataatttttacgtttttgagatcgttgctttgtgttttagctagcccatgcttgaatttttgaatggagggggtattttgtgatatgccattgaagggagcttgttgttttttttgttagatgatggaaagtaaatatatgttgttagatttttcatgttttaattagtaatttttgataaaaatgtgtattaaggactaaattaagaaaagtgtaagttgagggactaaaatatgaaataaataacatgcaaggacttatatgagcttagtgtatattcggctaagctattgtgcaatgaaagtttgtttattttgtatttttgtggaatagggactaatttgtgaaaaatgtaaaatgttagggtcaaaagtgtaatttaaccatttatgtgcttttggatttaattgaatgaatatgtggttaaattatttaaatttgaacttatttagatcaagaacagaagaaaacgaaattagatcgggggaagttgaaagtagtcgagtagtcgactgtgtccgtc

SEQ ID NO: 48607 - DNA, 601 bp, Gossypium hirsutum
  unsure (1)..(601): unsure at all n locations
  Clone ID: LIB3543-065-Q6-K6-B10
gnaacactgtacgcttcaaaagggaaaaggtctggggcgcataattatgaacatttccacaagatttggagcgaagttacctcttttaagcaatcttgttcctatcagagaggtgcctaagttggggttcttgccgttttcgcatcgaaagaggggatttcnaagtgggttttggggggggggggtttnaatgttgaaaaattcgatgttggtgtcgagaaccagttggggttgattcgttctgcaacggaatctaatgctgatgaagccattgaagctctcaaagctgggaaagttattgcagtgcctactgatacactatatggatttgcttgtgatgcttgttcttccaaagctgtaaataggatttacgacatcaaaggccgcaagcataccagtcctcttgcgatctgtgttggggatgtttcagacatagagcactttgctgtcacagaccatttacctcacggnttactcaattctctcctgccgggaccagtcaccattgtactagggagaggggaatctagcatccttgagaagtccttgaacccgggattagacagtataggagtgcgagtcccggactctgacttcatta

SEQ ID NO: 48608 - DNA, 574 bp, Gossypium hirsutum
  unsure (1)..(574): unsure at all n locations
  Clone ID: LIB3543-065-Q6-K6-B9
gcagcccctaggnacaatacaaagggcggggtagaaaacacatttaaacagaagctgggacggcagctcgtgggagcaaacatagcttgggatcgggggtgggcacaaggtatttcgtctggcctcgattgcgtggttcaagtctgttagcatcgctgcaaggtggtactgtccgacttacacatacagtgcaggggaccctgacaaccaaaagaagatctctcaccttgaaacactacaagagcgggctagactacaagatctttgatgcggatttaactgatgaagggtagctctgatgcccctattgctggatgtgaccttgaattgcatgttgcgacacccgttgactctgctgatgaagatcccaagaatgacctgatcaaaccacatactcaaggagtggagaacgtgactgaagcttgcgccaaatcaaagacagttaaacgatgacgacgagacataacatacacgcagctgtgtatatcagcacactcgggtgggacagatctcgacgtgagcaaacaaagactgcaccgatactcgggttcttatcatcagactgaccaccaac

SEQ ID NO: 48609 - DNA, 495 bp, Gossypium hirsutum
  Clone ID: LIB3543-065-Q6-K6-C10
gacatatccaatggttaacaatgaggggaggtggggaaaggtgaacaatatgtggggcactacagaacacttcattcaactactccccattcatagagagtgacacaccatctgagtatctaataccaccatatgcttgctacttccactctttgaccatttcctactccgaagctggcgggggaggggccgatcctggcctaaatctttccgacaagagtttatatgcccaggttatatagccaaacggatatatctacacctaacacactgttgaaactaacgaaggatatctaataggtttcaacaataaatccatctgtgatcttaaattagaaggtattctgttctggtcagataaatattatggtagagatgcataaggtcatgattacactgaacagtctttatgcttgatacttacaaaccaacggaataatgtatctgaaggaaatgttcatagaacacgtttagaccatagacacatatttttgt

SEQ ID NO: 48610 - DNA, 635 bp, Gossypium hirsutum
  unsure (1)..(635): unsure at all n locations
  Clone ID: LIB3543-065-Q6-K6-C3
ccccgcgtccngtaaaaaagaacttcaaagcctctctctattttcaatctcttttattgctctctgcttcacggtggccagtgctgccagttttgacattcgaaacaactgtccttacaaggtctgggcagcagccgttcctggtggtggcagagagctgagcaaaggcggagtttggaatctgaaagtgaatcctggcactacaggagcccgtatctggggtcgaaccaattgccaatttgacagagccggacgaggcagatgccaaaccggtgactgtgggggcctacttcagtgcaacgcctatggtgtagccccaaacaccttggctgaattcgcattaaaccagttcaacaacttggatttctttgatatctctctggttgatggatttaatgttcccatggaatttagtccgacatctggccggtgcagcaggggtattcgatgcacagctgatatcataggtcagtgccctaatgagttgaaagccccaggtgggtgcaataacccttgcacggtctacaaaacggatcaatattgttgcaattcagggaattgtgtcccaacggatttttcgaggttcttcaaggcaagatgccccgatgcttacagttaccctaaagatgatcaaa

SEQ ID NO: 48611 - DNA, 640 bp, Gossypium hirsutum
  unsure (1)..(640): unsure at all n locations
  Clone ID: LIB3543-065-Q6-K6-D11
gggaaatacacaaanaacaggagggggggggggggagagagcacagcagcgttgatgaggatttgcttctcaaagaattcttcgctgaagtcagcgaagtcgaaagagacaacgaagtcgtcaggatcctttcatgcttcaagttaaatccgtttgagtttttgaagctgccgtggggtggatgactagatgatgttaaaaaacagtatcgaaagttatcattaatggtccaccctgataaatgcaagcatccacaagcaaaagaggcttttggagcactagcaaaagcccaacaacaattgcttgatcaacaagaaagggattatattcttagccaagttactgctgcaaaagaagaacttagagctaagaggaagaagcagttaaagaaagacacagcttccaaactaaagtcattagttgacgagggaaaatctgaactagaatatgaacaatcagaggagttccagcaggagctgaaattgaaggttagagagttattgaccgagcaggaatggcggcggagaaaaaggcaatgaggatatctgaagaagaagtcgactaaagaaggatgaagaagagcaaaaggagatgtggaaacgnaagcgtgaacatgaggagcagtgggaaggaacaaggg

SEQ ID NO: 48612 - DNA, 251 bp, Gossypium hirsutum
  unsure (1)..(251): unsure at all n locations
  Clone ID: LIB3543-065-Q6-K6-D3
ccccgcgtccgggtttatgttggaggctgcactgcactgcactccctatcggaaacttggtttcaaacaatgctaagacgcacaagttccatctgtgactgttgacggacaacaaaccccatgaggaagtctggttctcgttgaaccatattgtagtatttttgtttttgtttttcctttggngaaaagattccttcactttgatgtatttgattatttgagaatgcattttgcaaaagcaaagttaattt

SEQ ID NO: 48613 - DNA, 543 bp, Gossypium hirsutum
  Clone ID: LIB3543-065-Q6-K6-E2
gtccgccatcccggtcgaccccgcgtccgcccacgcgtccgcggccgcgtgggcggacgcgtgggctgcactgaactgggacattaggtctggaatggctctcgagacctgcctgatggaattgaatacctccactctcaaggccctaatgtctctcatggaaacataaaatcttcaaatatcctcctcactaaatcctatgaagctcgagttgcggattttggactggcaaacattgtaggttcatcgtgcagacccaatagagagctggcgtaccgggcaccaaaggtgactgacccccgcaaagtatcacaaaaggctgacgcatatagctctggtgagacccttttagagttattgactggcaaagcccccacccattcaatcttgacagcagaacgaattgactctcccataggtgaccgcagtctgtagttcatcaagaatggacttccgtaattattgatcttgagctcctcaagtattaaaatttagaggaagagatggtccaacttttaaaagaagctgctgattgtactgaaa

SEQ ID NO: 48614 - DNA, 497 bp, Gossypium hirsutum
  unsure (1)..(497): unsure at all n locations
  Clone ID: LIB3543-065-Q6-K6-E3
ngacggcggcagaaaaaaggaaaacgagcaattatttatattttattttttcactttctttgaatccgaccaaaaagagactgaagttatcagtgaagggtaaagcttacggtgtggaggttccaattttgcagagcaagcttttttgaatttgcttaaggttagaaagctataactttataccgccaaaagcttttacaaatggtagtgaaagttgcggcaacgtcggcgcgtttacaatggtcgcagccgaatcttcctcagcctccttcttcttcccaagctttagcttcagcaatctcttcaccttcccttccgcggcgttgccgcagcgacggcgctctcgttctcaagtccgtacaaagattgaaccggtcggctctgttcggttcaagctccaccaatatccaagggtcccgatcttgcgatttgctcaaaccgagatccggaacttcacgacgagcttgcagcgcaagcttagacgccttttctgatga

SEQ ID NO: 48615 - DNA, 624 bp, Gossypium hirsutum
  Clone ID: LIB3543-065-Q6-K6-E8
cccagcgtccggagaacccatcacaacatgtctggcgcatattttgttcttgatacttgtttgctacccagaaatatattgcctacaattttcctttacctgtttgtgattgggatatggaactaccgtttcagaccaagacatcccccacatatggatgctcggctttcacaagcggatcgtacacaccccgatgagctagatgaagaatttgactcattcccaacatccagaccatcagatattgtacgaatgaggtatgataggctgcgaagtgttgctggtagggtacagacagtggttggagatctggcaagtcaaggggaaagagctcaggcaatactaagctggcgtgatccaagagcaacagcaatcttcatcatcttttccttgatctgggctgtgttcatttatgttactccgttccaagtggtggctgttctgttcggtctctactggctgcgtcatcctcgcttcaggagcaagctgccatcggtgcctgtcaacttcttcaagagattaccatcaaagtcagacatgctaatttgagaaactaaggttacttccattattatcattcgtttaatcagtatgtgaataaagatgattcggtgaataactttc

SEQ ID NO: 48616 - DNA, 639 bp, Gossypium hirsutum
  Clone ID: LIB3543-065-Q6-K6-F11
agtatggaaaatgtcttgggggggggaaatacatgtacctgttcccaggaattggtttgggaagtttggtctcacgtgctcgctttataactgatggaatgttgcaagctgctgctgatggtctgaatatgagtattatcatatagttcctattattcttgttttcgcgtggcggccaataattctctaaagcctagaattcacagtgtataatgtttgaaaaactacactcttattatttctagtatactataatgtattcattgagtatatatatataatacataagcgtttcgaatggtaccatagactacgaataaaagcacctgataagaacaagtctacttgctatccgcttggtcacagatcgaaaacctttctctataagcaggagaaaatctgtttacattgggacctttctcagaccctacttataacggcaggctataatttcttagtgatgcaaaactaggaccctaaaaggagtgaaatgttggtgtaggcctttgtatccctatgttattgcgtgcattattgaagttttggttgcataaactctattagacactgattacagtaacctttttgcgcttcacatgagtatgaacacaatgggatctataattcttgcgtcgcttg

SEQ ID NO: 48617 - DNA, 670 bp, Gossypium hirsutum
  unsure (1)..(670): unsure at all n locations
  Clone ID: LIB3543-065-Q6-K6-F4
tngatatgagcagtatctttctgatggaatggatactttgaggccatgacactgaacctagcagagataaaggtagaagagtcttggcgtaaaagcaatgggcggaaaagaggaagaaccaagtgtaatgtttttgaaaaaccaaccaaagagggccggacaaggaggggaaggcagaggaaggactttcaaagtgaaattcttccaagccttgcttctctttcaaggtacgaggtcactgaggatcttcagataataggagggctaatggaagccacaggtacacactgggaaagcagttcttcaagaattgcaggtagaaatggatacacaaaagggaggcgaaggactaatgcccgtgctgccagtgttacggagagcatgacaaacacaatgctgcagtctggtaacagtgaagtgggaatccagccaagaagactaatagactgggggaagataacaagacgaccgagggggccaagatgtccgtcaagtaatcctcggcttatattaggccaagtatagaaaggtaagtttcatggattagccaacagtgaatcatatgattatcatgtacatgctcaactaaaatatggcataccagttacattatataggagaatagatgtccattntgaactntcaatggcttttggtactgtctggtgag

SEQ ID NO: 48618 - DNA, 647 bp, Gossypium hirsutum
  unsure (1)..(647): unsure at all n locations
  Clone ID: LIB3543-065-Q6-K6-G11
cggccgcctgggcggncgcgtgggtggttatgggccgacagactgccgatatctctcctactcaggcatttccggaagagcagtgactctatctccttgctcttcacatagtgaccacaaaatttgtgcacaggtgaatgttagatctttgaaatgtagttcnaggggaatagtgggggggtggggcanagcaggtcctggtggccataggagaaaccctgacttctcgaggcaaagacctggatatcgagggaagaatagacaaaatgaagacagggagaacttcgaaaatctagatgaatccgaaatgatatcttcaaaaaatgggccgttgctttccctttctggttccacaaaatttcaagccactgctgccccaggtccaagagagaaggagattgtggagctttttaggaaagtccaagctaaacttcgagaaagaactgctgctaaagaagatacaaaaaccgaagcctcacaaggaaagggcaaagagagcgaaacagttgattctctccttaagttattgaggaaacactcggtcgaacaaggtaagaaaaagaacagcaatggcagcagcagagacttgaatttagatactcccgaagtgaatggctcttcaaatgaagataaaagctttagttttt

SEQ ID NO: 48619 - DNA, 634 bp, Gossypium hirsutum
  unsure (1)..(634): unsure at all n locations
  Clone ID: LIB3543-065-Q6-K6-G12
ctcacttcaaattctaggnattggggggggggggggggtgtctanaaaattatcccgcttttttcattttcattttccactgggatcgattacatcaccctattggtgttacagatgtaatcgctttatacgagtccggatccgatccccccatgattcggttcattgcctccactgcgggggggtatgcctggggaaatccaaacaccctctcnatctcccatcgatcaccgtttccccgtcgcatccttgtactccggcactcccagtctgagccccagccccaccgccactcatcgtttccgtcgagctcgacgaaacgctggcgatcgctcccctttctatcccgtcgtcgtactccgtggaccctcctccgaaacggacggcgaacttcccgaaagagggaataccagttttgagctttattatgatgatgggtccgggtcgggtcttcgtcatttacccgatagcatgtcggaatttttaatgggttctgattttgataggcttcttgatcagttatcccagttacaagtaaacgaagttggtcgcttcgagcagccgcccgcttcaaaagcagcgattgaatcaatgccggtgataagaatcgttggaaggcacatcaggtcggact

SEQ ID NO: 48620 - DNA, 617 bp, Gossypium hirsutum
  unsure (1)..(617): unsure at all n locations
  Clone ID: LIB3543-065-Q6-K6-G5
ctgctaccctagcatgcaactgtctgtcctttggcaagcttttaagttttttgtattgtctctttgttagtggcagccacttccacaaccacatccaagcctttaggcaaagtttccacgcctacnntgattctttccctgggatcccatggaaatagattttgcaggattaaccctcaatgaagaagaagaagcagttttacaaatacaagtagatccgactaaagataaggaagaaggagtttttagataggtgggatgtttcttaacggccagtgttattcacttcccagcaatgaaaagtactatggctaacttatggcatcttgttaggggtgttcaaattagggatttgggggaaaaaagtatttatttcaatttttccataatatggatttagaaagggttttaaaggggtcatcatgtacctttaataaccatctattgattctttataagttacaatggggagaagatccattaaaggttccgttgatttcaacacccttctatgtataggttcatgatgttcttatagggttttactctgaaaattagccttacaactggggaattttatagggaattttctggaatatgatggctcaaccttggga

SEQ ID NO: 48621 - DNA, 560 bp, Gossypium hirsutum
  unsure (1)..(560): unsure at all n locations
  Clone ID: LIB3543-065-Q6-K6-H11
ccttttcctccacactccttgctcgtcccggattcaaaaaaaaatnaagtggtcgccccttacttnctcnccctactcngnaggaaacgcttccccttccccccatgacttgaagttattctcggatcagttttatcttattctgatnatnatannatatattttttcttcgccccgggtaannncaaanatattactnacctaattnctantgnaaggaaaaacttagcttcccttccttcccgtggtggtgctgttgcggttgcccctcctgcagctggtggcggacgcggcgatgctgcacctgcagctgnagccaanaaagaagagaacgtccaggagaaggaagaatcccaccatgatatgggtttcagcctcttcnactaancaagcaaagcaaatatcaaggctttttaagctccctcctatgtaagttttcaatgttttggattttgttacttcatatggtgttaactcttctcgcattttctttgaaaaatttttattaatcacattaaccatttttcttaaaaaaaaaaaaaaaaaaaaaccccgcccct

SEQ ID NO: 48622 - DNA, 600 bp, Gossypium hirsutum
  Clone ID: LIB3543-066-Q6-K6-A1
gcaaaatcaaaaaaaaaaattgaagaaagaaaggaatgggtttttcaaaggaagagaaatcgagaagaatttggagggtattgaaaacagtgtttttcttgataacaatggcgatttcgttcctcgtattttctgcgccggtttttctcgttctagccgatgctcttttgccttccgctttgctctctgcttcgctttctccttcttatttatcactccaatccctttcttcccatttcgataactatgattttagatcttctctcatagatattcccctcatatccatcatcagatcagctgttataatcgttgtttacagtttttgtgatgggccaaaactttcgaggggaccatacctgggaatcacaatgatttgttcgatttcatcgttggtttttgtttcgataaaagcttcgtttgtgttcggttcgagaattcctaaagaagggacatatgttacagccatggaaaccgctcttttcatttcttcattggctttggcaattgcacacatgactgtggcttataggacaagttgcagagaaagaagaaagctccttgtctacaaaattgacattgaagctatttcagcttgca

SEQ ID NO: 48623 - DNA, 376 bp, Gossypium hirsutum
  unsure (1)..(376): unsure at all n locations
  Clone ID: LIB3543-066-Q6-K6-A4
ccccgcgtccgcccagcgtggggtgcgggggggggtgagcatagacaaaagcgtggttaaagacaaattaaagcgcatgggcaaaaatgacttatcaaaaagtgttacatgtgatgctaacgttaagagattttgaaagagaaccctaatgtatgtgaatacataaaaccattggtggggggggggcaatatatttttttaatttanataccaaatttatgtaaagaagacttcacaaagggtattaaggaatggggttagtccaaatggaagattatttangtattgttttgaattatcaatggtgttggaatgtcttgtgtctattacgaggttattaaatttttgggcctttgtccgtgagggtaattgtgtt

SEQ ID NO: 48624 - DNA, 628 bp, Gossypium hirsutum
  Clone ID: LIB3543-066-Q6-K6-A5
ccccgcgtccgcagaaagccatgctgtggggtgcaggcattgatggattcagtcgaagagcctctcaacattacatttcagaatgtccatcaaggttttagagctgaaacattggtgcggtttctaaaagcaagagaatggaatgttgccaaagcccataaaatgttggtggactgcttgcgttggagggtgcagaataccattgacgatatattagcaaaacccattgttccttcagaactttatggagcagtgcgtgattcacagctcataggaatgtctggctactcaagagagggtcttcctgtctttgctattggtgtggggcttagcacgtttgacaaagcatctgttcactactatgtgcaatcacatattcaaatcaatgaatatcgggatcgtgtaattctgccttctgcgtctaaaaagcatgggcgacctataaccacctgtataaaagtattagatatgactggcctgaagctttcagcactgagcaaaataaagttgttgacaatcatctccacaattgatgacttgaactacccagagaagacaaatacatattacattgtaaatgcgccatatattttctctgcttgttggaaggttgtcaagccccttttgc

SEQ ID NO: 48625 - DNA, 572 bp, Gossypium hirsutum
  Clone ID: LIB3543-066-Q6-K6-C10
ttccataactggggtgggggcgatgtccgctggtgcacgttccattttcatatcaagctctctcgatggaacatgcaaggtttgggaactagtttctggaaggcatttacaaacattagtttatccaatgtcagtgacagccatcgctcttcatccgatagagcggcgggggtttttctggtagtgtagatggaaatatatttgttaatgtgtttgacattggagcagttgaggattgtttcgttactacggaagatcaagcatttgtgctaaaagtacacaagtaatgtgtaatgtatggtgcttgaaatttcttaaattctccaggataactaaattttgttgaaggcttctgtcgatatggcattagagttgttcttgtagtaatactcactgctttttgcctatgtaaatataaattctatgaggagatttaaataatggaatcttatttgcagtgaatctataactgcattgacttttagcggatttcatctgatatctgcatgggaggattttacattctgcctatgggatacaaataaaccgggtggtccttagaagattcaaca

SEQ ID NO: 48626 - DNA, 638 bp, Gossypium hirsutum
  unsure (1)..(638): unsure at all n locations
  Clone ID: LIB3543-066-Q6-K6-C6
cccagcgtccngacaagnaagttgttagtaaatcgaaaacacaaaacaagaagcaggttatggagtttctggagaactaggcgagatggttatgcagcagtgatcatactgttgcagtcgctcaatgaactagggcttttggagatcaacaggctagaattgcaggaatcaggggcaaagttgtcatccactcctgaggtcaaaaatgcacattttgaatgcatttctgcctacaaagagttggcaactgaaaggttaatcggtgatttgaggcaagttaaggcggagtatctttcttgtttgaagcatctttcaagtttgttagatgctgaaggcacaacagaatacagaggaacaacattgcaggagctgaagggtgatatcaagcgtgtagaagatgatatttcgcagtcaaggaggcataaaagctaagccaggctacccaacacctcattttgattcaattttctgaaatatactttccattcctgtttgaagaaaattttattacttcttcaaataaaattttatgccaatttcatttcaatggatatgaaggaattgaagtgcaaatgattgttaattttagagggatggttatgttgggatgttaattttttttaatggcattttttttc

SEQ ID NO: 48627 - DNA, 361 bp, Gossypium hirsutum
  Clone ID: LIB3543-066-Q6-K6-D3
ggtaccccacaaggaatgacaatggacaatgctcgtttggctattgcagctattgggaaactaatgttagcccaattctactgaactcggtaatgataatctacaacaatggttctcccatacaaacctatctggaggtaggaacccaagtctggattatggattcaaaggtgctgaaatagcaatggattcctattgttctgagcttcaataccttgctaataacttcactagaccacgttcaaagtgctgatcagtacaaccaagataataactccttgggtactaatcttttgaaggaaaactgctaaggcgtgctgatcttttaaagctcatggtgtttacatacttgtcattactt

SEQ ID NO: 48628 - DNA, 651 bp, Gossypium hirsutum
  Clone ID: LIB3543-066-Q6-K6-D7
gttgcttaccatgatttccttttgcgggggggcgattctgaggagcatgcaggtactaaaacatgcttctattgcaacaaagtttttagcagccatcgagctttaggtggccaccttaggattcatcaagatggtagcattttgagggccctgaattaccctggtggttccagtgggggggggaacaataccgggaatcctcctgcatccctaccaaacagccaactgaactcctttgccagttttaacagcctgagtgcgatcacttctaattctgtgaacaattctgggaaccctcctgcatccctaccgaacagccaaccaaactcctcttccagttttaacagcccaacccagttcagtactagttccgtgaacaattctgggaactctcctgcatccctaccgaacaaccaactgaactctactgcttttaacagcctgactctgctccctgcagcacacctggcatgtgatttctcttggatgatctacttgaatgaaacgaaccaggtaagtaggagccagttcattggcggctattccggagttcctctaattccggttatcttgtctcctgacttctcctatggctacagttatggtgcaacttatcaccataacagtcttgcttcacgagcatttgctcct

SEQ ID NO: 48629 - DNA, 650 bp, Gossypium hirsutum
  unsure (1)..(650): unsure at all n locations
  Clone ID: LIB3543-066-Q6-K6-E10
cggncgcgtgggtttatcaggtggtggcatggggtttcctttgtacacccaccgatttctatctcttcacttgcataaactctgaggaaaaagaagaaaaatagagcaagaggaatatttttttttcaagaaattttctatttcaatattaaagctttccaacgatcttgccatctgtggggattgtattacgctgtcaaagtagtggagtggggggatcatcgaagaagctacttgtttcagtttgtatatagtttgcttataagattgtaaccttggagaaaagctttagcctttaggatttggttagtagtagtgtgattgaaaacatgggttataattgtgatttctgcggagatcaaaggccggtagtatattgccggtctgatgctgcctgtttatgtttatcatgcgatagaaatgtccattctgctaatgcactatcgaaacgccattcgagaacattgttatgtgaaagatgcaattcgcaacctgcttttgttagatgtgttgaggaaagggtttccctctgtcagaactgtgattggatgggacatggtacttctacctcgaactcaagacataaggagcaagcgatcaattgttactccgggtgtccatcatccgcggaactttcttccatatggcca

SEQ ID NO: 48630 - DNA, 625 bp, Gossypium hirsutum
  unsure (1)..(625): unsure at all n locations
  Clone ID: LIB3543-066-Q6-K6-E3
cccagcgtccggntaatacaaggcttctacgagnatatgcaaagattgatgtaagattacggcagttggcttttattgtgaacactgggccaagtccagaggagtgaatgcaacttaccaaggaactctatctagctacgcgtatgttttgatgtgcattcatttcttacagcaacgtagacctgctatccttccatgcttgcagggaatggagacaaccttctctgtcactgtggatgatgttgagtgtgcttactttgataaagtcgaaaacctttgcaattttggatcttctaaccaggaaactattgctcagctggtgtgggcattctttaactattgggcatatattcatgattatgcaaattcagtaatatctgtacgcacaggaagcttgatcagtaagggagaaaaagactggacaagaagaattggcaatgatcgtcatttaatctgcatagaggatccgtttgtggtatctcatgaccttggtcgagtggtggacaagttcagcattaaagttctaagagaagagtttgaacgagcggctgatgtaatgcagtatgatccaaatccttggataacactctttgaaccttacgtccctgggtaacaaaacattgtc

SEQ ID NO: 48631 - DNA, 632 bp, Gossypium hirsutum
  Clone ID: LIB3543-066-Q6-K6-E8
cccagcgtccgatggacaaagaaaggtctcaaattgctaagatgctgaatgggagagtgggaaagcagtgtagagagagatggcataaccacttgaggcccgatatcaagaaggattcatggagtgaagaagaagacatgatactgattgcagcacacaaagaaataggaaacaaatgggcagagatagccaaaagactcccagggcgtactgagaacactataaagaaccattggaatgctaccaaacgaaggcaattcacaaggcgcagcaaagccaaagatggcaactccaaccctcccaaaggctcccttctccaaaactacatcaagtccgtaagctccccgacggaactgacaccggcggcagccgcctcctcatcgagccaacatgaaaatgagttcgaaatgactgatgctaacccacacatggtgcaactcgaaacttcgagtttgaactctactggttggagcattggagatttaaacgatcatgttcaacgtcagcgtcaacagcagcaggaagtgaattactgttttgatgctaatgtttataatgatattcatcgtaatcaaagctttggatcgatgcttgaaggagatggcaatggcaatggcagtggcatgggcaat

SEQ ID NO: 48632 - DNA, 658 bp, Gossypium hirsutum
  unsure (1)..(658): unsure at all n locations
  Clone ID: LIB3543-066-Q6-K6-F2
naacatatttganatgtcaagtgtatcatccttcaatggagaatgattgggatctgcaagctgttcctatcgctgctagagctccttccccaggaatgttttctaggcttgggagcaatgggatacttggcagctctgttgagtcactatctccattgaagggttttgcaactactgctgctcaacctaggcaaccctctgagaattttgaccctactcggaaaacaggctgttgcccgcagtgcatgcagaattataaacaagatcttactagacttttagcggccaaggaacatgagcaacgctcctctgattttaaatcagagccaactcggccggcattgccacagtggttgcagaatgctaaggcccatgatagtgatatcaaaactatggatcaggcgcaggctaaggatcaagatatgatctggacgcagaagacccaagagttgcagaagaaatggaacgatacgtgcttgcatgtccatccgagttttcatcagccgagtctaggctctgagagattcactcctgcagctctctcgatgacgagcttgtacaattcgagtctgctaggacgccaacctttccaaccgaaattaccattgaacaaaaacactggggaggcactgcaactgaacccaagtctagtagctag

SEQ ID NO: 48633 - DNA, 653 bp, Gossypium hirsutum
  unsure (1)..(653): unsure at all n locations
  Clone ID: LIB3543-066-Q6-K6-F8
atactcgctttctcttattctccatgaggcagttcactggnaaacccatcacattccttgcaccaaatcgctccattttcgattccaaccatgaataaaaaccagattcaccaagctcgtccatggcctggattccctacctcaaaggtttagctagcttcggtgatgccaattgcatcgaacagcttttggtccattgtgcaaacgcaatagaaagcaatgacgccacacttgcgcagcaaatcatttgggttctaaacaacattgcaccaccagatggtgattctaaccagcgtctgacatctgcttttcttcgagctctcattgtccgagcagccaaaagtggaagctgcaaaatgcttgcagcaatggcgaacgctcatcgcaacctttctgtagaaacccacactttttctgtcatcgagttggctaactttgtggacttaaccccatggcatcggttcggtttcaccacagcgaatgcggcaatactagaagccgttgaagggtattccgtcattcacatcgttgatctaagctcgacatattgcatgcaaatccctacattaattgatgccatagctaataggttcgaaggaccgccactggtgaaacttacagttcctggtgttccgaaagagtgcccccattgc

SEQ ID NO: 48634 - DNA, 628 bp, Gossypium hirsutum
  Clone ID: LIB3543-066-Q6-K6-G5
aaactgattcatttacttttcttaaactttcctctcatttatcttattctccagtcattcctcagtctggttcacgctcccaattgatctttttttttttttattttcggcatacccagggattttcattaccagagagtctcctttgattatgatctccggccatttcttttcaaatcctacttggactgtttttcgacatacaattgcttcagctgcaaaggcagaggctacgccttgatggattttttagcaagataagaggactatcccttcttcattttttactacaatacttgaagctgattggtgatgactcccatcatacacaccatcgaaatcaattttgatgaactcaatagatggcccaaagtgcacaacagaaaaggcagcattgacatggggaaaactgatcaaagaccaaggacattcacaaaaaatatgatcaattgtttcggttcttccaccacatcgggggcaacttgtattactgacaagttgtctatgttgcatattaacccttgtaggcaaatagttccatggaactctccatattgtaatcttgatttttgatggtagatttaggagcccaagttttttgtaaaaattgttatagacggtttgtaaa

SEQ ID NO: 48635 - DNA, 309 bp, Gossypium hirsutum
  unsure (1)..(309): unsure at all n locations
  Clone ID: LIB3543-066-Q6-K6-G9
cccagcgtccgcacctctctcaaaacgaacacaaaactagaaaaagattggaaaagagagaaagtggaacctctttttactataaattgcttcggagatccgatcctttcgatcgccggattatcctcctcgataatccgtgatcccttcaatcctaccggngaaaaaagaaccttcttagggttttccgtcgagagagaaggacttcgaagagtttttcagtgtgtttttgtgtttttttttctggttttcgatggcttcggaggatgtgaagactagcgaatcggcggtttcgacgatcgttaattt

SEQ ID NO: 48636 - DNA, 298 bp, Gossypium hirsutum
  unsure (1)..(298): unsure at all n locations
  Clone ID: LIB3543-032-Q1-K1-A3
ccgcccatacctnaaattgttngagtatattcagcttattttttagttcttaagctttatcatttgatgacatcattatacatcgtatgaattgcattatcttgtatctcctgtccatgactaccaaactttttngaaagctttataaaatgaaagttgtttttgttactcattaattattttgttaagttatttttttatgtttttatcataatgatttgatttaaagaagtggcgtgtcattagtattggtgtgtcctttcatcattttaaagaagtgggtttggctttttacaaa

SEQ ID NO: 48637 - DNA, 539 bp, Gossypium hirsutum
  unsure (1)..(539): unsure at all n locations
  Clone ID: LIB3543-032-Q1-K1-A4
cccagcgtccgcccagcgtccgaaaaaaaggaagtagtctacaacctgagttcgttcaccccatggatgaggtacaggnggaagaaggattacgtagacccgccaccagctcccttgttggacatggnaagaacttaagagctggtcttttcacagagctgtccttgccgagttcgttgctactcttttatttcttttcgtgttagttgccactgttatcggtcaccaaaggcaacctgcttgtcagggtgttggtccccttggtattgcttgggctgtcggcggcatgatcttcgttctcgtctactgcactgcgggaatctctggtggtcatattaatccggcggtaacgttggggttgttcgtggctcggaaggtttcattggttcgagcggtggcctacatggtggcgcagtgtttgggagctatttttggcgcaggcttagcaaagtccgtcatgaagcactactataatacactaggaggtggtacaaacgtcgtggttgctgggaactcgaaggcgccgctttgggagctga

SEQ ID NO: 48638 - DNA, 566 bp, Gossypium hirsutum
  Clone ID: LIB3543-032-Q1-K1-A8
ccccgcgtccgcccacgccgtcccgcttcgcttcccgcttaaaaccctacgatccgccgccacgtcatatccctcctccatcatcttatggacattcaacagaggttgctgcaacgctacccgaagtatcgccgtcaggtgcatttcctcgttccctactccgcaaccggaaatggtggtcgattggaacgacgccgtttcctgctcggaagtcggagatggtgttgaagacaaaaacggcgatgatggaacgttggaagaaggcactaaacgctctattccagttcgagcttattttttctccaccagtgtggatttaagaggattggtggagcagaacaagcagaattttataccgccgacatcacgaatgactaattatgtagttcttaagtttggagatctttctagttcctctggtcctggtgttttcacaagtggaagcgattgctgtttcatggtggtattccagtatggttccattgttttgtttaacgttcatgaatgtgatgtggatcagtatcttaaaattgttgaaaaacatgcatcaggattgcttcctgaaa

SEQ ID NO: 48639 - DNA, 585 bp, Gossypium hirsutum
  unsure (1)..(585): unsure at all n locations
  Clone ID: LIB3543-032-Q1-K1-B3
gcagnaacagcaggagnanaggatgtgcatctgattccttggatgatgatttctccagctgttcttctagcaaagagcttttggatcattttcttccagtggatgaagagagatgaacagggttcagatgaatgggagctctctgaaagccccgagcatttttatgtcaaagagaagcctgcttattccattcaatcttcagacgttgagacaatgaaagaaaattttgctaagcttctattgggggaagatattacaggtggacggaagggtgtctccacagctttagctttgtcaaatgccatcacaaatcttgcagcgtcaatttttggtgagttgtggaaattggagccactagctgaagaaaggaaaaataaatggcgaagagaaatggactggttactctctcctaccaactatatggtggagttagtgcctgctaagcaaaatggtgcaaatggcaggactatggagataatgacaccaaaagcccgtgcggacattcacatgaatctcccagcacttcagaagttggactctatgcttattgaaactctggagtcaatggtgaatgctcagttttat

SEQ ID NO: 48640 - DNA, 400 bp, Gossypium hirsutum
  unsure (1)..(400): unsure at all n locations
  Clone ID: LIB3543-032-Q1-K1-B7
gnaaaaaaacactagnattatagcatacactcatatttcctcatctgatttccaactattttccttttgttcttttggagccgaaaccctattttgcaaatgcaaccagtatttcagcctgccttctttgcatttaatttcgattcaacagtntgcaaagaagggaatccagaactctactttttgatgtcttaaaattgtaaacatgttggacaattgtgaaatggtatgcggtaatgtgtaagcttagatttgtaagttcatgcgggttaaggaggctggtntcatcgtttccgacctgagactgtcttcttaacggctcctactggttctgttcctcggtccctttttttttgttggaaccgntgcttgttttgggccggtgtctcgtttgtttgtt

SEQ ID NO: 48641 - DNA, 419 bp, Gossypium hirsutum
  unsure (1)..(419): unsure at all n locations
  Clone ID: LIB3543-032-Q1-K1-C4
aaaaattccccaagttgcttgtgttcctctcatcaattttcgtctgatctacaanaagggagaggataagaggactggatttaacttttctttttttctttttttggtgtttttgttaggatatttatttggttttcttaggttttcgaaataatgagaacttcgtgggcagattctgtagcaaactctgcatctgaaattgcagtttcagacaatagctacgtacctcgtccaactcgatccacttatgtcccgccccaccttcgtaaccgtcaagcttcggacgcacctaatctgccaggtccggctactgagagggcagctnttaccggaaccgctggtgtgtccctgggctcccgatggagcagcggcctgcctaagcccgaaatgggggcggcctggtccaggttatggttact

SEQ ID NO: 48642 - DNA, 572 bp, Gossypium hirsutum
  unsure (1)..(572): unsure at all n locations
  Clone ID: LIB3543-032-Q1-K1-C8
ccccgcgtccgggntgatttagtgagctaattgttattttgtgatagtagttgttcatctactaatttttttttcttgctattctgtatgcagggctgtggataatcaggtatagtaacaaaatttttcgtaaaggctttcataagtctcgtaattagcatactgtactatttggtttaataagacagacagtactagtacagatgaaaattaatgtagatcctgttattttatggtcaaaactagaatgcagtcagtatttggttagtctaacatgctggactttgatgctgttctggttggtagcaaagacaccgctttctttcctttggcctttttctttatgaaggattctttccttctgtttagtcttgaaaaatacttgtttatataattcatgttctgatgttaccatatatactggatggtgaaaatgggatggattcatcagaactgtgacttcagatcactggagctctgcactgtctaggacatgaatatatgatttctcataaaagatttcattctttttttccttctctaataaaaattttaaataacagttatatgtg

SEQ ID NO: 48643 - DNA, 576 bp, Gossypium hirsutum
  Clone ID: LIB3543-032-Q1-K1-D11
cccagcgtccgccccgcgtccgcacacaccaccttgatagctgcatcgtcgccgtcgcggttaataacggtgatattagtgcaattcttggaagtaacagcgatcagagtaacagtagagtagttgaatcttcaccgtcgatcatggctcttggcggtgcaaattacactgaaatcgatgaagatctccatagtcggcagctggccgtctatggccgtgagactatgaggcggcttttcgcatcgaatattcttatttccgggatgcaaggtcttggagctgagattgcaaagaatctcattctcgctggtgtcaaatcagtgactttgcatgatgaaggggtggtggaagtgtgggatttgtccagcaattttgtgttttccgagactgatgttggtaaaaacagggctgttgcttctgttcagaagttgcaggaacttaacaatgctgtgatcatttccaccttaacaacaaaattaaccaaggaacaactttccaacttccaggctgttgtatttactgatatcagttttgagaaagctattgagtttgatgattattgtcataattataatc

SEQ ID NO: 48644 - DNA, 578 bp, Gossypium hirsutum
  unsure (1)..(578): unsure at all n locations
  Clone ID: LIB3543-032-Q1-K1-D8
gnaaaccattagctccaactgaaaagctagagtcccaaaggagcatcagaggaggattctgaggatgaattttatgatgctgagagatctgacccagttcaggattcccctacaagtgacagcggaagtacaactacagctgctgctgctgcggatgcagcacctatggaatctttctttccctggaaagaggagttggaagttcttgttcgtggtggagtaccgatggctcttaggggagagctttggcaagcctttgttggtgtgaggacccgccgactggagaattattacaagggtctgcttgctaatgaaactaactctggcaacaacactgaacaactgagcttcctgtcagagtgtaagggttcaaccacagagtcaatatgtgagcctgagaaatggaaggggcaaattgagaaggatttgcccagaacattcccaggtcaccctgctctggataatgatggtagaaatgctctgagacggttgcttacagcgtatgctcgacataacccctctgttgggtactgtcaggccatgaatttctttgctgccttgttactcctcttgatgcc

SEQ ID NO: 48645 - DNA, 587 bp, Gossypium hirsutum
  unsure (1)..(587): unsure at all n locations
  Clone ID: LIB3543-032-Q1-K1-E6
cccagcgtccgccccgcgtccgtgatcaaagctggaatctaaccttctttcaanattttatcatcttcctgatattgttcatgctcgtcaagaggcagtccaatggattttaaaggtgcattctttctacaggcttaggcctgaaactgcttatctttctataaactacttggatcgtttcctatcggctcgagctttgccgcaagggaaagggtggcctatgcagcttttatcagtatcatgcctttcactagcagcaaaaatggaggaaacaacagttcccattctcctagacttgcaaataatcaaacccagattcttgtttaagcccaaaacagtccaaaggatggaggttttagtgatgaagaccctcaaatggcggttgcgcaccattacccctttcgatttcctacattatttcatttcatgtatcaataattcccaacacaacagcctgtgtcaccttttctgttgtgccactgatctcattattaatacatgtaaagcagcaactgattccttggattaccctccatcagcaattgctgcagcagtgacactacggctgactaatcacagtgttaacg

SEQ ID NO: 48646 - DNA, 570 bp, Gossypium hirsutum
  unsure (1)..(570): unsure at all n locations
  Clone ID: LIB3543-032-Q1-K1-E8
ctaaatccanatttcaaaatttcagaaaataaagttcaataaatggctgaaaaaccatgccaaaaccgattttacctcaagattgggagtctttagttgaagatttccagtacggcggtttccgccgcgagaaaggcggtccctttccccttccgtcgtcgaacttgccctttcatcgatcctcaaaaaggaattccctttcaaaatccctctcgtaatcttcctcgacgaattttccgatctattgttcccccaagatccatcactcgcttcccttatggaccgcctcgtcgaaaccctacgcgccgttgtccaatccccgaccgacggtgtccacgtcacttacgcattgaaagaacagatgatggtttcgacgacctcggttttgatctccaccaactcagtcgagtccgtcgaggttcggtttacggaatccgtggtcgaacttttattagcggttataaaccggccgaaccatggaccggaccgccacgcacgtgccactgcttgtgagtgtctacgtgagttggagaaagcttacccttgtttactctctgatattgctggtca

SEQ ID NO: 48647 - DNA, 456 bp, Gossypium hirsutum
  Clone ID: LIB3543-032-Q1-K1-F12
atttcagttgctgctggttccttgcgtaacggggcccacctcccattttttcttctgcagacctttccgttcatctttgttcgacttctctcttcttaagtcgctccaaagtccagactagctgcttaggctgggggggggcggcgcttttgaagggctctttgccatgcagcccttcttctgctgagctttacgccaagggctccgggctgtgtggacatggggactggagctgtaccagcttcttttccagggcttgtaacgccacgccccaggcttacgacttgcttaacggtcggttttagtgatgatatgtcatgctgttaaggacccatgactggtgggtcgagaatctctgcttattggggatcaggactcccactgcggatactgctctacttctggctgcatctcgagggaggcctttgctgtcacgaggcatgcgtactgtgaatt

SEQ ID NO: 48648 - DNA, 600 bp, Gossypium hirsutum
  unsure (1)..(600): unsure at all n locations
  Clone ID: LIB3543-032-Q1-K1-F3
ggcaaaggagcatgggagggggctcggagtcttcttcaaactattttcattctgagatagttttctttgggatagacaacnatacatgcaatgagagaaagttttgctcggcttagagattatttagacactcacggtgccacatcatcagatggaatgtcttcatttttgagacatggcggttcaacttggggtggaggaaatctcagcagtatgtctgcttcagtatcaacccttggtgacagtggttggttaatacatgttcaaagtgtcttggctggttcagcttggatcactgcacgcattgctttggaatcagcatctgtgcttgtgcattgcagtgatggatgggatagaacaagtcagctggtttcactagcaaacctgatgcttgatccatattaccggacattcgctggttttcaggcacttgttgaaaaagattggctagcttttggtcacccattttcagatcgcattggaatgccaagtgtgtctggaacttcatttgacttaaacagacaatcttccactgggaatctgtcatcatctccagtacgccaatcttctggatcattcacacctcaaacttctaataca

SEQ ID NO: 48649 - DNA, 400 bp, Gossypium hirsutum
  unsure (1)..(400): unsure at all n locations
  Clone ID: LIB3543-032-Q1-K1-G11
tcttctttgtgtttatatgatttcttttttttttttttttgtggttttcgtctcctttttagtttgcggtccggcatctcatgtgccttcttttttattggtttttctgtcttgtgnnttgacgggtatggtttggggggtgggggggttgtngaccccgccttgtttgctatctctaactttagatgcggctggccttcccctttccagtgtcactgctctctctgctcttcctgatcgcgtgtctctcgggctgttcttgctttggtcattgggggctggggggctngccgggggcggtcttgngctgggtttagcttctggcngggcctttttctggtcactgatccaggccctcttctttggggtggcagggacccctgtgcttgctgcctggtgc

SEQ ID NO: 48650 - DNA, 575 bp, Gossypium hirsutum
  unsure (1)..(575): unsure at all n locations
  Clone ID: LIB3543-033-Q1-K1-A12
ctccgcccttttaaccaaaagaanacatggccgatcagctcaccgatgatcagatctctgagttcaaggaggcctttagcctattcgacaaggacggcgatggtctcttctaatctgtttctcttttaattttttctcaatgttttttcatttttagtaattttctttcttcgattcggctctggtttgctgatctacgcatccttcttgtgcttgtgtttgttattattattttttaaattctccattttcttttatgttttgaatgatgcgatggatctagggttccgatttatgaatctatgatcctgcttgatctagtttttctttcgtttctttgattttgactgttgttgctcttaattcttatccctttaatttttttttcattttctttattgttctcctttctcggtcgtcattgatttcaacatgtttttattgttaggcttagatattttctagatgtaaacatgctttcatagaccatcattgtattggttattcgcttcatttatattttcgagttttgggtttgctgattcgatttggtttgtgattcaatgatgattaat

SEQ ID NO: 48651 - DNA, 423 bp, Gossypium hirsutum
  Clone ID: LIB3543-033-Q1-K1-A5
caaacgaacacttcctccggtctccgaaaaagagaccggtcgaaggtgctttaccactcattaattccatagccccatggccaactatctaactgagccaaaaaatatggacctgaaataggacctaaaaatgcaaacatgaaacatggggttggcttgaaccccggataccgcacgagctttactaaagaccctatactaaaatttctctaataaaccatccaatgctgagaccacccacatatcctataactgtaaagacatggtgtttgctgatttgggccgagtaaaaattgcttattaaactgagtaaccttcacatgctaagcaggcaaagaccttggagatagtgcccaaacctggctgacgatctaggcaacatgcttatggccatgtggcagtatagccaaagggtgagccaaa

SEQ ID NO: 48652 - DNA, 575 bp, Gossypium hirsutum
  Clone ID: LIB3543-033-Q1-K1-A8
taaaaaaaaaaaaaaaaaaaaaaaaaaaaaaaaaaaaaaaaaaaaaaaaaaaaaaaaaaaaaaaaaaaaaaaaaaaaaaaaaaaaaaaaaaaaaaaaaaaaaaaaaaaaaaaaaaaataaaaaaaaaaaaaaaaaaaaaaaaaaaagggggggccctttttaggggtcccatttttcctccccctttttggggggtttttattttttttttggggccccttaatttaatttctgggcccggtttttaaaaccttggggtggggaaaaccctggggttccccaattttattcctttgggaaaaatcccctttttccccggtggggtttttaggaaaggggcccccccgtttcccttttccaaaattttccccccctttttgggaaatgggaccccccctttttggggccttttaagccggggggttggggggtttccccccgggggcccctttctttttgccgggcctttagccccggttttttggtttttttcccttttttttttcccccttttggcgtttttcccccgaaagtttttaatggggggcctctttttggggtccctttttggggtt

SEQ ID NO: 48653 - DNA, 571 bp, Gossypium hirsutum
  Clone ID: LIB3543-033-Q1-K1-A9
ccccgcgtccgccccgcgtccgccccgcgtccgcccacgcgtccgccgacgtgtcacgtgtccatatacatcgcaacaaatggtttggtggagtgcaaacacaagcaaatcgtagaagctggtctttccatgatggaatatgctggtctacccatcacttactggaatgaagcgttctgtagtgctgttttcttggtgaacaagttaccttcttctccattgggagtgtcaccctatgaaaagttgttctgtgagcgtcccaactacttgtttctacgggtgtttggctgtttgtgttttcctaatctttggctgtttaacacttcaaagctgcagtttaggtccagtccctgcacgttcctcgggtattctccttatcataagggctatcaatgtcaggcagctgatggtagggtgtatatctcacggcatgttacatttcatgaaaacgagtttccattcaagaagcttttctccaagttgacagactcgcaaccacttgttgctttttctagctctaagctgttggtactacattcggaatcgaatgcagcagtctcaccagtactgt

SEQ ID NO: 48654 - DNA, 568 bp, Gossypium hirsutum
  unsure (1)..(568): unsure at all n locations
  Clone ID: LIB3543-033-Q1-K1-C12
cccagcgtccgtgnaaattaatctgtcgacaaccttctctccggcatgatcccggaaaccggtcagctggagacgtttccggctagtgatttctttaacaatgcaggtctctgtggggtccctcttcctccctgtggagatccagtggctgcttcgagttccgagcatcggaagtctcatcgcaaacaagcttctcttgcagggagtgtggcgatgggattgttgttctctcttttctgcatctttggtgtgattgtagctattgtggagaccaagaagagaagggaaaaacaggattctgctcttgatgtttatatggatagttattcccactccagcaccgcgaataccagctggaagctaactggtgcacgagaagcattgagcatcaacttggccacatttgaaaagccccttcggaagcttacctttgctgatcttcttgaagccactaatggctttcataatgacagccttatcggctccggtggtttcggtgatgtttataaggcccaactgaaagatgggagtgttgttgctatcaagaaactaatacatatcagtggac

SEQ ID NO: 48655 - DNA, 574 bp, Gossypium hirsutum
  Clone ID: LIB3543-033-Q1-K1-C4
gcggcagttgccttccctttggcactccctctcttttttcttctccccaccctactcctcctcctgcatctctctgttattctccgcgaaccttaaaagagagcatgcccgtatttgccagtgcaagagaataatcgcagccttttctgtcgaatcttactcttgcaaactctacttgctcgcttcacttttccctagatgaggataacctaatcttgacaagtattatcgtgttccagcccagagaaggaagaatctcgggtctcagattttaagaaaattgcttaatgttactcctcgattgcagttgacacgacagaggagaaccaacttgtatcaaaggcttcacctttggtgctttgaccatgggaaacaactaggaagggaagtcttctacgtctgacaaatcatctatcaccagtgccaacggatcagaacaatattcatgtctatcctgatcgggctgctatgcaggcctattatggtcctcatgtcaatatgccaccgtattacagttcaactgcggcatcaggccatgctcctcccccctatatgtggggtccaacacagtcta

SEQ ID NO: 48656 - DNA, 501 bp, Gossypium hirsutum
  unsure (1)..(501): unsure at all n locations
  Clone ID: LIB3543-033-Q1-K1-E11
gggcgcgtgggtngngntcctagtgggggggggggtgactggnnggtggtcttgggggggtcggtncctggccctctttttttgactcagtctgctcgctgcgtgggctgtggtgctcctttctgccttctggtggcctctggttgtccttttggggtcttttttcctgttttgggttgtcgggtgtnccaattttggtggcgtgttgctcttgttcgtcttcttgtgttctttttctttccagagtttactggccgtgtgtgccctgctccatgtggtgggtcttgtgtgcttggtgttgttgggaatcctgtgtgtgtgttgggctttggttgtgctttggttgtccggggatttgnggttcctcgggtggtgccgctgcctcctctttgtgaacaggggttgggcttgttgttgttgggtgtgggccgtctggcttgggtggtgctggtcggctgggttggttgggtggcttttgttctgggtgttgagcgtgctggt

SEQ ID NO: 48657 - DNA, 563 bp, Gossypium hirsutum
  unsure (1)..(563): unsure at all n locations
  Clone ID: LIB3543-033-Q1-K1-F7
cggccgcgtgggttngaagcgtacggactaaaataaactcattgttgttcggaattcgtagagcagggagatgtggggatttggggggagatattattgggggagaaaggaaagggtgngaaagaaggagagcgggaggaggagggataattttagtatttgcttggatgtcgagtcaagagaagcccttgaagaactatgttcagctttacgcttctttgggttgggattcattggtttgtcattcagagttcctaaacatgttcttccccgagaaggctgcaactctagcacatgatcttcttaaggaacttgttgaggagctaaagattaggccatgccctgtggtcttttcatctttttctggtggccctaaggcctgcatgtacaaggttcttcagatgattgtgggatcctgtgaagtggaagtaaatccagatgacctccaactggtgaaggagtgcttttcaggccatatttttgattccagtccagtggattttaccagtgatttgggtgctcgatttgttgttcacccaacagttctcagaatgtctcatcct

SEQ ID NO: 48658 - DNA, 319 bp, Gossypium hirsutum
  unsure (1)..(319): unsure at all n locations
  Clone ID: LIB3543-033-Q1-K1-G12
cccagcgtccgtctcactcaatggntcttgttctgaggggatggatccaggtatcatattagaacagacacttacagttgtcctccacctgacgtcaagggccagtctggcccatgctagtgaaaaacatattcaaccgaggtggtctcttagttcaatttttgggaaacgaattagtggaagatgtgttcttgcagagactagtaatgtgtactttctacttgacaggggcttagttgctgaactagaacatatacataaagaaaatgttttgatatctgagaagttttggactaatcccagctttgagttgtctgct

SEQ ID NO: 48659 - DNA, 568 bp, Gossypium hirsutum
  unsure (1)..(568): unsure at all n locations
  Clone ID: LIB3543-033-Q1-K1-G7
ctctcccgnggagttgcgagctgaggttctttcagctcagcagggtcaagtggtgcagccctcaatgttgaacaacagaattctggagatattgacccagagtttcttgcggcccttcccccagacatccgagctgaagttcttgcacaacagcaagcacaaaggaatcatcagtctcaggagctggaaggtcaaccagttgagatggacaccgtctcaataattgcaacatttccttcagatttacgggaagaggttctgttaacatcatctgatgctattcttgctaatctcacacctgcccttgttgcggaggcaaacatgttgcgtgagagatttgcacatcgatatcataatcgtaacttgtttggaatgtaccctagaaatcgcagaggtgaatcttcaaggagaggtgagggtattggatccagcctggacaggattgggggaagtattgtgtcacgaagatctgtgtctgctaaggtaattgaagctgaaggaatccctttagttggtacagaagctcttcaagcaatggttcggttacttcgcatagttcagccactgt

SEQ ID NO: 48660 - DNA, 264 bp, Gossypium hirsutum
  unsure (1)..(264): unsure at all n locations
  Clone ID: LIB3543-033-Q1-K1-H2
cggccgcgtgggttcggctgtttattctcagttccagtttcggctcaaatggaccgatcacagatcatgtcaagttcgtttttggaggggtgaatttaggtccatggaagatgaaattctgagctgggagaagcaccagctcctacaaatgatgaacctccaagcaccctggttttggctgcaaaaaggacaaataggccggacattcttcgccatttcaagcattatctcggtggngtgggatattanccaaccggcattact

SEQ ID NO: 48661 - DNA, 583 bp, Gossypium hirsutum
  unsure (1)..(583): unsure at all n locations
  Clone ID: LIB3543-033-Q1-K1-H4
ggntttctggnaacagtggcgtttccctcacccttggccttcccgattgtgagaacctctctctctccgggaaccaccaaaacttcgtaccaaaccagactattaatgatgtagaaggagcaacccaatctgacttttgcgccatcaacacccaaccacaaccttctcattccaccacatatgacaccatggagatgcaaagcaggaaaagatttgcggcgcctttgttgcctgattttgtggcctgaattacaaactccataatcccattgcatttcacttctttttccttccccaaaacactttgggtggagtttaaatcatgactcaacaacatgaatcaaccaaatatccgttccaagtcccagtttctatttatatcatgtttgctctagttttataggaagaaggagatctagttagtttatatataggtaatacacttatatatatatgaaggtcattaatatgtttttgcatggtttaggattaaattacttgtaagattgcgcattgtatatcattatcttgctgatacatttggaaattgatatttgaaaggttttatatgtggataaacaac

SEQ ID NO: 48662 - DNA, 573 bp, Gossypium hirsutum
  unsure (1)..(573): unsure at all n locations
  Clone ID: LIB3543-033-Q1-K1-H8
cccagcgtccggnctagtagcttgttggtttggtctttggtgaggagattcgaccaacctcagaagtataaaccctttgtcagcaggtgtattgcacagggnaaacctcgcggattggcaagtcttagagaagtttatgtcaagtcgggacttccggctactacaagtactgtaaagattggaactccttgatgataatgagcatatcctcagcatcaggattgtttgtggtgatcacagacttaagaactactcttcaatcatttcactccatccggagatcatcaacggaagaccggggacattagtgatcgaatccttagtggtggatgtccctgaagggaacacacaagacgagacatgctactttgttgaagctttgatcaagtgcaatctcaaatcactcgcggacatctcggaggggctagccatccaagaccggactgaacccattgatctatgaaagttgggaacggaggagatataaaaataaggtggtggctgtaattgccatggatgaagcttcaaaggctttttcatatacggaagggctttaaggatggactggcaatt

SEQ ID NO: 48663 - DNA, 614 bp, Gossypium hirsutum
  unsure (1)..(614): unsure at all n locations
  Clone ID: LIB3543-034-Q1-K1-A3
cccgggttcgnnacccacgcgtccgnaaaaaaaaaaaaaaaaaaaaaaaaaaaaaaaaaaaaaaaaaaaaaaaaaaaaaaaaaaaaaaaaaaaaaaaaaaaaaaaaaaaaaaaaaaaaaaaaaaaaaaattaatataaagaaaaaataaaaaaaataaaaatggacgaaatttaaacaaaataaaaaaatgaaaaaagggggggggcgttttctgaagttaatgcggctttggctacacatctcgtgtttagccagtatggttttttttgggggggaggtccatttttatttcggcgtggccctatttttgcacagcttgatgtggggaaacggctggcgccctgctaattttgttttatgggcgaaatttcttttttttacgtggggggtttaagctaaagtggccagggcattaccccccacaaatttgggtatcttccttttgtttttgggcccctcccttgggtttgcctgttaagctttggggggggggttcttctttacgggttgggatttttttttttgcggggcctttttcccccaacatttgatttggttgatggtttttgtagcgggccatcggcgtttttgccgggttttttttttttggggg

SEQ ID NO: 48664 - DNA, 557 bp, Gossypium hirsutum
  unsure (1)..(557): unsure at all n locations
  Clone ID: LIB3543-034-Q1-K1-A4
ccccgcgtccgggaacagacaacggcggagnacatgatcgcattcagaccttcggcggttcttcttctaacctagccatgacttactcaggaatagcgagnaatattctagaagaaaatagaatcagagatggccttccagccaatggtcaaacaaggcttttatgcaaaagaaggcgcttgaatatgctactggtggtagttcaagctccgcacggcaagctgccaattctcaccaaccagggactaatattggccaacataatgttaggaactacttgagtgcagttaattccttcaatagtggtcattcaagacatggggctgcttcgccgataccctctaacttctatcaagtttcaacagaagttaggcaagctgacaactttggaagaaatactcgtttgagaaggactgcaagtcaaccggttcccacatcagcaaacttgcaggcgtggaactcaatcaattctaatgcacaacctacaagtcaatgccccgttacccttacaagcttagcaccagcgccagttctagcaaatccagccatgcagcatc

SEQ ID NO: 48665 - DNA, 383 bp, Gossypium hirsutum
  Clone ID: LIB3543-034-Q1-K1-A7
tttgctatctagcttttatctagcacaacagtagtgtgaagttaggttttgtcagaacattttatggcggagacaaatcttacttgaacactttagggagtcctttgaaggaaaagcctgtaaatatgattcaaatctcgggatttgctgactagcataaggcataaatgttggtgtacattgtttgatgtggtaggtcggaatttgaatctcgtaccatttgaataaaacctggtgcattaagttttgagttgtaagtaaacatatgttgatagctattaacttgtaaatcataagagagagagagagagagagagagagaaggtttaaaatctgtatatatgagcatatatgatatgacctttttctgggtacttcacatt

SEQ ID NO: 48666 - DNA, 571 bp, Gossypium hirsutum
  unsure (1)..(571): unsure at all n locations
  Clone ID: LIB3543-034-Q1-K1-B1
gtttggtgatgcaaagnantatttgatgagtctaaagaatgggttttcgtccgaattcggtgacattcaacgtgatgatcaagggttgttgaacggggcagagtttgatgaagcatgcaatatgttcgatgaaatgcttgaaagaaactggaacctagtgttgttacttataatagttttataaattttttgtgtaaaaagggtgaggtggaaaaggctaaaaaactatttgaagatatggttaagaaagggaagtatccaaatgcagtgacttacgctttgttaatgaaaggtttgtgttctttaggtgaatataaagaagctaaaaaattgatgtttgatatggaatataaaggctgtaaaacgaaggttattaactttggtgttttgatgagttcacttggaaaaaaagggaaattgaggaagctaaatcattgcttagtgaaatgaagaaaaggaggtttaaacccgatgtagtgatttataacatattggtgaattatctttgcaaagaaagcaaagttgaagaagcttataaagttctgattgaaatgcaagttagaggttgtga

SEQ ID NO: 48667 - DNA, 561 bp, Gossypium hirsutum
  unsure (1)..(561): unsure at all n locations
  Clone ID: LIB3543-034-Q1-K1-C1
gntcgatcgttcttgtcccttgntcaattgggggtgggggagttgcttagaaagcgcctacccctcgtccggtaaagctgcttgaaactccgtcacctatgaataaagaaaaaaggctttctcttctcctctcagcaatcaaactccatagcgttagctataggctttgacgcgttagcgcccacctataaagcctactttcactcgtctaagggccttgcttgttcggtcgagacggattccatcttttacagaaaaaagaactagtccgtccctttactcttgttgagtaaagtcccttaaccgttcgtttcagaactcatccgttattcgttcaacgattctttctttcctcagcgtgggtgaaaaccttttctttccccttactcaaaacgtgagtgaaaactatttttaataatcactccaccaacaggagaacgagatacaaaggaagatttcctaagctaagggtaagggtgcgatatgcgctttccctcgccgcaagaagaagggctttnagcaagggggaaaaaggacagtcttcgggttctgcaaggtgaa

SEQ ID NO: 48668 - DNA, 571 bp, Gossypium hirsutum
  unsure (1)..(571): unsure at all n locations
  Clone ID: LIB3543-034-Q1-K1-C12
gnctcaaactctctatctctgtctttctctcgttctttaactcagtcgttgttcttttctcttttccagttgtagagagttaatctaacagtccaaatgggagtttgggtggatgccaattatcttgtttcatcatctttttacctgctggttttgtgccttatctgcagccgcaagggaaatgctactgctgcaaatggctgcgatttgtttacaggcaggtgggttttcgatccgtcttaccctctttacaaagcctcagcttgccccttcattcagaaagagttcagctgccaaaagaatggccgccaggatctgctttacactcaataccgatggcaacctcttggttgcacactcactagttcccagtgcccaattcaacatttctagagttggagatgtcaccacattcgaattcttggattatgaagtaaaagtaatggtagatcgaagtgtgtatctggtagatgtagtgatggaaaaaataggagggtgttaaagcttgattccattcaaggaggaaagctatggaaaggaatcgacatgcttatcttcaatacttggcatt

SEQ ID NO: 48669 - DNA, 559 bp, Gossypium hirsutum
  Clone ID: LIB3543-034-Q1-K1-C7
cccagcgtccggccagctcttccatcttttgaattgatgttgaaggagaattctagagtacagctaatacattatatgaatttttaactttttgtcttccaaattgaggtaattgactggtttccattcttgcttttaactcgttcatcttgcctggtagtcagaatttccttctttctaggttttaagcagttttagcgtgtatagcaattacttgctggaatagctgctctttactgaatatgcttggagaaaatgctgggtttaaagtgattatcttatgagatctcttgacagattttgactgatttcatctttgcaactggaattgttatcttttatctcgttttctaagagacatccaggattttgctagatttcatactagggtcggaatggatttacatttgaagaatctgtttgatagattccaggagcaatttggttctggtcctggtctcggtcctggatccgggacgtgccttatgaaggtagaaggcatttcttccaactttataaagcccttatttaaagcctctgctgccttatatagaactga

SEQ ID NO: 48670 - DNA, 570 bp, Gossypium hirsutum
  unsure (1)..(570): unsure at all n locations
  Clone ID: LIB3543-034-Q1-K1-D10
gctngacgttcatcacttagccgagnaacacgtgagctgactcaagagaacatgagctgagagaagaaaggcttctgtgaaagctgatatcgaaaacctaactgttcagtatcagcaaagacgtatgatggtgtttccttggaccggtattgacttttcaagtgtcatggctccaccttatccatatccagttccgttgcctgtcactactggcccaatcataatgcatccctcactgcaaccatatccgtttttcggaaatcataacccaggtgctattaacaatccctgttcaacgttcatgccatattcaaccacgacaagcaaccctctgatcgaacagccatcatcccaatatacatcatcgtcccacacttctggtaaaagggattccaaaagcaaatcggcggatcaccaaagaggaagtaatagagagagtaatggttccaacaacgtaaggacgaaagtcgaactgaaaaatcccggatcatcaacaaatgaggatttatctgccagaaaaaggaaaggcatgngaaaaaaaaaaaaggatagaacaaatggttgctcgtt

SEQ ID NO: 48671 - DNA, 583 bp, Gossypium hirsutum
  Clone ID: LIB3543-034-Q1-K1-D11
ccccgcgtccgacttactcgccattttcatttcctttacacttaatccccaatacccatttcaacactcacaaaagcttctccttttatccagactctacccattttcagaccaaagtttgcaccttttcttccaaaaacttagccttattcttcaaaagagaaaaactgtttgtgtgacttggaaactgaactctgctgaagaagaagcagcaactcttcctgtctctccttcatccactctcagaatgtacttccagagtttgggcagttcaggtagaaccttttcaaggccttttgtggttaattcaagttcttcgaccacttctttaaatacccatcaaggaatctgggaagacccagatgatggaagtggaagtgaatatgatgatgaggatgatgatgatgatgaaaaagaagaagtggaacagaatgatgggtctgattttcaacaaggaaatcgtgttggggttgttgataaccatacaatgaatcagtatgaggaagatcttgtcaaagaggttgagcagcttttgggacctgaagaaaaagcaattctgcagcagaatgcctctcctaacctg

SEQ ID NO: 48672 - DNA, 585 bp, Gossypium hirsutum
  unsure (1)..(585): unsure at all n locations
  Clone ID: LIB3543-034-Q1-K1-D5
ataagcttaaccaagttttgccagnatttattcactttatcgaacactttcattttgggttaaaccggtgatgttatcccttaatttatgtgattaaaattccttggatatgttggctttggttgtgttctacagatcaaatatctcttaaggttgcctctctgaataatttattgatcatgggacaaaaggttaattatggagggaaagaagataatcaaaatgagatcaatgtggcagccaaaattaattgactgatgtgtatgaagcaccgacatttatgtcatgggagtgtactgtgtcagactagtctccaacacaaaagaacatgtatcggacatgcgatgacacacccatgttccaaatgtctgattgtatgtttagatcagaagcaaaagcacagcaactggaatgtctgaatgtctttgtagtcatgctacctttttgctgatgctgttacaattcttttttttaatcttatatataaacactctagcacatgaatgaaaacatcattgtttccatcaaatatcctacctttataaaggatgctttattttttgtaaacgtattgcattgcattct

SEQ ID NO: 48673 - DNA, 569 bp, Gossypium hirsutum
  Clone ID: LIB3543-034-Q1-K1-E2
ctgtcaggaacttacttaaaaggtcattctttgctggcaaagacatatcagcaactccagctgttgcaaatggagtagtctacttcccatcatggaatggatatttgtatgcagtgaatgcattcaacggtgctctaatatggagacagaatctcagcgagttaactggacaatctggcactggagttgttgtaaatgttacggtctcgagatcgaccccgacagttgatggggacctgttgattgtagggatatatggaccagcgatagtgattgctgttgcacgatcaaatgggagacttgtttggtctactacactagatccccgtcccagggttctgatcacaggatctggaacagtttacatgggggcctactatgtaggagtttcatctctagaggaaggattaccaccagagcaatgctgcactttcagaggcagcgttgtaaagctagccctacgaactggggcaatgttatggaaaacctatatgcttcccgataatggaggcaggttgggaggatatgcgggagcagctgtatggggaagcagccctgcaatcgataca

SEQ ID NO: 48674 - DNA, 549 bp, Gossypium hirsutum
  Clone ID: LIB3543-034-Q1-K1-E6
ccctttcctgatctccttcttgttattcccctatcttcacgctctttgaactgccttggaataactatggctactgctgaggggtgcatataaccccaactgcccttgcatgatggagataacgtgacagaataaaggaagagatcagccacgctgcaccagatcacttttgtgccgaacctcctgcagggcgagcaacttgccgaatacccaaacgacgctgatcctgcggaactatgcagacgaggaacctgaatcctctgttcaacttgaaaccaacgaggtggttcaacaaccaaggctgttactgaacacctcatgtaggattagacactcctatggaaacaaggccaaacccagatgccgacccatatcaatgtaaaccactgaaacaaaccgttgaaaccaaagatctacatactctattgatgcatcagcagatgcacccaactaacaagtttgaatggaagaacagcataaccggctgaactgtagaaagattaaacataaacttacccaacagagaatactgagtaaatactaaagctt

SEQ ID NO: 48675 - DNA, 532 bp, Gossypium hirsutum
  Clone ID: LIB3543-034-Q1-K1-E7
cggagctcaaggagtttttttgacaaaacgcatctttcagtacatgtgtggaaccatgctttgaggaaacagctctcttgtatggtgaacatattacaacacatcactacttcatatatggggaatctctagcccggacgaaactaggtcacgaggaagcaaagccattaacccaagccgtatgtcaagaaataacaagttgaacagcaacaaacggtgttgaaagatctaaaagacttacttcaaccgaccgaccggacacaataacactactcaatgcaaatcttcttgacctttaatctatcagtccgtccctagtcacaaactaagcttggtctactgtctgtaggcattccacaccaaaattcaaacaaggtacctccagaattcaacaaaatctactacatctcacttcatacgtgatgaagccttcacgaacacgattgtgattgcaaaggtcaaatgtgtgaaacctactaaaggttatattgaacacatacttaattaaacataacatctacgcttaccattt

SEQ ID NO: 48676 - DNA, 209 bp, Gossypium hirsutum
  unsure (1)..(209): unsure at all n locations
  Clone ID: LIB3543-034-Q1-K1-F1
cccgcgttcggngcttcnttttgcnctaccccctggtggggagccttggctggtttggtgtgcccgatctcctccttttatcttgggccactctcttgtgtgtcttttctctttctgtgttgtcctcgcttcttggcgtccttttccctgttctttgtgcccctttggtgggcgcggtgggccttgctgcttgttctgcggtcttcttt

SEQ ID NO: 48677 - DNA, 585 bp, Gossypium hirsutum
  unsure (1)..(585): unsure at all n locations
  Clone ID: LIB3543-034-Q1-K1-G12
tanaaaaaggaataaaccctaaaccttctaaaggcanaaaaggatctccttttctctccgccgcaaccctgatgcaccccctctcgaatttcgatttcgacgaagcgagcgaggtccggcggcctcaaaccggaaggtgagtctctcccctgtttctttttattttatatatgcttatgtatgtattaataacaaaacaaagaacgaaagaaagaagaacgatnaaaaaaaaaaaaaaacagaatcgccaagagagaaaaaaaacctttgttgtattgatatttttttctgagtttgtttttacaatctctgtcgctgtgtgttgattctcaaaatggctttatagccgaatcgaaaataaaataaaaaaatacatcattttttctcctatttttctgctattctcctttttcttttgcgttctgtctctgcttgttttgcaggcgtttgttgcgattgcaggtacgagtacggtgtcaggtgcagtgatgtggaggctcgcgtgaggctgggtcaaggtggcagtggcgtacgtgcgagggaaggctgtacggaggcgtgcgtggctggggagaacggcgctgg

SEQ ID NO: 48678 - DNA, 547 bp, Gossypium hirsutum
  unsure (1)..(547): unsure at all n locations
  Clone ID: LIB3543-034-Q1-K1-G6
ggnaagggaaaagtcttgtcttgcccgttagctgcgggccacggagtctgcacaaagctagcgtgtaatgcgaattactgaccaggacaggagcgccagtgcaagtaactaacgtgtgacatcaagcaacaaactgtgcttacctgctggtagcgggaggctgggctctacaaggatgacccaatgaggggtttaagcccaacacggagcgtaagagaatggcaacaccaatcctattcatgaggaatggcaaacgtgacggatgactcccaacaccattatgccatctaaccttttcaacctgtatactaggaaaacggctgattgtaggacttactatctaactttatgcctgagcattctaaccacttaagtagattcatgcatgccatctattggtagtccggaacagtagatctatataaaaaggaataacattggattaaatattactgatacccaaaccatagatatgactatcactcatatgggtgtctaaactcgcccattgggaagtctgcttctgtgtttgcatacatgatggttg

SEQ ID NO: 48679 - DNA, 594 bp, Gossypium hirsutum
  Clone ID: LIB3543-034-Q1-K1-H4
gtcgacccagcgtccgcccagcgtccggttgatacggtctctaaggcaatggccgccattgcagctgcagcagcagtaccactgctgctctcggatactaacagtatcaactaaaactccctcccattgtttctctttcgccacttcaacttcctcccgtcggaacgctcgtctccgcccacgcggagccagattacccaatgccccatctacatctgatctcagagaaaacgaaattagcgacgactcggaatccgatgttaagaagagccgcaaccagaagaagcgcgaggctcgtcgcgccgtccgttggggcatggacctcgcttccttctcaacccctcaaatcaaacttatcctcagagcctcttctctcgaacaagatgttttcgatgctttaatgctagttaagagactagggcctgatgttcgagagggaaagcgaaggcagttcaattatattgggaaactgctgagagaagtagagcctgaattgatggaagccttgatccaggctacaaaagtaggtgaccagaaaacattgcaggctttagctggttcagagacacaaatcattgaagaagaagatgatga

SEQ ID NO: 48680 - DNA, 583 bp, Gossypium hirsutum
  unsure (1)..(583): unsure at all n locations
  Clone ID: LIB3543-034-Q1-K1-H5
caaanaaaaaactgcaccgtggtagaaccgttcaggcggccataattgcggttngaaacaatagaagtagcattgtaccaaatgactaaagcggctgcatatttggcactgtgttcgtggtcgaaaccctcacccacgcgaacctgccaccacgcgcatctcgcaaatcggaggcaaccatcgtagcgattgacgtttcgattagatgagcatgcattgaaacctcacgcgccgctcacatttttctactctcaaattccagaagaacaacaaggtgctggaagggaagggtctccatcgagaatgaagccaacgttaaaatcgcatcaaagtctgacgagagaccagtcaaaataacttccactttttcggtctctgacacctccaatccagacgctgcaagagatttttgcaccaatagaagcaacgaaaagatgattcgctgtactccatatctcacatacagacttagaagaggtaaagtatgaaaaaagaaaacttattgtagatagaagccatgaagctaacaacttatcttgttgattaaatgcatatgcctctggatttggagtgagcccaactt

SEQ ID NO: 48681 - DNA, 539 bp, Gossypium hirsutum
  Clone ID: LIB3543-035-Q1-K1-A2
aaacccatacaacccagcgttccccgacacctccggccactcctgcgccccatcaccctatctgtgcccttcttactgccgaacgctgggctaaccctttcttcgactgcgtaaaggcgatgtctatagattctgggcgactctgcgctgggtccaccacctacgatatggcacacctctgtccgatgggccaactggtggagattcttatacatgtttttgatggaggatctagacacttttggccccatgaacgtcccctgcgaaaagactggggtgagcgctaactatagagaatcggtacagtaattcttgaaattgggggagagcgtgaactgttgcctgaacctattattttggcctttggcggtctcaagaaatgtgctgccaatgttaacatggaatatgggcttgatccaaccatcgggaatgtcatagtgcaagctgcccaatagtagccgatagaaaactcaaccatcacttttctcttgataccaggcaaactggtagtgccacccagagttacatgaatgccaatg

SEQ ID NO: 48682 - DNA, 586 bp, Gossypium hirsutum
  unsure (1)..(586): unsure at all n locations
  Clone ID: LIB3543-035-Q1-K1-A3
ttcctgaccgaacanaacaggatcagaaaagtctggataacactgcctctgttaaaacataaaaattaaaattaaaattttattaatggggttaccaatgcgtttggggctggcaaggcgtttggtttaacaacctaacaaccacctcctcccttcacaagtcctcctcattactcattttctttttatatttaaaatttatttcgtaaaatttttcctcatttttcccgcataatatttgggtataaacgtataaattatcctctgttggcttttttgcgctttttataagccttcccttttgctttttctctttctctttccatttctcatttactgtttctctctcatacctttcgtcggaaaacctcctcactccgtcgggaaacagctcttttccccggcgaaggaagtctctgattcgccggaatctactgatctctctactattgctaatttcttatgatattttaagcatttgttcccgtggctcggatttggatctccgagtctgtatccgtccgcgcgtcgtgagaatgtggcgagtttggttgatgcttgatgctttagtttgatagcaaatggt

SEQ ID NO: 48683 - DNA, 583 bp, Gossypium hirsutum
  unsure (1)..(583): unsure at all n locations
  Clone ID: LIB3543-035-Q1-K1-A5
cggccgcgtgggcggccgcgtgggtgctgttactcagcctgttctcaatttcaagggatatttggtcggaaacgggtttactaatgttgaatttgacggtaattcttttgttccctttgcctatggaatggacttgatttcagattacctatatgaggaggttacaaatgagtgtatggggaatttctataatccacacaatnngatacttgtnngaaacgaaactgngaaaaagttgatgagaacttatgatatctgaacatatacaatattctagaaccgtgttatcatgacccagatgcagctgagactaaagatgttaagattagactactttctagcttctggaagttaggtgagactgacaagcctcttgctgtactaaaaaggatgtttggtcgtgcttggccatttagagcccctgtaagagatggtatagttctgacgtggccagaacttcttaataggcaaagtgttccatgcactaatgatgaagtagcaacagcatggctgaatgatggagcagttaggaaagcaattcatgcagaagggcgaggatgatgatatgtgtgttccatttact

SEQ ID NO: 48684 - DNA, 340 bp, Gossypium hirsutum
  unsure (1)..(340): unsure at all n locations
  Clone ID: LIB3543-035-Q1-K1-B1
gctggcgttccagctgttcctatcgtgagtcgtcttccctcgtggggtttgggcttgaccaatcgtggctcttgagctgcncaggcgtcgcctcgctggctgcctgtgtgtggtgtggtgtttttttcccttgtggacccttgtggttcttgtttctgtgattgttgtttcagagcctttttcaacttctgtgcttggctctgctcgtgctttcttgtggtacggttttttccgtcggcgttttatgttggtcggtttcgttcttgcgtcgtttttcgtttggcggcgtcggttctggcgccttccctgtttttggcccttcttcttttttctttttttc

SEQ ID NO: 48685 - DNA, 569 bp, Gossypium hirsutum
  Clone ID: LIB3543-035-Q1-K1-B2
gccaagctaggcgagagcaagggcgagagcagagcgagaaacaggagacaagtaaaggaaacatgtgtctgtagcctggcctgttgcagctcatggagaccctagtgtacctcccgaaagtacatgaggagggtaaagaaagaggctaataatactccttactcattgccttgatgttctcatctctaatctccgctctatacctccccgccatagacgttgttaaacaactggaaacagaaccggtaacaaactctgtgcgcaactctggtcttacatctgatgttacggataaaataacagccaaaatggaagccagccttatggatagacgaaagacgatatgaggctcaatcactggctaaaacactgtttacaacgctggctttgttgtgcacatagtaatggacaaataacccgattcttatctggccttatactgtgccaaaaactatgccaagaaacagggagacaatgaatatgacattaaatattatatcacggaaaatcacaaggggatgcttaaggcaaactaaaacgtgaactattacctgattgaatacagtgtc

SEQ ID NO: 48686 - DNA, 568 bp, Gossypium hirsutum
  unsure (1)..(568): unsure at all n locations
  Clone ID: LIB3543-035-Q1-K1-B6
tccgaaacantggctaccacgtcttttactgctcctaaactctcttccccaactttccaaaccctttgcagaaattttcctctttccctccctatccccaagaccctttcttctttttctttccacctttctcccttcctctctcgcttccacctccaccaccatcactaccacccccctcggttccacccccgccgcctctttgccgttcgtgccgaatccgagaatggcgctgagccgattcgccactatgatttcgacctctttactataggcgccggtagtggtggtgttcgtgcttcccgtttcgctgccaattttggtgcttctgttgctgtttgtgagcttccgttttcgactatttcttctgagaccaccggcggcgttggcgggacatgcgttcttagaggatgtgtaccaaagaaactaatggtttacgcatcaaaatattctcatgaatttgatgagagtaatggttttggatggaaatatgacacggaaccaaagcatgattggagcaccctgatggctaataaaaatgccgagttacagcgtcttacgggtattt

SEQ ID NO: 48687 - DNA, 589 bp, Gossypium hirsutum
  Clone ID: LIB3543-035-Q1-K1-C12
cttgtttcatccatcaccacctgctctgtgccaatgcagaaagagctgaagtcattggtgaagggtctcctctgcaaaagctcagtctatgagaaggagcaacccgacatcaacaaggaggatttctatgctgtttgtcaatcctgtatgagtgagctacacaacctgtttgaggaggcttctgatgctattccccatgaaagaatgaccagaaaggagatgggtaagcctctgattgcacgcatctccaaacaggtggataacatcaattttctgttggagatcttgcttgatcgacaaatggccgaggagtttgtggatctgtgggtaaatcaaggaaatttgctaaaacttcatgaaagagcatctcccatggttaggtatgagctaagccgcgtttcagcaattttattcatcgcaatgggtacaagaaagctgcactgctgctcagaggccaggtcagggcttcttcaagcatggtttgggccaatgctattggattttggttggctgcaaagatgcagaaagggacttgacatgaaggcattggaggaagcaatgggtcagactctccttacacttcctttga

SEQ ID NO: 48688 - DNA, 582 bp, Gossypium hirsutum
  Clone ID: LIB3543-035-Q1-K1-C5
ctcaaaggagcagaaaaggttagggtaagcttttttgtccttaagcatactgtaattctcatagtcttccctgagtcctcactgtctcagggactgcaagggaagtagcacaacactacaaactcgctgcttccaacaaccccctttctttcttgacggattccccaaagctaatttcatttctctccataaatctccctttcagatctctcatcaaattataaccaccagcaccatgcaaagtgctgccttttctttaccctctccttcttcacatccttatctgaagccccggaatttcgcttccaatcctacattttatcctattcgcggcgtttccaaaggtcgtgatttttctgattctaccaatgccatctccattccttctttccctaagcgatcctggtctctctcttcctcctcgcctttgcccctcagggcctggacctccgctccttctctttctaaacccagtccccttcaccttagagcaacggcggccgagaatgccggtgaagctggaaagtcaggtagcttgctcaagacattggagctgggtttgctgtttggattgtggtacat

SEQ ID NO: 48689 - DNA, 555 bp, Gossypium hirsutum
  unsure (1)..(555): unsure at all n locations
  Clone ID: LIB3543-035-Q1-K1-C7
attctgaaaaacccaaatngatgatgcattattggagagtttcgaaatgagtacattggtactgcaccatatatatcctgctcaccttctcttcgtcaccatagactttgcccaagggatcaatttttaatcctttcatctgatggattatatcagtatctgagcaatcagaaggtggtttctcttgttgagagcttcatggagaagtttccagatggagaccctgcacaacacctgatagaggaggttcttatgcatgctgccaagaaagctggcatggatttccatgaattactggacatccctcaaggagatcgaagaaagtatcacgatgatgttactgtcatggtgatatcattggagggaagaatctggaagtcatctggaaagtatgtatgaaactcttcacatgctgggctcacaagaagcaatttttataatacaagtgactcagaactaaggagtttaaattattgaagtgaagttcattgcaagcacttgaaaaaattgggtgctggcccatttttcatggctttcaatcagggtatttttagg

SEQ ID NO: 48690 - DNA, 395 bp, Gossypium hirsutum
  Clone ID: LIB3543-035-Q1-K1-E12
atcaaaacgtgccgcaatgaaactccgtcccttttgatctccgatcacaacgaagccgaccaggactcgacgactcgtcagttctgaaacacaggtgcccatctagcctggaaatggagcgcgtggatctggcgtcgaagactgctggcactcgcgcggacgaaccagtttcctcgtgcggcggctggagctgaaaattgtttgaaggctagggtttcattttgaatcgggccctataaactgggttagagcattttgggctcgggtttgggctaatatttgggtatggtgttgagtaatttagctaggctaaaatagttttatttttgggctaaatttgtaaagaaattaaactgtttttattatttaaaatttattttatttggttttgtatt

SEQ ID NO: 48691 - DNA, 569 bp, Gossypium hirsutum
  unsure (1)..(569): unsure at all n locations
  Clone ID: LIB3543-035-Q1-K1-F11
ggtttctgccagctcatgcttgaggtatttatgtgacatttttctttattattgtaatgtgctcgactctgaccattgattactgcttcccttttatgtgttacaatgatttaatacttactattgtccgttaatatcctttttacaactgggaactgattgttatggtttgtaagcactaggttcttttcttttcatggatgactgtgtagtcttctaggaaaatgcacatattccaccctgtctttcattttctccttttccacacccgatgttgaaatgaaatgtttcaagggaagtgatttatccatttttgcttagcatcaattgnattgattgaaaaatatatatatttttacaattacctgtatttgtgatttcttttttgttagaaatgaactagaaaacttcaagtcttaagatctacatggttgatttctgtgagatgcgtcttttgcagcttgaatatttcgagaccattttaaatccatttttcacgagtgatgctagggagtctatgaagtctttacaaggggtgctgttggagaaagccactgaaagcctctctg

SEQ ID NO: 48692 - DNA, 584 bp, Gossypium hirsutum
  Clone ID: LIB3543-035-Q1-K1-F2
cttcaaactaatcaactgaggctcccaactcatttgtagccagttctagccttctgcaacatccaataaatcttgctcagcatcaagctaagagggaacaaagtcaaggcattaacttggggagtaacattcttataaattcaaacacccccaataaggcactaaagggttgaatgaatcaattgatccagcaccactgagtggatgggttttggatgcactaaactatcagcaaccatttcagatattgaaatgtcaaccagagaaatcagataaggggctgtcacttatgcctagaaacctgacacctacttttcctggaagctctgccaaattcagttatcaaaatctgatacttcctaagccagaaataattgagaataacagaccgatgaatacccaaaccgtgcaaacagaagaacatcaaaaccgatataatcttttgcagcaactgcagactggcagaaagaaaaacaaattatcaaactcgataacagcagatcagaaattgggttatatcaaagatgaggagaataaacctgttgatgacactgttgattcttttctgtcccatgatcatgata

SEQ ID NO: 48693 - DNA, 539 bp, Gossypium hirsutum
  unsure (1)..(539): unsure at all n locations
  Clone ID: LIB3543-035-Q1-K1-F7
cccgggtcgnacccacgccgtccgcccacgccgtccgcccacgcccgtccgcttttccctttaatgggctgcgctattttaaaccccgtntatcaccatccgaactccgatcacgngcggagcaaactaggattcggtggcctcaactcaaaggtacagagctagcctggcgctgaggtgcatgtgtggcgcagatgcagtgcattgcggggtagttggaggcttgcggatgtgctagagttgctgactgctgcggcgtcagaagaatctagaaaccctaaaggtttctggaaatatttgggcgatttgggccagtatagctgggtcttgtctaagtttagtattcggaccagtgtaatgggtcagatgtaattggaccttaaaatggacttttaagtgtattctattatttattaattttattattatttatttatttatttttttctctttttgaaatatatgtgggtcgggcaaatttgggttattacaatataatataagtgaagaagtggaagacaagttagaattttcacttt

SEQ ID NO: 48694 - DNA, 563 bp, Gossypium hirsutum
  Clone ID: LIB3543-035-Q1-K1-F9
cactgatcgataatatgcaagtactgcgccataaaattctcccactgctatgatatgaaaaagtttcagtgtttttctttactggggtttagccatggcgctctcaccatttcctgtaactcatcaagcgtgcgtattatcatcttcacattctctttactatcttattttgcaaaccaagacccagaataacagtttcagagcactcaaattcaaatcttattgtgtttctcatcaaacaataaaggttggtattgatataagtaagaagaagaggaagcccaagccaagttttttgtaccaaattaaggataaatggtctcaaaaaccaatcatttccactagagagaagttgccatggcaagaaaaagaggaacttgaagaacaagaagaagttcaaaaagagcagacttttgaggcgaccgcatctgagacagaaagtgatgaagacccacgagtggaagcgagtgaccaagtgagttttcctttgccgagtcgggtaattgctgctccttggtctcatggacgcaaatttaatgaactccattttgattttgttcctg

SEQ ID NO: 48695 - DNA, 570 bp, Gossypium hirsutum
  unsure (1)..(570): unsure at all n locations
  Clone ID: LIB3543-035-Q1-K1-G1
gtgccatggnaanatgtcaacttctgggtctcaccaaagccattggtgtctctaacttctcttcgagaagcttgaagaaatcctttcctttgccaaaatccctcccgccgtcaaccaggtggagatgaacccactttggcagcaaaaggagctgaatgagtactgcaaggcaaagggtattcatgtttcagctcattcccctctgggctcaaaaggcacgttgtggggagataacaggattttcgactgtcatgctttgaaagagattgccgaggccaaagggaaaacaattgcccagatttgtctaagatgggtgtacgagcaaggggcaagtgtgatagcaaagagcttcaacaagaagagaatggaggagaaccttgaaatatttgattggtcattgagtgtagaagaattggagaagatcagaggtcttccccagtgcaaatttaactccatcggtacatttatcgagcccagcgccgagcttgaggcacagctatgatatcaagaacgatgatcatttattttcatgtttacaatttatatatgctaagctttacttgattttgg

SEQ ID NO: 48696 - DNA, 269 bp, Gossypium hirsutum
  unsure (1)..(269): unsure at all n locations
  Clone ID: LIB3543-035-Q1-K1-G10
ccggnccggccatcccgggtcggcccagcgttcgccccgcgttcgtccacgcgttcgctgtagccaccatcacaactcttgggttgtttttctttttccttttgttggtgctttgtttaaatgctgtctgtggtggttgttcgtttggcacatcgagcttttggccggggcccgtgttggcgttcggtccgttttcttctcccttttgtgtgggtcatagcncgttccctggttgctatttgcgtgtttcagatagggagcacatgtac

SEQ ID NO: 48697 - DNA, 630 bp, Gossypium hirsutum
  unsure (1)..(630): unsure at all n locations
  Clone ID: LIB3543-035-Q1-K1-G4
tccgggnnaagttgnaactgnatnctctcctnaaaattggactggnagnntaaagtttcccttcttacttaaaatctggtggnacctacttatnntggtaggaacaanntagccactcttggnaacnntctcacacttgcaacnnatcactggcnnagctaggcaggggcccctatnntcctatggctnnggtcatcagnannnttgtgtaccaaatgttgnngttggctgtnnatctttgttaacctgatgccctttagcactcnntctggtcannggctcttcnnttgcaactaattaccctcccaagcgaattanccaacatagctctgcaaaggtgatttacccagtgttctaaagattgggtttagcaacaggngtttcctttggcttgtctttttattcattggatttgaagcactttctggcttatttaccacggatgcagaagttctccaaattgcctggtcgggtacattgtttgttgctgggtctcaaccagtaaatgccgtagcttttgttcttgtggactctattatggggtttcagattatgaatatgttgcagtgtctatggtnatatatgaccaagtttatgctataatagtatttgggcaaactgatataaaga

SEQ ID NO: 48698 - DNA, 589 bp, Gossypium hirsutum
  Clone ID: LIB3543-035-Q1-K1-G6
tcgctacactatttttctcccattttcagtgttattttccctttacctgtccttgtgatgtgcaaagacaatctcagctttgattcttttaatcttctctgtctttattcagacatgtatgtttaggatggttttggtgcgtgttgagactatattgtgtatttttggttgaatggtctgtaaagaggatgagcaaaagttatacttgaaccaccgggataatatactgtgagtcgatagaatggaggacgataacgggcttgagcttagcttgggtctatcttgtggtgcttcatctgccaaagccagaggcaagattagtagctcctccgatactaggacagaagaaggtgatagaggtgtcaaaatagtggataactttaaaaactttcttcaagctggaaacgagaaacaagaccccagtgtgggttctcagagaagtgatccaataaaacctttggaaaatttctttaatgatctctccaagggtaacggtgaggtagaagctactgttaacttgaatggtagaggtctttggggtacaaacagtaacaggtctgctgaaatcgatgaagataagcggtccgaa

SEQ ID NO: 48699 - DNA, 302 bp, Gossypium hirsutum
  unsure (1)..(302): unsure at all n locations
  Clone ID: LIB3543-035-Q1-K1-G9
ccccgcgtccgcccagcgtccgcccagcgtccgggaaggactcgcaataagcagattcaagcatcgattgcccaaatttttcagagacaatcagaagcactagtcaaacgacgtagtcttgngcaaanagagcagcacctttctcactagatcacaacgccatcatcgtagtgctcatcctcgtaggcgacggaactctcgaggagttgagcatcaaggatctgaagacaatgaggatgaaaatgatgataatggtggcaaagattcttcttccacagatgagcgctgtgcagaagtgaggc

SEQ ID NO: 48700 - DNA, 572 bp, Gossypium hirsutum
  unsure (1)..(572): unsure at all n locations
  Clone ID: LIB3543-035-Q1-K1-H5
acccagcgttctctaagcctgtcaagattttantgcttaagaacggattgtgagtcagattagctcaggaagcctgggagaaaaagaacggttgcaccaggcacaacgaaaggcgaaacaccaaggctaaggatactcgaccaagctttaaggcaacaaagggcatttcaacagatgagcatgatggagagtcatccgtggagaccccaaagaggcttaccagaaagatctgtttcagttcttcgagcttggctgtttgaacatttccttcacccgtaccctagcgatgttgataaacatatcttagcccgccaaaccggcctctcaagaagccaggtatcgaattggttcatcaatgccagggtgaggctatggaaaccaatggtggaggaaatgtacttggaagaaacaaaggagcacgaaaacaacatggattcctcagataatggaggtactgatggtggtgatgataataacaataatggccggttaaatattccactggctgatcagaaacccaccccggaccagctcgttcgagttgactcggagtgtctatcttccattatcac

SEQ ID NO: 48701 - DNA, 469 bp, Gossypium hirsutum
  unsure (1)..(469): unsure at all n locations
  Clone ID: LIB3543-036-Q1-K1-A11
gcttttgcccagcgtcctttcataaaaaacggaggggaataaaaaaagataattatttcgtaccaaaaaaagaaaatttattatggagtttgaaaatgtaattggactcgagaaccactgctgttgctgtaattgcattgttcataatttcactttttattatccatttattttaatggatggtggggaaattcattgtttttgtttttgataattctcatccaattccctttcttgactttcacgatatttcgtggtgttttttttttgagagagaaaaggaataaaggagagaaaaaaagagggacaaaagaaaagcttattttgttgaaaccctaaaattttatgctcttttgaaattttttttggatctgcttcaatggaggctggttcagaaggtgagaataatcgtacaataattttgttttagttatccatctattaatttcatcaatttaatcnnnnnnna

SEQ ID NO: 48702 - DNA, 557 bp, Gossypium hirsutum
  unsure (1)..(557): unsure at all n locations
  Clone ID: LIB3543-036-Q1-K1-A7
naagnaggcaatgagcctctctctccttcaggctactcttcagccgaagatgaagaaccggctgagcccgaccatattcattatggcgactcttctgacgacgacgacgacgacgacgactacggcggcggcggtggtattaaaaaccattccgccgctcccaagcgatatgactcctccgtctttgatttccccgatccctcccgtaaatccgatcttccttctgcattcgacgctttttcgcaggtttcagggccgccagagtttttaaaccatgcggttgaggaaccgatttcagcaggtgatgctgcccaacagcaaggaaggcgcagtgaccggaaggatttcaaagataagaaggatatgccttctggtgctgtggtagaagcaaaagctcagcttgttggaatccatgagcgagtaagaagtgatattgagggtagcaagcctcctgtttcagcagttcccagcgccaaacaggatggagcatagagggtcgcttctgcgtcaaatccaaatgcagaagatgctgcggagctcttgaggatgtgcctaca

SEQ ID NO: 48703 - DNA, 562 bp, Gossypium hirsutum
  Clone ID: LIB3543-036-Q1-K1-B2
atctaggtttctgagaagaaataagcagccgcggcagcaaaactcaacaatggcgagtataaaggttcacgagttaaggaacaagtccaagacggagctgctaagccaattgaaggacttgaaagctgaacttgctatcctccgcgtcgctaaggtcacaggcggcgcccctaataagctctccaagataaaagttgtgaggttatcgatcgcgcaggttttgacggtgatttcgcagaagcaaaaatctgcgcttagagaagcttataagaagaaaaagttcctccctttggatctccgtcccaagaagactcgtgccattcgccgccgccttactaaacatcaggcatctttgaagacacagcgtgaaaagaaggaggagatgtacttcccactaaggaaatatgccattaaagtgtaagcaggagctactttttgttctatcaaagtctaaaaagtagaattatggtttagatgcagttatatgagcatcatttttgcccctttattagttttccttgaacaatctgtttgagcgctataatatgatttcacatttcag

SEQ ID NO: 48704 - DNA, 553 bp, Gossypium hirsutum
  unsure (1)..(553): unsure at all n locations
  Clone ID: LIB3543-036-Q1-K1-C1
gnaacataatgatgggcatggnaagaatttgaggccttggattgtttcttttgatttttttttcttcagttttcttcatcttctggagcctgttagatttgggtctttttgagaaatctgccctgcccatggattttactgaatccaccaaaattgtgtacaataggatccaaaaattggagcctgagaatgtttctaaaattatcggttatcttcttttgcaagacaatggggacctggacatgatccgtttggcctttagccctgacgctttgctccactctttgatccacaaggctaaatcgcaactcagcttaaacaaaccacctgtttctcaggtgagtccaacccctgtggtcgacttccccatgcagttaactccattttcccgtgcagtttcaacccaaagagctgccgctactcctttctgggatcccccagtgactgctgctgagcaacatgtgaatagtttggaattcgccccgccagggtattcggatgctgttgccgaagattatagcctccaaagccaaatgcatttcttgaacattga

SEQ ID NO: 48705 - DNA, 597 bp, Gossypium hirsutum
  unsure (1)..(597): unsure at all n locations
  Clone ID: LIB3543-036-Q1-K1-C6
cccagcgtccgccccgcgtccggttataatatttgtgagtggagtctgtaacaaatatnngatcgaggaaagaaacgagagatccctttgtgagaaatcaatgaagatggtggtgaacatcattagactctcatcattttcgatcgccaagatgagtctcggagaaccaacgacagcgacaaccaaaagccccgagccgacgaccggttcagacacgttcaccgacggaccgtctcgatttgccgggagccacaagcagagtaggtcaaagccttattcgttcatgatggagccagctgcaagcgaagagaatgaatcgaggatggttcgtgaagaaaaagaacatagcgatgggcgttttgctgcgtatataaggaaagtacatgagaagaatcgaagaaattcgcatgaagcatcaaagcattcatcctatatactgccacctccacccactccattaagaagaaggaagtaacctttccttcatatgcaccattgaatttcagtttctgggcttttttatatataaataagaatgttttgtctaataacatgaacatgcaaagttttttttggttcttttttttttcttccatg

SEQ ID NO: 48706 - DNA, 573 bp, Gossypium hirsutum
  unsure (1)..(573): unsure at all n locations
  Clone ID: LIB3543-036-Q1-K1-D1
cccggtcgacccagcgtccgttcagtttttttattgctgcagcgggaccaggcactcttccagacaaccacaagnaaccataaaaatctacatgcgcggtggaactgcttcattgttgccttcaatatacaaattcaaacaaatctgccctttggctggatcatggggtactgtggctacttcaacaccgaggaaatcggataataatggctctaaggaaacagggtccgtcagtaacgaccagactgattgccttttcttggaccactggttgccttttcactcttagaaacatggtctcgccgtgatgctgatgataactgactggtctcataaatgaagcgttgctgaatgccctatctatgtaaataattaacctttgtcgactacctgaatagaacttttgagattggagcgttgtaggttgtgcttttcattgctatggcaaacaagccatcaagccgtcaattcccaaattctgacgtcagttgccaccagtaggcttatgaattgtgccaagcatactgtgtaaatcgaactgtagtatggcatgtaggcaccttagaaccctgt

SEQ ID NO: 48707 - DNA, 575 bp, Gossypium hirsutum
  Clone ID: LIB3543-036-Q1-K1-H10
tttttcctcatgtttcagaacgtcgcacatcatgaaccgatccactgcttttagtgacctcacctttggccaacgtgcatgctacccagcctcttgcttctttttcttttttatcgtcgtctttactttctaaccttgaagtcatcgtctacagctgtttgagcatcgtttgttgttgatatgtcgttccccttagttgaatatgccacgttatcgttcagattgccagactaggtctcgaggctccgatcttgatcttacatggggaagacaagcctatttttttatattattttggctgttggtttattagcattttgtgatttggttatttggtttgttgggtttaaggtggtgtttctgtgatggctcattaaagggctaatggtgggtaggttagttacggggactggagaatggtggctttgatggcggcaataggggtggtcaaggggtttttggtagaggcgcaagggagccgagagatggtgattgagaggggttaatgtgttggtggtgtgttagtggctaatggtgttgtatattgaaggaagctgaaaaatttgttctctctt

SEQ ID NO: 48708 - DNA, 575 bp, Gossypium hirsutum
  unsure (1)..(575): unsure at all n locations
  Clone ID: LIB3543-036-Q1-K1-H4
ccccgcgtccggtgggattgagaatttgaagtcacttngagggcttgatgtctcctacaatattatttccaatttttcagagttggagttccttgtgggcctctcatttctacaaagcttgtggctggaagggaatccactatgttgtgctcgatggtatcgcgcacaagttttcagctacttcagtcatccagaaaatttgaaattagatgacaaggaaattaacaccacagactattggaagaggaaaattatcgttgccagcagacagaaacgaccttcaaggtttgggttctattctcccgcaaaagatgatgctgaagcagaggggtgtatcaaaaaaaanaggataatggtatctcgacttgcttgtattgagagtgaacaagacagcacttacatttgttctgatctagactctgtatcatgtggtaatgaaactcaaagcagagagaaaatcttatctgaggatctagctgaaatagttgatctgatgaacagagtagaacaattgaagaaagagtgttctattctatggttgcaggagttcaaggattggatagtttatgcttcta

SEQ ID NO: 48709 - DNA, 266 bp, Gossypium hirsutum
  unsure (1)..(266): unsure at all n locations
  Clone ID: LIB3543-036-Q1-K1-H7
agcaatagcacagctcctctctcagcatcccctccttactgtaaaccgttggcgcttattgttgggtagaatctatcctgggnatgtcttattaaacaagctccacattttatggtggttacatcgaactgtatgaagggtattacnttacgggctttgctgcatcgcgctttggtaaatgtgcgttgtaattgccatcactgtgtcctggaaatttgttgtcaatttcctgggaaaaccaggtacgcttggtttttgcgggtcgc

SEQ ID NO: 48710 - DNA, 589 bp, Gossypium hirsutum
  unsure (1)..(589): unsure at all n locations
  Clone ID: LIB3543-037-Q1-K1-A10
agctttcgccccgcgtccngacaacttcaaggtggagggtcgagctcacgctgctgcagctagtggtttgcttggtcataccgagttgcgtttgcacatgccaccatcaatagcttttgctacaagaggacgcttacaaggactaagactccaacttgcccttctcgatcgtgaatctgatgaggggggtggtgacaccctgagagtgttggatgataatacttccacaagtcattcaatgagcgaggaagatataaatgctttacctgtgcacaagtacaaggtccatggcccggagagtgcaggatcatcattgcaacaggcatcttcttcgtcagtcacaattgagcaaaagcaagattcccggaaaggtgatgggaacatgaaggcttcagatgatgaactaacttgctctatttgcttggatcaagtcaatgagggggagcttgttcggagcttgccatgtttgcatcagttccataccacctgtattgatccatggctgcggcagcaaggcacatgtccagtatgtaagtttagaatggggtcgggatggcaggaaaacagggagagtgaatcagatgattcg

SEQ ID NO: 48711 - DNA, 583 bp, Gossypium hirsutum
  unsure (1)..(583): unsure at all n locations
  Clone ID: LIB3543-037-Q1-K1-A7
gcgttcgccccgcgtccgcgnatttctatgctgagcaggtggtcaggtatttaacttatgtgaaggctttttatcctagtgatgatatcaatttacctttttgggtctgtatgaaccggtgtgtaggttgctgtgggtttgaaatatattggttacaatgtaaaagataagttttatgattttgggcctgtattggttcggaaatgttttgtgattgattcaagaaggaaaatgttgaatgttgtagattaaaggcaaaagataaataaaaaaccagcctgctagcctagggttatgggcaagtaaattaggcttaggattgaaatttggtggttgcttacatgctttgatctgggagtcaaggttttgtagatggctatagtcggttttacagggaattaacttcatgctggttataactttataagtttgagaagtttcttaaaatagaaaaagaagaaaggcaattattatttgggcatctcttctagatttcctttggtaatatatacgtatattgtatttatttccttaggtaatatatatgtaatatgcatgtatatattttttatatgattctatg

SEQ ID NO: 48712 - DNA, 556 bp, Gossypium hirsutum
  unsure (1)..(556): unsure at all n locations
  Clone ID: LIB3543-037-Q1-K1-B8
cgccgctttgcggcacctcacacttgatgagctcgngaagagggattgatccagttgatttggcacctactttaggatactttctctggtttgaagcctccgacatcaaggctcttgtatataattttcctgtcaaattcgtgctcaagattccaacttatagacacccaggggggagtttgcaatagatttgtgaggttggcactgattggtgaatccgacgtgaaactgctctgggtttttgcgaaaacctgagagtaatgtgggtagagacaattaaatactttcccaaattttattttcgatgttaactgagaatctaaagagttttttaccttacaaatttgttaaacttttttttcccggtttctttgtgggtagttcaatttgcagttactccctctgtgccactcacagatgatacattgataaatattcggtaaaattataatgaaagccttaactctaaanaaaaaaaaaaaaannaaaannnnaaannnnnaaaannnnanannnaaanaanaaaaaaaaaaaaaaaaaaaaggggcggccgttt

SEQ ID NO: 48713 - DNA, 583 bp, Gossypium hirsutum
  unsure (1)..(583): unsure at all n locations
  Clone ID: LIB3543-037-Q1-K1-D3
ttttactttttaaacaacagtccatgtcatgcggtgtctgcgatgnaacccaaaatggcnnncaggcaatccgataccctttgagctgaacaccggnagctaagaatccccntctgtagggactcggnaacctgggcagnngcttctcctgggcgtagnnttggcgcctgctgnnttgctgcnntgctatcaagaatcnngggtatcggcgatatgtgattgggtgctcannagctgacaatgaaaaagagattgggttctnngttctgaaaaanattgtttgaagatggtgtnntgtgcgacgtggaagatctttgnngataacctccaaactctggtnngcactaatnncatgcaccggaagatgtaccggtggncgttaaataacaccttacaagacttgcagctggactatctagatctctatctgattcattggcctgccagcatgaagaagggttcagttggttttaagcctgagaacctgaccaagcctgacattcctagtacatggnaaagcgatcgaggcactatacgactctggnaaaagctcgagctattggagtaagcaatttctcgtcta

SEQ ID NO: 48714 - DNA, 479 bp, Gossypium hirsutum
  Clone ID: LIB3543-037-Q1-K1-D5
ggaagcactaaaaaggctcgcgatgttgcttttttcgttgccattgcaggtcatgtgatcccatgctacatcttgcaaatcttctcatcttctcaaggctttttaattactatatatccacacttgcttgatcggggtgtcccaaatatccttgcatagcaatcctgacttaaccttgcattccatccccaccgggttatgcaaacgtgagtgctctattgcccattgtttcgagtcctttatttcgctccttaatgcgaattgcgcccaccgcgtttcttgattgcttgcttaacttgctatctgatgtttccgctgaccctgttgctggtttgttctccgattcgacttggaaattcacagtttccatacccgaagccttcttgacctagatttgtgcttctgacttctctacatatcgaatctacttgctcttgctgacttaccccttctacatgaaaatggatatctcccataac

SEQ ID NO: 48715 - DNA, 378 bp, Gossypium hirsutum
  unsure (1)..(378): unsure at all n locations
  Clone ID: LIB3543-037-Q1-K1-D9
gttcctctgagttccgtctgtgtctttcgctgcctcaccccactccttatcccatgcgtctcgccgttctggctgtgctacctctcgctccatgtgttgcgtatgcgtccgatcactgggcctttttatctacttcttgggggggggggggtttctcctcttgttgccccctttctccgttgtgttgccgcgccttgctagcttgccctcaccgtttagctgtcccatgcatgcagagaaccctccgtgttccctacacccgctgccggntccgtccctttgcttcttgcagagcgacaccttttccactgttattattcatagtntctcgcccgctgaccttcctccgtctggtcggatctgcatcgtcgcgcctct

SEQ ID NO: 48716 - DNA, 575 bp, Gossypium hirsutum
  Clone ID: LIB3543-037-Q1-K1-E2
tcatgccctcgtcatcgggtggggggcttgctgtattggaaaagcctttcaaacgatgttaaacagtaggttcgagagtgtatcgtttgtcagtgttgcaaaattgaaacttcagcttctcctggacttttgcaacccttacctatacctgatcgtgcttgggctgtcgttggggggggtttcattgaaggtcttcctccatcccaaggcaaatccactattcttgttgtggtcgaccgtttgactaagtacgatcactttctcgctttggcacacccctttacagctttgactgttgctacagaatatcttcagcataactacaagttgcatggactaccacattctatcgtttctgatcgggatcatcttttcttaagtcatttttggcaggaactgattcgccatttgggaaccaagttgaagatgtctaaggcctatcaccctcaaacggatggccagattgaaactcttaacaagtgtttggagagttatttgcactgtatgactggtgaaaaaccatcagcttgggttatttggcttcttttggcagagtggtggtataatactactaa

SEQ ID NO: 48717 - DNA, 526 bp, Gossypium hirsutum
  unsure (1)..(526): unsure at all n locations
  Clone ID: LIB3543-037-Q1-K1-E3
aaaaaaacgcnnngaaaaanngaaaccgaaggcaaaagcccnccnctcaagaaaacanaagncacancncgnaagnnagggcacgacatnnngagcccncgagaacaagctgggggggggaagggnnnatnnaaatnncttgtattttaattttaaaatgatattttactatttaggtttaacgagaaaatcgaaacctcgtaagttagggtacgatttctcgaatctccaaaatgcgaaatattgcctatttttagaagttcttttttgaattagggtgaaaattaacgcaatattaaaaatgatatacgtgtagtttatttgattatgttaaaaaaatcgtttaaagcgtaaaaagggcttggcgaataatgataatgcaacatacatttggagtaataatgacataatatgcataataaaatataacatatagtattgatattaatgaatcataatattaatatgcataaacaataataatgatgaaaatgataacaataataatgataataacaataacatt

SEQ ID NO: 48718 - DNA, 593 bp, Gossypium hirsutum
  unsure (1)..(593): unsure at all n locations
  Clone ID: LIB3543-037-Q1-K1-E9
cccacgcgtccgccaacatcgatttcttcaggttttcagtttatcttatgtttcttattcatgtaaaagcaaggaatgaaactccgttgagagagagagacagttgcattgaagttttcacanatgggaaagcaaggatcaccgagatctgcacgccccatcttgcagaatactaactcacttttcaggacaaaagattatcatattagaagcagttctgattctttgggggccagtactgatccttctatcgggaggagaatattagggggagataactactggaattccaaagtagtattgctccatggtttgaaagataattccggaaagtttactccttgcaagggtgtttatgttgggaaaaagcatacatggtttggccggaatgtgaagccaattgctttcatattggtgttgatggcttctctgttcttgcttgattctctgatggtgtcaatttttggttcaataaaccttcaaggcagttcacctacaataccctccgatgcccatgaggacgataatgttgtctctattcatgaagaaagaccaacggttcagatgtatggcaggcttctcaaattggcttc

SEQ ID NO: 48719 - DNA, 583 bp, Gossypium hirsutum
  Clone ID: LIB3543-037-Q1-K1-F1
gcgttcggacttttttttttttttttttctttttggggattattgatattatatattttaattaattagggttttctccctcgtttttcactctattaactgtaataagtttctgcgttccggttctttgttcggtaaggacaaagactgggaaatatgggtgcacagaaaagggtgctactggtagggtttcagaagacccagaggaattagctcgtcatccattacaagccattctcttagctgatagcttcaccaccaagttccgtccaattactctcgaacgccccaaggtattggtgcctttagtaaatattccgatgataaattatacattagcatggcttgaatcggcgggcgtggaggaggttttcgtgttctgctgtgctcattccaaacaagtgattgattacttggagagttccgaatggtcatctcaaccaaatctttcggttactactatagaatctcacaattccatcaatgctggagatgctttgcgtttgatttacgagcgcaatgtgatacatggcagattttgttcttattagtggagatacagtgagcaacatgtcgcttacac

SEQ ID NO: 48720 - DNA, 558 bp, Gossypium hirsutum
  Clone ID: LIB3543-037-Q1-K1-F4
ccgcgtggtagtttctgggggtggggacggttgtcgcatttgtgggattggggggattttttaccaatttattagtgtcattatcgcgtgctggattgtcgtttgcgacactgggaaaccaggttgcctggtggtttatgtgcattgcttcctttctttgggagtggggggggctctctactgattccaatttccctttcctagcttttgatggaagttgcgatgctgctctggtgtattctccggctgtggctatcgttgggctcgagtatgtgccagcttacgacgtggatgctctgcttcacgctgttgctcaccatccggtttcagtggctcttgttgctgggatgttggctttccggttctgctccgcgggggttttctcgggtgattgtggtacagagctgttccatgggtgttctgcagtggggtctggtacaaccttggttgggacgccttgctggctagcgggagaacctctggcgtgccggcctggggtgaggaacggttacctttcgttggtatcgtgggatcctttgccttcctagtactgtaatt

SEQ ID NO: 48721 - DNA, 566 bp, Gossypium hirsutum
  Clone ID: LIB3543-037-Q1-K1-G12
ttggtgtccaaaatcttcatctgggcgggcgggggttgtggttgaaagacggtcttttatcgagaaagactgctggaatgtattctgccatgccatatgccatttcgcaggtcattattgagatgccttacatttttattcaagctgctacgtatggcctaatagtctatgggggggggggattcgaatggaccgctgcaaagttcttctggtatctcttcttcatgtactttaccttattgtacgtcaccttctatggcatgatggccgttgctgttacgccaaactaccacattgcatcaattgtttctgctgcattctacggaatatggaacctcttttcggggttcatcatcccacgaccgagcatgcctgtatggtggcaatggtactattgggcttgtccagtagcatggttcttgaacggattgtttgtttctcaatttggagacataaaaacaccccttgaagatggtgactttgttggtcagtcagtggaacaatatttgagaagtcgatacggtttcagacatgattttctgggagttgtcgtaactgtaattctt

SEQ ID NO: 48722 - DNA, 528 bp, Gossypium hirsutum
  Clone ID: LIB3543-037-Q1-K1-G2
ctttccctcgctttctcgggaaaaaaatggctccctcggcttcagggaatggctgtgcatctatgattgcatgctgactgttttagaactgacagctaaaacgacttaccgtttcgtagttcccaagattgaagacaagcggggcgggggggggtcggaaaaggttggtggatcctactgcttgctatgaggctttcactgctagccttccagccgctgagtgtcgatgcgctgtgtatgactctgattctgcgaccgctgagacctgcctgaagagcagatttttgttcattgcctggtctcctgatccttcaactgtgggacgcaagatggtctatgcgagctcaaaggtcaggttcaaacgggaattggatggcttccaggtggagttgcaggctaccgatccttccgcgatggatctccctgtcatagggcagccgtgccaattgcaatgtgtgtcccatttcttcattgaaatggaactttatactatgtggcccacatcaatgcagtgtctgtatcaacttt

SEQ ID NO: 48723 - DNA, 581 bp, Gossypium hirsutum
  unsure (1)..(581): unsure at all n locations
  Clone ID: LIB3543-037-Q1-K1-G4
gcgttcgccccgcgtccgccccgcgtccgggccgcgtccgctgatttctcatttcgattcccatttcccacctctttgaaactcttggctctggtttgaaagaaaaattgaaaaaaaaanatggcggaagaacatagatgtcaagcaccgaagctgtgtgcgaacaattgtggattaatgggggggcccgcgacgcaaaatctttgttcaaaatgtcaccgtgatcttcagcttaagcaacatcgatcttcctccgccaaacacgccgttaatcaaacctcgatcccttcgccgtcttcttttccgtcggtttcgtcgtcctcgtctgcggataaggacggtggatcgttggcggagacgaaggcggcggaggtggtggaggttgaggttagacctaaacgatgcttgagttgtaacaagcgcgtggggctcacggggttcaagtgcaggtgtgggatggtgttttgtgggatccataggttccctgaagaacatggttgtaaatttgatttcaaagcaatgggggaaacaccaggtttgctcaagctaatcccgttgttaaggctttcaagcttcataaa

SEQ ID NO: 48724 - DNA, 571 bp, Gossypium hirsutum
  Clone ID: LIB3543-037-Q1-K1-G6
aaacaaacccccccccctcaaggggtgctaaaattttgggttcaaaaaatagggtttttggttgaaaaagggggcaatcatgaatccattaacgttagtcaagcgattgcaaaacatttaatgcgaaagaagcagacttagggatatcggaggaagcatcatggcacgccagagtggcaggagattccgcttacatctttgtcggtggccttccgtatgacctcaccgaaggtgatctcctcgctgtttttgcccaatatggagaaattgtagacgttaatcttgttagagataagggtactgggaaatcaaaaggcttcgcttttcttgcttatgaggaccagagaagtacaattcttgctgtagataatcttaacggagcacagattttgggtcgaattataagggttgatcatgccgaaaagtataagaagaaagaagaagaagaagatgaagaggaagaacagaaaaaaaaggaggcccggggggtttgttatgctttccagagaggtgaatgtactcgcggcgctggatgtaaattttcccacaatgagcaagtaggattcatctc

SEQ ID NO: 48725 - DNA, 422 bp, Gossypium hirsutum
  unsure (1)..(422): unsure at all n locations
  Clone ID: LIB3543-037-Q1-K1-H10
gccgaacacagcaaacnngaagagggggggaaagacannnnngaagcngaaggcganngaaaanacannaaaggaangggcggggaganggggagaagggagaacccgnccccccaggagcnancggaaagggcangnnngcggcgagaagnngccanncggaannnaaagaacaacaagaagggcanaaanccaaancccaaaacagaaccnnngnccnnnngaaagacgganncgnnaanagnganancggagcccgaaggagagcaaccnanngnngnnnagacnnnaccttttttgttgtttaaaatttcagtagttcatgtatttccaataaatttttttttgtcggcttcataactctgtgcatggctgagttgtataggagatgacagaaattagccaaaaggtaagtattttgg

SEQ ID NO: 48726 - DNA, 266 bp, Gossypium hirsutum
  Clone ID: LIB3543-037-Q1-K1-H6
cccggttcgacccagcgttcggttgtgagagtgacacataccatttctaaaagtttttactttttcctcaactgtacactgtggcttctcattacgccatctcatacttcctaattgtagcatgttctttactttcttgtatattatatgctggacttaagtttgttaataaagcatccaaaagaaagcatcaaggagtaaaaaaaaaaaaaaaaaaaaaaaaaaaaaaaaaaaaaaaaaaaaaaaaaaggaaggacgatattaaa

SEQ ID NO: 48727 - DNA, 612 bp, Gossypium hirsutum
  unsure (1)..(612): unsure at all n locations
  Clone ID: LIB3543-038-Q1-K1-A10
cggaaccggccttcccgggtcgacttcgctgttagcccggntaaccggccggtcgaaatccgatccggcacggaccacggccaggcgattgatatccacccgcccggccttgctcgcgcggagcaaggcttcgtaggtggagttatcctcctgctgggtggtgcagtagacgcccttgttgtccgtcagcaaacgggtccagacctcggcccggtcactcaggcgtgtcccggagaaccaggtgttgcccgccagggtgtcgcagcggctcacgaccggcggctggttggctggcgcataagggtatttgacccgccaggccgcggattccttgctctcgctcaagctcacctgatgcgacagggcaaacgccttggcctgcagcttggggttgagttcgaagacttcggtcttgtagtccagcggcggcttctcgttcggcccgcgggtgttgatgccgatgtagccggtgggccagtctttcggcgcatcccgcgcgtccagttcccactgggtgccgaactccaccaggtagtgggcccaggccgcggtgccgatggtgccttgatgggggttgatcccggcaataccggcaatcaggaagtacgactg

SEQ ID NO: 48728 - DNA, 321 bp, Gossypium hirsutum
  Clone ID: LIB3543-038-Q1-K1-A6
tatgcactcactgtcttttggcggcgggggaatcatgattgctatctgggcgcgagaaaaaatatggatgccttcatttggtgactccttaaaagatactgaaccaaagtgaaagcctgtactggttcaggatgacggcgggatgggaaacctgtgcaagcatcaggcttagggactttctcggtctggcaccaaagacaaggaaccgggtgttcccacttcgtattagacaacgtcttctgcacggcctcggggacaaccttgctcgcgttacgctgactgaaagctggtatgacgatcatatgaacaccgttctcagga

SEQ ID NO: 48729 - DNA, 612 bp, Gossypium hirsutum
  Clone ID: LIB3543-038-Q1-K1-B11
gtcgacccagcgttcgccaaggtgtggttataagggatgcaaaacgactagttaatggtgatatcaatacatactcaaagggtgatgtatatcctgtggaaccttttgacggcttccctgtaaatcaagttctcgatgctcattggggggttctctatgacgaagattcacgtgggcttcggtcacatactttagctatggttgtgaatgactctcctggtgttctaaatgtggttactggggttatttcccgaagaggctataatattcagagtctagctgtgggacctgctgagaaagatggactttctcgcattacaaccgttattcctggaacggatgagacacttgcaaaattgtttcagcagcttcgaaagttagtagatctttacgaggtgcaggatatgactcactcaccatttgcagagcgagagctaatgttgataaaagttgctgtgagccctgctgctcgaagggacatccttgacattgctaacatattccgagctaaagctgttgatgtgtctgatcacactattactctcgagctgaccggtgatttaaacaagatggttgctcttcagaaattattagagccctatggaatttgtg

SEQ ID NO: 48730 - DNA, 591 bp, Gossypium hirsutum
  Clone ID: LIB3543-038-Q1-K1-B12
cccacgcgttttccccgcgtccgccccgcgtccggtagggggctaatgctacaactcctactataaagcaagccataaagcgaaggagaatgacacagtcttctaagagttctgtggcatctaagacttccttactttttactttaccgaggaagagatatagaatgccatttgaagggaagatggggagggggggtataagatctacaacctattctcttttaagaagaagttcttttgaagacagcctattctttttctttgacttccttgacttactatcaactaagtgtacttccttgaaaacttcagctcactagactgcttgctactgtactgattcgcttggaatgaacccttctcgaacactcagaattctagacgatcaagggatgaatagtcttggactggtgggatcctaagagttcgacttccttttattctcttagagatgaaagagccatcgaggtttagccctttatcagcttctctcggaggagtcatagtcccattcatacgatcctgaagttgggggagttagacttactatcccactttcacttggtctcgcttttgagacgtcctgctgtt

SEQ ID NO: 48731 - DNA, 573 bp, Gossypium hirsutum
  Clone ID: LIB3543-038-Q1-K1-B6
cgtccgccaccttatgacactgggggggtatttataaaaattttacggctcagtttataaaataaggtcccgatacctcgttttctaaaaccacttgaatttaataaatcacttatataacataaattattaaataaaaaaccttttttttttaaaaattacatgtggctgggggatattaaataataatatttacggacttactcgtcggatttggtggtcccgaaactactgtttccgacactaccaaaaaacggactgttatataaactctctaatatttacacattttctcagtttaattttaaatttaaaaaatcaacaaatttgagtttttcatttcctcaaactttcagtaataatctaaaaatggttctattttttatttttaaaaacataaagagaagggtgttaaaaaaagaaaaagctgcatagcattcccactgattataagaaaaccgcacttaattctcagactaaactaattaaaaagtgtttagagactggtcgttttacattgcaggttcacgtcgttgggtgtggcatcaaatgattggggcaacttttggggga

SEQ ID NO: 48732 - DNA, 583 bp, Gossypium hirsutum
  unsure (1)..(583): unsure at all n locations
  Clone ID: LIB3543-038-Q1-K1-B9
gnaaaaattgatgagnatgtacttaaatttaacaggttaattgaaaacagactgacggcaaacttatataaaacgaaggtacagaggaaacttaatttacatttctatcgccacaaacgagggtaaaagaacagaagaaacatgtgttttttttttctttctaaaggtaatcaaattgggccttaggtcctagtttctacattgttctatgaaactcaataaccgatacagattcaagaacaacccagaaaacggtcgtctttctctctctcggcatcaacgacagtgccctgaaacttgggcaactacaaggccctaactataaatatcataagttccttacgtccaaagtaacattgcctttttctctttgcattaagtcgctctacctagatactctgaaaaatggctcctccgacagctattgttactgacccaagctaccccgttcttcggtctaaagtttttattttagaccgacacaacccgagatataagtcctcggttgttgcattaagctcaagtttgcaggccaatcctatgttgtcaagcaacagtggttcacagggtttcttgtcttcta

SEQ ID NO: 48733 - DNA, 566 bp, Gossypium hirsutum
  unsure (1)..(566): unsure at all n locations
  Clone ID: LIB3543-038-Q1-K1-C1
ntttgtgtatatttcgtgtgcgatggcccggcattatcccatgnaccttacttaggaacggttgctttatgttcattcgtttcgattcttgtactatcggtcaaagcttgtgtttttacggtgaattcgcaatagtggcggaggcatcgtcgggttattcattggcaaggcaaaggcttcatttcaagaaatcatggggaatgccggttttgttcctttcgtcagttgttttcgcacttggtcacattgtagttgcttatagaacatgttgcagagcaaggagaaagcttttgtttcatcgagttgatcctgaagcagttcttttgtgcaaaaatgttttctctagcttccagaaggttccacgatctcccactccctccatagggaaaactccaaaaagtgatgggngaaacaagacgaaagccttttgggcaatctggcgacgatggggaggttcctattagattgcttgctgacgttgatagcttgttcattacattgcaagggcttaccgttcattacaagctttgttttcctggttcaccccctagggctttgtcatctac

SEQ ID NO: 48734 - DNA, 587 bp, Gossypium hirsutum
  unsure (1)..(587): unsure at all n locations
  Clone ID: LIB3543-038-Q1-K1-C10
gcgttcgcccagcgtccgntttgctgctatacatatatatattaagcagtagcaggataattttatgtggactctgggttaaactatatcaagtagccttttggatttattgagtttttgttggggatttgaaaatagcaacttgaattctgaatagctttctgggttttcttccttgtttgggggcgttggctctttaatatatatatttcagagtcagaaaccctaaccaccttaccatcaagttcactattcactgatctctaatttttaatgttttaaatgccatttattgtctttgattttatggtttttttctttgttgtcttttcattcatcaatagctcaacaattcacaaaagtccaggttttgaatgatggagcaaaccggtattgaattcttcacatactccatgggggccttctgaattttattggaattgatctatggtgatattctggatagtggattgagacaagcctagatgactgtggaagaagctggcaatagctccgagtggagcagggaccaagatagggcattcgagaatgcccttgcaacctatcccgaggactctgctgatcgg

SEQ ID NO: 48735 - DNA, 558 bp, Gossypium hirsutum
  unsure (1)..(558): unsure at all n locations
  Clone ID: LIB3543-038-Q1-K1-C3
tgcctctttttcttcgggggggggggggggttcactacatgggtcatgggggtgttgtttctgccgacgatacattgattaaaacccaatgccataatgcaaaagtccccaaagcctgcatacaatgcgtaaaatctgattcccatagccaatcaaccgataaagtggggggggggggcattgtcataacttgtataagcaacaaagccgtgaccttggaaagcaacatgacggttctagcttcaagcgttcacgacaagaagttgaaattggttctccaagactgccaaaaagagttttctgacgcgaaaaccaatttgactactgcgatggaccggttgaagaacaaagattacgatcaaactaattatttagtgaatcatgcactccagaaagagttttattgtnagaacaatgtgggggatttacagtatacgcttcctactactgtcttgaatgacatgacgctttatgaagaactttcggaagcagcaatgacaataattgatcggtttttatgggtgtgaaaaatgaactcaaataaaaaaaattatattt

SEQ ID NO: 48736 - DNA, 535 bp, Gossypium hirsutum
  unsure (1)..(535): unsure at all n locations
  Clone ID: LIB3543-038-Q1-K1-C7
aataaggnaggacattggaaaaattcagcaagcggnaccagtaaaagtgacaagggcagcattaatgaagaaactgtaaacggcttttaaagacttaatgggggnntgcctgtgattgnnatgctccttctgaagcannaggctcagtggggtggggctctgcaaatctggaaaggtttatgctgtggcttctgaggacatggactctttaacctttggaactcctaaatttcttagacacttaatggaccctagctcaagaaaagttccagtcatggagtttggtgttgcanaggttttggaagagctgaatcttacaatggatcaattcattgacttgtgcattctttccgggtgtgattattgtgacagtgttcgaggtattgggggacagacagctttaaagctaattcgtcaacatgggatctgtggaggaaatacttcgggaacataaacaaagaggggtgcttcaatacctgatgattggccctatgaagaggctcggcggcttttttaagaaccattagtctgcatg

SEQ ID NO: 48737 - DNA, 603 bp, Gossypium hirsutum
  unsure (1)..(603): unsure at all n locations
  Clone ID: LIB3543-038-Q1-K1-C8
cccggtcgacccagcgtccgtggnaaggnaactgacggtcctcgtggacaggcaatgagtggaccacgaaggcagatagagaagaagagaagtcagcagaaaagatgtgaccttgagtgttcttcagccgtatttctcagggagtctgaaggatgctgcaaaaagccttggtgtttgccccactacactgaaaggatttgcagacaacttgggatcccaagatggccctctcgcaagattaacaaagtgaatagatcattaagaaaaatacaaactgttcttgactctgtacaaggaggattgaaatttgatccaaccacaggagagtttattgcagcaggtactgtcatgcaagaagtggatacccagaaaacactagtgctctccaataagaaccttcccatccgaatttctgaaccattggatctggagaaatcatcagcagcatcactagaatcttgccctgatgaagaaaattcagttgttaaattggaagaagatgagtgttctttgggtggaaactacagcatggctgcaaggagtgtgcttgttccaagtacctgtgaagaagtaaagcaatctggtgtcccttgtattgattgt

SEQ ID NO: 48738 - DNA, 580 bp, Gossypium hirsutum
  unsure (1)..(580): unsure at all n locations
  Clone ID: LIB3543-038-Q1-K1-C9
ggnaaagattcctcgntgccttcgtccccggggtttcccaggcagtgtgactccagattatgtcccttttcaagtatgggactctttgcagggactttcaacatatataagaacaatgctttctacacaagctcttttgagtgctattggagttggtgagaaatccgcaactattataggtgcaacttttcagtggttcttgagagatctaacaggaatgcttggaggcatattattcacactttatcagggatcaaatcttgatagcaatgcaaaaatgtggcgtttggtcgcagatctcatgaatgatttaggaatgttgatggatcttctttcccctttgttcccttcagcttttattttcattgtttgcttagggagcttgtcaagatcattcaccggtgttgccagtggagccaccagagctgctctgacacagcatttcgccctccaaaataatgctgcggatatagctgccaaggaaggaagccaagagacaatggcaacaatgattggcatggcattgggaatgcttcttgctcgcattactactgaaaacccagtcgctatttggttttct

SEQ ID NO: 48739 - DNA, 573 bp, Gossypium hirsutum
  Clone ID: LIB3543-038-Q1-K1-D6
cccagcgtccgccccgcgtccggattcttccaaatcttttttcctcagtttttcactcgtccagtcattgctcctctctattcttttcacgctctttaatgctaccactcgaagccactcaaagcctctttgcctcttcctctttcttgttctttgccttgggtactggcctccatttatggcaacctcaagtgaatgtgaaggtgatggtgaagaaaatgaggagcaatttctatttcaccaaacccagaagctgctttctttatatctcggtgttagtttcagtgttttcttggcataccttcccgagtcttccctcgctttgctgcccaagttgcaaacccaaacgagagatatcacagctaggcttttaacggccgaagagcagttgaggcaaatgaagtctaggagaaaagaggactccaaagctaacgccagagtggtcgagatctttgccacccacaggaacacgtggcaagcggaggagaaacagctcctgcagcagatccaggatcagagggccaagatcgaggagttggagagggagacccatgaatccaagcggagaattga

SEQ ID NO: 48740 - DNA, 562 bp, Gossypium hirsutum
  Clone ID: LIB3543-038-Q1-K1-E1
tgacttgccttccgcttgggggggggccgagtcatgctttctctcctaagtccttatctctccccaaatctctccctcccttctcttcaaattcacagttatgccatcctctcccaagttcttccacgcgcgcacttcgccgccggcaacgcctcacaccagatctactggtgggatcttcgccttcctcctcaccttcgccattctctctttcctcttcgccctctcttctttcctttcctccggtggatccggttaccgttgccggaactccgaccctagatccgtccgtgtcatttgggacaaaactggtcatggcaacaacggtcgttccgctgctggtgatgatgatgggactaagaggcataaaataatgggcttcgttgggatccaaaccgggtttggctccactggtcggagacagtctttgagaaagacatggatgccttctgatcgtcaaggccttcaacgattggaagaagcaactggattagcttttaggtttgtaattggtagaacaaatgataaatcaaagatggcagagctgaaaaaagaagtagca

SEQ ID NO: 48741 - DNA, 531 bp, Gossypium hirsutum
  Clone ID: LIB3543-038-Q1-K1-E3
gcccttcgtcccgttctcttgtcttcttgtcccccccatctatcttgctcatctcatatgcgtatctttggttgtactatgttatgctttagagaaaaacagaggatgagatggactgcctattatgctgattcttagtgactctagcaaccgtgctcctgctgttggcttctgcgctgctgatgaagctgttctgtcacattgtcgttatgtacctgggcgtatgggcagccagcttgctcgccgtctcactctggttggactgccacttgctgtccctgttgctgactgagccatatgcaatgtttctcccaatttcttttattgcatgctatatgggacgctcctttgataacgctgtgatctctttgtacatattggcggccacaaaactcatgttcaatcctttgtttttaggcttattatggcatgtgctgcagatacgtattttgatcctgcttataagcaaagaatcatattgcttaactgttgagataagctcgaaaggttatgtctgttctttgatatcag

SEQ ID NO: 48742 - DNA, 310 bp, Gossypium hirsutum
  Clone ID: LIB3543-038-Q1-K1-F1
ggactaccttaccaaaacttggaaggattcaggcaatttagcctggtccttgtgcctatgacccgaagttcaagttgggggggccgggcgacctgagtcctccaggttgtcagactgaggcctgagtgtcaggctttcgaacaggtgccttgtcaagctgtgtggccccgggttcaggctgtttactctgtggaagagtgacttttttggcctttcggtttatagtggttggttggtggccttgttggtatgttcttctctctttagtttttgtggggacatgtgttcattggtggtatggagtgtattt

SEQ ID NO: 48743 - DNA, 275 bp, Gossypium hirsutum
  unsure (1)..(275): unsure at all n locations
  Clone ID: LIB3543-038-Q1-K1-G10
aggcaaatagtgaggaggatttcatgggagtgatgctacctattcttcgagatgcggaggagcatgatgctgataccatcaacaaagccaccagtctcgtacgttcatttctcttaaagttttctatttttttgggggggggggcttatangttctaatcgttttaactctttgtaacacaaaaattagaactactcataacctctccccaacccataaatagaaacataatatgtttcaacgcattcgaatatacattctcctacattgataag

SEQ ID NO: 48744 - DNA, 501 bp, Gossypium hirsutum
  unsure (1)..(501): unsure at all n locations
  Clone ID: LIB3543-038-Q1-K1-G2
cccggtcgacccagcgtcctcagcaaatgaatccctttttgctagggtgtgagtgcaattcaacagccccattcaatcatcatttcaccctcataatcggagatccccatctccatcaaagccaaggctcgaggcctattctcacccgaagatccccatnncttaaactccaattctcgacgagaggagtacaaggtaccccgatggtgcacccccgaaggttccattggagatggtcgttcgaaaggagcgttcatgagcgtgagcgtgagcgtgagcgtgggaaaccactcgtgggagtggctggcttgtggcgctagcaggttttcagaaacctctagggtttttggtatttccgaactattaggcccctttgggccatttttaattgggttttggactagtgttttatttttgttttgggctatattttgttattgggcttgaagggatttatgtggggttaatggactgttttatgatttttatgattttattatt

SEQ ID NO: 48745 - DNA, 514 bp, Gossypium hirsutum
  Clone ID: LIB3543-038-Q1-K1-G3
atcaattttgggcaagtaacatgcggggtgacaaaggaacaacgtatgttgttatgcggtttgaccgataaagatcttcgtagaatatgtaggaaccaatatgggcatctaggttccgctattggttattgaccgagaatagttctaggtgatgtctacatagttctcgagcggggggggtccgcacgcttaacgttacgatgacaattttattatgagtttacaagttttgatgtaccaaagtttgttcggagtcccggatgtgatcacggacatgacgaggagtctcgaaatggtcgagacataaatattgatatattggacgactatattcggacaccggaagttttccgggtgatttcggagaaaaccggagtgccggagggttaccggaaccccccccccccggagagttaatgggccacatgggccttggtgggaagagagaggggcggccaggaagggccgcgcgccccctctccctctagtccgaattggactaggagaggggggg

SEQ ID NO: 48746 - DNA, 578 bp, Gossypium hirsutum
  Clone ID: LIB3543-038-Q1-K1-G6
cccacgcgtgcgtgacctcacgggcgagttgactgccatgctcattacttttgtcattattcttgtctgtatgctcacatccctattcactaccgttttggctacaagataaggttcgaaatgaagttgaaccagctatgaaaacacatctgatcatccacactattataatcactgttggaatggcaataggaactggaattggtgctccaattggcttgaccatttacaataccatggacaataaaggggttcagaatggggaactaaattggcacctatgtgtgggcctgtgtgctggacttattactggacttattactgagtactacaccaactactacaacagccctgctcacaatcctgcccactatggcaccaactctgcaacaaccaaagcaatatccaaccttatattaggacacaaattaggaaacataccaatgatcatcctaacaatcaccatatcagtcagtattagcgttactgctatctatggtattgtagatgctatcctaggaacggtcatcaccatggcaaccaccatggctactgatgctgatagccccactaatgac

SEQ ID NO: 48747 - DNA, 528 bp, Gossypium hirsutum
  Clone ID: LIB3543-038-Q1-K1-G9
cacccaaaaccttgttggtgggggggggggtgctcttatttcttattaagtgaaagttcacattcttgaaattgcacattttcctcaagcacattttatttaatttaagcctatacacaaatttaaatttttcaatccactacactccaatgttaaacctaaatgctgtgggggggggtggggtatctcttgcactctaaatggagataattcctaacccaaggatgtcgcaggatccaaattctttaactgcaaactgcagcttgcgcatcatttctgttctttgctcatgctattggtatcaacgtacctgcttacgctattccttccatgtgaaggctgctttacatttgcttcttgttcagccctgatctttacaccttcaattgatgactctcgttagtcgcgcaagtattgtctagtagcataatcctgtataaccgcatccatatgaattggccgccttgatttcaatgaatgttaggcaacctccttaagtcctctttcaaaactattcccaatgcatta

SEQ ID NO: 48748 - DNA, 548 bp, Gossypium hirsutum
  Clone ID: LIB3543-038-Q1-K1-H6
aacctgtactaacattggtctggggatctttttttttcattttttcttgtctggtgtgttctttctgtgtaaagaaagaatgttgaagttgtggaaatggtatcaaaattgcttagcaatccacccagtgaagacacaggttttaagctcaggcttggtgggggcttttggtgacatagctgctcaaactattactcactctactgccaaaaaacaccatcatttgcaggtacgaaggtttggaccgatgcataaggtttcgacttcgtttacgaccatattcttttcgtttcgtggctactaaagttgcagtcgacgggtttatcttcgggccattggatttactcgtgttttttacttacatgggattttctgcgggaaagagtgttccccaaatcaaagaagatgtaaagagggattttgtaccggcattaattctcgaaggagggctatggccgattgttcaagtcgcaaatttccgatatataccggtgagataccaacttctatatgtaaacatgttctgcttgttggatagttgtttcttg

SEQ ID NO: 48749 - DNA, 390 bp, Gossypium hirsutum
  unsure (1)..(390): unsure at all n locations
  Clone ID: LIB3543-038-Q1-K1-H7
gggggaggctacaaggaatgcaccgatctaacaacgatgaaacagctagtgataattgaaatttatctggcagctacagccataaagaggtgaggaatatggtgatggtaaatgacaggaaacgccgcataacgcacatgctgctgttgatgggagttctgtcacggatgatcgagaggagtcaacgatgtctcgtagactcggtggcgcccgtgagaaatctcgaaagcatgctcactcacccgatctctgacagggaaagccgacgtangtaaacacacgtagagatcaccgcgacagctcacgccttaacagtggttacgaggagctggaagatggctagctcgtttaggtatggtgaacaccagcaatgttccctattgtcatcta

SEQ ID NO: 48750 - DNA, 571 bp, Gossypium hirsutum
  Clone ID: LIB3543-038-Q1-K1-H9
tttgtcttacgtgctacttaatatcctcttgtgggggaccctgaaaagggcccaaaacagggacccaatccaaatctgtcctacaaagagtaaacactgagagaaaaccatacaagctctcatcaatgggggtatgaatggaaggaaacctgcggacgaagcataaaccgaagacaagtctgtgaggagaggggagagaaggtggtgagaagggagtaaagcaggctgtgaagccagttgaggaaccgaaagctgaaaggcccactgaagaaacgccggcggccacgccgcctacaccgcacgatactctgttggaggttttcatgcatggtgacaggcgtgctcaaagagaggtcctcggtgccttaagggctgccaaggggtcgaagatggggtgactgattgcatgactgattgcgtggtggttaaaggggagaaagctggtcctttggcagttcctgagagagttcttaggaagagccaccggaaagagcagctccttgcaccggttcctaaaccaccttcgacgccagagaaacaggctgaggaacaacataaacctaaacctgaa

SEQ ID NO: 48751 - DNA, 432 bp, Gossypium hirsutum
  unsure (1)..(432): unsure at all n locations
  Clone ID: LIB3543-039-Q1-K1-A12
cgtananatttattcacatttgtaaaaaaaaaaaagcttttagaaaatacccagtctgatatatagtagaagcattagaaagaagtaaaagaaaagaataaattactgagtgatttgaagtgaaaataagacccaggtaggtcattttgtaccggacggggactcctgaaaaccaggaggtgtataatataagatggtttcaaggtagagctcgcaatgagatgtggcgagatgcacgcagttctaagataaagggagcttgcacttggcacgtgcatctgttgcggattttctgcctctctctccccttttgcttgcttgcatggcttccacttctcaactgctgtcctctttctgtttttgtatttatccctttatttgtcattcaataaatccttattcttaataaaactcctaacaaattcaacattt

SEQ ID NO: 48752 - DNA, 603 bp, Gossypium hirsutum
  Clone ID: LIB3543-039-Q1-K1-C12
agcatttgcttcaaggtctgattccaaacacattcatgcggagggagggtgctccaaaagaacgtgaacttttatgtggtcgtctcattgataggcccatacggcctctttttcctgctggcttttaccatgagatccaggtaatggcaagtgttctttcttctgatggcaaacaagatccagatgtgttggcagctaatgcgacttctgctgctcttatgttatcagatattccatggggtggacccattggagtggtacggatggggagaatttgcgggcagtttattgttaatccaacaatggatgagcttagtttaagtgatctcaacttggtatatgcatgtacgagggacaaaaccttgatgattgatgtgcaagctcgcgaaatcactgagaaagatttggaagctggtttaaggctggctcatccggaattaaatatctggaacctcaaatcagactggctgcaaaagctggcaaacaaaagaaggaatacaaattatccatggtctcagaacaaatctttgagaaagttagaaacctagcggaggcaccaattgatgctgtttttacagatccttcctatggaaagtttgaacc

SEQ ID NO: 48753 - DNA, 556 bp, Gossypium hirsutum
  unsure (1)..(556): unsure at all n locations
  Clone ID: LIB3543-039-Q1-K1-C4
ggaacaactatcccganatttacatcaaatgtacatagttaatgctggaaaggttcaaactactatggaacacagcaaaagctttcttgatccaaggactacagcaaagattcatgttcttgggaacaaatttcataataaattattggagagtatttatccaagccaattgccggagtttcttggtggaacatgctcatgccttaatgatggcgggtgtcttagatctgacaaaggaccctggaataactcagaaataatgaagttggtgcactcaggagatgccttgtacttgaggaaaacagaaagttcttctgataatgacaatttggaggccaaacttttatctactaaggttgcaagtagtgaaatatcttatgcttccgatgtgagaccacatacatcagatttaatgcagttagtgtcactttctgacaaaggacagatgagtgctcttaaatcaatgcatgacattattgaaccagaaagtgctgcaataactgaagaagctaattcaacaaatgatgtaattagcattgttactccaagaaatcca

SEQ ID NO: 48754 - DNA, 605 bp, Gossypium hirsutum
  Clone ID: LIB3543-039-Q1-K1-D8
cccggtcgacccagcgtccgcccaacaccatcatccaggcgatgacgtcgtccttccgcctccttcccctcgcgctgctgctcctcctgctcgccatggcgcacgcgcggctgcagcccaccatccggctgccgtcggacgacgggaccaggtgggccgtcctcgtcgccggctccaacggctactacaactaccgccatcaggcggatatttgccacgcctaccagatattgaagaagggtggtctcaaggatgagaacatcatcgtcttcatgtacgatgacattgcgcacaacctggagaacccgaggccgggcgtcatcatcaaccacccccaggtggagatgtctatgctggggtccctaaggactacactgggaaggaggttaatgtcaagaacttgtttgctgtcctgctcggtaataaaaccgctgtgagtggtgggagcggcaaagtcgtggacagtggccctaatgatcacatttttgtgttttacagtgaccatgggggtcctggggtcattgggatgcctacctatccatacgtttacggtgacgatcttgtagatgtcctgaagaaaaacacgctgctggaacctacaaaaa

SEQ ID NO: 48755 - DNA, 562 bp, Gossypium hirsutum
  unsure (1)..(562): unsure at all n locations
  Clone ID: LIB3543-039-Q1-K1-E4
gcgttcgggttatagattttctctttttaatgggataaattattatttttttttaaaattattcgtacacattagattcaaatccgatctttcttctgtttgataaatttttagattggttgagattttgttcactaattcttttttgagtaattatgaaatgaatttggaccttttcccccttttttttaatcaacttttcaactacttcaaagctagggttgaaaggaagacaaggaacccatgcgtatcctttattttttcccccctaatggtgtctacattctccctatatattaacaatggggaaatctaggtttacttaatttgtccaacttgacaacctcatcgagcagttaggatttagggtttcatttgatagtacaactggacgtacctctcaccatgttttgaaacatggagtggggttgatcctgttgatgcggagcggaaggccttggcctcctttggccctatgtggtcaagttccctgtntcatgctgccaaatggtggttttaggtcaccatccctttcaacaaaacgttcattgagatgggtact

SEQ ID NO: 48756 - DNA, 594 bp, Gossypium hirsutum
  unsure (1)..(594): unsure at all n locations
  Clone ID: LIB3543-039-Q1-K1-F2
cccacgccgtccgtaaaaaaaaatgtntgcaaaatcaggcaaataagtcttcttttagagaatctcttaaagctcttgaagctgatatacagcatgctaatagcttggcagctgctctaccaagagattatggtgggagttgctaccagatgagactatcttatagtccttttgcacctttcatcttgtttttgattgaatggatggattatagttgtaccgatacccttcccagttatttaggccttctccacatccttgtatacaaggcatatgttgatggaatgccagctttatcctccaaagataaaaaagcaactctaagggaattttatgctgttatttatcctttgctaagacaactcggagacgaatttatcgaatctgaagataacaagaaaggccgatgcacggaagtttcgagccggaagaaacttgaagaccacaagaggattcccgataaagattcagagagagacgacgaatgtggcatatgcatggagaattgtacgaaaatggttcttcctgattgtggtcacgccttgtgcgttgattgcttccacgaatggaacagacgttcgcaatcgtgccctt

SEQ ID NO: 48757 - DNA, 501 bp, Gossypium hirsutum
  unsure (1)..(501): unsure at all n locations
  Clone ID: LIB3543-039-Q1-K1-F3
gnatanaaananaagagagaagaccgaactctctctgtagctgctgctctttctttgctgtaagggaaggcctaatatctcttcacacttccgtaagattatttcattttttttttaattttaccccctttttgcccctctcttaattctctctattttagttccagagaactctccttgatcttataatgtaattcaatttcttcatttcgtgcactttccatctttattttcccttaatttcccccattttgcatatttagaagctttttttggataagatttagttcaaattcagcggctttgggttttttatttattcaaaattagggctttttcttccggggttttggtaaccttttacggttcaatttctaaaggcttgattttgaagggaatcattgcttctttgggtgtttttggttagtgggtatttgctgagatagcttggaatttgctttgttgtgaatgttttagattttggtggatatttgatatttt

SEQ ID NO: 48758 - DNA, 430 bp, Gossypium hirsutum
  unsure (1)..(430): unsure at all n locations
  Clone ID: LIB3543-039-Q1-K1-F6
gnaaggactacagtttngagcatttgtgacttgtgattcttgcgatgggcgtggctatccgcctaatgccaaagtgaaaatttgttcaatttgcagaggctcagggacaattacaattcctccatttacatcaacatgccatgcttgtaaaggatcgggccgaataatcaaggaatactgcatgtcatgccaaggttcaaggtttgttgaaggtgttaaagaaattaaagttacaatacctgcaggtgtggattctggagatacaatacgtgtaccagaagctggtaatattaggcgacaaggaagtcaacttggtaacttgttcattaagataaagggtgcagctgatcctgtctttactagagatggtgcagatgtttatgtttattccaatattagctttacacaaacaattcttggtggtgcagtg

SEQ ID NO: 48759 - DNA, 341 bp, Gossypium hirsutum
  unsure (1)..(341): unsure at all n locations
  Clone ID: LIB3543-039-Q1-K1-F9
cccacgccgtccgattagnaaaaggtgagtgaggaanagagagggaatagttggtgcagttgagaagttgctttctcggggaggaatttgatgcagacagtggaaagaggaggatccatccgtatctatttgcagggcacatgtgatgttattgtaatatagcagtgctcgtgatcccgaccggcccaactgatagccttctgcatcttgtctgcagcttcttcacactgctggttccagttccatatccagcatggattggcgatttgctgtttttttacccttctcttttacacctgtgaatatagaactagctctatatatgcaggtccataagtttg

SEQ ID NO: 48760 - DNA, 583 bp, Gossypium hirsutum
  unsure (1)..(583): unsure at all n locations
  Clone ID: LIB3543-039-Q1-K1-H3
agacttccaggnattgtcttccctctattgtgggcaagaatttgtagcacatgaagggtccatcttgacgatgaagttcagtctggatggcgaattcctagcaactgcaggtgaagattgtattctgcgtgtatggaagattgttgaggatgacagtttagacaaatttgatatccaagatcttgatccatcatgtctttacttcagaatgaatcatctctcacagctgattcctcttaatgccgataaacaaaatatagataaaataaagaggttaaggagatcatctgattcaacttgcgtcattttcccacccaaggtcttccgagttttggagaagcctgtgcatgaattccaagggcacagcgcagaaattttgtctctttcgtggtctaagaaagggtttctactgtcatcttctgtcgacatgaccgttcgtctgtggcaagtgggatacgatggatgcttgagggttttttctcataacaattatgtaacttctgttgccttcaaccctgtggatgacaattatttcatcagtggttcaattgatggcaaagttcgcatttgggaagtgcttcgt

SEQ ID NO: 48761 - DNA, 590 bp, Gossypium hirsutum
  Clone ID: LIB3543-039-Q1-K1-H5
gtcgacccagcgttcgccccgcgtccgccccgcgtccggggactgctagtgccattgggtcaaaatcctataatgctattatgggggagcttgtcgcattggaaactcgaaatatggagatttcacccaaaaacaactctgaagattgtgtggattttgctgctgcaacaactgccactctaggtgttccctgtccctgcctgtcaaaaacgagatcttttgatgattctcctcattctgtttctgaccagcaaagcttaagaaaaggggatcttgaggaggaagcagagctaatgaaagccttgaaattatcagaggctgaattgccaacctcaaatggtgatcctggcagtttagatataagatcgtgttcaaacaaccctgtttctgtagattctgtagataaacaagagggggacagaagtgctgaacatcagaacttgcaccagcatgaaccatccttttcagataattgcatttccttgagcaataatagtgttggtaagacgtgttttcagaccgtctcaaaagaagagttgctaaagactgatgatattaatcaggatcagtcattttatgttaaatctggg

SEQ ID NO: 48762 - DNA, 582 bp, Gossypium hirsutum
  Clone ID: LIB3543-039-Q1-K1-H9
ctttgtatctatatcgtgcaaggtcctcagaataattggtgcctattttggaattggttttgccttttgggtggggatgttgaagcattgagtaacgagtgttgaatgtggttataatgtttgaagaagattgatctagaaaaaacatgataccaagttttgatgagctgtgcaagagatgaatgtgtagattcaaaaaataattcttgtagttggcttttacatgatttgacgaactgttgacatgtctagaagtgttaatggggtagtttgtgctcatactaatgggttttgtagttccatcagcagggtcaaccattaattttgatttcctttttcaagtagttttggctgcttcagattctttgatggtttgttattggaggtcgcatatccttaaaattacgctagttttaactagatgggaaagcttgtggtttatctaaatgccaagcttgtggtttatgtaaaagcccttgttctaaactcgttttccagtccactgttgatgcttcatccttttcatcttttctatggtttctcctacctgctaaatccatggttgggttgtatgttctttta

SEQ ID NO: 48763 - DNA, 265 bp, Gossypium hirsutum
  Clone ID: LIB3828-003-Q1-K6-D2
gactcaccctgtcacagatcattaagcccagtggctgtggtggttactcgcagcacataccgctacacttcccatggccctagcacgctctcctttctcttatttccattactgaatggacaattgcggacaatgtgcccgtaacactctaagaagagctctccctacatggataaaacatatggctgtccccaaccctaccccttaaaatctatattatgatgatgattaacgcaactggccatatccctaatgagacggagga

SEQ ID NO: 48764 - DNA, 358 bp, Gossypium hirsutum
  Clone ID: LIB3828-003-Q1-K6-E3
caacttgagcccatggcaagtttcttctttccagtttgacggaacatgactcccttacctaacaaatgatttcattatttcacaagatgaagtcttgtttacaatttgctatttaatggcaccaaactgttgtaaaagctttctcataaaatgcagatggcaaagccactctgaatctcaacccgagttaaaatgaaaactgtgagatcgattatacatctatccttcatttgttctgattttgatgtacataacattgctagtaattgtcgcatttttgacatcattgatgtataattagggtttgcaattatcacatgataaaatgtaatctcagcaaacatcaatcatatacatt

SEQ ID NO: 48765 - DNA, 591 bp, Gossypium hirsutum
  Clone ID: LIB3828-003-Q1-K6-H2
gccatcggtggatgaatcaaaccaaccacagacacattggtgattgctggagtaagaagggtgggtatagatttggctacatttaggttcttgccacgttgagttggaggattttcttcctgtttctggcatacaaagtctttcttccagtgtgcaaagtactccagagaaacatggccattcagatgatgcttcgagaagtccagaactcctgcaagaattcctgaaatctggtccaagaaaggagcttcttcgaacctgttttcataaagagaagaaaagttcagcttcttcaaagagcaaaatgtctgaagttgtaaagttgggtaacaagatcatcaaaaagcctgacttgagaaaggtttcatccactgccaacagtcagtcttctgctaggaagcaaaacagaaagggggagaacccaataagggtgctcccagctactgagcagtcttcagaccatggattttctagctcatggatatgtaaaaattctgcttgcagagctattctttccatagatgacacattttgtaagagatgctcctgttgtatctgtcacttatttgatgacaacaaggacccaagtct

SEQ ID NO: 48766 - DNA, 601 bp, Gossypium hirsutum
  unsure (1)..(601): unsure at all n locations
  Clone ID: LIB3828-005-Q1-K6-A1
ngatatctacgtcctacaattccgatacacactaaccccaactggctgaactgcttgagagttgctggcaacaagatcctgcactaagacctgatttttctgaaattatagagattttacagcaaattgccaaggaggtaggagatgacggtgaagatcgacgtaaggagaaatcttcaggaggatttttgtcggcccttaggagaggccaccattaaagtaaaagaccaagatatgtttatacagtgatatgtcggccgggccattcccaccattttcatcaacactgtacagtaattctttttttttcccttgtttcccccatgatttatggtcgtctaaaacaatgtccattcttctgcctgccgccattcctattcgaagataaaaagaaagaattgcattttgtagatttgaattcgttgaatcctgttttaaaagtaattgcatgatctagttaggacaaattttgggttcaatgtgattctctttattgaaaaattgaccttgttttcggagctactaaatcggcattagatcattgtaaaacgtagactcgatttgcaatttgctccactccaaggtatttttcctttttttt

SEQ ID NO: 48767 - DNA, 229 bp, Gossypium hirsutum
  unsure (1)..(229): unsure at all n locations
  Clone ID: LIB3828-005-Q1-K6-B2
caccacacgttcgnaaaaaagatattgaggagtataggaaaaggtctgtttgaattttgtgtttagaaataaaggaaggaaaaaatgagggaggtgattagtgttcatataggacaagctggaattcaagttgggaattcatgttgggagctttactgccttgaacatggcattcagcctgatgggatgatgcctaccgagggcaatgcaggtggtaaccatgatgcct

SEQ ID NO: 48768 - DNA, 579 bp, Gossypium hirsutum
  Clone ID: LIB3828-005-Q1-K6-B4
cagcaagcaaactagtcctctttttctgagactataaaaccttctggatgttgcatgtaaatatcctcctcaagttctccatgcagaaatgcagtttttacatctagctgctcgagctccaaatcatccatggccacaataccaagcaaaactcgaattgaactatgcttaacaactggagagaacacatctgtgaagtccactcctggaatttgactgtaaccctttgcaacaagccttgctttatatctgggttcttcaactcctggagtcccttctttctttttaaacacccatttacaacgaatagcctttttacctttaggaagtttcacaaggtcccatgttctgttttatggagtgattccatctcttcatgcatagcaaacatccacttttctgagtcttcacagctaaccacctcagaataattagatagctcttaattcgcatctatatcttcaaccacatttaaaacataagcaactagatcagcctcggcatacttctttggaggtttaatttctcttctaattctgtttttggcgataaagtattgtggtgaagaagcaactctat

SEQ ID NO: 48769 - DNA, 579 bp, Gossypium hirsutum
  unsure (1)..(579): unsure at all n locations
  Clone ID: LIB3828-005-Q1-K6-C5
gnaatacttggtcctgccattgctgaccacaaaacttacttgngaattatgtgacatggttacaatcaaataatgcacgtgaaggaagggcttataaggaatcttttgagaaaaaatggccctccattaccttctcggacaaaattatcctctggagacctatgaaatgctgagaaagttggatgaactcagcttgagagcgatagcgaacttaagtgccaatgctacttccaaacaatttgaacgagaagttcgtgaagtgttcttggagacttttggtggacttggagcagctggtttgtcagcttcacttctaacatctatattacctaccaccttggaagatcttcttgctctcggcctgtgttctgctggcgggtttatagccatttcaaatttcccagcccgtagacaaggaataatagaaaaggtgaaaaagacagcagatgctttaggacaagagcttgaagatgcaatgcagaaggatcttcaagaaaccacccagaatttggaaaagtttgtaagaattatcggggagccttatcgagatgctgcgcaaaatagactggacaaacttct

SEQ ID NO: 48770 - DNA, 600 bp, Gossypium hirsutum
  Clone ID: LIB3828-006-Q1-K6-A1
gttattattaagctgactgcacagtttgttgcacgaatgggaaatcattcttgactgggttgaccagtagggagattaataatccccagttcaattttttaaggcctactcacagtatgtttacctttttcactgaacttgctgatgcatattccaaagtgttgatgcctccaagggcttgacagaaaagttgaggaagagtgttgttgatatgacaactgtgcttgagaggtgcttgcaccggctggaatgggaacgctcgcaggagcaggcaaggcagaaagctgaggatgaaattgagcaggagagaatgcaaatggcaatgattgattggcatgattttgttgtggttgagactatagactttgctgatgacgaggacgaggacttacctcccccaatgaccattgaggaggtaataaggaggagcaagatcactgctatggaagaagatgagattgttgagcctggaaaggaggtggaaatggaaatggatgaagaagaggtacagcttgttgaggaaggcatgagagctgctagcattggagagaatgatggtgagaagaggatataagggtaaatgaggaccctgaaccacca

SEQ ID NO: 48771 - DNA, 430 bp, Gossypium hirsutum
  Clone ID: LIB3828-006-Q1-K6-A4
atcaagatcaatggctgccccatcaagctcggggagcacattatcctacacaaaaaagctgtcaaatcgaacattctcttatgccgacaacgctgctgctgctggtacataagaatactagtcaaaggctggggatacactaaaaaaatctactcttttcataaaaaaatatcgaaagacctaattgccttttaccaaaagcttgtaccaccagcaaaaaatgaaggatataaaggataaagagcagacttactaccggactatcatggtagatgatacaattatgaaacaaccgcaaaaaaccgatggaaaatgatctaatgaatgggttcagaaaaactacaagtattgaacatatactgttagttcaggcaaatctactggatcttgcgaaaattctgatattaattatgactctaagaaacacctg

SEQ ID NO: 48772 - DNA, 586 bp, Gossypium hirsutum
  Clone ID: LIB3828-006-Q1-K6-D6
tcaaaagctgagtacatggtggaaaaactgcatacgaccggctagtgtctgcctgatgtatggtaactgactacaccatgaaaatgcagaaataaaaaaaatggctttatatatattatatataatacacaagcggacgccatattgttcgggccaaataagctagaaaagaaaacatcaccttttaaaagagggggaggaaatgaatgattctttcgcatcgcaatatgaaggatattctaattcttgattcatgtaatcaatgtatgacaaatataattaagagtattgaggggtatagcaatggactctcattaaatagattgatctcttatgatacttacattgactgaaccgtgcaaggaacgaccaaaataacaaccaaatggtgctgctattcatacccagccactgtctttatacttcaacacggataatatcaaataatggaatgcttgcctaaaaaaaaaaattgatggggaagacaatatattaggatccagaataacgctacacgtgcagtgcaacggacaaagtctgatctagggagaccataaacaaattacatgggatattttgaaccacc

SEQ ID NO: 48773 - DNA, 327 bp, Gossypium hirsutum
  unsure (1)..(327): unsure at all n locations
  Clone ID: LIB3828-006-Q1-K6-F1
tccagnccgtccgcggagacaggacgaatgaaagcaaagggggtaaaatcgtcaaaacaaatatccctattgagggtgtctttttgtatgtcagtcttacaaaagtcacaatagctgataactacatcctcggcctctcccttacttgcacaggagacagatgtccaatgagtttggggcaaaaaccctaacctccaaaacatgaccagagtaagctagctatcgcctatccagcatctttatcaacatacatggctgcagctgctctagagggaatatcaattaagatgctaggcagtgtgaggcggcagcgggagcacttgaagc

SEQ ID NO: 48774 - DNA, 599 bp, Gossypium hirsutum
  Clone ID: LIB3828-006-Q1-K6-F3
atttttgcaaattattgtatcatctttttctatacttcgttgaaatttgacctcaaattagagtgtacggaccctgtgaaggtctgtagtctgtttggttttgggtgccactaccgtagggttttgttggaaatgggaggcgactcgttttaagccatttatgtttttgtttgctctgcatttgctgtgttttttttttcagttggagaagtgggacttgggggaggaggatgataaacgatggaaagaaacaatggagatgatgatgataattttaaaataattttaaccacttgcatttgctctgattttttcagctggagaagtgggacttggaggaggatgatgaagacggaaaggggtaaactattaaaataatcacttttatttacttcagattacattttagtcacttatgtttgaaatattacgttttagtcacttacattatcatgttgtaacattttagtcattaagccattaatttccgttaacagtgtaacattaagctgatgtggcacattaaatcatcatttcaaacgaaaattttaggtcaaattataaaattggtccctatattttttcattttaagcaattt

SEQ ID NO: 48775 - DNA, 611 bp, Gossypium hirsutum
  unsure (1)..(611): unsure at all n locations
  Clone ID: LIB3828-006-Q1-K6-G4
gcaagctaaanagaatgaaacgcagccatttacatccaggtcagggtccagatcaccggtcgttaatctgttgccgaagcgattcgggaattcaacgatgttggcggagtctatcccggtttgtgagttccaaggtcgacctattgccgaccatccggctattaaattcggacgacctcccggtgctcttagggtacctcgtgaaccactcgatgctgtcactgttgctgaagctgtttccgtaatttcttgctggtacgaggacaagacagaatggggggaacgagtagggtggatttacggctcagtgacggaagatgtggtgacggggttccgtatgcacaaccgtgggtggcgatcagtatattgcataaccaaacgtgacgcattccgtgggtcagctccgatcaaccttaccgatcgtcttcaccaagtgctccgatgggcaacaggctccgtcgagatattcttctcaagaaacaacgccctcctcgctactcgcaagctcaaattcctccaacgtttagcttacctaaacgtcggcatttacccattcacatcatttttcctcatcgtttattgtttcctccccgcactttcactaatctccg

SEQ ID NO: 48776 - DNA, 529 bp, Gossypium hirsutum
  Clone ID: LIB3828-011-Q1-N6-A3
gttgccccatccaaaaacgtgtttctttttaaccaaaaaagaattttttaagggtttattaaattcaaaaactggaaaaagaaaaaacattcttcattggggggggcccccccaggcaaaagaaataacccccaaaagaaaaaaaaagattttaaagaaatttcaagccgggccaccccggggggggggaaacaaccaaacaggggaatctaacagggggggaaaaacaagccccccggggacaaaaaaaaaatccgcccccgccgggccggggccccccccaggcggagggggacaaaaaccccccgccaaaaaatgggggggctaattctggccccctggggaacccccccccaatgcgccccccgggcattaacgttaataaaaacaaaaaggggttatccccccggggggaaaaaattggggcccatcattagaccccttaaaaccacacaaaaaaggttccccgggggccggagaacatttgttcacaagagagattgagaagaaacgggcaaaattggcggga

SEQ ID NO: 48777 - DNA, 573 bp, Gossypium hirsutum
  unsure (1)..(573): unsure at all n locations
  Clone ID: LIB3828-011-Q1-N6-C3
ctggaattcgcacatattcatttaatatttaagaaatacaaattaaatagatcgagcactcctccatgcaccgtcttagctcaaaaaaaaaaaaaaaaaaaaaaaaaaaaaaaaaaaaaaaaaaaaaaaaaaaaaaaaaaaaaaaaaaaggggcgggccgccctttnttttttttttttttttttttttatccctaaaaggaattaaaataagggtttaaaatttccaaaatccgaattcgaaccctaaatttgggaaattctttttttttgaggaaaaggggaaaattggaatttaactttaggaaaaaaaaaaaactgggaattccaaaaaaacaaaaccgggtttttaaaccccattgggcccccacaggctaaaaatctgggccaatgggttcttaatatcatacagggaaattaacactacgtttttttggaaatttcatttgaaagacccctaggcaaacccagaggaaggggattttaactggaaaggggatttttataagctcccccagcaaaagctgcaaaaggatcaaatgctgcagtccttgaaccagtttaagaaaaccta

SEQ ID NO: 48778 - DNA, 531 bp, Gossypium hirsutum
  unsure (1)..(531): unsure at all n locations
  Clone ID: LIB3828-011-Q1-N6-H1
cctttaaaaaacgccctttttttttttttttataaccaacagaacccttatattgacagatttgatttaaaacattttacaagaaataatttcctgccactatgcattttatatataatgcacaaattaacagcctaaagatctctgcactataaggtgggatccaccgggtggatactcaaaatggagggaaaatggagcagataaaattccagaaccacaataaccactgatgaacagataggaaggggaacctgttcttcatgtttaccacctcaggtgaatcatgggccagaaattgaattttcggcaatgactaccaggtgcacaagaagatttaattggctgaaaggaaaataatnagggtaagatatgacggaaaataaagaggagatcaggcagagggagggcnccaagatcagatgaacttggctttatccagcncaaatggaaacaacaaatttggtcagcttggcagcgacggttgaagttttagcacaaaaagctctggctnaatttgatgtttaaatg

SEQ ID NO: 48779 - DNA, 574 bp, Gossypium hirsutum
  unsure (1)..(574): unsure at all n locations
  Clone ID: LIB3828-011-Q1-N6-H3
ttttttttagaagcaaaattttattttgatatattttgaaattttaatttgcagcatatctagaaaggagtaaagcatagtgctacaatcaaaatataaatatcgcctttattcttattatccaaggaaggctaatgccacattcaagagcttacatcagtcagtaattaagaaattctgacaagagagtggatcccagaaaattaaagaaaaaaggaaacaatatagtatctcactttcttccatgacagtggtcaatgggctccagccattccggttgngttgagagagagttgngttttgggattgggaagtgcaaattttgcccctnaagcactaatggcngccaaantngaccccaatacaaaggctggtnngtttccgccccccantgctgcntctatcggnccactnnntcctgntctnatcatctgtggggttccctcttgacaagtttagtcctccccagcccggccttgcccgccccccttctccggccntnnttgggtgcccctgcgattggggtgcttctgtccccccaggggnttccccctcaccccttccatgcccgtgc

SEQ ID NO: 48780 - DNA, 577 bp, Gossypium hirsutum
  Clone ID: LIB3828-012-Q1-N6-B1
cctacgataactctgaaacatatatgacagcaatatatatacaatataatataatataagttaagattccaactagaaatgcggaacttaaatttggattatgtcctgtaattcccgagggccatcgaacgactgtgtttttctcaggttccaatggaggccgtcttggatgctggataagaaatcacttgtagaatcaacttgacatgctgtaggaacaggacatggtgccatactgcacaaaagagcatccccagcagctaactgttttctgtccttaccatcaaatgatgcccaagctggacttctgctattaaatggcaccactattcgcaatgtgacatgctcaggcaatatcaggggtcgaaacgataatgaatgcggacatatgggtgtgaacaagataccggggacctgtgggtggaccattgatcctccagctgccagagaatatgcagtgctaccagatgtcgttgacaaaattaaaccatctccttgcacgcatgtgacaaaggaattgtcacaatagcattccagatttgtgaggtatgatgatattccacggtctattgtaacc

SEQ ID NO: 48781 - DNA, 468 bp, Gossypium hirsutum
  Clone ID: LIB3828-012-Q1-N6-B2
aaaaacaaacaaacaaaacaccccttataaaaaaccaaacccggtaaaacaaaattgggaaaaaaaaaaaaaggccacccttggaacccgggcccaaaaccaaacaaaggggtaaacccaattccccccctgggggggggaaaaaaccccaaaaaatatttaattcggttaaaaaaacctttaaaaaggggccgaccccctttttttccttttttttttttttttttggccaaaaaaacaagggggagagatcccttttttttggggcaaaaacccttaaaaaagggcaaaaaaaaaattgggggttggggaaaaacaccaaagccggggaaaacaaaaagggggaaacaggggccaaatccgggtttggccaggggaagttaagggggcgggaaataaaaaagggggcgggggggggggcaccccccgtttgggggaaaaaaaattgggccgcatcccatgccggga

SEQ ID NO: 48782 - DNA, 128 bp, Gossypium hirsutum
  Clone ID: LIB3828-012-Q1-N6-C1
aacaaattctatgtcactacatccggtttaatttaggtttagctatttacaaaagctttcctaagattattcatttggtgcagtgttgcacatttatttttggttttgtaatgaaacccacgctttcg

SEQ ID NO: 48783 - DNA, 586 bp, Gossypium hirsutum
  Clone ID: LIB3828-012-Q1-N6-E3
atcctaataaaatgtgggacacataatcgtagcctgtcggatacaatcataacaaccattattgaagagccaatgtaactgaacgtatagttgaccttttctctctccctaagatttatttctcaccatcgaggaaggaatctatcaaaggaattggagcttgaatctctcatacaccatttgacattgttttatttgaagcctcattgatgtcatcgagaggcttttccatggcgtttatggaagggtcatattgttggataaccaaaatggatgaagtagtggagaaatccgacgaggctaaatagctcccgacatgacctagttcaggacaatccgaactcctgtccgacaaaggcattgccggagacgttcttcctaccaaaaacagtgtagagttgctcattgatctcaaagctgcgattacgtcttctctgcttcccattgctatcgcttcatgttttacagactcactgcttttgcttaaattaaggaactccgagaaaatctcgttgtctttcttggattctgctcccatatcagccttgggaggattaagtgctgtttcaggtttgggtgtaaattt

SEQ ID NO: 48784 - DNA, 519 bp, Gossypium hirsutum
  unsure (1)..(519): unsure at all n locations
  Clone ID: LIB3828-012-Q1-N6-F4
atattaaatttttttttgtggtttttataaaataaaattaagaatttgccattgaattttagttttaaaacatcacaggcatgaagtttggggcaaacattggtagaaaaaaagaagggcacgggggtggggaggaagaaggggccagacgggaaaaggaagcggggaactgggggaaaaaaaaaagggggggaattacatgctgtggaaaaggaagcgggaggatggaaaacaaaggaaggggatgtggcaacaaaattagaacgggggaaatagaacggaggaacatgctaaaaataacacgggggaatggggaagatataagggcaactttttgacaaaaggtgaacgggggacaaaaaccaagggggtgcaccgaagatatttccaaaaaaaagaaggtgcatagtagaacacaagaggaaagcacaggggctcaaaagctcggaaacgggagcaactaaagggaagaaacnaaggatctcagcgggaaaaaaattcggggaaagggaatcaact

SEQ ID NO: 48785 - DNA, 568 bp, Gossypium hirsutum
  unsure (1)..(568): unsure at all n locations
  Clone ID: LIB3828-012-Q1-N6-H2
ggaaccaaaaccaaaagaagagctaccatgcatccgcatatcaaaattaaaccctattttagttcaaagactatgggacgtttttcttttttacaaattgaaattcatctcacgcaggtgggggtgattttttgctacacatgaaagaagcttgaaacggacaggggagaacccaaaaccaaggggggcacaagggaaattattaactttcataaactaagaaaagggcccaatctcaagcacattctttctcgtacacttcactggcatttttccaattgatgactttccatatgttcttcaggtaatctgggctaacattcttgtcctgtaaatagtttgcntgctcccaaacatttttgccaagcaaaggaactaaatgtggccctttngtcacgagtggatcctgatttggagttgtttctataacgggtttctttaattccttgttcactccaagccccccccaaccagagccctggnaagcagccccctcagttttcatcttctgaatcaatggttcccttgaacccaattgtgtgtcttttgccccccccagggagctttt

SEQ ID NO: 48786 - DNA, 226 bp, Gossypium hirsutum
  unsure (1)..(226): unsure at all n locations
  Clone ID: LIB3828-012-Q1-N6-H3
ctctaaaaagcccccctttttttttttttttttttttacaacgcaaaatggcaagtttctcctttgattgggcgtaaatacagcagttttctgtcaaagccatatcaactgaaaaacaaaagaatgaatttatttcttttttttgagtttaaggttaaaatttaaaagcgggggggggcatgccgtgtncccaaaatccgaacagagttcagctgggggggttcac

SEQ ID NO: 48787 - DNA, 558 bp, Gossypium hirsutum
  Clone ID: LIB3828-013-Q1-N6-A6
ggacgcggggggcgagccgggaatcgggaaccggggcctggaggcggaccgggttccactatagcgagtagtgtgagagcttggagctaggatggacataggtgatagctgtgtgaagtgggaatatcgttcacagttccaaacaccatacaacccggaagcctaaagcgtaaagcctgaagcgcgtagtgagtgatcagacacacatcaaacgtgtagtgcttactgcccactgtccagttgggaaaccggaaacgcgagctgccttatggattaaggaatcgcccaacgagaggggggaggcgttttgggcgccaggggggatggtgtttttacctttgacacgggaaacaggtaatagccctttaccctctgccccttggacattagagagaagcagtacacgctggattgtggtatgacgcaaaaagccaaaatgctggtggataacggcgaaatgtaacatgaaccgtgatcggtcttggggtttgccacttccgagtatatgagaataacgcccaacccggactcgggaatggggaatgttgcgcacagcgc

SEQ ID NO: 48788 - DNA, 613 bp, Gossypium hirsutum
  Clone ID: LIB3828-013-Q1-N6-B1
aagcaaaatttctaacagcttaaatagaaaagaaaattcatgacgatctacactgaagaaaacaacaggctgacatccatatatccatttcctcgatgttagtttacatagcttgagaattagcaggcattccattcatctcttcatcagtgccagggaggagatgccacggatgttggtctgaaaaattttatgtttcatttagtatcacggtcacggaatactaactgagggctccattttaaatggagatgaagctttcctgatttagcaccatctattgtgaaattgtcttgaaattccccttctaataacaccctagtgagtgtcatgacgattcttccaattttttccttcctaaaagtgtcgtggtcccaaacttcaataattaacatttcatgtaatgcgtcttccactacaaagtcgaaggtttggttccaaactggattcaatgtctcattagcaacccttgtcttggattttgtctcggatttcttcattgtgaggaccacaaaagggtctgcctttccattaaaatcaactggtggcaagttttcacctgatataaccatcactgacagtactcctctaacaatgacctctcttttctttt

SEQ ID NO: 48789 - DNA, 602 bp, Gossypium hirsutum
  Clone ID: LIB3828-013-Q1-N6-B3
tctttttttcatttggatagtcaagatccgattatacaagtttttcagttctacctgaatattctatttataatctttacaaatccctttctggctttctcaagtacctcagcatatcttacccattcaaagataatatcatataacaaagatgtgactgaaatccatgaagaaatgaatgggacaatttgataaccatcaccaacctgttgtggaacgacagtaacttggtttgtaatgagattcatggagatgatgatgaggttagattagcctccaagttccctagcaatgtcccgcaaacaagaggctgtgccgaaggaattctcagacaactcagcccacttcctggtattccagagcactctggttgtggtctttgcatgtctctaccagggatgcaattgagggagaaatcaaaaccgccatttctgatgaacaatttggagcattcttggctgaacccagagaagaaattgtaggcaactgtcaaattcatgaggctccttaaggaacaaaccaagtcgggtagctcaccagataactggttgtgtgccaaattgagaacctcaatgtcatttaggcaagatattgtgtctggc

SEQ ID NO: 48790 - DNA, 491 bp, Gossypium hirsutum
  Clone ID: LIB3828-013-Q1-N6-B4
gatgaaaggagatatatatatcaaatctaggggttctattctatgtataatagctacaatgacaaggtctgataagttgcaaacgactgctaaggcttgaatatacaccacacactgattatacgatcaagcatatgtatgtacctactactactatatggagtgaccaaatatacggattcttttcagcacatgaaccctatcccttgaactaattacaagtcaaccgattgcccaaaatcccgttgagcttgctggcttcacctgatccaccttctcgccaacagaattgtggctgccgtcatggcctttcagacacaaacctaagtccaaattacccatgcttgaatcctgagtttctttcttcaaaatgttattcatgttcagctcgttatcagtcttggaagacagccaatctggggatcgcttggtcttattctcatctgtcttagcttcattttcaacctgttttgcagcagctgcccttctac

SEQ ID NO: 48791 - DNA, 613 bp, Gossypium hirsutum
  Clone ID: LIB3828-013-Q1-N6-C2
gaggttaaaagtcactaacactccattgaaacaaggtacaaaataaagcctgcaggtatttacaaaagcaatatattacagtgaacagaagaaggattggttatcatgcttcccaacccctcaaaaccgtagcacgagcgaccttgttgactcctagggtgaaggctcccattctgaggttgcagttatgagtatggcacattgctttgatgtcattgaaagctctcttcatgtacctcttaagctcatagttgaccttttcttcttcccacataaatccttgaatgttctgaacccattcaaagtaactgacagtcacaccaccagaatttgcatatatgtctgggagtatagtcactcctttcctggataaaatttcatctgcttctggatcagtaggatgatttgcagcttctatgatgaactttgccttaacatcagcagcattttccttgttaagaactccacctaatgcacaggggatcagaacatcacattcatgaacaagcacatcatttagatccatggcatctccaccttcaaaatccttcaaactatcagctttctctttgtgtttcagtaaagctgggatatcgattccatttgggttttt

SEQ ID NO: 48792 - DNA, 339 bp, Gossypium hirsutum
  Clone ID: LIB3828-013-Q1-N6-C4
atgaaaataatatctttgcatataaatcaaaatgaatattagccatcatttgaggcttaatacaaaatgatgggtttccaacccaagccaacacatttggctggttctcaatggcacagaaatagtaaagtttaagccctatacatgccatattcaaaaatataaatcaaactacactgactgcttctattgatagtgtgatcaatatctttaacttcctttggtccttgagctagataggcggcactcggattacaaaatgtggtgactagtcaatttagtcgatttgcttggctttcccctagtctagatttggattcggtatttcttaatttgtga

SEQ ID NO: 48793 - DNA, 576 bp, Gossypium hirsutum
  unsure (1)..(576): unsure at all n locations
  Clone ID: LIB3828-013-Q1-N6-D2
atagataaatatataatangaattaatattctaacatctaatataaattatatattatatattataagctcaataataagaaataaaaaattcacccttaacaacaatatatgttgtatatgtaaatcctagatgtgaaaacagacataattctcagcacctttgtccaatcccaatggttggatcgcttggagcatcaatccaacaactacacatatggtaggttctcaagccatcgttgccttcaaaaacaaatgctccttggttgttaaaacttacaacttaagctcatacaactctattgtggaaggaaagttgtcttttgatgtttgggaactagaagctgaaactaatgatgatgagaagatgataatttatggttctttgaaggttccgagcagtgcagagaaggtgaaccaggttcggcaagttgggcctggggttactaatgatcacccaaggaagcatggatttgcaaaagacaatcttagttctttcggagaattgaagttgatgaataaaatgagttcgggtgcctcattgcttgctccaacgccgcaagttgctaacaatgat

SEQ ID NO: 48794 - DNA, 492 bp, Gossypium hirsutum
  Clone ID: LIB3828-013-Q1-N6-H4
ggggggggaaaggttcccttgggaattcaaaccttttttaaaaacggccaaacaaggaagggggaaaaagccctttttaacaatgaaaaaaaagaaaaaaagccccccaagggggttttttccattttttaaacccccattttttttttgggtttttcaattcttcgggggttcccccctttttgggggggggttcccggaaaaaggggggaaagaaaaaaaacaagggggggcccaacccggggcccaataacagggtttggggggattgggaggcgggaatttgggccggggcccgttgccgaagctgaagctgccgctgggggtggggctgaagccggggatggggctggggaaccccccccggccgggacccggcttttgggggggggggggcccttggcgggccctgggaatctttttccgggccctgggttttgaaaaattccgccccgggggggcgcccggggtttccgggccgggccccggagg

SEQ ID NO: 48795 - DNA, 582 bp, Gossypium hirsutum
  Clone ID: LIB3828-013-Q1-N6-H5
gacaagccaaaaaagatttatttggttgggcgtttagacaatgagttatgaaatatggatagtcatggcatccgcatactactcctatcctacataaatattatattatctaaattaaacccatgagtcgattttttttatacataaaaagagtatactacataaatctgcaatcatttgaatatatatatatatataactctatgtcgatactatcagcttcatacgaggggaccgtgaaaaacccacctagaaactgcttttctctcacaccctaaaggcccagacttgccataacatcaaaatacagccgacaacccacctttgatatggtctaaaacttgcactggtatcagtcacaccaacaagaaacctgcaatcaccaacagaagggtccagaaaagtgaccataccaagtccatcaaaattacaacttttttcattctgcatttgcagctgatagtaactgttgaatgcatatgacacatttccttttgctccaattgcattacatgatcccccgtagttgagcgtggtgcaatctgcgacattacaagcaagcttcatgtgatttgccacttc

SEQ ID NO: 48796 - DNA, 284 bp, Gossypium hirsutum
  Clone ID: LIB3828-014-Q1-N6-A4
ggataaaaataaataaataactaacaaaaacaggggactttatagctgcaagttaaataaaacaatacccgaaagggggcccacctatctttagaaacaagaatcccacctaaatgggcatcaacacagcttaaacttttatctagggttttattcatttcaaagcaaaccaaatagactaaccccaaaccccattgaaatatgccgcccaagaaagaagttgctagctttgggaaaagcattatagtggcaaacaacccacccctagctagaaaaaattcttt

SEQ ID NO: 48797 - DNA, 613 bp, Gossypium hirsutum
  Clone ID: LIB3828-014-Q1-N6-B4
cacatcaaatgggagatgtttcattcatatttacaaaaaatctgattctgttcaaaagtatgacatatgagacttaaaattaaaaattctgatatactagtatactgggaaataaatatcttagatgaacactctggtttgtccacaatgataacaattcgcgttgttgtataaatgaacactcccagaaccagaaacttgtatttgaaagttctgaaccagccagacacaaatgggtgagcttttaggttacaagaaccaatcaggttttttgatgttttagtagagaacatccaactgatggaaggtaattggaaaagttataactaagttgttgatttaatgaagaataaaaaggaagataggcaaaaagtaaatagtgaaactaagaaaagactaagatatccaatgaagatagatggagagagaaatgagcaacatcgcgttgattctccatcgtatttggactaaagccagatttgaatctaaaacctattcctatcccatccatatctagtttcagtggaggcagccaaggcgtcattaggttgcacgtgcaaaattttgaaggagaaaacacctttgggagttccttccctatctgatttcactg

SEQ ID NO: 48798 - DNA, 538 bp, Gossypium hirsutum
  Clone ID: LIB3828-014-Q1-N6-G3
aaaaaaatccttgggggccttttcaattatttttcaggggctactgaaagatacaacaatttcacacaagggtggttggttcacaatctcacccataccattccattacatgggtcccactgcatatgggatatatagcagggctaacagatacaacataagggttttttttttgggtttttgggggcccaacataagggttcctggttggtccacaacgggcatttaactttatagagataattacccactccctttggcacaataaaaagcagagctactggcccttccccaattacaaccatttttttgccttattccaccaaccaacctaactggaacttgcctttttttccagcttttttcaaatattgcatgccttatcggttaccccgggcatccttattggttctaccatccttggtgcttggaggggaccgactagttgatggtggggaatatccaggggccctaggagaatacccagcacttggactgtactggggcgagcttgggctgtagtctgggctcactccaa

SEQ ID NO: 48799 - DNA, 602 bp, Gossypium hirsutum
  Clone ID: LIB3828-014-Q1-N6-G6
aaatatgtaagtagtactttttttcctgataggccaacatgcaacatagatgcatcaaatcaaataaacaggtctcttcccctctttcccctctcaccaccccacattcttatcaccctttcaaacaaaagcatcccatcaaaaggtagggttgccagacacattattatataaaaaccccatactgaaaagaaagccaaaaaagatggaaataaaaaaataaaagaattattaggaaaaaggaaaaaggtcagtaagcttcaaatgactgttcttcccagcagccttcaaaaccacatttctgaccttttctttgtacttgggtagcatcggtgtatgaaaaaagagaaggatctgcttttctttttatatgttgtccaaatctttaattttcctttttcatctctgtttcccctgtctctaagcattcaatcaacttgaaatcatgtcaatgaagcaatcaataaaaacaacacacactcctctaattagcagtaacagtccactgctaaaatcttctaaggcatttttccagcagagagccgcttctcattagttacttggtcactattgctcacatttttattgaatgcgagcctttt

SEQ ID NO: 48800 - DNA, 452 bp, Gossypium hirsutum
  Clone ID: LIB3828-014-Q1-N6-H4
gggaaaaagaatatggggtggggccatttattcttaaaaaaaacccttttgggccaagggggttttaaagaaaaccctttgggaaaaaaaaaactttttatttgggtaaaaaaaaaagacgacaaccaacctttcccgggtttttaaactaaaaagggggtcaaccctctacttgggggggggggggtcacgggccaaaaccctttttatcccttgggtttttacaggttgaggcggggaaaatccgggggggccccggggggggccacactcagaaaaaggcccaccaaaacccgggggggaacactttccactttaaaatcccgacgggccggggtttagggggattttggggaccggggggatccgggggaccggggggatccgggggattaggggaatttgggggatttgggggaaccgggggatttgggggatttcgggaattctgg

SEQ ID NO: 48801 - DNA, 603 bp, Gossypium hirsutum
  unsure (1)..(603): unsure at all n locations
  Clone ID: LIB3828-015-Q1-K6-B2
ggcactagtatctcaaactcctgtttattatgtactggtggtgttttatggtataatgctggcgtaaatgtgtttaaatacatagccatagtctgaaactcctatgttgtatttgaatcttcccaatagcaactaagtaatctcataatttcattgttgaattaatttgcttcctcatgtttaaggttcaaacctaactcttgatgctatttatcttttgttacgaatactgtacaatggttctttttttttggggaaattgacagattaaagtgacatgcagccattttattgtcatttaatgctatcttagctatcatcctagattaaatcatgaacttcaatactcctgtgtacaggtgttctcttctcaacaaagaagcatccgcgcaccaaggatctctcgcctgaagatttttggtttagcgcaccaaagaaaggagttatggtctttgctttgcctgnggagcctggtctaactcagttggctggggacttcaaagttcattttcatgatcgccaaggagatttctactgttggttaaacacaacaacgatagaaaacagaaaagttctgaataccaaggagcttgattggtttga

SEQ ID NO: 48802 - DNA, 610 bp, Gossypium hirsutum
  unsure (1)..(610): unsure at all n locations
  Clone ID: LIB3828-015-Q1-K6-B6
caaacttaatttatcacatagtaaaatttaaaattgttaatatttaataaattgtataatatttttataacatatctaatattnagaaaataatgttacttcatattaaaattaatttaatattattaatatttaatataacctaaactgatatgtttctaaataatgttatataatattaatttaattaataatattaagttatttaattatattggatgattataaagttatcttatattaagtagtagttcttgatactatttttcattaataccatatggagatatcatctaaattatatgtactgtaatatcacagtgttaaagtatttcctgtgattatttcttttcaatatgcttatagattacctttttaattttgaggcatttaattttagttatatattttaaatatattattattttatttatatttaatttaataaattttgtttacaaattaattaatttcatttataatttttattttgaatatgttaatacattcatgtgaaagtgctagaagcaaaaacattatctttggaaacaatgaaagcaagaaattctagctcctaagaatctgggagtaatcttttctttctatccgg

SEQ ID NO: 48803 - DNA, 463 bp, Gossypium hirsutum
  unsure (1)..(463): unsure at all n locations
  Clone ID: LIB3828-015-Q1-K6-C4
natggaaccctatcggacaaaagtatctattcttgaagatactatagctcataaacaatattcaatctgtaatatcctaaaggaccttgaatctggtgttgccaccatatgtgattaatgcgtgtgcatgccagtatatatgaagccatttgtggatgcaaggaatgaagcaagcccctacgtaactccatcaacagttgtagattcctaaaggggggtggtcgttataaaaggtccactcttacggaccatgccatgctactatatagattaatgatcagggcacttaacaggatccgactgaccctagtgctacacacaagaccctatgggaaaaccatgctataacccaacaaaattcaaaatgatcagatgacgaattttccatggggaatgaagcataacatatcagaacaatacttgctagaatactgaatttcattccaaacttccagtggatata

SEQ ID NO: 48804 - DNA, 526 bp, Gossypium hirsutum
  Clone ID: LIB3828-015-Q1-K6-E3
aatgtagcaaatttggaggtagagttgcttcagctgttaggcgaagatatattcaagcaagttcaaagcgagaggctcaagcatgtgagagagcaaaggaaactgtcaaacaaggagttaatgaagcaaaggaggtgaacaagaaggcaaatagcaaagcgcaaagtgcatgggactccgcaaaagagactgctcaaaaggctaaagacaatatgtttggaaaagccgatgaatcgaaggaagttattaaacaaaatgcagaaaagattaagcaaagcatgaacaaaaaggactgattatttatttcattttaaaatcttaagccatagaacaaaataaataaatttgccctaaggtcaactacccacttcttatttggttccatcattcaaaactatttaccttttactagttttttaggctattttcatgggtagctaattgccatttattatgatatgtattactattttgattactaaatttttgggaatttaaagaatatatcaatatttgttggattctc

SEQ ID NO: 48805 - DNA, 567 bp, Gossypium hirsutum
  Clone ID: LIB3828-015-Q1-K6-G2
atcgacgatcgcgaccatcgcttttttctttgtgtttaataattctatctaattaaattcgacacagatgtctgtgaagcgtaaaccagtctatcgaagagaaaccatcattgttccagttggtctcaaacaccttttctttgttgaagaaatcccatcaaagttcatgggtaaaggtcaaaaccgtcatccatgagttccagttgcagttcactccttcaagtctagattttagaggcacaggagggaaagacccatgtaaggctagtgatggaacaggagagaaggtgaaagaagcagtgaaggacagcattgaaacaagtgaagcaatagctgaagaaactgcaaaaactgccgcagaagctgtccacaaaactgatgagaaggtgaaagagagtgcttcttctaaaccagacgattctcatgaggaactgtaaactatatatcccaacctatttagatgtgggtgttttttctagttctttttttggggtaagtttatttctgttatatgatttttgttgacatattaataatttatattatataagttttgatatgtttgta

SEQ ID NO: 48806 - DNA, 628 bp, Gossypium hirsutum
  Clone ID: LIB3828-015-Q1-K6-H1
ctcagctcgtaaaacatatgagacaccaaaggtggttggaagaattggagtggattttttcccgagtcatttggactgaggtcgattcttgtagtcgtaatattgggaggggctttacctgaacaccaccctagcttgaacaggattggtctcagcccataaaacggacctgagataaataaaagagaaatggtttaaagcaaaatttcctaatgtcccttctttcccacttcattcaaatcagtctgtgcttctatcatttataggtggctagtaatgaacttagaaaacaaccagtttatgtgacgggtttcgaaaaaaagtcataaaatttgcctgttcttttgatttttttcacatgttcttgaaaaggacacttcctccttaagaaatcatatcgaaataacaagacacgtgatcttgtttgtttgtttgacatcacttgttttgactcttagtttcacaagttatacaagaacaagtacactttttcctgtaagaatttgaaagttgcctcttggtctgttatttttgctgaatgaaagttgagcatattgatttcaactagttgtggtatttgcggtccatgtcagtttaggcatagattgcattgtttctgaattggttt

SEQ ID NO: 48807 - DNA, 549 bp, Gossypium hirsutum
  unsure (1)..(549): unsure at all n locations
  Clone ID: LIB3828-015-Q1-K6-H5
ggnattgttgtgaccagtagaatggtcatagcatggaacaatggggagatgcccttacatcatggggtgcttcctcctttcctatatggaaagggagtttacaaccattggctaatcaacgaggctttgtctagtggattaaggttcgtgtttgatgccagttggactatctcaaacattgccctgggggattcaagttatcagtctaactgtttcgttaagagttccaatgtttcggatattgaaaagggaagttgggagtatgattgcaattctcatcttgcagcagtgtatggattatcatctcttcacggatttaattattctgctgtgatgaaacttgttaaatgtgatggccgataccttcttattaatgccacagaagatttccttcatacatatgcctacaaaaggaagagcttatggaaaagacacatcccaaaatgccggagatcaaagacaactttggcttgtgttgttagaactataaagacgcagaacgaaacgtcaggttgctctctgaaagagggatcggttcacacaaaaaca

SEQ ID NO: 48808 - DNA, 610 bp, Gossypium hirsutum
  Clone ID: LIB3828-016-Q1-K6-A6
ctggtcctaagcagggcatgagttcggcaagaaaatgctgctaagagaaaggggatggtggagacaattctggttgcttctaaaacgtgcatggatgcaagcttctcgtgatggaccaacaaataaagttagagctagaatgtcaattgcatcagctataatatttggatctgttttctggagaatgggaagatctcaaacgtctatactagacagaatgggtttgcttcaggttactgcaataaacacagcaatggcagctcttacaaagactgtgggtgtatttcccaaggaacgtgcaattgtagacagggaacgtgctaagggatcttatgcattgggaccctatcttctttccaaattgatagctgagatacctgtgggagcagcatttcctctaatgtttggtgctgtgctctatcccatggctcgccttcatccaaccttttccagatttggaaagttctgtggaattgtgactgtggagtcttttgctgcatctgcaatgggtctgacagtagggtccatggtcccaaccactgaggcagcaatggccttgggaccctctcttatgacagtcttcattgtgtttggagggtattatgtaact

SEQ ID NO: 48809 - DNA, 436 bp, Gossypium hirsutum
  Clone ID: LIB3828-016-Q1-K6-B3
gtgtatttgtgaagcttacctttattgaaaatctctcgtgtatgtgggacagcgtctaccactgtaagctgtcgcaatatggcaatcttctgctatgctaacacatgctgagggtttgtaattggtttccactaacatcctgctgcaggattcagtggtgcacctgaacataacaatcattatgctctggactgaccatctatatcctcctgttaacaccacatgggatgaccgttcatggatgctgactcttggtgctcgactgatctttcagatacccaccaactgcagcttttgtttaccaagtcgtgcatatagatgttactcctgaacgacgcatctggttttacattctacaatatcggcctactccaatttatgatgtaccgtgaaataatgacgtgctatatcatacatgcgttttgtgatccaaata

SEQ ID NO: 48810 - DNA, 624 bp, Gossypium hirsutum
  Clone ID: LIB3828-016-Q1-K6-C6
ctacattgcaagattcattgagtttacttcctttaggcttatgggcatggttagaatttttctgtgcatggcttccatcaccatagaattcttccttccttctacaataaataccaccccctccttcatcctccaaagcatcatcccaatcaaaaatctgtgtttcaccagccgtcctttcaactgttttcttggccaagctttgtggccctattatcgcacatgaaataagtgattttctcccagtactctttcctaggtcaacttgatcatcaagctctgtcatcttatcatttacaaacctttccacaaaattaagtgcattagcttgtaataactccccaggttcttcagagtcaatatagcttaaacctgctgactgaccatcacttgcaggaaactgaagcaagtcatctcttgcatccgcattttcacttctgcaagaagacctttcggcaaaaagttttctcacagttgaaccaaccctgcaactggttccatgccttaaaccaattgagttctcttcacgattaaccagatgttgtgcctgattcatcttctccacaacattagggtttgaaccatcacttttaattgtgcactggtctgaaaactgacaaccag

SEQ ID NO: 48811 - DNA, 471 bp, Gossypium hirsutum
  Clone ID: LIB3828-016-Q1-K6-D4
cagattggtgcacctgcttatatcgaatgcagtgcaaagtcacagcggaacgtgaaatcggttttcgattcagccattaaaatcgttcttcaacctcctaaacagaagaaaaagaagaacaaaccatgctcgataatgtgagtagaaacagaaaatgtagaacccccttctttccctttgtttttttgcactcgaagaaattagaactaccccggattttgatctcccaaaccgacgcaacaaaggatcatcgcgaagcatcttatggttcagtagtatattatgttattgcaactcctttggcatctctaattgtttgaaatgaaatagatcgatgttagttaggaaactgctcggaaagtctttaattttatcgttttgtatcgatttatgttcgtgttttttgtttttctgttcttagtttcttgtaaatcgttcgttttggattgaaacgagtcctttcatccgcgt

SEQ ID NO: 48812 - DNA, 192 bp, Gossypium hirsutum
  Clone ID: LIB3828-016-Q1-K6-E6
tttgcatcctagtagacattcaaaaagggaccaaatacaggacagtttgaaagaactactcaaaataggagttgcctgttccagggaacaacctagagagcgaatgaaactgagtgatattatcaaagaattgcagttggtactaagacttcttattggatctgccattgaataagatgaaacagaattcgg

SEQ ID NO: 48813 - DNA, 351 bp, Gossypium hirsutum
  Clone ID: LIB3828-016-Q1-K6-F4
atctaacacatgcatggaacacaagatctacgactggagagtacctgcagtgcccttatagtgaacaccttctgggtggggcatgaacagagacatggctgtgaatagacatcatcaataagctggttcttttataaactattctgccctctttcgaccgttcaaattttaacgcgaatgaagtggaaccagtcatcatgcctcaaccttttgcaccatccaatccatattgcaccatactattacatgtgctgcaacaccctatgaactatgatgactctgacgtccaccatgatgtgcagcaaaatgatcagtggagctacatcgtcaatatatgataacaacattcaa

SEQ ID NO: 48814 - DNA, 297 bp, Gossypium hirsutum
  Clone ID: LIB3828-017-Q1-K6-B4
atctccctccacctccacttcactcagcccaagttgtacatcttgtaacgccccgatttttgggtttggaagtattgggccttgagtctagcatcgggtgagccctagttggtagacttggagctgggcgggatttagagtggccacgaggattaaatttttggtttttaaataagtttcaagtagcttccttttaaatttcgcatttattttatattatttctattttggttaaagttgtaataaggctgctctattatatttattttgggtttttaaattacttaaatcattttc

SEQ ID NO: 48815 - DNA, 497 bp, Gossypium hirsutum
  Clone ID: LIB3828-017-Q1-K6-B6
attctccaaaaagttccttataatagctttattaaagatgtcccttaaactatacgagattgtacttaattgtaatagctaccaggtagaacatttaccagcaattaagcgaggattatataagggagtatcctttgggaaactctctcctagggttaccaaaaaagggtaccccaaaaggttaacaaaaaatattgataaaaaaaaggaaattggcatggctttagaataaacaaatatggcttgccgtcgaaaactaatggctgcttcaaccttaccaaaaatataatcaacattaatgcttgagacaaacctgataaaccctatagtatatgcatcaccaatgacccacaacagatgccactctgaaatgccttagcaagtaagcgaaaaggagccactccataacttcttgttaaaacagtcttatcatatactctaaaactgaggcttctagcattttcagcaccagtaatgcttcttttttctcaaacctt

SEQ ID NO: 48816 - DNA, 524 bp, Gossypium hirsutum
  Clone ID: LIB3828-017-Q1-K6-C1
tgattttccgtttttatcctattgcttgttactctttttgatccaattttttaaacagtagtaaactgtttgataagcatgaaagtgaaactgttagcagatgattaattgggacgtggacgcgatgtcccccgcgcgtgaacagtaccccaacggtataaaaatttgaccgttgcccccaccccaacggtaaaaaaaaaactataaaacccaccaccccttttttttccacaaacaaatcctatctcgatttccttccaaaatcctctcaatttccttccaaaattctctaaaactctcaatttccttccaaaatcctctcattttccttcaaaaaatctctcaaatccatattaaatttcaattttccctcaatttcatttttttaaaaataattttaaattttttatatttcggccattgattcatcttgatagcaatcacatatcggtggagcaaatgaaaatgtctgaagatcgggtattggaatgcaatatccggaatatgcatgcttcttttatcac

SEQ ID NO: 48817 - DNA, 447 bp, Gossypium hirsutum
  Clone ID: LIB3828-017-Q1-K6-C4
gtattagcttttgatacgtaatgtgagctctgtaactctaccgtcctatatcctcccaggacgatattacacactataaaatgcatgggtgggaccgaaacgtgtggctacatgtactggctgcaggcgtggctgcgtctgggggagatgcgagagagtgtgcacacctgatacgccagccagatgcaccacaactgacacttttgctcttgcagttgcacactatactgcacactctggagaagctgacatcgaattacacgcctgccaacggctgacaagtgtgagagacaactgcacctgcgacccttgcgattgtgaatgatttgataccaaagccaatgctcgctgtaagcacaagcacctttgtctttaaaaaataatatgcaaagccgactatgtgatgatagaataaactagccatagcttgtctttggtcttgcctgt

SEQ ID NO: 48818 - DNA, 610 bp, Gossypium hirsutum
  Clone ID: LIB3828-017-Q1-K6-F1
aaaccctaacacatagcaaataataactagaaatagagcaaaaataaaaaataaaaatcgaagaaacatctctaattcctttctctacaattgtttctcttaatacccttttagtctcaaagacccaatttttaatcgctttgtgtttcatcgtctgagatttgtttttcaggtgacattataaatccgggttttggttcgatctactggtattggctagaagcatttccagcaaaatcttgaatgttcttcaccaaaagattttgaacttttccctgtttgtgagctgaagctaagtgttaaataatgagcacattttatatgtgcggtggttgtctctttggggtcaaaatgtttactgattggggcttttacttgctgacatacgctatatgcggaatttaaccggtcaatcttacatgacctgagaaaattgaaaaaaaacacgggttttagcatctctggcatatttctgggtggaagatatcgtctcttatgcaacgtcaggggggcaccattaattcgttccctgaaactgttaacgttgacatggggtctaatcctgataacactagtatttggtcaaccaaattctttgggtaacatgctg

SEQ ID NO: 48819 - DNA, 466 bp, Gossypium hirsutum
  Clone ID: LIB3828-017-Q1-K6-G2
ctgatggtgggggtagccacgtgcttcatgtgcctatggggctggtcttaccatgcattcgccaacacgtcatcatccataacatacatctcgataacatagtctccctcagcacaaggatgcgcgcgtatgcaaggactaggctaggaaccaccttgcgtagaggaccaggcgcgaccgagatcgcttttcccttcatcggagcagccaacgggtgtcaccaccatttatccggtgaccagtgctgcgacagtatcatgaacgctatctaaggagccaccggcatcaccatttgcaactgccacttgacatgaccacaacgacaatatgctgttgggagctacccacatactcgggcgttggaaaagattcagaaccacaagcttacacacgattaacaataaatgtgggactacgatgctctaggtccttcactgttaccagcgtgacttgaacaacagaaaca

SEQ ID NO: 48820 - DNA, 537 bp, Gossypium hirsutum
  Clone ID: LIB3828-017-Q1-K6-H3
caggctcggtaccgaagcaagatttacccgtgaacgtggaagctcggaccaaagttggagtaggtgtggcagggttgaagatcggcatggtcggggtgaccgttaagtgcgatggaatgtccaagaaacaacttgacggtggtgacatgcccaaatgcgtcatcaacatgttaaaatggtaacaatgcgtcaaacttgtcgttataatatgttactgtgttaggcttcgtttgcaggctggatgagaatctcttccccttgggtttattctgtcattttgtcttttaagtttcctttgattcgccaaggaaaaaaaaagatttcttttattcaattatttattctcaatgatgagcttcaatgtgtgatggaaatcgttgctttggctgcaggctcaacattcattgacacaaatcacatgcgtcaaagttttcaatcgtaagaaggatttgttcatttgatcaatcggggtgtaattcatgaatattttgtatcccacattggattgtattgtagcaattagttttgtctttcctt

SEQ ID NO: 48821 - DNA, 576 bp, Gossypium hirsutum
  Clone ID: LIB3828-017-Q1-K6-H4
gggttctacaggatgttggtagccaggataaggacaaaataaatgtatggagatcaagcacacaagataattacctgcacttaaagattgaaattgatattcgtggggggagttctgtggctgatgcatcagtctcaaccaaaaatttctctagtgagaagcggaataaggatgaaatcaaggagagcttgaactttacgatgtgtaaaaagcttgtgcagatgatgcaaggtaatgtctggatatcaacaaactctgtgggctttgcacagagtatgacacttcttctcaggtttcaaatccagtcatatgtccaaagaaccatgttcgcagctggaaactctgagcgatcaaattcctactccaggttccgaggtctacgagttctactagctgatgacgatgatataaacaggactgtgaccaagaagctgctagaaaagctgggttgtgaagtgacagctgtttcttctggctttgaatgcctcagtgcagtaagtcatgctgaaaattctttcaggattgttgttttggatcttcatatgccccgaaatggacggattcgaagtggcaatg

SEQ ID NO: 48822 - DNA, 624 bp, Gossypium hirsutum
  Clone ID: LIB3828-018-Q1-K6-A1
gtcttattcaagccttttttgccctccatgataaaaatacaaatggtgtaggggatgcagaaaacataattggaaagggtgttgatcttgctttagaacaatggtggcaattgcctgaaatgtcggtgcatgctagggttcctcttctgcagcagtttcagcaattagttgaagttcaagaatctgccggaattcttgtggacattgccaatgggagcaaactttctggcaattctgtggttggtgtgcatggaaatctttatgctgatctcaaggacattcttgagacttggagactaagaactccaaatgattgggataatatgtctgtctggtatgatttacttcagtggaggaatgaaatgtataatgctgttatagatgcattcaaagagtttagcacgacaaacccacaactgcatcatcttggtttccgcgataaggcatggaatgttaataagcttgctcgtattgctcgtaagcaaggcctttatgacgtatgtgtaacaatacttgaaaagatgtatggccattcaaccatggaagtccaggaggcctttgttaaaattacagaacaggcaaaggcataattttgaaatgaagggagaacttactagtggcctt

SEQ ID NO: 48823 - DNA, 636 bp, Gossypium hirsutum
  unsure (1)..(636): unsure at all n locations
  Clone ID: LIB3828-018-Q1-K6-B2
gcctgcccatggccatggacatcaacagacacaacaaccacatggacagagttcatctatgggtgcctgtgttgaggttgggaaatttgggcttgaggaagaggttgagaggctcaagagagacaaaaatgtccttatgcaggaacttgttaggttaaggcagcagcaacagactactgataaccagctgcagaacatggtgcaacgtcttcaggggatggagcagcggcagcagcagatgatgtcattcctggccaaggctgtgcagaaccccagcttttttgctcaatttgtgcatcagcaaaatgagagcaataggcgcataagtgaaaccaacaagaaaaggaggctaaagcaggatggcatcattggtgaagaccattcaactgcctctgatgggcagattgttaaatatcaacctttgatgaatgacgcaaaagcaatgctcatgcagatgatgaaaggggatgcttcacccagacgagactcctttaacaacagtaatgaacataccctgataggtgatggttcattgtcatctagtggattggatggtgggaacagttcaagccatgtatcangggtgactcttcaagaagtctcaccaaacttcagtatctcggggcattgcccctc

SEQ ID NO: 48824 - DNA, 120 bp, Gossypium hirsutum
  Clone ID: LIB3828-018-Q1-K6-B3
gaaaacccttagcggcgactactcggacttcataacacccgcagctgtgaactatggagggagtagaaactgtagtagcgacagccggcgtgcccaagaagagacattcaagaagtctag

SEQ ID NO: 48825 - DNA, 598 bp, Gossypium hirsutum
  unsure (1)..(598): unsure at all n locations
  Clone ID: LIB3828-018-Q1-K6-C2
cggccgcgtgggatttttcataacccatagcaaaaacatcccttcttttctctcttgncctgaaaaccatacatacaacgagcgaaacaacaaaaaaaaatggagtgaaccactcttcaatcttagctgttctatctctgactttttctgtttctcataaggtagcatttttggtggaaaccagaaaggcaaaaacaatgtctagttatcaaggtgtcatcgtttctgatccttggcttcaaagccagttcactcaagttgagctccgtacccttaaatccaagtttatcaacgtgaggactcaacatggtcgtgttactctcggtgatttgccgccagttttctccaagttgaaggcttttactgaaatgttcaatgaggatgagattaagactgttttgggagaatccaatagtgatatgggtgaagaaattgatttcgagggctttcttcgggcttatttaaatttgcaaactcatgcaatcgaaaaatcgggtggaacaaaatcttcgtttctcaaggcaaccacaaccacttttcatcatgctattaatgaatccgagaaggcttcttatgttgctcatattaataactacct

SEQ ID NO: 48826 - DNA, 560 bp, Gossypium hirsutum
  Clone ID: LIB3828-003-Q1-N6-A1
acattcaatcaaaccagttttactattacgcctcttttccattacattcaaccaaacagttgattggctgttacacctctattccgtgtacgacctctaatccaatccaatacacctctaatccaagacagagaaccaaacgtgctcttagctaaagaaggcattgatgttgatactaggaatagaaagttaatctaattaacagttccttttctgatgagaatgcgttgaaaatcttatgaactcctttgcttgggaagggattgaagatatatgggtttggagggggaatcttttagggaattttctatatgaggcacctattaactattacataaaggtacttttaaccgtaattatagacattatgagtcttgggagctatacaatatctaaaaaaaccttcaaaaggaaaaatttatccgcggaaaaccacttggaatttactgactactttcgctaatctccaacacagaaggattagaggacatatcttgtgtccaggtgtcccggagcaataaagtccctggctttttcgaatgagtttcagaggccggtgc

SEQ ID NO: 48827 - DNA, 508 bp, Gossypium hirsutum
  Clone ID: LIB3828-003-Q1-N6-A4
ggaaaaaaattctaaaatgggccatagccggaaggatccagccccccccccaggccccatatttttctagccctacccaatccccaaaacaaaacccttgaaggcaacttgcaattttaagggccgggcaaaaaaacctttcaggccaggggtttaaccccccgaaaaccctgtttagggccaattcaaaacaactttttgaacccgggggggaacccaacccctcccggggggttgggattaaaagaatcatccctcaaaagcccttcaacaatagaacccccccctttcaaagaccgaaagggaaaaccaacccccccaggaagggtcccttcattcttatcccaaaaggcaaaatactgaaaaacaagtcccaatttattcccgcggggcttttctcccccaaaggaaaaataaggggaaaaacaaaagccaccctctccccgggcccttaaggaaaaaagaccaactttcaaggctttatttataaaaaaagccaccccaaaaa

SEQ ID NO: 48828 - DNA, 552 bp, Gossypium hirsutum
  Clone ID: LIB3828-003-Q1-N6-C4
actacgcacaaacaacagattcagtgcaaaatttccattcgcggccaattgtgaatgtcaaaatattttattcatatgcatggcttaattctcaaacttattgagctcaaaaacaatacttggaatcaacaagaaaatggcagctctgaatcaatggcaactctcatcaaaccatgtatgtcatgcccacttgcaagatattcatgtgaggtacactcatatttgctgcaccaactcgacagtttctctgcaggaacgcatagaagtagtttatgacaagtttcttgagaaaaaggatgttctttttcgccctcacatctccatgtgccaagaaataagtaaatcctgaatctattgcttgtcgcagtgctgatagctcatattccaaacctaggtcttcatccgatgacatgacactagacggtaatgatgccggtgctttttttaatagacaactttattgcttcttctgatcttctctcacgtatcaatgggattttaagctccttgttaccaggaacatccctgtttctgtgatcctttgagctcaca

SEQ ID NO: 48829 - DNA, 206 bp, Gossypium hirsutum
  Clone ID: LIB3828-003-Q1-N6-E4
atcagcgagctcatcacaaggcaaataataatggcaataaaaccagcccaaactaaacagtggggggtgttttttttcgccgacccattaaccctttaaggaaaggatataaatgagctaaaacccaaaaagcaaagaaagctcctacgatgaacatataccattgtccggatcccaaaagtgttcttgcataagcaatggtagga

SEQ ID NO: 48830 - DNA, 196 bp, Gossypium hirsutum
  Clone ID: LIB3828-003-Q1-N6-E6
aatccacacaccgcgcccgacaggggattctttgccccacggggggccaagaacaaaaatgagaaggggcccaaggccccctctattttgccgggcaagccccaaattcgccaaacataccatagttgggggtggacgcgcggcgggctccacactggcggccaggctgaaccccaactccggtcccagggccccc

SEQ ID NO: 48831 - DNA, 584 bp, Gossypium hirsutum
  unsure (1)..(584): unsure at all n locations
  Clone ID: LIB3828-003-Q1-N6-F1
gngaagttgtaaaatcattatgataattatgtatataaactaggaaagatacattcagtatttatttgatgcatctttaattagttgacgtattatatgactcttatgctcttgtattccattgattggaatcaggctctcaacataaaaaaaaagagagagacgtactctcgatgatgatccaggtaagtattgattccaagcaccttaagttcttgggtggagggatcaaacaagactacttcataatttgtgtttaaaagaaacatttcaccatttttccaaaaccctaattgtctgacaactccaggaataggttcaatactgaattgtttagtccatacttctccattcataacccataaatcaaaagacgtgtcagttctttccactgtgtaagcaataacaccaagagatccattaaacaccaatacctcgaggatatcattttgtgggtaaaacccgacaaattctgggataagtgaaacccaaaacttctcattagccatgtcaaatgaaagaatcaatttttttttcataaggagtgttccctatagttgtttgccaaaaaaaatcgaagtaat

SEQ ID NO: 48832 - DNA, 434 bp, Gossypium hirsutum
  Clone ID: LIB3828-003-Q1-N6-F4
agcacataatcagtactaagttctaatttaaaccaaaagtataaagaatctaatattttcattataatataaaataaaagatgttgtaagacctaaccaaatctaaaacatgataaagagaacctgaaatgattcaaatacaaaataacccggaaccaaacatagttgaatacaaaatgcacggaacccaaaatgaccgcccaaccctggtaaagccagtccaattgccacccttagctcccactctgaagttggtatggaatttcaatctcgaccctaagttgagatcagaggataccctgggatacaacatacaaatgaaagaatcgaacgattaggagttgggacaaaatttacacatttacatccttttcatccttgaccgcatccagggacttcagttccgccaacaactgtccatactcgcgttgcac

SEQ ID NO: 48833 - DNA, 589 bp, Gossypium hirsutum
  Clone ID: LIB3828-003-Q1-N6-G4
gctatgccaaaaacaaacaatttccatacacatttcataccatcaatagaacaataatcggtattcactcaaacataatctaatcaatgctctattatccacccaaaagaagtggggaaaaaaaacattgtaaaagaataactacaaaaaatgatctccgagtagatggggtggatgacaatctacatcaactcaaaataaatcaattgcctgtggcgcatcagttggagaagattaatgtacagcaatctgaacaaaagaagagtaccttcacccttcactttcctcacaaaactttgaagctggtatcatatgctccgttctaccagctggtataatgaatcaacaacagcaacagatactgatatagttgttggaacagttatgcattcaactcccaaggcatagcttgccaaataacgacctctacacaaattcaaactcagaaaagttcctctgaattgaacttgttccatgcttccttgagtaagtcgaacaccttttctgaaatatatttctgctgaagattggcacctttttgctgaaccttatcaggatggatgcaaagagtagcctttctgtaagcctt

SEQ ID NO: 48834 - DNA, 136 bp, Gossypium hirsutum
  Clone ID: LIB3828-003-Q1-N6-G5
gaatacaaacactttattgggttatcaatatttaattaattgggtaacacaacaagaacaatacaaaattcaactgtggctttaaatacatacaaatggaacaacagttgcattaggaaactcaaattcaaaacca

SEQ ID NO: 48835 - DNA, 576 bp, Gossypium hirsutum
  Clone ID: LIB3828-004-Q1-N6-A3
aaagaaaacatattattccttgacacaaaattaaaacttaaattaccgacaagaagaaaaagaaaggaattatacccaacaacattaacaacagcatcggcttgattttcgtgattaaaaggccgagaagcgtggcctgatctgatctgtgtttgtactaaataccttaagattaatgcaagtcagcttgtgcacccaggtcggcactggccacattaacgtatcacagtactaaaaaccatgctccagttttatctgtgtatcagctgaactttctaaatcgtgggaagtctttttaattttatcgatgaaagagaaattgcgaaaaccggaaaacgatttcatcttccatgaaaaccactcttttatcgattagacaatccaaccatctagtttctatgcacgcgcctaaaaaggacaccattcgcatcgcacgtgctcctatcaggctttggtttttttggtacggtaaaaagtacacgtgtcaccccaagacccccccactgcaaaagtctagccgaattgtgtaggttgaaactgattccccttatattctccccctatccctcgctcttt

SEQ ID NO: 48836 - DNA, 401 bp, Gossypium hirsutum
  Clone ID: LIB3828-004-Q1-N6-D6
atctcggatttgtgcacaacaatattacatacaagcaaacgttatccgtaccaactgtactcctgtagaccggggcactagtatggagaacacaatctcaggacaggtgccctggacagcgacaacattctggaagcagaaaacggaacccttctattaatgtcgaaaacacgacatgtattgactccggactctacaacgccagggcatctgtagcaagaaactcggggtatagtgcttctaggaggatacaagcccctttaaggcaatggtccaccattgtgcgaaacgctgtccaggaccggaaccccagggcgttcccctacctcttatcacagcaccgacgtgggcatggaatggtccatgggcaaccagacccatgaataggtctcacattcccg

SEQ ID NO: 48837 - DNA, 541 bp, Gossypium hirsutum
  Clone ID: LIB3828-004-Q1-N6-E2
gaaagggggctcatgccctttatagcaaaactagttaaaatggtaacataaacaattatagacagattcttatacatcaaacgttttccaccaaacttacgaagattgttagccatagatcaatcccaaggtacaggtgacaaagccgagagtaacttcccaatcactttatgttctaatattttactccacgcctcgttgtaatattcctcattgctcacacaatccacaatcatctcatttttgtccacaatagaccatgacactctactggtgtcccctcctgatttttctttccttttggttgaatcttcaacctctatgccttccttatccgctgccaccggatcttcaaccttgatatattgatccttcgcttctaacgttatttttttaaattttcttaaaaattcatcggcctcctcttcaagttcgcgtgaataatcgaccttctcatcaagttggcgtggtgatggtgcaggaggaggaggaatttcatgacccatgagtattataataacaatgacaagattgaggaaaa

SEQ ID NO: 48838 - DNA, 504 bp, Gossypium hirsutum
  Clone ID: LIB3828-004-Q1-N6-F2
ataaaatcattaggggcactgcaaattcaacaatgccctgattcatttgcaactaacttctgctgtttaaacagggtacggattcaaaatttacattttacctggtcgctaggagagtgaatataaagagtattaatttcatattcttcaacttcggggcaaggggttcatcattgaacgtttgatgtacaacttgatcttcccattcaagcaaactgttatttgtcatcagttctgaaagagtttagtcttcttagtctctcatcaagctctttcattacttctggttcttgctttttcctttgctttgatattgggtttggcgccataaaaccgatcttatcaaacgcaactgtcaataactcatcaggatcaaaaaggggatgggtagttctttgtaatatattaataatggcgccaacctgatgcgttaaaagcaactcgtcttccttcatcataaatattgccaaagcagcatgaaaaagaacctttgccccctcgtaa

SEQ ID NO: 48839 - DNA, 392 bp, Gossypium hirsutum
  Clone ID: LIB3828-004-Q1-N6-G6
attatcttattaatgcgctcatttttttattatgcgacttaaggccggagaaagccctatgtctgccatgcgaatataagggcgaggaggtcacataacagggaaaataaatttactctacaaatccgaacaaattattttccctttaaaagaaacatgaaatttgaaagctccattcaaataaagaagaaaggagggacattactcaccgaatccttttaaatactggtcgagctcctttaacagcaagattgggcacatcttggtgactggtaatcacccaaaatcatggcttgttcggcagagaagcgaaagaaaccctaaagcaattgattgtaaaggctgaaatttcttttgatctaactggaggctgcgtttgaagaatgaaatct

SEQ ID NO: 48840 - DNA, 503 bp, Gossypium hirsutum
  Clone ID: LIB3828-005-Q1-N6-A4
aaaaaataaataaaatacagcaagtcctttactaacagcaggtccaaatacagcatctgggtcgcgaaccaaaacaacatcgaaaatcggaaattgggtctttaaccaaaaacaaattgaaaagtggaaaactgggatttatataaaccccagagggcaattcaaagatcaaagctttataaactccacggcggacaggacaagatgcaaaggaacctagattgccgcactaaaacacgactcaccagtggacctactttgaaacattgaagggaggtttacaagcaatgcttctaaaaaccgggggggcacataaattgcagataaacttcctttcctggccaacgaacttaatgaaaggataaatgtctcctttgcaaagggaacatcaaacagggccactttccccaaaatccacggccagattggaagggcaccttatctcacaaagactgcacctcccagggtctctaacaaagtaaacggggggagcaagctccaaa

SEQ ID NO: 48841 - DNA, 559 bp, Gossypium hirsutum
  Clone ID: LIB3828-005-Q1-N6-C4
agaaggaagaaaaaatggattttcattaaaagcattgtacaagaaatattttttttcctaccatttatgcatttcataaataatgcacatccaaacaacctaaggggactaactcgaaaatggaggacatcacatttctgtatcatatttaaccactaatgaaacagacgagggagttaaacacggaacctgtccttatgttgttgctttttaccacctcaggtaaatcatatgccctgaaatcgggtttttctagcaaggacttaccaggtgcatatcgaagatattcatcggttgaaagaaccgaaaaagggaagaataaagacaagagggagggggagggggttaccaagaacaggatgaacttggctttatcagagcactatggaaaacatggcagttccggctaattttaaatgctcaaatgcggagtggaccagttacaggagtactaccagaattggcatctttatgattaaaagagaggtttgcaaattgagaatcgagatctctactgctagagcgtcgatgggtagatgatagctgctgttggtgttgc

SEQ ID NO: 48842 - DNA, 562 bp, Gossypium hirsutum
  Clone ID: LIB3828-005-Q1-N6-D2
tttttttttttttttttttttttttttttttttttttttttttttttttttttttttttttttttttttttttttttttttttttttttttttttttttttttttttttttttggggcacgcggggggcaacccggaaatccgggacggggcccgggggggaaacaaattttcccaaaaggggggcgaaaaaaaacgggggaaaaaaaagggaaaagcgggtcccggggaaaaaaggtaaccccctaaaaattccaaaaaaaaaaaaaccgggaaaaaaaaagggaaaaaccgggggggccaaaggggggaacaaaccaaaataaatgggggggggcaaacggccccttttcaaagggaaaaaccgggcggcccacctgaaaaaaaaaaacccccaacccccggggaaagggggtttggaaatggggccccaggggggtttttttttcacccagggaaacgggaaaaagttaatggcccttaaccgccgggccctaaaaaaaaaaaaaaagcggcccaccctggtttcgcccaaaaagggaaaaaaaccggttgaagggggg

SEQ ID NO: 48843 - DNA, 182 bp, Gossypium hirsutum
  unsure (1)..(182): unsure at all n locations
  Clone ID: LIB3828-005-Q1-N6-E3
gctgacctctaacgccgctcgcgtaatcggnacggagcctttttttttgctactcgcgtcatcgcgtcatgcgatcgaagagcacacaaattcattcctggacgagttttaaaaaacaaccccaaattcaaattattaaggctacaaatgagacttattcaaccaaggggtctccaaatcaa

SEQ ID NO: 48844 - DNA, 395 bp, Gossypium hirsutum
  Clone ID: LIB3828-006-Q1-N6-A3
attgccaagcaggatatctaacatttttattgggggtgaaaatattaattcggaaggagccaaatttgaattgcaaaaaatcttgcacagagagttttttttcaacattcacttctacttatattgtggggggggggagcctcaaacaaacggagagaaacccgagttctttgtacccgggtcccctcctgggcataaatcaaagaaatcaatacgaaaacacaccggcaaacatgggaatagacgaagaacatgacataggtattaaagctttaggaacggatgcaggggtacgcttgattgatgcagatttgataagatgatggtaagttacttttttcttggagagctgggataaatgatgtttggagttcaaaatgccttaaagtgctgga

SEQ ID NO: 48845 - DNA, 589 bp, Gossypium hirsutum
  Clone ID: LIB3828-006-Q1-N6-A6
ggacaaaacgattttatttcatttctagttacatacatcacataaaattaattcaatcagccatagaatattacataaaattaattgtggaatttattttcttcggaaaaagaacagatattatctagtagtggccatgcttttttcttggtataattaaaagctatgcgtttagctctaaaagccaaaattagccattggcccaagacactgaaatgcaagaaacgtacctgcaactgcagccgacagccaatggcaagaaaagttgggtcactacggcctgcagagactgagccgaaggtccatcaaaagcaattgcaatgtacacgcaatgaacataacaaatctaaacacaaataccaacctattagattgttttgtcttgatattcattcaacatttatttgagcagttgatgcctccatcagcccattccggatctgctcaccaatatccctaacgtgaccaggtccatggggaataaacacggtagtgttctttgaggagttgccgaggtccttgatcgtgtcgaaatttgtgtgatcataataagatccatcacctccttggctgaggtgccttccacctt

SEQ ID NO: 48846 - DNA, 562 bp, Gossypium hirsutum
  Clone ID: LIB3828-006-Q1-N6-B5
acccttacaatttacacaaataatattatattgcatataatttgattgttcattcgtaaaacgaatggtagttaataaacaaatttagaataaaaaaaaacagaaatatgaatcaacatgcacaaaaatcaagttagtagggaaattgtcccccactgctaaaaaggaaaatgagaatcatccatccttttaaggttattgtaaaaaaccaatacttaatcctattgtttgtttgtttgtttttttgcttaaaaacattttcggtgcacaattgaagggccagactcgtcgtattcagctttggcaatccacatctgcagtcatggaaagaagtagggttctttattaaaaaatgttcgtaaaaacgtaatcgaggataaatgcatgaaaaacatacttgttggaaagtgctgagggatgccaatatggaacccccaatccatacactatacttcctttcaggtggagcaaccaccttaatcttcatgctactaggagctaaggcagtgatctctttgctcattctatcagctataccggcgaacatggtggtaccaccact

SEQ ID NO: 48847 - DNA, 578 bp, Gossypium hirsutum
  Clone ID: LIB3828-006-Q1-N6-F3
ccattctcttttgtttctccctctgttttcctcctttctctgtttcttttaacatagtttttctatattttccgtttgttaaaactagtctctatacttttattttgatattgggtatttcttgtacgttctgtttaatcttccttttgattaatttttaatatattttcaactgagggtaacaattttgtattgctcttcaatgaaaatccaaaacaaagatttttttaatctttttttgcttattgtaaacaattgtgaattgggtttttgatattttacacttattgttaatgctatacaaaggatccaaaaatggattattatggtgattttatagaattgtttggacctgatatttcaattaagattttcataatattggttaacccttctgatcccattagagttaacttgatttttagtttttggcaccaatttggtaaccaaattaatgtctttggtagaatttagcttggtgttctattatatattgaagaagagttgggattgattgatggaataagatcgattttattcatcttgcaatgatcaaaaataatctttgggtttacata

SEQ ID NO: 48848 - DNA, 297 bp, Gossypium hirsutum
  Clone ID: LIB3828-006-Q1-N6-F4
ccaaaaaaaaaagcacaaactgcattatgtccaaatacaaacaataaaatactaaagaaaaagaaacgcgaaaggctacaccataagcagttgatggaagccgaaaatcccaaatccaaatccgataagcttgcaggcacgacaatagagagaaaataagacacaacaaggacaagtagagagatgcgacagttccagcccaaggcatgcggtgaaattaaggcagatgagcattcgaccctttgtccgtagccatcgcaccttccacctgaacccacgcgtccgcccacgcgtccg

SEQ ID NO: 48849 - DNA, 342 bp, Gossypium hirsutum
  Clone ID: LIB3828-006-Q1-N6-G4
gtattcacagagatgtctcactcggagttgtatatgcgcacgccatacacaaggcaaataataatggcgataagaccagcccaaacgaaaacaatggtgggtgtttttcttcgtcgacccattaaccctttaaggaaaggatataaatgagctaaaacccaaaaagcaaataaagctcctccgatgaacatattccattgcccagtcccgaaaagtgttctcgcctaagcaattataacagcaatgatattgaccatggcgataacaataggtggaatcattaatgaagcccatttcactatgtataaatctgcatatatatcatcttcatactgacctgct

SEQ ID NO: 48850 - DNA, 370 bp, Gossypium hirsutum
  Clone ID: LIB3828-006-Q1-N6-G5
aaaaaccccccaaaaacccaaagggaatcactcttccatacaggacaaaaaaggggttaattggaaccacaaattcagctggggaacataaaactgaaagtctgaaacatgaagggatcaaagtacaaaacttcaactaattaagggaaccttaaagaggaaaaaataaccctaaaaaaatgaccaaaatataaacaaacttttggacccgatccccgctattcaaaaatagggaaaggaaaaaatttctggaaaaagaagcttttttaaaacacatgaaaaccccaccgggggggctgcagaaaaactttcccatccacttttttcgactcccaaagagaaaattcccgccaaaagtcccacaaaaaca

SEQ ID NO: 48851 - DNA, 470 bp, Gossypium hirsutum
  Clone ID: LIB3828-007-Q1-N6-A6
gaaaagatgaatcagccattcattcattggtaaagatcaaggacaaaaatgtcagacgttcatcttaaaatttattgaaatgctgatcctagttatagattttaaaagcaaaataagtgaccaatgcattatatcggagaaatcagctcgtcttccaccctaagttcatctgccaaaggcctcaaggatgcagaaagccatcctaggaaaaccatgagatcttgtacaatcttcttctgttactgcaaagatgataatgcagaggaaacatttcgcgagattcgatcgtgtattggctctcccatcggctgcatctcaaatcttgattttgttatagtctcgtataaaaagatgtatcgccaagcaagctcgcagacaagttcttcaggggcatcaggaagcaccttatcttcatagggattgcagttctctctaaaccataaccttaagaactccttatcaatatttta

SEQ ID NO: 48852 - DNA, 127 bp, Gossypium hirsutum
  Clone ID: LIB3828-007-Q1-N6-B12
aagtaaaagacaaaaaggccactgaaaatgcatatattcgatgcacacaagatgtgggtatgtgggtctcctaagatctgccggcaatttaggtctggggtaggagcaagggtgtatgggtaaaaca

SEQ ID NO: 48853 - DNA, 439 bp, Gossypium hirsutum
  unsure (1)..(439): unsure at all n locations
  Clone ID: LIB3828-007-Q1-N6-B5
tttttttcgaaaaatatataaactacaattgattaaattaaagtacaaagatcaaattcacaacttaagtagagtacaaagattaatagtagaattagcaccccnnaaaaagagtatgagatatttgggggttttaaggaactttagggggaaccaccaggtgggccaaagttaaaaaggggggccacgaatttttggggggggggggggggggccccttttttatattttttaaaaaaaaatttttttttttggggggggcnnnnnccccnttttttcccaccaacctcttttttttttcccccctttttttttttaagggaaggggggnnngggggggggggggggggggggataaaaaaaaatttttttggggggggggggggaaaaaaaaaaaaaccacccccccccccttttttttttttttttttttcctttt

SEQ ID NO: 48854 - DNA, 140 bp, Gossypium hirsutum
  Clone ID: LIB3828-007-Q1-N6-B7
gttataaaatgcatgtgtttgaacgttccctaacctacattcatcaaaattcatggtcccaaaaaatcggaaatcaccacagacagaacaagagattagaagtaaaaatgccatacgcaacataggataagggaaacata

SEQ ID NO: 48855 - DNA, 484 bp, Gossypium hirsutum
  Clone ID: LIB3828-007-Q1-N6-C10
aaagaaaaagaaaatcatctaattcatcaaatggtcaaattccaataagttcatggaactcccccatctttcaaaaacatttcaaatcccccccccccttttctcaactccatctataaaaataattgcaaattaaaaattaaggaaaagaataaaccccaggataacgaaatttaaaaaaatagcaaaaaaaaaaaagacacaaatttaggggcaaacattaattacttcccccaatcaaatgcgcactttatcattcttttacttacgctttctgcacactttaacactcccatccccacacacactctcctttcacttttccgattcactttgtcttttcctttcgttgttgatatcacgcacgctcaaggagtggtggagcgcggtgtggtccttgattctgtgggaggagtttgtccgtctgatcctttcgaaggatcatcagatgattgtcgtaatccgtcgtctgtttccactctat

SEQ ID NO: 48856 - DNA, 449 bp, Gossypium hirsutum
  Clone ID: LIB3828-007-Q1-N6-D2
aatacaaactgcctcatgcagttttttatttgaagaactttgtaacttccttttggaagttattccatatcaacgtccttatggacgttttattttttcttacaaattaatttatctacaaatatttaaatccgctaaattcaataaatctaaaaaatagattttcaaatctaaatctattttatccacctttactctaaatccgctgcaaatgataattaaaatattatctaaaacctcaatatccgaatccaagtccatactaccataacttgctttggctgcttccatcatcgctaattgaaagcaaaggacccatggcagaggggtagcatcctaactccgcttggggagtcttttacttcattagtagtacccatcataatgatcctcttaagcagttactgaagagctcatctcattgagaacgttgtagtacgtaaagaaat

SEQ ID NO: 48857 - DNA, 467 bp, Gossypium hirsutum
  Clone ID: LIB3828-007-Q1-N6-D4
gttaaattcataaaattgttgaattactcaaaaaaaagtaaataataataaataattattttgaacaatgttccaaaatctaaaatgaaaatataaaaaaggtgtaaaacccccatcaaaatcactggccttatactgatgacaaaaaccagctgatcactccttgttcttaggcttcttcacaatcattacagaacaatgagcatggggagcacagtaatcacttacgcttcccaaaacagcccttttcacaatgccataaccatggcttcctagtaccagaatagttgcatggtgcttgtcaacagcttcacataacacatcccttggatcaccttccattacttccacattcacttcattcactgattttttcttgcataattccttgactttctctgggatccttccggctgccttctttaaatcgatctccatcatgggtataatctccgcagttgctggac

SEQ ID NO: 48858 - DNA, 158 bp, Gossypium hirsutum
  Clone ID: LIB3828-007-Q1-N6-D5
aaaataaatgaattacgcctgacgcacaacattaagacgaacaaaaaccaaattttaacagtagaataagacagaagttgtaacgaaagatgaaacatactctttaaactatgaagaagttgaaataataaaaaagaattcaaaccgtaaatcaaatt

SEQ ID NO: 48859 - DNA, 307 bp, Gossypium hirsutum
  Clone ID: LIB3828-007-Q1-N6-D9
attaaaaaaatataaccttttttttttcaattgcaaagtatcacatggaattcaacttttttttatgaacggccaaatgaaggggggaacaaaaaaaagaagaaaagccggtaaaaatgggttgacccccgagtaatattttacatttattaatcccccattttttattcttcaacacttaatgctttcgtatattcttgcgggcttactgaaaatagggggcaaagaaagaaacaaggggggctccaaccaagggcccaaaaacaggcattgttgaaattgccaccctggagtccggacccgtggg

SEQ ID NO: 48860 - DNA, 491 bp, Gossypium hirsutum
  Clone ID: LIB3828-007-Q1-N6-E11
attaacaaagcaaagttgagccagtcagttcatattattattactaacaatgtatacttaggtcaatacataacaagcttgatataacaattcaggtattagatttatgtactgcacatgggtccctactaggctcgaaattgacaaaaaccgaacaagggcctacttcgtagcggataacattacctgcgcctgtgtagcctatgctctcatatggaataacagggccgaatgttgcctattacctccacaggaaccacacttttgagcattagggctagctgctgtctagtctagcttattgattgtgagtccagcaggaatagccgtgctatcagactctgtaagccttggctaagcgtttgtggctattgaaaagaaaacctccttcacattcaaatcggaatgccgcactagtggggaagaacttgatgccatactgatcatagagggcttgacccttggtaggcggcacagcccttgcagatcta

SEQ ID NO: 48861 - DNA, 486 bp, Gossypium hirsutum
  Clone ID: LIB3828-007-Q1-N6-E2
acgatcattatgtccttttcttagaactttaagtgttcaaatttgacaaggaaatttctttgtcataaaccagaaaagcagtggttgaattaaaaataagagcccttttctggttttacttcactataaaatggattaaaagaaaagagttgctaccaatgagaggaaatcaagaggctaaaaagttgctatggcatcgacactgtcaattttggctactttcactattatccgcatcacattcaacgacttcgtccccaaggaaataagagactatttgtggagtttcatccgccgtttctcatcggaattcaccttggttatcgaagaatcacatgatggatcaaggaaccatattttccaggctaccatggaataccttggcagccatgtactgtctgcttcagctgccgaaggttccccgaagcggctcaccgtaggcaagagcgagaaagtaaggaagttcacgttcggcctggataggca

SEQ ID NO: 48862 - DNA, 465 bp, Gossypium hirsutum
  Clone ID: LIB3828-007-Q1-N6-G10
agacaaagggggagacttatttattttagaagaagaaaaagaaatggttcttgaatcttcttcgcaaaacagaatcatactagctttcatgattcaccatacaaatccaaacccaattggccatgtttagtattaataaatggcctctggaatacttacattattacgaagccaaagggggggcgggttcaacttttttgtttaccactatgctggtcaactccctcagagcggttaccttttgatagtaaatcaggctgaggctgcggagttcggctcaattaacttgcttgctggggctttctcttggctttctacataagcagagggaaaccatccagccttgcccttgcactctccctccgaccatccactaggacccaccttaattttcgtattacattacaaccacatatgattatcatcacctaaaatattaacgttaaacatttaaccaggctagcc

SEQ ID NO: 48863 - DNA, 487 bp, Gossypium hirsutum
  Clone ID: LIB3828-007-Q1-N6-G8
aacaagaatagagtatttatcacataaaacaaaaatcaaataatagaattcaccatagggttcatcttcccgaggtatatagaaagctagttcataattgtgaataaaaaacatcttaatgaaaaaataaacacgggaaataaaaaaactcataaaaacttcaaaagaaattaaaaggaggtcttcaatcttaatagaaatctacttcagagttggctccaatggtgttcttcgagttgttttcttcaatattctctggtagctcccttttctctttttctatttggtatttatagactttagaattcctagaaagcctagaagctatgtttttccgcaggtttgggatgcaaattgcgaaatcaacacggtttggcaaatggttgtgtgccagcccgtgtggctcacacggccgagtgtccagcctgtgtgggaaggcctagcccatatggttcctgaagtctactctttttgtctgattttcgct

SEQ ID NO: 48864 - DNA, 432 bp, Gossypium hirsutum
  Clone ID: LIB3828-007-Q1-N6-G9
aggaaaaaggaagataacatttcaatccattttatgtttgaaaataatatttttgaaagctgaaaattctttttttttaaaataaaaagcaatttaaatgggatgcaatttaaaagaactttttatgaagcagggccatgacattgggaaatcatttttctagttccctagttcaatcggctcctcctatgcccccgaaagtcaccggtgtcgacatccgaaaccctcaatacatcgtttttttttttaaaaaaccaagcccaaagtgaaaccccagaatttatttcgacgggggggtccatttgactctccgagtttattacaacagcaatgcttgaaaacaagtcccgatcattgacaactggtgggggcgcttgctcctgatttcttcccaccgggttgcctcggaatattgcctcgaccatccttttt

SEQ ID NO: 48865 - DNA, 471 bp, Gossypium hirsutum
  Clone ID: LIB3828-007-Q1-N6-H3
gaacaaaaactgtgttctggtaatttagtaactttatattatatgttctcgacctgaactatgctagctacctcatacaacaaaatgtatgtatagcctcaacatcttatacattttccacacactacatgaaacagaaaatttgtaaaaagcctgtatctcataacaactgcaaaacaaagctgtacagtgtacatgcatgcatatatacatacatacatatatgcagcaagagcttccaagtactgatgattattctctagacctggactcctatccgttgagcaacctctttaaaggagtaaacatcagaaccccaaagccaagcatcacaaccggcatctctggcaccccatacatcattcctacggtcatcccctacatgaactgcttcctctggttttatgcccaacagctcacaagcttttacaaatattgttggatttggcttctctgcttctacttcagctg

SEQ ID NO: 48866 - DNA, 477 bp, Gossypium hirsutum
  Clone ID: LIB3828-007-Q1-N6-H7
catcacaatcaaattgaatctaataatcatatataatcagacatgccactgctaatctatttcattagaaacccatgcttaacatttctacctctataactacgtaccataaacgcaatttatggtattttaaatctctaccaaatgaccaaaacaatcttttcttaaaaaaaattatagagtaacgcacccaaaacattaaaaaaaataatgaatcaagagtcaggggtgggagaagcggcgagaaaaagaggaccggtgccggccccgccgtgagaatgttcaacgacaatgttatcggaaagctcgttgccgagcatttcccaaacaccactatggagataattcctgaagatcctatagggctcatatagtccaccttccattataatcacacttcttctgttggctattctcccaagcttctttacaatcgccactgtgcctgcccctgccagacgagctccccgttccgtt

SEQ ID NO: 48867 - DNA, 484 bp, Gossypium hirsutum
  Clone ID: LIB3828-008-Q1-N6-A2
gagaaggttccaaatttattataaaaactaaacttaattttacaactgaaatggatgatggatttttccccaatcgggcaaaccttgaagttgtaaagggactcaattgtctttccctttacccataatttccgtggccatgaataaattacacaacaccaactttttccgcccacaccaaaggccccccttctccttttgtcaatatacttttatttacatgacagctttaagacacatatctttaaataactatgaattaacagaatttcaaaataatattatatacaaccaatgaaattagaaagatatattccaataataataaaaaatgaagcagcagtttagttttcaagccaagagccagaaatccttgtggcgtttagtggtgatcaaataacctccaagctttttgcttttccttctgactgcaacagccatgcaggtagcattttggatacagtattccactactccacctgtc

SEQ ID NO: 48868 - DNA, 458 bp, Gossypium hirsutum
  Clone ID: LIB3828-008-Q1-N6-B3
aatattagccatgtaataatatattatcgagaaatctgaaaattttaaaaattaaaaattaacatgaacgaagtttaagactaacgttaacctcactagtaattcgactctttttatatttcatcaggaaaaagctcttctttaagtgaaggagcaatccactgtatctgaatgtatgtaatatcccatagatcatcttcttccttacgtaccaaaatcccagtttcctgcatcttcgttatcatcttcctcaacaactccggaaccacttcgtgcaatttcgtttccccatattctcccaaatcagctttcatgcacgtatccatccttctcaatacccctaaccaaaacgtcctaaaccctggattctccattatctgattcaagtattgtaaatacacatccgtcagcagctccattgacagctttaaagtcccctccatgcttcttgtttccct

SEQ ID NO: 48869 - DNA, 476 bp, Gossypium hirsutum
  Clone ID: LIB3828-008-Q1-N6-B5
gcctacggaaaaatattactactaatgttaatgacatcaaaagccaaatcacttggtaaagttacagcaccagatgaaactatatatgcgaagaagcagtattacatgcactaaatagcaaatgacatactgagattggcataaaatacctacataatctacaaaaagaaaaaacaaattgcatttaaagacaacatgaatcatttttatacatgtacagggaaggaaaagtagtgtgattgcctgagctaactttggatgtaaggaattagctgaagaaaatgtgccaattcaccttaacttgagtttgcaaagctatggctcttcagattcttgttttctccatattgatctattagtatgggcgccactttcatatccactactgtcacctgattcatttacaggtttatctgtcactctatccttcacgccatctcgtagtgaccgcatgttttcccttccagctctgccgt

SEQ ID NO: 48870 - DNA, 471 bp, Gossypium hirsutum
  Clone ID: LIB3828-008-Q1-N6-D1
ataaagtagagtcatttaaagctttcaagtatcaagcaaacaatttctgttttacagtccaaaaccaaagccaaattctagttcaccaaaaggcttttccaggagctccacactattttgatgacaacaggctgaccaaatttataaaaaaatgcgttacatcaacatgattcctcaaggaagcatgaatttgagtctcatctgatactaccaagatagttacgaagcaagtagaaattgagtctcatctaagactgcatagattttcatcatattacataaattaagaagtaaactgaatttcctcaaatgcactgcatcaaatctatatgctaagctgtagaagtcagcatgatgtagttatggtcccattgacatattctgctcatgtctcccttcagaaaagcttcaacatataaacatataggcatcaaaatgacaatgtagaacgttaattctattgataagctt

SEQ ID NO: 48871 - DNA, 470 bp, Gossypium hirsutum
  Clone ID: LIB3828-008-Q1-N6-D5
aagacttaaaaggatgccaatttataaaatctgaaaaaatggggttctaaaaatttgaccagataagaaaccaaaaaaaaaaaaaaaaagttctaaagagcctggtagcctggaacaatgtcaacaactcggtcttaaaaaaattttgatttgttgctaaagctaaatctacaattccaagactcaagcaccattgaaaactagcattgtcctttttcaggatctgcaaagagttggatggagagacagatattcttaccacctattatttgggggcttaactctataaatacgaacaatccagttcgatgtcgtaaatgcctcttccaagtgctcgagtttaacatctttatttccaatttcgacgcctcgtgcacgatcatagccgggcggttttccatattccgtcagcatctctccaaaccgatagtagcatagcttgtacatgaggcaattcaacattttaggag

SEQ ID NO: 48872 - DNA, 442 bp, Gossypium hirsutum
  Clone ID: LIB3828-008-Q1-N6-E7
agaaaagaagtaataatattaactttgcccactaacaggaacaataaattggctgccatttgaaggcagctcccccaataactaaaaaacacaagaaccaatctaaagcctaccttggggccatttttatgggacttttttccccaccagcccctttttacgggctttttcaccttaaaaggcttttattttttactatcaaaccatgtttacatggccatataacaaaaaagggattttcacaaacaggtaattctcatttagaataaaggggcaaaagagggtgcctgagacttacgggccggtgaaacaggctcaaatcgagggggggtggccaacgaaaggactttcctttggggcccatggcgagtaggaaaaactgagtcttggatcaattttgaagttttatggtctggctggatgcatgaaaagggggagccct

SEQ ID NO: 48873 - DNA, 485 bp, Gossypium hirsutum
  Clone ID: LIB3828-008-Q1-N6-F11
caatccaatacaccagttcaatttcaacaacacttgaaaaatgttcaaacagtaactggacatataagcaactgatctgcaattaccagatcatatttgatgttacattttccggtatagcaaaaacaagattcaatgagattaaagaacataagcatccagttacacctaaagtagttaaaagacattaaccaaacttgtcctgttttagaaccactgtcctgaaaaagcattatcatcatcatgtaaagtacacatataaaatgtaagaaacaaaaaccgacggcattaaacttaataatcttgctactcaaaatgctagaacgaaaaataatgtggtggcagtgctgcaggatctagctccaaacatcctcttaggctgccctttctctcatgagttagctggaaatacggaatctgatgagagaaccgaatctgatccacccgagggatttcgattgtaacatttgatcctccttttactc

SEQ ID NO: 48874 - DNA, 248 bp, Gossypium hirsutum
  Clone ID: LIB3828-008-Q1-N6-F7
aatacaggataaagcccatttttctacctcataataggaatcaaaccttcaatctataaaacgtattctaacacaagcaagatgaatggatcttgttggtcataaatattaggttttggcacttggaggttcagctatctcagactaggggttaattttcttgagcctgcattgggagagacttgtctttattaggggggtaattgttggatgctagattgattaacgaaacggggaattatagcaac

SEQ ID NO: 48875 - DNA, 370 bp, Gossypium hirsutum
  Clone ID: LIB3828-008-Q1-N6-G6
aattaaaagggggaaagggtaattaattagggaaggggaaaaaaaaagaaaaatggaaaaagaaaaaaaaagaaagaggggaaaaggaaaaaggggaacgccaggcaaagggtaaaggaaggcgccaagcgaaaggggaagggcgggaccgggggcgagttttaaaaactgaacaggaaaaagggtacggaaacaaaaaacaggaccaaaaccaaaaccttggacggggaaaaaaataaaaacatttaaaaaaaaaaaacaaaacccgagagcgataaaaaaaaaaaaaagcccgggcccggcagggaaaccagaaaccggtacggggagggggactagattcaggattagggataggaatagaaatggg

SEQ ID NO: 48876 - DNA, 423 bp, Gossypium hirsutum
  Clone ID: LIB3828-008-Q1-N6-H1
ggccctgggtttcccgggaatccggccggccctgtggcttcccaggcccccgggggggaccgggaaaaacggggcggggcccggaggggcaaccactttccccgaaggaagggggaataagggcggggggaaaaaaaggaaaaaggcgggacgggggaaaaaaaaaacccggggaaaaaaacgaaaaaaaaaacgacccgaaagcaaaaagggaaaacccgggggggccaaagggggaaaccaccccacacaaaggggggaaggaaaacggcccccttcgaagggggaaaacctggcggcccagccgcaaaaaagaatcccccaccccccgggaaaagggggacagctaatgggcccccagggggggttccttttcaaccggggaaaaggggaacacgggggggcccccaaccgggggaaaaa

SEQ ID NO: 48877 - DNA, 487 bp, Gossypium hirsutum
  Clone ID: LIB3828-008-Q1-N6-H5
gaaaaaaattaaatgaaattaatcaaaaaccaacttaagttacgaggatatcgatttgaccgattatctatctttttgctcaattgtttaggtaccccgtaagttgttctgtcttcaaagagcataatgactagataatccaatgtgttacataaggtaaattttgtataattgtttggttttcacaaaattccatttcctctatgcaaaaacctaatatcggatcagatgagacgattgaagaacaccatgtgttgatggcatattgaaaaagtgactaaagccctaacgttcttctctctttaactttcgttgtcaactcttcctctgatggaatttttccaccagtccttgtggttgcgagcaaccatgccgtaagctcatcctcgagaaagtcgtggttggagatgtattggctatcgaccgagcatttcatcccccctacattaacaacaatggacctgttggaactttgttgtgcaccctg

SEQ ID NO: 48878 - DNA, 490 bp, Gossypium hirsutum
  Clone ID: LIB3828-009-Q1-N6-A4
ggaagaggattttggtatgccattttaataataatagtaataatgtattcaatcatgggggccaatttgacatttttggcaggtcgcacattttaggcaacaaaacagcgagtgagagagagaaagataataacaaatgactggactaccaaaaataaacaactaactacaaacattagtttccctcgcagggcagcaatggcgtctccatcatcgagatatcatcatcatcaagtgaatgccctattttctgccaaaacccaagttgccctctactactcccagcttttgttccaacactatctctaaaaccaaacaccctaaaagtctaccttttcagggcagtccgatgctctatgcccagatctcccacagttgaaacatgaacctccgaagtttctgtcacgggcgggtgacctagttgatctgctgccactaccaattagccagtcatccctactgcttttcgaagcccgggaccagctactta

SEQ ID NO: 48879 - DNA, 158 bp, Gossypium hirsutum
  Clone ID: LIB3828-009-Q1-N6-A5
agataatcatttgatttatagttcccattaaacaaagatcacagcagtcaccttcaatgcgttactacatatatactttccacaaaatgctggattttttatcttatgtgaaaagagtgagacactgtgtccacactcctaagcagtactctgctgag

SEQ ID NO: 48880 - DNA, 493 bp, Gossypium hirsutum
  Clone ID: LIB3828-009-Q1-N6-A7
agaatcaatctctctttcatatatcagaagattatatatgtaaccatataacttacagaacatatacatttctcgttaccacaaaccactttcaaatatagtaaaaaacaaattaaattacaaaaagagaaaggaacacaagtcatttctgctgacaagaaaacacgctaattcctttcaggacattcatattgaactagggaaattcaagcccattttccctgtttatgagttagtgaatgaccacacgttcatgattgaaccgagatgttagcgttactctgctgctccgtgagtttagccggcgaggatttcgtcgcatcttttacctgctttgctctatctttcaacttgccacctctctccccactcacctgacccttgtttttctcctcgtttacagtagtggaccgttccctaaggttaccaaagctgtggcggtgagcccggcagcaactttttgccttttcatcctcggttgagtggactacgt

SEQ ID NO: 48881 - DNA, 408 bp, Gossypium hirsutum
  Clone ID: LIB3828-009-Q1-N6-B11
gggttaaaaaaaaacccttggcttcttctttttttatttcttattataaaaaaccccccaaattaaaccgggttaaacctattttttagggggcaattggcccctggttcccccaacccccctagggggaatcgggaaggcccggcccaaaacatcattgggaattgcggggggggccgcaaaaagggggggagcaagggaccgggtccccgaaaacgggctttcgaacccgggaatagcaaaggcccgggtcttcccaagggtctttgggaaaggccccaaccctttagggaacccaaaaatttcccccttcttgaacccccttgatatcaacccatgggggggggggaaaaaccccacccctaattctccttccaacccaaaggcaatctctgaggcccggggggg

SEQ ID NO: 48882 - DNA, 419 bp, Gossypium hirsutum
  Clone ID: LIB3828-009-Q1-N6-C12
agattacatgcccagcgccttttctgaaaaaccaaggcacacctgataatgccagaaagagtttttgcgtacccaagcactgcaggatccaaagttccgaccatgttaggtctctagcaaccttaagacgctctacatcctcaataagctatgggctgcattatgagaatcaacctgtcacttgccgaacatttggcacatacagcgacgctcccactagcagaaacaccgaattaatccaccaatatggcatcgccacaaaaggattccccaccaaagccatactagcttgcaataacactaatcataccgctcatcatacccttcgaccttcttatcatcaaaattcgtaccaaccatgtcctcaccaagcccacaaatcactgactcaaagacttccgggtcactataatgagaga

SEQ ID NO: 48883 - DNA, 473 bp, Gossypium hirsutum
  Clone ID: LIB3828-009-Q1-N6-D2
aaccaacataagcactaatatccattgaaaaggccggacttttcaatcatttaaagccgtggaggttccaaagaatccttacccaaaaaaaaagattaatggcaagatgtaaatagggcccaaaatttcggtcacctctccataaataaacaaccgcagcttatttttaaaaaaaacttctgcctcattacgtatactcggatgctcttatgctcaagtttaggcagaatttagggcatcaagcctatgcctagctttcccaatgatggataactggataccctcacccttaggaagggacacccatggctttggaccttttccgatggcgaacactttgccaagaccagttgcaaactcttgcccagcaccatgttggacatggattgcctaaaagctgcccttatgctaccccctattcttaaccacttcaactccccctttgcttctgccttcagagaccatgacaacat

SEQ ID NO: 48884 - DNA, 429 bp, Gossypium hirsutum
  Clone ID: LIB3828-009-Q1-N6-E4
ggattcaaacaaaactaactttatcgatttacagaagcaaatcatgaacgaagagcaacaaagttttggtttacataagggaggggggaaccatcatcagccaaatagcattaaacaagggcagggacaatctaaatgggctatcatccccacatccttaggggctgggcttttccttccgaccggaggcccttccataactaattctggaggcaaaaattttttcagggaaaacagaaacgggacttgaaggaacactttgaaattcggtagcggggtcccccaaaaaaactatgggggaccggcttattattctcatctaggggcccaaaaaagcattcctctatttcatcaaaggacggaacttcattttcgtctccgctggagctattgaaaagggcattatcgaattctgaggggggccctttc

SEQ ID NO: 48885 - DNA, 474 bp, Gossypium hirsutum
  Clone ID: LIB3828-009-Q1-N6-G3
aaaaaaaaaaagcagaaacttttatttccaaggcaacgtttttccgactattttacaaaaaaaaaaaagaagaagatggacaccatatctggaaactgttataatttaaatccaaccaacacaagcccactgtagccgtaacgagtaggggaattatgtacgtttaaaagaatcaccagatccaaaaaggtttggatataagtaatcatcattcatagacggcaatctctgcggcagttgttgatgctgctcttgttcaagtgcatcgtctctggaaaccggtgaatccaaaccttctttagatttgctcactgaaggaacatctgctgcctcaaatcccttgttctcctgatcctgacgtaccgtgttggagtccaaagaatacgaagcatcaatgggataggtaaaagagtgtagatgatcaaaactcgggttttccatactagctggttgatgagggatatttgtatgaaa

SEQ ID NO: 48886 - DNA, 432 bp, Gossypium hirsutum
  Clone ID: LIB3828-009-Q1-N6-G7
aaaaaaaaaagcgctaaccaaactttaaacattcttaatttaggggcgacaatttacaaaaaccccagaccataggggcccccggcccctttcattttaccaaacccccacttttttggctacttctcagaaaccctaaaaaaaaagcccttttaaaagttctaacccataaacgggaaaaaaaaatttcacttttaggggttttttttttaaccccgagtttcgtttttttttcaaaacccctactggagctgggggccctgttaatctttgggggcgctttttccatgggtccaaaaccgagtttttaaacctggggggaaaaacctgactcccccctttttttgatcgaaccaccggggaccctatatcctaaaattcccccaaccctttttccacaacgttaaccgagtagtctttaaccctttccat

SEQ ID NO: 48887 - DNA, 465 bp, Gossypium hirsutum
  Clone ID: LIB3828-009-Q1-N6-G9
ttttttttttttttttttttttttttttttttttttttttttttttgggttttttttttttttttttttttttttttggggcagaagaagaataaaaaaacccgtttttggggggggagtaaacaagaaacagtcgaatggggcaaaaaatagacctaaaataaaggtctaaaaccggactcctattttaaaatgggaacccatagtccgaacattattggaaaaaaaaagtctgaaataaaccctattggtgaaaccggccaaaaaacgtcccatgaaaggggattccaaatccccccccggggggggcccaagttttagttggctccctaaaccccctgaagggtctcctaaaagacaaagggtttgcagggttaaaagtataaaccccccctgctttgacttttccgcaaatcttgcacccccaaaaaccgaagggttttttttttaccgattactttccgg

SEQ ID NO: 48888 - DNA, 447 bp, Gossypium hirsutum
  Clone ID: LIB3828-010-Q1-N6-A11
caaagaaaagggggggtcagctaaaacgagggaaagaaaaaggaatgccactgaaaaaaacaaaagggggacactaagggggggtctgtggggcttaaaaaagggcttaagggcccccaaccttaggggcggaaaaaaggggttgaggagcccaaaaaaccattagataacaaacgcacttgctttcgaaaaaccgcgcatacaggataagcccaacccccgcctaattcggaaaagggtttttcaccaaaactcttccaacattgaaaacatggcaagggggggctttactccccggagaggggacaacctacttacaccggttataaacacggccaaaagggtaaaacgcccacttaaaaagacccgccctgataaccttttttttggggcaccacttcccgagcctctcccacgattcttaaatgaaaccaaagccataaaatt

SEQ ID NO: 48889 - DNA, 392 bp, Gossypium hirsutum
  Clone ID: LIB3828-010-Q1-N6-A5
gggaaccggaagaggacttatttttctggggggggaaagaaaaaaaaccggaaagggggggttaaaaaacccttatggaaccaccatggggggggccttaaaaatggggggtggggaatgggccccaaaaccccgggaacgggaaggggtcgggccgggggaaaagtggcaggaaaaaaacttccggggggtaaaaaaaaacccccggaaaattggacccattaccggataaaacccccggggggggccataactaaaaaacgattggggggcacaaacttttagttggcaacaggggaaaaatttccaaaaatcccaatgggtggatttttgaaacaaagagggtttacttttaaaggcaaacgatcttaaggattaaaaaattccggggg

SEQ ID NO: 48890 - DNA, 441 bp, Gossypium hirsutum
  Clone ID: LIB3828-010-Q1-N6-A6
ggcaccaatccattccttttttttattcgaaaagaaattatgcaaatctcaacataattaaaaagacagcattgggggggatttcaaaactgggaaaggggcccctacatatcggttttagaacataaaggagccagcaacggggggtggtccaactccaacaatagccgagagctcaagagcagccccggtggggggactaggagccctggcctgagaagggggggggctagcatctccaggggaacctggggggctgccaccgggtgcgggggcgggggccccaacagcgggggaaaccaaggcaaagggggccatggggaccaaagcaagaacaacaattgggggggccattgggtttattaaaaaggaaaagatggggggacggaaaaatgcagttgatctctaaggctggggtattaaacaatagaaaagcccccg

SEQ ID NO: 48891 - DNA, 467 bp, Gossypium hirsutum
  Clone ID: LIB3828-010-Q1-N6-D1
acaaaggaaaaattatttactaattcagaaagtatacaatatcaaaattaatgtttttcaataatatgcagaccaaaatcaaccaatttttttttatatatataaatatactcaatgactcaagtttgacttccgcaagaccacaaagtagatactacaacgtaacatgcttttattttccgatctaaaaatggaccaaaaatcagatatgtcaaatcttaaccattgaacctttagctggataagtctccggggccattgatctccttgttttcgattacaattccgtccggaatctccaacttttctcctggttttgcagcaattttcacttttcccttgagaaccataccagcaccaaaccaaacatcaccagtcacggtaaggctatcaagattaatgatgcttgggattgtcttgaaccgacttaagaagttgctaaccttcttgaattcaggccccaattc

SEQ ID NO: 48892 - DNA, 156 bp, Gossypium hirsutum
  Clone ID: LIB3828-010-Q1-N6-D5
gggaaaggattgttttatatatacgtgcaataattacataatttataagaggccctcgcaatcaaattaatttatgggaggttatcaaccatatattcattacattgaattcatattcatggccacttttcattgaataaggggaaggcttgcgcc

SEQ ID NO: 48893 - DNA, 502 bp, Gossypium hirsutum
  Clone ID: LIB3828-010-Q1-N6-D8
aaaatcaaaaatttataaatgaacccttatactttttgaagctcatacctagttccattataccaccactttatgttgctacaaaacctaagagcatgctgattcactaaccctaaaaatgaaggaattgcagaacatacaacaagctttaaagccctccatactaaggctacacttatgatgcacaaactgaagaatggctcactattatcgcctccatactatttattatgactagcaaaacagactctgctaacgccaggggcaaaagctatccaaccggccacgacgagatacatcgtacaacttaaccctatctctgacggtgttcgagccaccaaccaccttagttacaatatcagataaatggccatgcccccatcagttagaaaccaagtcggctttcttgtgtatacatcactgaggctgagctcgactgccctgtgcaccgtcgtacccaccaccatacccagcttgttcaccataaagaccatgtgcctga

SEQ ID NO: 48894 - DNA, 490 bp, Gossypium hirsutum
  Clone ID: LIB3828-010-Q1-N6-D9
cagttaaaaagatatattaaatttcttttaaacttttttctgcatattcggatggtcatatctatttatgtatctaatgactaacaaatacaaatataaacttaaatacttcaaaaagaaagtcagactacatactgcaatttatacttgggaggatcctttctttcctattccccacccacctagcataggacaatgaagatcattcaaacacctaacaagttacaccacgctacgcgttgccttctctcatccgtacaaactggatgaaaaataaatttttttaaaagaatggagcaaaattttttgtattagaaaccaaaaggtgacttccttctgctaccaccttctccatactgctcgttccatttcctcagctcattcatgcttgcagcatcataagcaacggatgaacccaccttggcttttgattgaataaagtcatccaaattaagaggccttagtacaccagctgcatcatttttgccac

SEQ ID NO: 48895 - DNA, 472 bp, Gossypium hirsutum
  unsure (1)..(472): unsure at all n locations
  Clone ID: LIB3828-010-Q1-N6-E10
tttttttttttttttttttttttttttttttttttttttttttttttttttttttttttttttttttttttttttttttttttttttgggaaaaggggggtcattttttaaaaaacccaaattttttaattacagcaaaaaaaatatttggttatccccccaaaatttttttttttattattctaaaaaaaagtatttttaaaccccaaaaaggggttggggttttcccccaaagaaaaaaataccacccccggaagagcccaaagggggcccggaaaaaaaccaaaaacccttaggggggacaagaaaaccccctctccgaaaaagaaaaaaagaagtttggggcggaaacccctttaaacttagggccgggaggggaaataggggggtggaagggaaagacccctcccttggcaaaacnananaggnaaaaaaagaaagaacgtcgcgaagaagaaagggggannncaag

SEQ ID NO: 48896 - DNA, 482 bp, Gossypium hirsutum
  Clone ID: LIB3828-010-Q1-N6-F12
actatgaaaatgtatttcaatgtataaactataaattttctgtacacaactctctgaatcaaacaagttatagaaataaatggagcaaaagaaagggcatgaaatgaaggggaataaaaagccccactgctccaatatggtattgcaaaacttgcctcatttcaagcatatacagttttaagccttcggattttgttcccagaaagaatggttgacagagactgcaatccaccatcttctcatactccataatctatctctgttacattctgggccgttgagagctttacaggcctttcttcttcatcatatatatcaaggttttcacaaggcgcggggaagatggtccctattacacgcccttgaacaaacgcgcactggaatatatgctttttcttatatgttatccccacgttcatatccctgaacgtcacgtttctgacaggaatctcctcgctaccatgtatacgaacaggtacacg

SEQ ID NO: 48897 - DNA, 203 bp, Gossypium hirsutum
  Clone ID: LIB3828-010-Q1-N6-F3
cccgaagaaacataaaatcaaacaacataaaatattatgagtttatgattacatatgtctgctagtttcctttgcttcttcctcctcctgttgatcttctttctgcttagttctcacatacatatctatatatataaactgtcccttacatttagctatgatcaaacagtgggtgcctcagttctcacttcgtaaacaatggg

SEQ ID NO: 48898 - DNA, 492 bp, Gossypium hirsutum
  Clone ID: LIB3828-010-Q1-N6-F4
aaacagaaatagaaccttctcatataccaattacagctttgtatcatgatgttacctccctattcaattcaaaatttaatatacaggcgacattatcaaaaaaaaagaaggaaaaattggcaaaatcccacctaatctagttgacctcttcaattcctatagagtttcttatgagaataataagcgttccaaagaacaacaacactatcagaaatggaggggggaaaagggcaaaacaagtcagcaacaaacatattttcccctccagacattaatatgtctgagacgcctttaatatatacattcaaagagtaagccagagtttcggtgttttaccttccaaaaaagttcctcaaatggatttttagagattgctgtcctcttaagatttttaagagttcagtaattagttttccaattttcctgtgcgagttgaggctgctgataagtgccaggtggtggacctacagatccgacagctgcagctgtgga

SEQ ID NO: 48899 - DNA, 422 bp, Gossypium hirsutum
  Clone ID: LIB3828-010-Q1-N6-G10
ggaaggggacccaaagatcttctatatttggggcaacgtatgtcaaatgggaaaattctttatcgcaaatttttaaagccttcaacccaacttgaaaagacaaactgatagttgattttggtttttgaagaagtaaaaaattccgggggattccattaaaaaaatctggggcaaaacccaaaagggaaccctttatttatctattccaggcccccaaaattcagggggaaaagctttaaaagagccccgcccacaaaaaagtggggggaaaccacacaaatttcacaaagcttaattatatccccgatcttaacagctaagggtgaaaaaccggttccttttaccccatcttggcaaactctagggggttttgcagcatgaaacaaacaaacaatcttgggggacccgtgggtccacccgga

SEQ ID NO: 48900 - DNA, 488 bp, Gossypium hirsutum
  Clone ID: LIB3828-010-Q1-N6-G12
aaagataattcatgctatttaacacaataaaaagtaacccaaattctctccaaggatgatatacgagtagtttgaaccaatgtcatgaaaaccagaccgaaagtctaactgaacaagccttcagtttctggttcaaccagttcaatcaaccggatccgattattgcaatggttttaactctcattacagcgtctctatagccataactaaaaccaagagactaagcaaagccaggtctgcaacaacaatgagcctaaatatgcttttattcatccatttggctatatatatatagggtggatatatgttaaaaacactgaaatcatgattagtagttcctagactgctgaggatcgtgatgagctagatccaactgattgccagagcttgacccagtccagcatagctttagcagcacgagcaaacacagggtccatcgatcctagccgctctttaacagcgtttgccacctcaattatgcattcctc

SEQ ID NO: 48901 - DNA, 180 bp, Gossypium hirsutum
  unsure (1)..(180): unsure at all n locations
  Clone ID: LIB3828-010-Q1-N6-G7
cagagaaggcttatatatgtattccttttattgtttcatactagtaaatcaacaggtacaatctggccgaaagacaaaccggaataaacggggaagaaaaatgggacaaaacacgaagcatacccgacaacaactcacaactttgccagagccattacagaataaaatctatatncctta

SEQ ID NO: 48902 - DNA, 470 bp, Gossypium hirsutum
  Clone ID: LIB3828-010-Q1-N6-H12
acaaatgactcggtccaaaacccggttttaattctgacataatatggagtaagagtgaaagctgttgttaacaataccaaaaatctgcatgtttgtacaataaaataacaggtcatagaaataatcaaatctcatttctcataaactctgattgcaactcattgattgagatcttaagtttggcaggaattttatttatattcacaacactcctattatgttagacttggagctcggataacagtgcgggtcgtttttatggcaacatttttggtgaatgccacacttgcgaatcgaagcaatcgttggcgcgtaggcgccgcgtgcgctacatatgggggtgagctaatcgtaactcgaagctcgtggtggtcaatttcgccatttccacggattttcactggaaatttctgaccgtgtttcacctggctattggaatttttaacattgatctcttgtttgaacatacc

SEQ ID NO: 48903 - DNA, 582 bp, Gossypium hirsutum
  Clone ID: LIB3828-011-Q1-K6-B6
cgcagctgctgatagtttatatttgcagggtaatgacatcaaagcattgagatcgtattatcagtcacttattgaacatttacgagtccagcagaatggaagccttgttttcagatagcagtggccatatgattatattttctaactgagggctccacatacacacacacacatattttgccagcaaaggttcccaccatcttgcaatttgtgttgttccattttcctcattcaagtctcttatgatttgaagttaacattgcaggtttctttatgtaaatatcaaatgtgttctgttgcttgtttccatggacaaagaggtattttttgagttgctcaaatatccttcagtttcatcctgctgaattagggtgagtttttgtgagagcttttcatagttttccctttcattttttggatgcattttttttaatcttcaattaagtgtatgtgtgacttagattattaccccctccccctcaaaaaaaaaaagaagaaaaaaaaggccattagccatttcttttattcattgttttgatacaattattttggggccaaagtttataattataaattcaattc

SEQ ID NO: 48904 - DNA, 643 bp, Gossypium hirsutum
  unsure (1)..(643): unsure at all n locations
  Clone ID: LIB3828-011-Q1-K6-E2
gcatggcaggcactagggagtgcactggaggggggtaccaattttgttcagaagcttgagcattctgctgtgaacattgcagattccattcagcatggaggtttacccgctggttcagttgcaccctcattaattgagtctggaaaagcctttacgacaaagggaatgcaagtgcttgaatatgtgggaaaggagactatggatttactgatcaatgaaactggtatagaagttgaaaagaactctaagggcactgagcatctatctgatgaggatcagtcggtagaggaagttagttttgatcgatgcttctacatatacggaggtccagagcagttagaggaactggaagcattatccagccattatgcccttctgtttaaccggagaaaagcaaaattgccttctgaacagaaatctgtgtatgagggaaagcttaaacaaatccaacaaattttcagtttagatgctgaaattgatggaaatggtccacagtcggccaaaggaaagaaaatagagactggaattgatggcagtcatgatgagatgaaaattntacatgattcaagtgtcagcaaggctgctgatatggctgttgggttcacaaatgcattggcaggattagctgttaatgatgtaattc

SEQ ID NO: 48905 - DNA, 442 bp, Gossypium hirsutum
  unsure (1)..(442): unsure at all n locations
  Clone ID: LIB3828-011-Q1-K6-F2
acagcttgagatctgagagcaaagccctgtttttcattggggttttttgtttgaagttctttggttgtcaacctgattttttttaaaataatccttgctttttagttttgggtgatttttgagtgtnataataatatatctctttctggttatttcggggtcattctttcgttcgttgtttttgggtttttgggattggaatttttggggaatggaggtttcggtgttgtggagttgttctcaagctactgtcccttcatctgtattggggtttagcgtttcattgtttattttcggtgcttttatcgtgatactcttttctcgggtaccattcggtgtttcgtttgtttgtccttttggttgggttaatctgggctcttattttcatcgcatgctgccctttctgttcgccttcctgtttcgaagtcttcttcgtttttct

SEQ ID NO: 48906 - DNA, 606 bp, Gossypium hirsutum
  Clone ID: LIB3828-011-Q1-K6-G5
gcgcttcattaatacacgcctgcttgtttggagcaaatgagtggcgatttgaagtctgtaattcgcaaaggcaatgtagcatatgggaattttcatgatgatggggatctctgctctcctgatctcggggagttatgtgatggtaaaagcgagaatgggtttaaactagagcgggatgctaagggtttagagaccgggaaatctagcattgctaatacttgcccctcaaaagatccagttgcattgcctatgacatattcggctcctgttaattctaaacgagatgttaaattgccgtctcgtggggaccgtattcctaatgcttctttttcaagacataggaatgatattaagttaggtagtagagatgatgatgaaaacttttctaggttcaatagacttagctacaggtttaaggcttctaggcctccgacacgtatcggagatcgaaggataaggaagttgctgacatccaaatattggaaagtagctccgaagttgaaggatttcgaacattctaaagccgatggaggaataaggcctctttatcgcaagcggaagtcctactataactatgacagatgtcaatacgaaacacactacaaa

SEQ ID NO: 48907 - DNA, 613 bp, Gossypium hirsutum
  Clone ID: LIB3828-011-Q1-K6-H3
gctgattgcacttttccatcaatcatcagtttcttgttattcttttttatctgtatgataagagcgccatggagacaggtcaaaccgtaaccccgatcccgctatggaatattgtggtgatttcagccattgccgccgggatccaattcggatgggctctgcaactttctcttctaaccccttatgtccaaacccttggtgttcctcacgtctgggctgctttcatttggctttgtggtcccatctccggcctcgtcgttcaacccattgtaggctacagcagtgaccgttgtacctctcgcatcggtcgtcgccgacccttcattgctgttggagcttgtttcgttgccgtcgctgttttcatgattggcttcgccaaagacatcggtcaccgatctggtgattcactgcaaaatcccacaaagcctagggccgttgccatcttcgttacaggtttttggatcctcgatgtggctaacaacatgttacaaggtccatgccgcgctttcttggctgacctttcgtcgaatgatcataaaagaatgaggatcgccaatgcgtggttctcgtttttcatggctgttggcatcgttttaggttatgcagctggttc

SEQ ID NO: 48908 - DNA, 570 bp, Gossypium hirsutum
  unsure (1)..(570): unsure at all n locations
  Clone ID: LIB3828-011-Q1-K6-H6
tngaaaaatcatacatgtgaacgaatattttattttattttttattttatttgtaagaaacatgtgatgaataatgaaaaaattgaaatggagctttggaaagtaaaaaaaaaaaaaaaaaaaaaaaaaaaaaaaaaaaaaaaaaaaaaaaaaaaaaaaaaaaaaaaaaaaaaagaacaaaaaaaaaaaaacacaaccaaaccacaagcaaaacaaaaataataaaatagaaaccaaagtccacctaaactgaccaccctggcccaacgttaaacaccggggaaaaccggggaaaaccccgaaccttacccaccttgaatggccttcgccccttatccccccttggcgccagttgcggaaaagtgcccaaaaggcccgcccctaccaaccttcccaaaacctgcatggccaaagtgacgaaccctacaccccctgattaagcgcatcaagcgcggcggttacgggcattacgaccattacaaccgccacacccgtaagggcccaacctcccgctcctttcccttcctttctttcctctttcgccgcttttcccggtttacccctaaaacc

SEQ ID NO: 48909 - DNA, 572 bp, Gossypium hirsutum
  Clone ID: LIB3828-011-Q1-N6-A12
agccaatcttggattttaattgaatatcaataagggatttcaatatgactaacaaatatccaagtcaaatgaaacaacacatagtaagaaacaatatgactaacaaatatcaatggggggaatataatagctaacaagtacgaacatacatcatcaaacattaacttttaccagtgtagatgaataaaccaacagcgacaataatgagctatgctattttgcagagacatcgcagtccggagatttgctgattgcatttgcatttcctcagcaaccttcctctactttttattggtttgggtttaattttcattaaattgcatgctcgaacccttcaagctaaccatgcttgctacctgtaactcagccaagtaaatcatctgaaaaccagattgtggcaagttttgtcgcaaggatacggacaatcaacgaccttcactgcggttctgtcgaaataccaatctccaacagctatagcgattggcttgtttctaatttcaggagaattatcagcaaaccatgtgtcttgcctttctgattggcagtgagcaaaacatgaatttataaataat

SEQ ID NO: 48910 - DNA, 476 bp, Gossypium hirsutum
  Clone ID: LIB3828-011-Q1-N6-A9
aaggggaacatattatttttattatatctttatttttaatctaatttttattatttattttagttttgattctaaatttttatttttattttaataaaaaatttaatttgataatgaattttaataaaaaatttttggttttatatcatggatattattcttcccaatattttgataatgaattttaaattttttaaaaaaaaaaaaaaagggcggccccccttttttttttttttttcaacaaaaatttaaaatcttttttaacaaagttaaaaccagtttaaaaagtcttattgggccaaaaaaaaataatgcccacctgacaaaaaaaacatcagcttgattcaaattctcaaaaaaataaagttgaattttaaacatgggaacccgtaattgggaacccccttccaatgatctctccaccaaaaaaccaggcatagcactcaactccaatcaaagcacccctgcctgcattt

SEQ ID NO: 48911 - DNA, 507 bp, Gossypium hirsutum
  Clone ID: LIB3828-011-Q1-N6-E9
ccccacccaaaaaagcaaatgggttattaaaacataaaattaggtttggggctacttcacttcacttacacggggacaggaaaaggggggttaaaaattcaggcaaacattttgggggtaaaacaaaaaaggacaaaacccaggggggagggaacacacccgggtaaaactttaatttttggaagaaaggggcctttaacaaaaattcaggggggggggcataacaacatttgaggacccaaaccaatcaagccattgaaaccatgggaggattgggagcacttggggggctttgcctttgcccgcccacgggggtttaaaaaaccagctatacctttgggggaccaccccaagaaaaactctttttccaaaagggcatcatcaaacaaaacttaaaaaactaaagccaccccctttggtgccccagggggggccttgccacaaaaaaaccccataaaagggaaaagccttctcggggacccccttttattgggtgaaactgctgcc

SEQ ID NO: 48912 - DNA, 573 bp, Gossypium hirsutum
  Clone ID: LIB3828-011-Q1-N6-G9
gaaccaagtctatcttatggactgctgcagaatatgtctatctaatctaaacaaataaaacccataaaccaagataacccaaactaggtgccttctcaaaacttgtgaggcaggaaataataaagaaacaaacacgagatcaacgtaagaggtgacattggttggatttaaatccacttttcataatatgcatataaaggtataaactgtaattccctacccatcatatctgtttccttgttggccaaatttgtagttgcacctatctaacatggcctccacaggcagcagagagcacctttccagttcctccgcctgctttctcattctcgtttaacaaaagaacttctgcaaagctcttggacattttcttcacgatatcattagggagtgagacgaggtttgatgcttcacacactaaatcatcggaagccactaggctggttagctgcctggccttcctttcctgcattgctttttgccgctcttcgtagaaataaaagtcatcaaggattgaagaatgactttcataattcttgaaaatgtttatcatctcaatgccctgttcaaact

SEQ ID NO: 48913 - DNA, 643 bp, Gossypium hirsutum
  Clone ID: LIB3828-012-Q1-K6-A2
gtgatgcacaactaactatgtcccagaagcttcagttgtcaggtggataataaaattttagcttctttttttccccttcttttggtagaaagtgtttggtactgtgcttgaaaactgacatatatcaaaatcaagatgagcttggactagtcataaaacatgaaataccttttttgctggatgggtgttctactcgctatgtaaattcaagcttcatctatcaaacctcattaatgtcatcatcattcagatcatttgtgcctatatatgatttttaggcgatttccttgataaagttgaatcgctttgacatcacaatagcttgaatgaaaataattactaccttactatgttacctttttgccatcaccttctcccgattctttcttgcgcgaataagaggctaaaattatgatgtcttttattttctaaggtctagtttgagaaggataagaacatcacttttaccctctccccaaactctatttcctttcctactgtccaaccaccaacatccttgaaggggacaaacagaaatgaagggaagcatatcttacttcacttgccctatctgatatattcattaaattcaaaaacttatgtttgatggttttttttctttaatcattgtttgtttttctta

SEQ ID NO: 48914 - DNA, 226 bp, Gossypium hirsutum
  Clone ID: LIB3828-012-Q1-K6-B4
ctttcctcgcaataatccataagaatttgcaaatttagatcaattaattcttctcgaacaatacttattctgatatatatatacatatatttctcccttcgaaatgtatcgaaatctttgtaattagaaagaataggatattacaatttacgagattgaatcttatattcgaatgaaacttataatattaagcaagtttaacaaatacaactagtttacttatgtt

SEQ ID NO: 48915 - DNA, 595 bp, Gossypium hirsutum
  unsure (1)..(595): unsure at all n locations
  Clone ID: LIB3828-012-Q1-N6-F7
gccctnnttttttttattatttatttatttttatttttttattttttttttattttttttttattttttttttatttttttttttttttttttttttttttttttggaaacaaaagcccacttttaaaacacccaaaaagaggggggattcaaaaaacccccaaatgggtttttccagaacccaagcaaatagacaagggtttacccccaagaaaatggggttaacaattttaaaataaacacccgggaaccggcccggaaaacacttcttggggggggccaggcagggccacaggaggggctccccccctccattaaaaattaaaggggccccggggcaaatccaccggggaactccccccagaagggccttggaaaacagggggaaccaccaaagaaaaagcccggggtccaaaagccagggggggtccgggtccacccccccaaaaacccattttaaaggggtcaggaaaaaaaacccccacaaattcgggggggggcccaggggggaacatttcagggggcccaaatttaggacccatgggggctaaatttagttcatcaacgggaaaatttggggtttggcgggggccaa

SEQ ID NO: 48916 - DNA, 500 bp, Gossypium hirsutum
  Clone ID: LIB3828-012-Q1-N6-G10
ccaaattctttttattataaaaaataaaaacggggaacacaaccaaggccggggcaaggcgcaagcaaaaaacatttaaatcaaataaatatataaaaagggaagatccaccggccaggcagggaggggggaaaaccaaaaaagaaaaaaaggccgagcccggcaacaacgggaacagcaccaacaaaacgggaggctaagaaagaaacggccccagaaggggagggggcgagagcaccgccggggggggggggaggggaacggccggggccaagggagggggagggaaaagaggggggagagggagaaggcgaggaaaaaaaaaagggggggggcacaaccgccgcttaagccccaacaacggcaaggaaaacaagggggaggacaagcaaaactgggcgagccaacttaatggggggggggaaattttaaaaaaaaaaaaaaataagtaaatgttcttaatggaatccaagggaaaagcggacccgtgggacaacccg

SEQ ID NO: 48917 - DNA, 636 bp, Gossypium hirsutum
  Clone ID: LIB3828-013-Q1-K6-A4
cccagcgtccggcgatggaagcaaaccgcgagcaacaacaataatcgtaatgaaacacagagagagaaagaagaacaactgtggagctggggagcaggaacggatggacagctgggcaccctcaggctccaagacgagcacctccctcaactccttaatgtcccttcactatcttccgcttcatccgtctctatgctcgcatgtggcggcgctcacgttgttggcttgacctctagtgggaaagtactaacatggggaaggggaaactcaggtcagttaggccatggagacatggattgcttgctatctccaaagattgtaatgtctttggagagttactgcatcactcaagtttcagctggatggagccattctggatttgtttcagatgaagggtgtgtttttacttgtggagatggttcgtttggccagctcgggcatggtgattacaggtcacattgctctcctgttaaagtatcattttttgttaataagcatgttgaacagatagcttgtggcatgcgacattcgcttgtcctactgaaagatggttcaggaaatctactttatggatttggatctggaaagcgtggtcaattgggtatttcaatagatagaatcaagtctgtcaatgct

SEQ ID NO: 48918 - DNA, 315 bp, Gossypium hirsutum
  unsure (1)..(315): unsure at all n locations
  Clone ID: LIB3828-013-Q1-K6-A6
naaaaaaaaaaaaaaaaaaaaaaagggcggagggctggtcgatgatccaagctccacgccgacgtgcgcgcgaatgcgtagctctagttcttcgataccgaaacccaatatcactgttccgtggccgtacaacgtacaacactggtgacagccctaaaccctgcccatctccaatacttattgcagcttatagcacatttcccccttctggcagttgtagcaataaggcaccaggccgatcccccttgccatagccaacacatgctcaatgcggaaggggacatggcactggccctgtacattaacctcaagcgc

SEQ ID NO: 48919 - DNA, 290 bp, Gossypium hirsutum
  unsure (1)..(290): unsure at all n locations
  Clone ID: LIB3828-013-Q1-K6-B4
tcgatacaagtcggattgtttgataggttctcacatggatcaagcaacattagacaacctgctcatcccatctccgtgtggaacatgcgtttcttgtgatgtggcccttggtcttagatttgtgctngctttcctgtgtgttgggggctggcggtgatctccaactctgtttgtgaaggttgctggcttgctgggtctgtgtcttgcgttcgtcgctcctgctcctgttgtgtgtttgttctttttctcttgcgttgcgtggttgcctgtgccgggttctgtctgtgtct

SEQ ID NO: 48920 - DNA, 458 bp, Gossypium hirsutum
  Clone ID: LIB3828-013-Q1-K6-D1
gcttaatggggtatcaacctcgggagcaacttaatttggaaatagatgggaagcaacatcactgcaccgggtatagaatccggagctctcttccattgaatattagctggataggcttgatcacctctgcactcaaactatcatagacaaatatgtgggtttggcgcctaacatcgttctggttcaagtaggtaacatggaaataggaggctttatacactgtcaattcatatgttcctggaatgcgttcttgtgtaggaacatcagtacttgccgtgtgtcttccaatgcaaatgaataaagaaccatggaatgactgatcattgatatatatgttggtgctgcaattttcaccgctttgatccaggcattttacatggctatgatgggatcatttacttataatacattgctttttgaagtgactactggtgtgggaacatcagtacttgcctttt

SEQ ID NO: 48921 - DNA, 533 bp, Gossypium hirsutum
  Clone ID: LIB3828-013-Q1-K6-E1
gggacagcgggggctagtttagctgcgcttaatacaagccatcaaatgaggatatcaaagagcgagtatgactaatctgcgcctgccattgctcataggtaggcgcgtctacatatgggcggggagactgaaagtgctgccgtgtgcagttactatctccagcgggaaacgctttcagtctggcaccgcctgcgactgcctgtggatggagtcaccaactcttgctgtgtggttacccccaatgctgccgtgacatatgaggatattggaggcgctcaaggcggagccttcatgggtggtacaggtgcagatgctgctcaggctggaggcgctgccgctgacgctgaagcttcagcagctgaggagaaaaacgaacagaaagatgatagtgaggacgatacaggattctctctggtcgatgaagcacacctactgccttactgactgtctagatcttagcaagcagctacattttcattattcatttatgcgtgaattaaactatagcgggtgacagtgggcacttattccta

SEQ ID NO: 48922 - DNA, 312 bp, Gossypium hirsutum
  Clone ID: LIB3828-013-Q1-K6-E4
cccctttccggtggcccccctccggttttttcttgggttttgtggtctgtggcgtcgtgctgcggcgcttgtctttgtgggtggtgtttggtggccttggcttgtgtgttgcgtgttctttcttcctgctggcggtgtctttgggcttgggggtgttctgcttcgtggcctttggtgtggttcctccgtggcttgcgtcttttgtccgtctcttggggccccgcgctcgtcttctcctggccggtgtgcgctgcggggggtgtgttcgttgtctggttcttgtttggcctggctgcttctctgctcttgcct

SEQ ID NO: 48923 - DNA, 322 bp, Gossypium hirsutum
  Clone ID: LIB3828-013-Q1-K6-F2
gccagcgtccactctctctaaaatttcacttcaaaaaaagtctgaacttttgaactaagcacaaaccggctcatcgaatatcaagaatccaccgccctgggaaatcaagcccgtagacacaggaatcatggggaggtggtggccctgttgacgaagacatcgctgacgacgagcggccgtcctggcccgtaaccttgattgaactgacactagtttgttcactgcttgctccctattgtttgctactagaagtcaatgcggtttgcctagcctggactgtattaatggcactggttggggcttgcatcgtgcttatgacaca

SEQ ID NO: 48924 - DNA, 586 bp, Gossypium hirsutum
  Clone ID: LIB3828-013-Q1-N6-C12
actcttccaaaaaaaataaccttgttattaacaaatttcaaacaatggcaacttcattcataagcagtatgaggcgaaagaggtaatgacctcaaagcaccaatcatttgaatgttcgtgcggatcaattctgattttgttcccttacttcctacatttcgtacaacttcaatggttgtcttcgctaacaagtcatccgacaagcttgaagaaagagatgctgaaaacaaaagaatgattagtcaataatttacaaaaacagaatatgtcagcttatccaaatgatattgccacctcctctaggagttgggattccagcaatgccgagcttcgatccccaacacttgcaaattccccttccctgattcccctcagtccttagcatactttgtacaaaactaaataaatatgatacacatcttaaaagatatatataaagactcatcaattcttttttcttcattccttacagttgtcataaataccaaccattagattaagtatcaaagaagtaaaacctctactaattgctccattttagcatgcatgtattaaataacaagaaatagaaggcatctagccttct

SEQ ID NO: 48925 - DNA, 533 bp, Gossypium hirsutum
  Clone ID: LIB3828-013-Q1-N6-G10
attaaaaaaattatttatatatgaataaaatcacgtattaaatgtagttatgttttttgataatataacaggcctattttacccaaggcccaataagacccaaaatacattcataaaaattacaagagaaaaacaaaaacagtccaattacaaggcccaaatgccccaaacccgaatggcccaaaacttaaaaaaaactagcccaaaatcttaaaaattttcagaaaaaaaaccctaggtgcggcacacctaagtctacctagcctaccaccgccactgtcacactgcctctgccacccttgctccactgccccaattgcacctgcggagaagcaaaaaagaaataataagtagcaatgtaaacaagttgcaagttggctataaaaaagcctcaagcaaaatgtaacttttttttatagagattaaatcaaaacacacaataaattgaatgcaaaaatacaaaaagattcaaaaacagaatcaatcaaaagaatacaaaggtagctttttatcttttttttttttgctttttt

SEQ ID NO: 48926 - DNA, 492 bp, Gossypium hirsutum
  unsure (1)..(492): unsure at all n locations
  Clone ID: LIB3828-013-Q1-N6-H12
aagtgtaaatgtcaaatatagatatgttcaaacttttagaagtttttttcaagcaataaaagactaatacagtagaatttatttggaagattaaaaagccaacaagctcacctcatattaacaatggtaatagtaagctttccactaacctttgaacagaaaactgaaagaaagtccaaatttatttatctacacttgcagcattttcaggaacaagctcatcgctgcaactacttcgtaccaggatttctgccaactcaccgacttggctatcaatttggtcgggatttccaccatgtcaaccaactcagaaatcgatagaatatttaagtcaaagatggctcaccattggtttttggcagcaacaaggacctcctnctttttctgagcagcnttgtcccaactgaggtcttgcatcataccccgtcttcgatgtccgtcccaactctctttgttctctcattttgtccacntgccgttccctaacgcctg

SEQ ID NO: 48927 - DNA, 282 bp, Gossypium hirsutum
  Clone ID: LIB3828-014-Q1-K6-A4
aaagattctatctagctacgcgtgagttgtttgcaactataatgctattcccatagctagcaacatcattcctgagcagcatatttcaatggtgtttgtggttagtctatttggtttgctttgaaatgaataaaaacatagataaaagtataagctgtgatgatgccaatttaggtaggattcatgtatctagagataggtaggacacatttcaggtattgcttaatttaacttgcagctataaagtcacctgttcttgttagttatttatttatttttatc

SEQ ID NO: 48928 - DNA, 636 bp, Gossypium hirsutum
  unsure (1)..(636): unsure at all n locations
  Clone ID: LIB3828-014-Q1-K6-B6
ttcagcttcttacctcccattccaggttgggtatttttccccctataaacccttttcttaatgaatatttttcatttgatctctgcaaatgttagttcatttggtgctacggttctttatttatcttcaatttgtatttgttcatctgggtattaagcaagttatgttaatttcactcagtcattggttttggtttcataggaagttggcttacggtcaattgtatttttttaggtaacgatggaattggattttttgtaggcattttatattagtgtttaggaatttatgttatttttagatttataggaagtgaagtaatggttaattcaagttattttaggttaattatattttttgggaatttctcttcaagttcttatgataaagtgagaaagtatatgtaagctggatttaccatgtcaaacagttttctttttctttttgtgtgtgtgtatgtgtatgtattctctttagctttgaaggatggacctaataattgtacaaagggacaatcaaaactctattactgctgattttttgttagattagagtgaattagatattaaagacgggtttgtaaaagacgagtttgctaactgaggataataatnctttcaaccttctattactctg

SEQ ID NO: 48929 - DNA, 189 bp, Gossypium hirsutum
  unsure (1)..(189): unsure at all n locations
  Clone ID: LIB3828-014-Q1-K6-C2
catctggctgtacaagcttcgtgcaatgggagtatgagtgcctatagnaaactcaagatttagagctcataccatacactttctagagggatcatggnatgaggcaaacacagcgctcggaaagaaagcctgctctactcggtcaacctgtcagttctctgttttttcgggggcggaaatagtcgcccg

SEQ ID NO: 48930 - DNA, 549 bp, Gossypium hirsutum
  unsure (1)..(549): unsure at all n locations
  Clone ID: LIB3828-014-Q1-K6-F6
ggcttatcggctgtacagattttgttaaacgttggtggtttcctcataactctgttggcaataattgttttcacggtttacgccgaaacgtcagctaagaaattgcagagagaagaagaattggtatagcagtaaggtatggtattggtttacagataaatttgtccatgagaaacatgtttatagggatggatgaagttttatatttgctaaataacttcatccgtatgtgacacaaggggggaaccaaagacaaatctaacatcatgngagaaagatcattttctttcttacatcacacgcttaattgagagaccaaggcaaatactgtttgacatttatgtatataattctatgtcattttgttgttgactttatgactgtttatattatgcaaaatgtttctgttaatggttttcaactaanaaaaaaaaaaaaaaaaaaaaaaaaaaaaaaaaaaaaaaaaaaaaaaaaaaaaaaaaaaaaaaaaaaaaaaaaaaaaaaaaaaaaaaaanaaaaaaaaaaaaaannaaaaaaaannaaannaaa

SEQ ID NO: 48931 - DNA, 595 bp, Gossypium hirsutum
  unsure (1)..(595): unsure at all n locations
  Clone ID: LIB3828-014-Q1-K6-H2
tgaacttctcatttgtttctagtctacaatggaatttgaccaagcctgttcatgaaattgctcttccgtgctttgcttgaccgtttctgtaaaagtctcttggtttgtaataacaaaccaacagctccttgtgattaataagccatgtgtggcttgcaatggtctgcagcatccatggtcttccggtttcagaacataagccttggcagagctttgttgttatttgtcggtggcgctttgtgcattcttggttccaagttttgcgatgcttacatcgattgttcaccccgtctaacctaatcgctcccttagctttttggtcgttggagattggggctgttttggattttccaatccttctgacgttgctttttctttgggaaggattggcgagaaactntttctttttttcgtcttctcacccggtgatggtttctttgatcatggtttntcaggtcgttttgttccagcttttagagactctttctctttctgttttctgccttggcttgcgctttccctggttcagtgttttgggttaacctggttcttgttgctttgtttgggctcttcttttccctgtttttcgaatcgt

SEQ ID NO: 48932 - DNA, 268 bp, Gossypium hirsutum
  Clone ID: LIB3828-014-Q1-K6-H3
accggtctgcattgcacttattccatcatatcataagttatcttgtgattacttttttatctgattgataagcagcgccatggtatacaggttcaaaccgtaaccccgaatcccgctttggcattattgagggaggaatttcagccattagacaccggagtagccaattaggatgggactcagcaacttttctcttctaaccccttatgtccaaacccttggagggccaaacgtctgggctgattttattaatttttgaggatctata

SEQ ID NO: 48933 - DNA, 558 bp, Gossypium hirsutum
  Clone ID: LIB3828-014-Q1-N6-E12
aatagacaaatcaaagaataaatcaaagaattttatattgtacaagtgatttacttaggtgccatatatcataaaaacggctaaattctatacacgtgtctgtcagataactgcacgcttctttactaatatttatccacaaataaaatttttatttagaaaaacaaaaccctaaatttcctcacgttgtcggcgattttttccaggctcccacaaaaaaggagaaaaaatatcggttcaacgactgtaagcaccaccttggcttgaacttgacgaaatactccctgaacttccgctcccaaagagcaaatcggagcagtaatttcccaaatcatcaggggtatatctgacaagtgattcggcccacatttctttcatcagctgcactccgccgtacttatcgaaaagctccttgtagatggggccgatccgtctggccaacgagagctttatctcatctcggagtttcgggtcggttacgacccaagaagtttgcttcttgtaagcttcttcgaaagcggagttgaattttctgaaatgctctatcacttgatcaac

SEQ ID NO: 48934 - DNA, 484 bp, Gossypium hirsutum
  Clone ID: LIB3828-014-Q1-N6-E8
gtattggtaacaaccaaacgtaaacatatcagacgagaaagactactttagaagatcctttatgacacacgaatataatgcatgcttatttatataacacacgctatagttgctctgcgggcatgcgaccggatgagaggggcaagataagaacggggcttgaaagtctaacaaagagaggttagcacagttttaaaaagcatgttcataatagaaactgtgcttcctgccgtaaggaagaagggcatatgtgaacccaacacagttcaagagcagactgggctccacagccttttaacttaacacaggttcccaaacgcacatatgttggcattgactgctgaagaagaagaacaaatggaagcactgtatcaccaacagggacaaaaccaagctcataagccatggtcacaatgccatgtcctgcaggaggcacctagcgtaaacccccaacctttataacaagaagtgttctcaaaccaaa

SEQ ID NO: 48935 - DNA, 602 bp, Gossypium hirsutum
  Clone ID: LIB3828-014-Q1-N6-G10
aaaaaacatactctctattcatccgagacaacataggttaaaaaacatattttaaggtggtgaacaaatttatacaaaataaaaataaaaggaaaacaaaaattaaaaaactgcatctgtcaataaattacaacaatgaaaacatctattattcaaaataacattatttttttaaaaaaaagtaaccttcaatatttacaggatatcaagcaagttataatagggcttgcagcaagtagggatttgcataattggccaaaaataaagatcctcatctcccagctgataacgttggcacttatttaaggggttccgatcacagaactgagactccctgtgcagtcaggctgctttccaccaggggtccaaatgaaccctacatctcataacccgaaacttcaatggcaaaagacttttacaacctgttcaatacgcctccggcaaagagggcagctggttaagtgcgaagcgcaggttgtacagcagcacatatggccacattgaataaaaacggcattgtactcttgctcaaggcatattacacatatatttggcatcatgcgatctctcttgggttctgctccgttttcaactttcaaagt

SEQ ID NO: 48936 - DNA, 581 bp, Gossypium hirsutum
  Clone ID: LIB3828-014-Q1-N6-H12
tttttttttttttttcttttttttttttttttttttttttttttttttttttttgcgagcaaatgggaaaggaaccttttattttttcttaaaaggaaattactggaagcccttttttacaaaaactatgggtggggcttttattattgtttgcattggttttataatttttagccgcttttggtgcctctttaaagaaaattgggttctttggggctttctaaacatcatggggggccactttgcccttttacgcttcctcccgccggcgggttcaggggcaacttctggttttggttctggggaaaccggcttctcttcggcttagcccgaatggggcccctcggtgggttcagtggccgcttctccttttggttctggggaagccgccctcccctcggtttagtcggaagttggcccctcccccctttggggatcctctccaaccgggcttttaaagttttcaacaggtttagcggcccccgggcttaaaactgctttttccgctcccgggggtgccgccccctcttaagggttttcggggggtcccccctccgaattggggtggggggcccccagcc

SEQ ID NO: 48937 - DNA, 486 bp, Gossypium hirsutum
  Clone ID: LIB3828-014-Q1-N6-H8
ggccggcctaaaaaaattttaaaaaaaaaaggaggggaaattttttcttgggccgggggcaaaaaaagaacccccagggggccaaaataattgggtaagggggggtaaaaaacccccaagaggaatttttggggcttggaaaaaaaaaaccaaaaatgggggggttttttttagaaaaacgttggaaggtcccaaaactggtaaaggaacaagttttggaccttttcggggcacccctggggggtttggaaggggccccccccccccggaagaacaaagggtttaatttttgaaagggggaaaacaatttggaaaaggttggcaaaagggttttgggggccccccccaatttggggtaaaaaatttggggccaccgggggctggaaacttttaggggcctgaagggggggaccaacaaaaaaaaacccagggcggttttttgggttcttaaaggggacaagattattattgggaaaccgcccccct

SEQ ID NO: 48938 - DNA, 588 bp, Gossypium hirsutum
  Clone ID: LIB3828-015-Q1-K6-B10
aaggtgtctcctcaataaccacaagggataacttgagtcctactaatggaagcaacaaatttgcaaatagtccaataaacatcactccatcagctgctgcatctgttccctttaggagttcaggcaatagccccaggcttgccactgctgagcgtaatcagactccagtacggatgaccatggagaagagagcaactgctcaagcccaaagtaggaatgacttcttcaaccttttaaagaagaaatctacttcaaattctgcttcctctgtccttgattcaggctctgctgtgtcaccacctgtctcagagaagtctgacgaacttggcactgaagattccagcacttctgttactctgcaggatgggggtgttccatcatcagagatctcaattgctgacttgccagctgacaataggagtgaagtggccttgaatggagatgcttatgctgagtctcagcacggttctagcaatggagatgagcattcaagacctgatgcgtacctttatcctgatgaggaagaggttgcgtttttacgttctcttggttgggaagaggaatgctgagatgatgatggtcttacag

SEQ ID NO: 48939 - DNA, 403 bp, Gossypium hirsutum
  Clone ID: LIB3828-015-Q1-K6-B7
gcacagatagtggcaagagaatgttgcatgcggtgatagactactttatagtctgaagcctgaatattatttcactcacatgtggcaagaaaaaatgtttatgttggaacttgtgattgtgtacttgtatgttgaatagtaactgacacctttactgtgataaaccagattgacctttcacatgaaccatacacgcaggtaagcagtgaatggaatccgttgttccctaaaagacaaaccggttattcagtgaaaaacaggtgtcaaagagcaacaatgaagaatgtaatatggttaaaaatgaagtaaggggtggggttatatttttatgcaatctatttaacggtaatgttctagtggatattactattttttttttgaaaaaataattgctgtggacggt

SEQ ID NO: 48940 - DNA, 595 bp, Gossypium hirsutum
  Clone ID: LIB3828-015-Q1-K6-C10
cacaaatttgctatgataaggaaactccgggaagagtttctgataggaaaatatcagatgtttatggactaaatgtggcttcagctgcagaaattgattctgctagtggattcaatagtgaaaagattggaagctcgggaagtttatcaccgggattgttgacaaatgaaaacctaagagaaaatcaatgtggaaaggagctgagtgctgattgtggtagtgattctgctaaagcatctattgctagagtcgactcttttaacgagcctatgcacaaaagatgctctcttaaagctaaatattcgcatggacattcacttaaaccactaagttccttagatagttgcctcatggcacaactacatatgcaacatgttaaaatggaggaatatgtacttagcttccttccatcaccaacaacaccgatcttgagaccattgctgataactgacggaagccgaataatcaacagagcaagtggtggtttttctattggatcaaatggaaccggggacagtaagctgcataatctagccacttttgaaaagaacagatacgtacatgcggttcctcctctgccaaaaattgattcctc

SEQ ID NO: 48941 - DNA, 588 bp, Gossypium hirsutum
  Clone ID: LIB3828-015-Q1-K6-D10
ggtaattgctgctgaaattatctccacgactgagttcatcatgctgtcaaactttgtcttgcctcgaatatattctttgtttccctggtcatcttttgtgtttccagtgaagtaacgaataagcagcactgcaagaactagtacagccactgccaatccaatcttcccaattgcagaagtcagcttgttgaggcgagcctgtaatggggtttcttcatctaactcacggtttatggaactcatcatctccccccatgccgtattcatgccaacagaagtaacaagcattgaaccgaacccatttgtgacctttgtaccagaaagaacaaaaggattgttgctgccattgatctcaacatggtcgctttcaccggtcatgctagattcgtccaccttcaaagagtgtccatccaagaacaatccatccgctggaatttgatcaccaattttcaaagacacgacatcacccacgacaacttgaaagactgatataaattggcggcgcccatctctcactacttccacttttatatcactactctcctgtgaaagtttctcgaattgtctgttttgcttaaagtactgaca

SEQ ID NO: 48942 - DNA, 635 bp, Gossypium hirsutum
  unsure (1)..(635): unsure at all n locations
  Clone ID: LIB3828-015-Q1-K6-D12
gnaacgttcatcttcgtacgctcggntttgtatccttaccttaaaaaaaatactctcgttattgtgtaagtattgaagatcctcaaatcacaattaattctttcacttttattctcgattaggacggttctaacattaaggtttgttgtgcattcttgaagtgatattcgtgaatcctggatccgtactctatattttggaagcgtgtgttttgggcagccgattaagtaagtatcttactgaatcactaaaataagatatattcaccaaaatatcattattttgatacgatacgaaattttgtcaaaaactaaagatttaaggattgatctcatccctaggagttggattcaaagttgatatcatcggattttgcgaaatcagatgtagggatttattcatcttaaaatgtgtgaaattattgttaatttaataaattttctaatattaaatatttaattaagaaaaaaagaaacgtgaaatgtgcgaatacattatatattcaaatgaaatgataaatctgatagaaaggaggatttcaagtaagtgattttgaactttcgaatgtgataatatgaatgtgtttgtgtgattttctgttaaatgtggtgttatacgatttcttgacactcatg

SEQ ID NO: 48943 - DNA, 638 bp, Gossypium hirsutum
  unsure (1)..(638): unsure at all n locations
  Clone ID: LIB3828-015-Q1-K6-F8
cggccgcgtgggctcgctgccgttgttcccggaatagcatcagaagcttttgtgacttctccctcgctcttgttgtcccnatttactgaaatcgacaccaatgcaggtatcacaccttcttgtaggaccatttgactgcatttctcatctccattacaaagaactagaaggcacgaaacagcttgctcttgctcaatcaattcacctgcatcaaggactgttgccagaccacttatgacaccacaggctgataccatctcgtctcttcctgctggacttgaagctaaatttatcaaaactgcaatggatttctccgtccaggtatggtcgcccaagaccaggagtgactggagggcactaactatgccagctgcaagaagactcggaatgttggactgcacggtagaaaggttataaagagtatgaagggcatcaagcttggattgttgatcggtttcactgcccagtagccggactaagaatggcacagccttgcttgagccaatgacagacttggcttgctcgaggcaagagagattaagatagagagcagctcctggttcatgagcatcagagttggaaatcatattctccagcaatttaatcactccagatgctaacatcgattccttgttcct

SEQ ID NO: 48944 - DNA, 633 bp, Gossypium hirsutum
  Clone ID: LIB3828-015-Q1-K6-G12
ctcgttttccgaccacggccgcttccgacaccttggggtggcttaaaagtacagcttccacttccaatgtgcttacaatttcccctcctgtaaatatgatatcttttgcgcggtccttcaattgtatgacaccattagggtgaatgacaccaaggtccttggtcctataccatccatctttaaatgcttcttctgttgcttttggatctttaaggtaccctaacatcaatgtgttccctttaaacatgacttctccgatcgtcttcccgtcatgacgtacgcttgccatcgtttccggttccttcacgtcgacattttcgaccacaatgttatcctttttatgttcattggttgatctccatggcttaacaatagcaggaccaagtacttcggtcattccatatgcatggctaacagtatatcccaatccttcaactttcatcactcgggacatcggtaacacgccggcaacgataagtcgaaccttaaaaggaaccgtaagcgacgcatcggcgatcaagttcaaaatggccggtccgccgcacaagtgagtcacattgtgaagaacaatggagtcgaatatgaactttgctgatacagttcttaagcagatgttggtgccaccgacagccg

SEQ ID NO: 48945 - DNA, 455 bp, Gossypium hirsutum
  Clone ID: LIB3828-015-Q1-K6-H7
ttgtctccctctttaatttcttttctttcttttgccttctttatatctctttcattttttcttttgctcgtttcgttgcatattttttttacaggttgtttattggagaaatgatggctgataggcaccaacatccttctgtcatgctaaagattgctggacaactccatcttggttccagcctttctcaagatgttcgatatcgctatggaggattccaaaggcctgctgtacatcagaagcgttttgcatctgcaagttgcaatgcaacactacagcatcccatgactcagctggcatgccacccagtaagttataatctctcattgtttggatcgagttcatcacctgttattgcccaggctccatcagagaaaggtatttccggtttcgttatcgatttcctcatgggtggagtttctgctgctgtgtccaaaactgctgctgctcctatt

SEQ ID NO: 48946 - DNA, 600 bp, Gossypium hirsutum
  Clone ID: LIB3828-015-Q1-N6-B2
aaatggaatgtttattctgacagtcaaatgtaatagtatttttcaatttacaacataaagaaggcagaaccagattctgatgatgatacaagatacaaatgaagcgaatatgatttgatataatatggccgacgcgtataacttgcaaaccagttttatgtacagaagaagtggcatctgttgtgttctgccccggtttagtcactttcatagtcctcatcatctccaaagctgaaaacagatgcatcagccgccattgccctgaattcactttctgagctagacacttgaacacctgcagcaggaggagctgcagcagcagcagcagcagcagcttttcttggctcactagtaccatgcatcggttgagagcttgcacttcctaaagaaacttgcccggtagaatgcaccaaacttgcaacttgatctgatttgtcatttgtttcaggtttggaggctgctgaattaagagctattccctctgcagatgttgccttattctgcctgctcttcaatgaaccagattcttctgcctcaccgtctgagaacacataatctttgtcattatgtcctggatctttattttcatttgctggggct

SEQ ID NO: 48947 - DNA, 502 bp, Gossypium hirsutum
  Clone ID: LIB3828-015-Q1-N6-B6
aagataaatcaccactggccacctaagatttttcaatcaagaatcaaacaaatctaaatttagctctcacaaaaacatcagcagctttagctggtaaagggctaagagccttaaaggaaataaaatcaggctcatttgcattcatcagaacacccccctgaacaactctcaaaggatcctatggaaggggaatacttactggggggggcttaagatcggttcactggccaaaagggggggggagagaaaatttactgggttcaaggggctcatgttttcactaacccattttccatacccatttattggagcaactcgctttttgacctcagtattctcgtatacctataaatcaaagttttaagatgcaagtaagcttgaaaaataatgggaaaattacccatgggtcgttgggcactggttttgaattttattttcgggttttggccaattattttgaaaatgataacaaaaaacatgtttggcaaccagttttcctttc

SEQ ID NO: 48948 - DNA, 406 bp, Gossypium hirsutum
  Clone ID: LIB3828-015-Q1-N6-B7
aataattatttatttttttttttttatttttaaaaaaaaaaagcaatagccacggagtaactttaccctaaaaagataacataaaaggtaaccccaaacggacttcatttggaaaaacctgacatgggtttaattgttcgcatgtctggacacacgggagaaaagtgccttgaccggttaagactctttgggaacagcggatgccatcaaagaaataactggggcttggaactgtgaaaagggaaacttgcttcaaaatgaagatcgaaatttttttcggccccatgggtttcaccgggaaatgtccgaagagatgccgcaggcgctccctccttggtgttatggtgatcattactaggatgggaaaaatctagtctgaggtggaatccgtgggaaactggggccc

SEQ ID NO: 48949 - DNA, 520 bp, Gossypium hirsutum
  Clone ID: LIB3828-015-Q1-N6-B8
gatgctgacaatccaaatgttataacctacaagaagtttcttaaatatgtttctcacatgctcgtaaactagctatatcacactggtccttattacaacttccaatggcggggcagagtccaaaaacaattgggtcctgtctactttagcagtattattctcaagcatttacaaagatttaaggcgggcaaaaaaaaggatctaacctctagcagatcttctcccactgtgaaaaaccagtttaccgtctctggcatcactatcaaacccaaccgttttttctttgagatgaactggtgaaagaacgctactatgaaattatacccatcaccacacatatctgaggtttcgtgcgtacatctggagtttattcaccatagactccggctttgatgaatccacattttcctgctcctgcataatagtgtgcagagtgcgaagaacatctattgccatacccttggcttcaccgataacgtaaagatatccacccttgagaaacacgttccatatatatgca

SEQ ID NO: 48950 - DNA, 272 bp, Gossypium hirsutum
  Clone ID: LIB3828-015-Q1-N6-C10
gaatccaagtaacacccaaatcactgtaaatagattgcatcaaactatagttggaaaccaagaaccaaaatgatgcactggaaattgctgtagttaagaatgcaagtcttatatgtattaactgcaaaattttcagtttctcaaatttcatccatggaaaacaataatctttgtgcatttagcagtacaggagatcctttcttggttttctccacagtttgttgtgtcagtggcttgtccgttgcgtcgtggtggtgggggcgttgggtggt

SEQ ID NO: 48951 - DNA, 596 bp, Gossypium hirsutum
  Clone ID: LIB3828-015-Q1-N6-C12
aaatcaagctggtgattaacttttttcatttatagccaaatggcctatagtctatttgtataatgctgggtaatttaataactatagttcaatcattaatttcatttacagcacaagatgtatctttctctttattgcaatcaaagagaaataatttcagtaaagaacatggatctaaattaccatatctccatcttgtaaacatgaatgcaaaagatccaagtacacacctgaagcataaaacaataaacaattcattctgttcttgcatttctcccacctttcttactaactgcctcacacaatcggcatggtaatgtgtcaaggcttgttgcacgggcctttgcatagttacctaatacaccacatcttctccaggcatggtactcagcataagctacaggatcattagcaagggctttcacgtaagaagccaattcctccatggacctaaacttagttccatctataattgaatgtggagggacaaagtccagcacattgggagctccaaaataaataggaaccgcaccagagtccaaagcataaaatagcttctcggtcacgtagctctctgtaactgtattttcaattgc

SEQ ID NO: 48952 - DNA, 599 bp, Gossypium hirsutum
  Clone ID: LIB3828-015-Q1-N6-C2
ctaatattgtagtattgataatgtcattagcgattgtaataccaaaagtaatttaacgtacacacaaaatgtaatgtgattcagaattcaaattcaaaacctggtacttgaaccatgtttgtctcattacctcccgaaacatgcacagtcgaatccttgtctcccctttgagatgaatccttaccggtttctggcaattttgggtggttttccgccaacggcgagcgattttccggcccatcagaaggtgctataagtgttccttgactgtacaaagtgcttaattgatgaaagtaagggcatgtccttgagtcaagggacctcttcttgttgatatctttggtttttctgaagtacttgtttatgttttcccatttctctttgcacctctttgcacttctcttgtaacccaattctaacatcccttgtgagattctttcccatagaggagcttttatggctgttccttccttctcatggtcaccgttgttataaagactgcacctcaggtttatcaatgccaacacttcatctcttggccatctctttccaaggtcttctttctcattggacgtaaggttttggggagctttatttac

SEQ ID NO: 48953 - DNA, 541 bp, Gossypium hirsutum
  Clone ID: LIB3828-015-Q1-N6-C4
aaaatgtaaaaatattgtttgtatatggtttgaacaaatatttaaataacaaataaatcgtatttgttggcatgcacatagcctggaagcacatatgggctcaagagagcacggggccaggacctggaagatgttgcaaatcgacactagttatgggctagacattcaaacaaaggactgttgcgggccaagaggatttgatcggaatggcaaggtcgcccacggtaaacattgacccatgcctaagaaccgccaaaataaactatatagattctggaagcacataggcgccacgaaggtcatagaagctaacggtgctaaattgaacttcggatacaatatcacacattgcatttatcccatggccaaaattgtaagatcagtgggacctgggaagagacattactcatggtaatagcctcaaaatgaatgtctgatactgacccaccaaattcgcctggccaagtgttgatatgaactccattcaaagcattaaggatggtgcagcttgagattctgattgcctgaactggctcttcat

SEQ ID NO: 48954 - DNA, 448 bp, Gossypium hirsutum
  Clone ID: LIB3828-015-Q1-N6-C7
ggaaccggaaatataaaaaattttattcacaaaacactttagagatgggcccacataataaaatgggggcgggataaaaattcaaaggcaaaaaagacatcctgggaaagggggatcccaaaggggcccccaacaccatataagtttaaaaacgaaactggcccacaaagggaaactttttatgaaaaaaaacaaacaaatggggccactggaagggaacaacccgggcccgggaaaaacattccggggggggggacaaaaaatctttaaagccccgggcccaggttatgagctacccacagaaacacagttcggggggaaaaagggggccaaataacctttgggatctttttttggaaccacagggacaaggggcattacgggtcatttctccactctttaccaaataaaactgggcaagacccaagggggttaaacccattagctt

SEQ ID NO: 48955 - DNA, 528 bp, Gossypium hirsutum
  Clone ID: LIB3828-015-Q1-N6-D10
agggaaaggccagccccgaagggggggttcggtttttgcagccatatattcggccaggatttttgtttttttggccaaaaaaattatcaacaagaaacagattttggggagtctttcctacattgcccttgatgtccaagaaagggacccgggggaagaacgcttaccttttctggggggggaacaaaaaacactcactggggggggaagggaaaaaaaccttgaaaccctaagaaaacttgggggggggaaaaaaattggtgcaagtcttgaaactgaaaaaaaaaaagggatcagggctaaagaaactgatcttgcacatcgggtcgatgtattcggggccaacaggtttcaaaaaccacctaaaaaaagcttttttagctttgtttaaaaagctttcaaaaataccaccattatcaaaccctggggttgggccggtctctctctgggctttggcatcaaacagcatggcataacggatggagggtacaaaggggggagaattggcattgctggctttctaagggg

SEQ ID NO: 48956 - DNA, 597 bp, Gossypium hirsutum
  Clone ID: LIB3828-015-Q1-N6-D12
caatagaataacaaatcacatatacagaatcatataatcttagagtcacttttatctgtatgcatatcaatgatgtcgatgcaaacattttcaaaaaacaatgcagattttcaggaaacatttcctacccatcttcgctacagtccataatgagtttctcaaaactcgtctatccaaaaacacaccaattaagtcatcccgggttacttgggaaccatgactcgccaccccgggttgcctggcaaagatagcttatcaaaacgcaattaaactgctagatcaagtatatgtgggatcaagctactatattgcagtcgagatgctagataacgtggttaaatcactagaatgtgtaggttattaaaatgctagaatcttcctcctttcaatcatatcttaaccctatgcatatgatatgacatacagaacaaaattttcagtaagcatgctttacatgcaaataagaatcagtgtaatggcatgcttaacatgtagatcaaaatcggtgtaatggcatgcttaacatgcgaatcagaatcaatgtaatggcatgcttaacatgcaaatcagaatattgacagaaacagtggcatgttt

SEQ ID NO: 48957 - DNA, 433 bp, Gossypium hirsutum
  Clone ID: LIB3828-015-Q1-N6-D9
gtgggtggttttatagaggggggggaacagggggagagggggggcctgggggaaaggggggtggggggagaaaggcacacaatataggaggcggaaaaataaagggaaaggccggggggccaaaagagagagcgaaaaaaaataaaagggggggggggaaaagggaggggtgaagaggggaaaaaaggggggcaaaaggggtgaaagaaaagggcaaaacacggggagagggggggtgggaaaagggcgccaggggggggattgttaaaaccagagagaaagggaaaaaaggatagggccccaccgcccgggcctgagagagatgcaaaaagcgggcaacactgggttgccccaacacgcgaaaaacctgtttgaggggggggaacggggggaaataaaaagagaagagttgaggataggggaatcccgctat

SEQ ID NO: 48958 - DNA, 554 bp, Gossypium hirsutum
  unsure (1)..(554): unsure at all n locations
  Clone ID: LIB3828-015-Q1-N6-E12
gaaatctaaaatttcaacattnaaaaaagaattaaaattttcgacaatcaaataaataaatacaatatgacaacttttaaatgcatattctagtttttagagctttcactttaacacttaatttttaaaaaatttcgtagtttttcactttaatttgatgttttgatgcattattctagtttttacagttttacatcaaaagggaaataaatactcagttgtggccatccgatcaggtttgaaccaaatcctaacgcatttcctgagatttttggaggatatcttgtattaacagtgtaatattcatgtaagaagatccccccacttcaactgctttattcgcctcatctcctaattctttggctcgttttctcatctctgttccttcatttccttgctccatcagtttgtctattgcatttttaacatgttccttgttcaaaatgaacccagatttctcatctcccagcatcgtaggcttgttagccccaaggttgactccaattttcagtatttgtactacaagtttctcgttgcagaactggtctcccatg

SEQ ID NO: 48959 - DNA, 438 bp, Gossypium hirsutum
  Clone ID: LIB3828-015-Q1-N6-E3
ggggaaacccaacaaatttgggttttttcttaaaatccccaaaaatttagaaaacaaaaagggaaaccaaataaaaaaaaaggggaattaccccccccggaaaatgccccaaaaaaccaggaaagagggaaaaggtttggaaggggggacccaaaaaaaaaggggggggtggcccctagggcaaatttatttatttgggcctaggggtaaaaatttaaaaaagaaaaaaaaaaccagcccttttgggacaagcctggctaaaacttttcgggatttgggaaaaaaacccccttcgattaaaggggttttccaaaaaaattggttttaccctttagaacaatctttttgggggggccccaagcccttgggcctttgatatttgcctttttggccacccccttgggttaaaaaacccctggggggaaaggtccctttggc

SEQ ID NO: 48960 - DNA, 256 bp, Gossypium hirsutum
  Clone ID: LIB3828-015-Q1-N6-F4
gacttcaatcagtagaagtcaaaataagggaatggaatgggagaatttgaattccttcttatattttgcaattaaaaattatggttttgcttaaaaaaaaaaaaaaaaaaaaaaaaaaaaaaaaaaaaaaagggcggcccaaaaaaaaagaaaaaaaccaaaaaaatcccagaccggaacctgggagggcccaccaccttttgcctatagggaagccgttttagcggcctggcccaaaacaaggaacaataggtgt

SEQ ID NO: 48961 - DNA, 529 bp, Gossypium hirsutum
  Clone ID: LIB3828-015-Q1-N6-G2
gggacagtaccccttatattgaaaataaatctccaataaacagaaattcttttttttaaatgtcaaccaacctcagatagaaaccaataccttacaacccaaattctctttgccccaaataaagagaactgaaaaacaccccaatcgtagttggggggcctttaaaggctacggatcctcaagaaaatgtatgggttaaagaaaccactcttttcaccttctcccctatgcggggccagcttgtgggggaggtttgggagccttttcagctgttggtctacttggaccaaagccgaccttaactggttttttaaccttttttcctggtccatcactagccttaccgggggctttccctcctgggcctttaaaatctaaacttgggggagggaaccgcaactggaacccatgggtgatgggtttgaccttttcccatgaactttggtgggatttcttcaacaaaaaaaaggggtttgagaccaactggaacaatgatgggttctcttcgttggaccggtttccttcacaa

SEQ ID NO: 48962 - DNA, 568 bp, Gossypium hirsutum
  Clone ID: LIB3828-015-Q1-N6-H5
gacaaatgaaaatggttcagtttattcaagttaatattgagcaattcactcttttgcatatgattgcataaccaaacaagaacagaggaaaaagaagaaaaaacttgggaggtagaaaaaagatcatggagaaagttcttgtatagaagttaaactgggttcccaacctgattcccgcaacaatcctgtccttgggagtggaggtacaaaaggcttctttacccttctactccttcgcagtgaatgtttcgacaccctctcctttggaactttaggtaccttggaaggcttggtaacatagaattcttgtgcagaattaacagattcctccaagttttctccagatatatcccaagtgatccttgcatctgacatatcttctctaccttcagcagcttgtttgaatttaagcttcttcctgtgtctatatttcagtttttccactgtagaggatgggataatgtaatacttttggccaggcaacaggctatcttcaggccataaaagggactcatcaggattcgtaaaaacttccggacgtgcaatacacatccctggatatttattc

SEQ ID NO: 48963 - DNA, 613 bp, Gossypium hirsutum
  Clone ID: LIB3828-016-Q1-K6-B8
gtaaaatatagtaccactgcttttgagttagaatttgtggttttgtgtgctctgtttatacatgtttagatgcggttatgtatttttctttgttcttgcattgtggtacaggctgttgaatttgggcaaaagcttgccagtgagcactttttccgacatgttcttgagtgagtccaaccttcccagtttattttgtttttgtgaccctgtaatctgtcgtagaaaatccttattttttttctgtgatgctttataatagtgagaatctttttgaggatggtgaccacttgtatcggttcttggaccatgatcctactgtgtcatctcaatgtcacaacattccaaggggtataattgaactgaagccaaagcccattgctgaaattgcatcaaggctgaggtttttgtcctatgctatttttgaagcgtatgcatcagaagatggaagacatgttgattacagaagtattcatggaagtgaggaatttgcaaggtttgatgcctcttagtgtatgacattgctcactccattaacttcaaaattttatgcatttctttcaaatgctcaagtctccattgtgaatggaaaaaaattaggtacttaagatagttc

SEQ ID NO: 48964 - DNA, 612 bp, Gossypium hirsutum
  Clone ID: LIB3828-016-Q1-K6-B9
cggccgcgtgggctccgattcaataattttgaaggttgtttaccacatgagctcttcgaaaggatctggatgcattgtttttgaacgataatcgcttcacttgcaacatccctgaaacaatcggcaaatcgtctgtctctgttgtgacattcgccaacaacaagttcaaaggatgtatcccacgtagcattggcaagatgtcgaacttggacgagatcattttctcaaacaataacctcggtggttgtttccctcaagaaattggattgcttcgcaatgttactattctcgatgttagcaagaactcgttcgtgggtagcttgccagcaaacttttcgagcttggagaaggttgacgttttggatatttctgggaacaagttgacggggagtatgccggaggatatttgcaagttgccaagcttgtctagtttcaagttttcttacaactatttcagtgaggagcatatggcttgtacaaaacctgaaaggaagaacattgaggtggatgatactggtaattgtgtggctggtcggatgaagcagaagacagataaagagtgcaaacaggtggtgagtaacccggttgattgtagcaaggacaaatgtactg

SEQ ID NO: 48965 - DNA, 577 bp, Gossypium hirsutum
  unsure (1)..(577): unsure at all n locations
  Clone ID: LIB3828-016-Q1-K6-D8
cggccgcgtgggcggccgcgtgggtttcggcccactttgcggctcagacatcttccaatcccatagatcagtctctttggaggttacctgctcttcctatacaaactttccagctgcaacaatggtaaactgcgcacgcattccatgacacacattcatgnagtgatagcctttgaatgatataaagcacataagtgcacatagtaggattagacgctcatcattctaaaatgagtgcgacaaggataatcatttttcgttaggcatgtgatagggctactggaaaaaactacagtgggcaaaactctctcccatgtactctggtattcattctgagacagtgacatattaatagagcaggacgcgaatggaatgtctgtatgctgaaatatttaagcttcatggggagagtttcttctacaaaaaaagagactgaggtattacagatgctctcttcaaagaaacaacttgccgtatctactgctggaggagcagccgtactggatgtaaactgggactatatgcatgaaaaggggattaggagcagctcagatgtacctttggaagccttggcaca

SEQ ID NO: 48966 - DNA, 219 bp, Gossypium hirsutum
  Clone ID: LIB3828-016-Q1-K6-E10
aaaaattggcttcaaaaatttctcaaggttgaagatattgatacttttaatgtggtgtaatattagttatgcacttggacaatattgttgttatcatgtggtgtaatattagttatcatatggtgtaatattagttatgcacttggataatgttgttgttatcatgtggtgtaatactaattatgtatttggaagctaatttataattatttaatcctt

SEQ ID NO: 48967 - DNA, 306 bp, Gossypium hirsutum
  unsure (1)..(306): unsure at all n locations
  Clone ID: LIB3828-016-Q1-K6-E9
cccagcgtccngacattgagacgatcatcattctcctcctccctatctgtcgacgaaagccatactaacaatggagccaacagcattgagcccagacgtgacgagagaaagcgccaatgctgtcttgtttgaagcaaatccggcaaactgaactattgtcgggctgtaatacataacggtattgatgcccgaaaactgctgagcaacttgaaccgtcaccccagcatagagtccccttcgcacaacaacattgcgtaaagcccctttcatttttgctatgaaattatccccaatggcttgttcatc

SEQ ID NO: 48968 - DNA, 534 bp, Gossypium hirsutum
  unsure (1)..(534): unsure at all n locations
  Clone ID: LIB3828-016-Q1-K6-F11
caaaatgattggaatatttgggtttagcagcaattgattgttgtcgtcaatgaccttggactcagtagggttgagtgttgagagaattcacaacaagggctgcttgatataccaacttgaagatgctaacaaacacacacacatatatacgtatgtatgtatataatttcttttactattagtgtatttttcatgattaattctagtgtctcggtgaggctgccgtagtagcacctatgtaaatgatattttagcgcttggcttggtttggctttagctttttgggaatgatttatggccgtcgaactcttgttgaaagaggcttgccatttgtaaattatacaaatactgtattcttttgttgtactgataataagttttatgtttctgaaaaaaaaaaaaaaaaaaaaaaaaaaaaaaaaaaaaaaaaaaaaaaaaaaaaaaaaaaaaaaaaaaaaaaaaaaaaaaaaaanaaaaaaaaaaaaaaaaaaaaaaaaaaaaaaaaaaaaaaannangggggggggcccttttaa

SEQ ID NO: 48969 - DNA, 440 bp, Gossypium hirsutum
  Clone ID: LIB3828-016-Q1-K6-G12
cggccgcgtgggttgctgctttctttgggcttcctcagcaacctacttccctgatctattgtttttctaatgaaacatgcccgcgagaaaaggatggcttatagaccagatggattactcagcccaaagtcatgaaacagtcctaaactgagacactgttcatatcctgtgactacaggattagcgagggtcttatgtctaccttgagcaagatgactctgctgttcattgcgaaacgatgtatccctgactcacggtataattttgctgtgctgctgccccctatcccataccaagtttatatgtgtgaaggaaggggaacaattcttttatgaccttttctgcaaactctgaaagctttttctgaattgtgtaatcagaaatatatacattctaggcaaaaatgggtgctttttgctgatgctcatgtggtgaggact

SEQ ID NO: 48970 - DNA, 561 bp, Gossypium hirsutum
  Clone ID: LIB3828-016-Q1-N6-A6
acctaaaatttcatgattccaggatagtttcaatagcatcatgcgttacgaaaactacattttcttggttttagctactctttagacaagagatgacaaaagatatctgtaagtgtagcacagatatggttcatatggacgtcataaagatccatcacagacgagctattttacatgggaaagtataccattgatgtaaatgtagctcgaaaatgcatgagaccctcctttattgcaaagatatctcctttacttagcaccttctaggatgaatggttcagtttggtctactggagttgattcaatttgctgattttgttcaacttgtttgagtggggaaggttggtcggtttctaataaaggttcaagctttagctttggttcaatctgctcagatgcaggcgcctttagctgcgggtatttgggtttgttttttttgaggagaaggtaagtggtactataccaaaacaacaaaattctactttgtgctataactgtatctctcatacatgttcctcccaaggagtatcgatagagtgcctgttctcctgtctgaacgtc

SEQ ID NO: 48971 - DNA, 544 bp, Gossypium hirsutum
  Clone ID: LIB3828-016-Q1-N6-C5
aaaattaaataccattaactggttcccaaataataccgcaatggacgttataacaaacttatcacaaccaaaattaccaaattagtacctacaaatccacatttactcctattagctcgaccatactttatgcccccaaaacaagggattatatgcttacttaaatcacaaaaagcagagctaattgatgactgatacatgaacactaacaaaaattatcattgtcaaggactatcttcattgaaggaagcccatttgcagacaccggattaccctacaatcctacgccttcgtcaatgatcaatctaagaccttctatgtcaagttccccatggtgaccactcaccaaaattgctacagttagctgctcggggatgctccaaacatactttctaccactgagatctgagaccttgggcacacaagcatccttggctttaaaaaattccaactgttctcggacattttggactctctctaaaccatcatgtacagcaattaatttacgatgcttaactccttgctgtgtctgactacagacata

SEQ ID NO: 48972 - DNA, 603 bp, Gossypium hirsutum
  unsure (1)..(603): unsure at all n locations
  Clone ID: LIB3828-016-Q1-N6-C6
tttnttttgcagggnaaaatttgtagagtacattgaggaaattaatgcgatagatagtatatctcatcaacatttcgacattattcccgttttatctagaataactttgatgatgagctagtactttttgactaatagcagtttctcctttttttgggtaaacaggaaaggaaaaatcttacatcaacataaattacatttataagtcctctcatacatgacccctagtgcatccctcattagaatattccgcatcccatggttggggggcagcgagggttgaacatttgtaaccccggtggttcatcttttgaaagcattctcttaaaatatttacttttataaataattggaatttggaagcatgggcatcccatcttcaaacattaaaagatggtggaagatcatttttggccaattggtctttccatctctctgttaacattagttattttctgtagcatctgtaaggtttacttcagttcgtgcagcagccttgcatgcctctggtcttgcagctcgtaaagcagcattacggggaatgaatggcaagtcttgtttcatccagactggttgtcagttttcagaccagtgcacaattaa

SEQ ID NO: 48973 - DNA, 599 bp, Gossypium hirsutum
  Clone ID: LIB3828-016-Q1-N6-D10
tttttttttttttttttttttttttttttttttttttttttttttttttttttttggacaagaaaccacaaccaaaaaccaaaacccaaaaaaaaaaaaaacaaacaatgaaaaaaaaaacaccaaaaaccccgcccccaaaaaaaaaaaacaaaaaaaaaaaaaaaaaaaaaaaaaaaaaaaaaaaaaaaggaaaagaaccccgggccaaggaacaggaacaccacccaaaccccaacgggccaaacccaaaacccccgaaacccaaaaaacaaaaggggggggaagcccaaccaggaccgaaaacaaaaaaaacccaagaaaaagaaagccacgggcgcggggcgggacccgggaaacccggaccgggacccgcagggggaccaactaaaacgaaagggaggagaaccaaaggcaggcgggaacaagggcaaaaccggggcccaagggaaaacggccccccgtcccaaatccaaaaaaaaaacaaaccaaaaagggaaaaggcaaaggcgggggggcccaaagagggagccaaccaaaagcaatggcctgacgcccacgggccaattggcaaaacgaaaacccgccggggcagaggg

SEQ ID NO: 48974 - DNA, 517 bp, Gossypium hirsutum
  Clone ID: LIB3828-016-Q1-N6-E6
caaatgagggaaaaatttaaaaaaggggggacccaaaaaaaaggttgagaacaaaagggaatttttggaaaaaagcacccagggaaagggggccccaagggggggccggggaaaaggaaaccccaaaaggggggggttttgaaaaacgggggggggggaggggcgcggggggggccacggggaaaaaaagggacgcggggggggacccggaaaagccggaccgggaccggggggggaaaaaggtttcccaaaaggggggaaaaaaaaagcggggggaaaaaagggaaaaaggggtgcccggggaaaaatagggacccgcgcaaaatgccacaaaaaaaagaagcccaaaaaaaaaaaggaaaaacccggggggccaaaagggggagcgaacccaaataaaagggggaaaccccaaagccccctttccaaagggaaaaaccgaatcgccagcaaaaaaaaaaaaagggccaacccccgggaagaggcgggttggcaaatggggaccaggggggaattt

SEQ ID NO: 48975 - DNA, 413 bp, Gossypium hirsutum
  Clone ID: LIB3828-016-Q1-N6-H3
gagaaaaaaaaccctaggaaatttattaaaaacggaaaccgaagggggggggggaaaaaaaaaaagaagggggggggttaaaaaatttaaaaaaaaaaaaaggggcaaaaaaaaaaaagagggggggggggttcccaaccaaattaatttggggaaaaggggttttatttggggcctggggggatccccccaaaaaaggaataaaaaactggtggaacggggtggggggggggagcccaaatgggggggaaaagccccaaaaaactttgggtttggggggcccaaaaaaccccccggaaataaaacccatgggaaaaagccctcactttaaaaaaatggggggggggggggtccccaaaggtcaaaaaaaaaaattttttggggccccaattaaaaatttcaaaagtttaaac

SEQ ID NO: 48976 - DNA, 574 bp, Gossypium hirsutum
  Clone ID: LIB3828-016-Q1-N6-H6
aaaagcatgatgatctggaaaatatcatattagaacctcaattgcctcccagtgacctcaacttcctcaatactaccaaaaataatctccacccattggacaagaaccattgacaaaatttatgccatggcaattcagcaacagctcctgatacaatttgaacacatcacacctacactaaagcaatgcctaatatgcagggtttctataccaaaatccttacagcagatgctatagcctcgacctctgtttccccaacttccttccagaccccatccatcataaggtgcctgcaggtacctgatgaagaaacaccttcactactctgttcatgtttgttctcgaccgtttcctttagcttcttagggcttgagaaattcattaactggatatcatcgctaccttctctcttgccatttcgtcggttaagttcccgctcgttcttcccttccattacttctgtatccttttggcagtcactaccgcagtcaagcaatggaatacgaccagaagacccaagagtacgaggcaacataccaagtggacatgggttccatgattttgccacaaccca

SEQ ID NO: 48977 - DNA, 640 bp, Gossypium hirsutum
  unsure (1)..(640): unsure at all n locations
  Clone ID: LIB3828-017-Q1-K6-A11
gtatctattgagagaacagtgttctattagananaaagcagcaggattgtacgctccaacttcttatgctgcagcccagggccttgtggagcttccatacattgttgctcaaacaattttgtttggggtcatcacatatttcatgattaattttgaaaggacagctactgtcgtctcttctgccttttactctttctggaatctcctctctggttttcttgtcccaaagccaagaattccaggatggtggatctggttctactacatttgtccagttgcatggactttaaagggtattatcagctctcagcttggcgatgtcgaaaccatgattgttgaaccgacatttaaaggcaccgtgaaagagtatgtatcaacagtctttggcattgattccgatgtaacaggactcgcggtggctgtactaatcggcttttgcatcttattttttggtgtctttactttgtctgtaaaatttctcaacttccaaaaaagatagaaggatgaaattgagagctatggtctcattntgttgatggtttcctcttaagtgggaaaaaccaaacaaattcatgaaaagctagtatgttgccgaccttcttcgatgatatctacttaaatttggtggtcattaagctac

SEQ ID NO: 48978 - DNA, 626 bp, Gossypium hirsutum
  unsure (1)..(626): unsure at all n locations
  Clone ID: LIB3828-017-Q1-K6-B7
ataatattggtagttaaagttgtagacattntgaaacttttacacatggctatactttatctactataataatttcattttaactttgccctactacaagtttgagattttaaatatttcatttcaaatgtttatttcaattatatcaaattccaggcgattactactgcaaggatgaaaggagagtttccggaaagagtaggacaaccagaatgtcaggcatgtatttcttccttggtttctcaaatgacaataatgtttctgcttttacttgtgctttacaacttgcaacgtatgacattctgattaacatgaagtatattacttttatccatctaaaagaggaaatttattttattgttgtaccttggggattttactcatcaaaatgatgagctaaacattttaatacttangtgaatgcgattattctagattgatagagatatttctttacaaatttaaatggatttgactgttagatcagttcttttgctgctcggaatttgtttggatctatatggttgatgcactagaatcaaacaagtgttccttcttattttgaagttgtccataatgaatcaaggattactttcaagtctagaatgaaatcccactgaatgttg

SEQ ID NO: 48979 - DNA, 574 bp, Gossypium hirsutum
  unsure (1)..(574): unsure at all n locations
  Clone ID: LIB3828-017-Q1-K6-C11
caaaatccaacatatcttaagttgtaatggcaagtggaaagtcgaagaagtgcagaaaccagtatcatcatatttacattatgcgngaagttacattatttgttatcattatgaaatagtgcaagtgcccaagaaggaaatgtcaggagaaaagtaaggagaaacagaaattgcacgtacatgaacgtcgaaagttggccagagtggtcaaaacttttggattcagagaagaagcctttcaaacaaaagatgaccacagagaaagtagaatacgaaaaaaaaagagttagaatgtgaagaacaaggtggaaagaataaggtataatataggttctagttatacatgagcagtatgcaaacaaagttagttttccatattctactttctctagtgtaggtcttgtttacacggtatagtcatatatactttacgaaataatataattatataatccaaaatacttgcatacatacatatgtattgcatacttacttaaaaatagttggttaaaatcaaagattaatcctaagatttaggatttaaatattcnnnanaaaaaaaaaaaaanaaaaa

SEQ ID NO: 48980 - DNA, 617 bp, Gossypium hirsutum
  unsure (1)..(617): unsure at all n locations
  Clone ID: LIB3828-017-Q1-K6-D10
cgccgcttcgcctcccgnaaaacctaaattcgatcaaaactcagaaacctaccgtcgaggagcccgacgcacagggctgagctcttgctattcttcatcctcaccctcccgcaagtcaagcgtaagcggcagcccatgaagaagggaaaaaagagagagaggcgtcagattatagggcggtcgccggtcgaggaacctgcatttagtgagccgagaagaaatgagattgcttttctactggctactggcttgattgagccttggtgagctcattatttcttgaaggaattgttcttgaaacttcaggcagtcaatgaaaacatcaaccaagtggatccttcctcaaatgctccattatttctgctactcttttaagcatgagtttagttcaaatatttgctttttgttgggtaaattttaaatactgatattgaatgactgatgggttttataatctcactttgtcctacctgcacaagaagatctctattttcactgttgcttatttttgctttcattttttgtggaattttttgtatcattatttttgggttaatataaattttggtccctgaacttggcaatcaagtccactttggtacctaattgcctagttc

SEQ ID NO: 48981 - DNA, 463 bp, Gossypium hirsutum
  Clone ID: LIB3828-017-Q1-K6-F11
atcggctccaaaaaagtcatcccaccagctgacatatcaggccttgttgaaatgacccaccctggccatgatattaccaattaaggagaggctgcacgtccatctaacataaatggaaaaaccagctcatgatccatttagcgacgatcttgttattggtatgagctgcgtctaggccacctgagaagaggatttcacgagctttgagagaggttgatgtaggaactaagcgaagcatatcaaggattatttatattaaaagcgtgaactcacaagagagccaaattaaacatgcattagatggagagtgcactacgcaagatatggctcatcatcctgttggtggatacaagaataatataatctgatatttatggtgattcattgacaagcttgatagttggatttagtgactgccatacattaaccatactactgatcctgagactgataatatgcactc

SEQ ID NO: 48982 - DNA, 465 bp, Gossypium hirsutum
  unsure (1)..(465): unsure at all n locations
  Clone ID: LIB3828-017-Q1-K6-G10
gagaaaacgaatttgagcaagtatatccccgatgcctcaaatgccgtttacaatgttttgcaagaaatggcaaagtcacatgcatcngaaaaagaaacgttacgaggaaggagatgcagatattcttcaaaaagtatccgatcatttgattaccaaagaaacactatatgaaaagctcactcaacatgttgaaaaggtggattacgagatggcattagaatacgcaacgcaaaccggagtacgagaagaaccgagagaagatatatatttacagtctctagatggtaaaggtaacttttttgatttccatagtcccatatttgtctttaaactctttctatagtgagtttgctctacacttaataacactatttctaatttgcaacctagatacctcatttttttactccatttttactgtatttgtatccctacaaataaaactagataattgtgttgagtgtg

SEQ ID NO: 48983 - DNA, 277 bp, Gossypium hirsutum
  unsure (1)..(277): unsure at all n locations
  Clone ID: LIB3828-017-Q1-K6-H12
aagnagttacgaatatagagaaagaggacatacttagtatagggatgcttcaactgctcagaagcttgtattatactgctcctcattactagcaatcgtttgtggctgttaccagtaggagtaaattatcacatgaacacgaactacacatagatacttgtaatggaaaaataccatcattgttcaaaaaaaaaaaaaaaaaaaaaaaaaaaaaaaaaaaaaaaaaaaaaaaaaaaaaaaaaaaaaaaaaaaaggaaaaaaaaaataaaaaaaacca

SEQ ID NO: 48984 - DNA, 510 bp, Gossypium hirsutum
  Clone ID: LIB3828-017-Q1-N6-A12
gtaactaccaattttggcccgggcccgtttattcaaaccccaaacctattttttaatttaaataataataataataacacgggccaattacagaaaccaatagcccaaactaacagccccaaaccagctacataacccctagcccaacacttaaacctaacccacacttacaaggcccgataggcccaaaatattaaaattagacagagccctagctgtctacttgcgccgcagcagtccgagccccccagcgcctccgtacacgccaaccctggcctccgcacgccagcacagccctcgtacgccacgcacgcaccccgaacctgcaaaccgccccggcccaacaaagcctccacccaaaaaaacagcggggcagcagcaaatagggaatatgggatgaaacggcgcttattttctacctttttcgcctataaaggcctaaaaaaacattgggttgagactaccaatagattcccccgacagagaacccccggtatataaaatcgatca

SEQ ID NO: 48985 - DNA, 551 bp, Gossypium hirsutum
  Clone ID: LIB3828-017-Q1-N6-B7
gcaaaaaaaatgccttgtataacatactgtggaaagaaacataacacagctttgggacagatgaattgttcacattgggtttaccaaatgtgacatcagtttcagatttatacaaatgcaggaatatgaaattcagaagatgcaactgtcgactgaattgcatatattttaaaagaacagaatcaacttgacatgaactctgtacatccccaacaatgggaaatgaatttacagatgactcttcctcatccaccaaaagattgtcaactataatcagcgcatcttgtttccgtgtttatccctctgtatcaatactgtcatcactggaagacaattgtctgttctctgacagtgaaagtcgtctgggctttgtagagcctgcttcaacaagcccttctgatgaaaggtttatcccaccacttcctgacgaagaccccaacaaacggtgaactggggcttcaaatggagaagatgcagagtaattgaatgtgaaaactcccataggatggttaaacttgcaacttggaccaaacttgcaaattccatatcta

SEQ ID NO: 48986 - DNA, 622 bp, Gossypium hirsutum
  Clone ID: LIB3828-017-Q1-N6-C1
acatcaaatagaacttctatttaattatatcaaataatatcaaaataactcgaaaaaatttttatgcgtattacataaaataaacttctatttcattatataaaataataaattttaatacagtaatcaatgtctatgcccgggggattcggttccacatggcggccgtcgacggttatgcgctggattcttccttcctctagcttcaggcggcggttgttcttcctccagtgctgattgttgttcttccggttcggcatctggttgtcggacttgggacgatgatccaccttcaaagaatagtgtatgtggaggtgtttgcatcatgaacggcgacggtgtttgaaagccatgcgttgctggcgattggtaaaaaggagagcttcacgacggccccccttgcgacccctcctgtgccgctggcctagttatcggtggtccgctcggcataacaagaaatggagctgatccgggcatttggctttaacctgccataggattcgaaaaagatacatgtacgggttaaggtacatataagggctaggaaacacacctagcatcatagggaaaggcgattgcgtgggtatcatctgttgaattgctgcgtcaggtgactgcgtcg

SEQ ID NO: 48987 - DNA, 526 bp, Gossypium hirsutum
  Clone ID: LIB3828-017-Q1-N6-C11
aaatcctaaatcttaggattaatctttgattttaaccaactttttttaagtaagtttgcaatacatatgtttgtttgcaagtttttgggattatataattattttatttcggaaaggatttttgactttcccgggtaaacaagacctaccctagagaaaggagaatttggaaaactaactttggttgcatacgggtcatgtttaactagaacctattttataccttattctttccaccttggtcttaacattctaactctttttttttcgaattctactttctctgggggcatcttttgtttgaaaggctttttttttgaatccaaaagttttgaccactctggccaactttcgacgttcatgtacgggcaatttcgggttctccttacttttctccggacatttcctttttgggcacttgcactttttcataatgataacaaataatgtaacttccgcataagggaaaaatgaagatactgggttttgcacttttttggaatttccacttgccattacaacttaa

SEQ ID NO: 48988 - DNA, 484 bp, Gossypium hirsutum
  Clone ID: LIB3828-017-Q1-N6-C4
attgaatcaataaaataattttatttggaaaagtcagcattagacactacaaaggccgtttcctgacgttttgaagcggaactggcaccaggtccatataatgccttaaattacgcgcacggctgcaggaggccttggcatgttttccacaacaccgcaaactagggcaccctccagcatgccgggtgcgaccctgaaagatcctgctaggggaaagagcactctcataaagctgacgcccaaggcaaacgcccgtcccatttcttaaacccgaaggcccacattccacaagggaccaatgacaataggatagctgcccagaacttggcgaaaacctgagtggcgtgtctgctcacagtatcaacaagattgaaccccttactctattcaaggctccatagaccaggcttgacgggcacctccaccaaggcatagccacacaagtggtgagactggatggctgtttcgggattgttaaatatga

SEQ ID NO: 48989 - DNA, 505 bp, Gossypium hirsutum
  Clone ID: LIB3828-017-Q1-N6-D10
ggaaaaaacaacagggcccggaactgggcaattggggcccaaaggggcccggatggccaagttcagggaccaaaatttattttaacccaaaaataaggatccaaaaaatcccacaaaaaaggaaagcaaaaataagcaacagggaaaatagagatcttttggggcgggggggacaaagggggattataaaacccatcagccattcaatatcaggtttaaaaattcccccaacaaaaagcaaatttttgaacaaaacccatgcttaaaaaagtagcaaaaataagggagcattggaggaaggacccactggggggaggttttaattgacggccggaagtttaaaaaacaattccttaaaaaaaaaagagcccaccaagggtaaataaagccaggagccagaaaaaaacaatctcattttttctcggctaaaaaagcaggttcctggaccggggaccgccctaaaatttgacccctttctcttttttttccctttttaaagggctgc

SEQ ID NO: 48990 - DNA, 574 bp, Gossypium hirsutum
  Clone ID: LIB3828-017-Q1-N6-F1
gaaacataacgtcataaatattatttcatgcatgtatatatcattgtcgttatgttttatgcaaggtgattctacaaacacaattctgcaattcataaaactgatggctgcttcatcacctcgaaagttacagtttacgatcaagaagagcaggcttaaatcggatataatccatcctctttatgacaagaaaattgaagttctggctctcacaatagcctttgatcttcatttaagcaacccagttgtcttacaaataggacacaggttttttagcattaaccactgtttgatgcagttagtatggaagtcatgcccacaattgaggatcccggtattgtccccatcctcgtattcttcctgacagatacaacatggttccggttcttgtgtggattcagttgtagtagatgaatacttccgctgtttcatcaactccagaatggtttcctcattcagtcccgtgctcacgtctccaatccgttcttctaatgccaacaattcctcgtatgacatgttatcaacatcaaggcgcatatctctatgtctgtcatgtgtttcaaccataccatga

SEQ ID NO: 48991 - DNA, 465 bp, Gossypium hirsutum
  Clone ID: LIB3828-017-Q1-N6-F8
aaagggcccaaaaacataatttttaaaaaaaaaaaaaaagggtttgtgggggaaaattttcgggtggaaaggccaacaaaaccaaaaaaataaaaaaaagcatttttaaaaaaaaaaatccaaaaaaagccaaaaatttaaaaaagaaaaaaaaaaaaaaaaaagttaaacccgaaaaacaacctatacccccataaagccacataaaaaacccaaaaaaaggaaaatgtttttaaaaaaaatccttatccctaaaaaaaaaatttaaaggaaataaattaaaaaaacccccaaatttttttaaaaactttaatggagggggaaccctaaaagggtaaaaaccatccttaaaaaatcctcccaaaactttgaaaatgtaaaaaagggggaaaccacattggggcttttccaatccttcaaaagcatgaaatttcccaattttgccccaaaccctaaaaatttttt

SEQ ID NO: 48992 - DNA, 464 bp, Gossypium hirsutum
  Clone ID: LIB3828-017-Q1-N6-G10
aaccactaaaacaatttttagttttattggggggatacaaatccagtaaaagggagtaaaaaaaggaggtttctaggtggcaaattaaaaatagggttattaagggtagagcaaactcactataaaagagagtttaaagacaaatttgggactatggaaataaaaaaagttacctttaccatctaaagactgaaaatatatatcttctctgggttcttctcgaactccggttggcgttgcgtattctaatgccatctcgaaatccaccttttaaacatgtggagggagcttttaatatagggtttctttggaaataaaatgatcggatactttttgaaaaatatctgcatctccttcctcgaaacgtttttttttcaatgcatgtgactttgccattttttgcaaaacattgaaaacggcttttgaggcatcggggatatacttgctaaaatttcgttttctcc

SEQ ID NO: 48993 - DNA, 437 bp, Gossypium hirsutum
  Clone ID: LIB3828-017-Q1-N6-G12
ccccaaccaaaaatgggggcctctacccaaaatccacaggcagcccaaaaaccaaaacagccaaaactagccaaaaaagggaaaaaaaataggcgcaacccaaagaaacgggcagacaccgacccgggccggaaaaaaagctggcacgccgctgggaaaggggccccccaggcgcgggccgccatgggggacaggcccgggggcaaagaaaaaagccgccgggggcgggggacatggggcaaaagccaaaaaaacaaaaaagaaacggcgggcaacggcgaaaaaagcccggaacaacaaaaaacgaaaagggggtccggggggaaggggggcaaaaacccggcaaaaaacagaagacacgttttaaaggggaattttcaaggggagagaaaaattaaaagccctttctcttgtaaaaggggagcgtgggttgaggg

SEQ ID NO: 48994 - DNA, 502 bp, Gossypium hirsutum
  Clone ID: LIB3828-017-Q1-N6-G9
aaatctaattatccacatttgtaaaaaagaaacgcaaaataacaactgggggaaaaaaaacgggaacaatgattcgaattacatataggggctctgacaattaaatgcttggcgcgaaagatcgaagggaaaattcgaacccacgttgatcgacgggaagggactccatcgggggtgacaaagagcatgtaaaaaccagggggggcaaagatgctattaacgggagctggaaaaacaagggggattggattaaaggcaacatttttgttaaattccacaattcccaaccgaatcaatctttgattgataaaaaccccgggcgtaaaaaaaggcggggaggaaaacgtcacttgaagcttatgtgggccaattacaacatttccacggattcgcactggaaatggctgaccgcattaaacccgggtatgggaatttccaacaaagagcccttgttggaacatacccaatttcgggaccaagtaatggggggagaacctttaaa

SEQ ID NO: 48995 - DNA, 292 bp, Gossypium hirsutum
  unsure (1)..(292): unsure at all n locations
  Clone ID: LIB3828-017-Q1-N6-H11
caataaaaaaaagtcttccatttccttaattgttatataacaataacaatttcttcacgtatagtttttgtatgatattaatatgttctgaatttattggtgaaaaaaaaaaaaaaaaaaaaaaaaaaaaaaaaaaaaaaaaaaaaaaaaaaaaaaaaaaaaaaaaaaggggcgggccgccccagaggacccaagcctaggtccccgggccggcgagggaatggccccccnatggggggccccaaacccactcccgggccgggggtnacaacnnngcngccgggaaaacccc

SEQ ID NO: 48996 - DNA, 536 bp, Gossypium hirsutum
  Clone ID: LIB3828-018-Q1-K6-A7
cccacctcgtgaaccatataacttattaaaatggacggggtgtctagtatctcgactttggttcgctcggggatggaggacggtggttccaatcatgtaccaaatcaaggctgtgtaagcgattattaactgttaaagcggtgaatctgtcaagtaacatgacatttgaatattgcaaacttacgactttgcacgggcatatacgggctcttgttgagcatgttacgtgaggcaggcctgatactcttacctatcgattttgatgccaggatgttctttaatgaatttaacggggcatgggcatatcttttacttactgatgatccctatccatcgaccatacattcataggattctcccatagactgattgccctggagaattcctgtggactttcttatcagatgacatgtgtactatggggccctatcttatatcatcagcgtggcatgaagcgctgctatggctttgtcttcgctttgcattggttgacgcaatcaccaacccaatgaactatgctctctaccatgcaaaca

SEQ ID NO: 48997 - DNA, 648 bp, Gossypium hirsutum
  unsure (1)..(648): unsure at all n locations
  Clone ID: LIB3828-018-Q1-K6-B11
ggnaaatcgtagagatcgtcagtttgtttacagtagattcaggccatggnagaacttgcagggatgatgctggcagtttgttgacatgtgtctgttttctgggggactcctcccatattgcagttggcagccatgctggggagctaaaaattttttattctaacagcaataatgtaatggacagctgcacaggccaccagcttcctgtgactcttgttcagtcatatttttctggtgagacccaaatggttctatcatcaagctctcaggatgtgcggttgtgggatgcctcttctttctcaggtggggctatgcattcatttgaaggctgcaaggctgctaggttcagcaattctgggagcagttttgctgccctatctgctgattctacccagcgagagattctcctttatgatatccagacctatcagttggaattgaagctttctgatgcatcagctaattctacgggtcgaggtcatgtatattctcttatacattttagcccatctgatactatgctgctttggaatggtgttttatgggaccggcgggttccagatccggttcatcgctttgatcagtttacagattatggtgggtggtggttttcatcctgcttgagatgaagttatcataaaattctga

SEQ ID NO: 48998 - DNA, 244 bp, Gossypium hirsutum
  Clone ID: LIB3828-018-Q1-K6-B12
ctaacattcaatcttcatttcttcccactttgtagtgtcaagtgctgtcatacatttctttacatttttctcttctattggctgctcatacgagagcaaagcagcaaacagctgcaaataatcaaggtatggttggcaaacacccattacatatcactacattctattgtattaaatttcgataaaatagaaactaaacccccttttctagcttgatttttaagaaaacccatatcatagtgtt

SEQ ID NO: 48999 - DNA, 298 bp, Gossypium hirsutum
  unsure (1)..(298): unsure at all n locations
  Clone ID: LIB3828-018-Q1-K6-F10
atcttaattggtgtcgatttcttgaaactcaggtgtggctatgtagttatttttgatagctgtgttatagaaatatgaagcggataattgttgaggtaatgatgaaacaaataattcaagaccaaatttcatcatatgtaaaaatggggctgtgcnaacaaaactgngaaaaaaaaaaaaaaaaaaaaaaaaaaaaaaaaaaaaaaaaaaaaaaaaaaaaaaaaaaaaaaaaaaaaaaaaaaaaaaaaaaaaaaaaaaaaaaaaaaaaaaaaaaaaatacaaaaaaaaaaaaaaataa

SEQ ID NO: 49000 - DNA, 621 bp, Gossypium hirsutum
  unsure (1)..(621): unsure at all n locations
  Clone ID: LIB3828-018-Q1-K6-F12
catttttatgcatggnaatcaaaataatgatataaattgagctcgaatttaatctgatcggttcatttaaacatctttgagagatagtaccgagttaagataagatttgaacattataatttgtaatctcttctcttatttattagcttattcgtgaggagaaataactagggagttttatataggtaatcaaagtaacaataggaattgagccacacttaatccagttttgtaagtttaggattcgagtccttacattttcggattgtttatgtagagataactaggacttctatgcatagaaccaaaataaaaatatgaactaaacccagttccaattcagtaggttcatgcaataagccttaagagatagcatcgagtaagtttaaagtataaattgcaacattttataagaatcttatgcatggcatttgaatctcaacatttatattctctgggtgggctttaatggaggctaagaggtgccttgagcccccaaaattttggaaaactttttttttctttgaaatttgttgaaaaatttaatttggcccccttttatatttttgaaaattttcattataccttttaattttttttaaaaattttgattaaattctt

SEQ ID NO: 49001 - DNA, 634 bp, Gossypium hirsutum
  Clone ID: LIB3828-018-Q1-K6-G10
ttacaatatatattgaagaaaaagcaaatctcaaacttatttctcaatggcaccaacatcccaatccttgaatgaagagcaacgtcgatccgctaactgtcatcccagtatttgggatcccaccgccatccaatcctttaccactccatacactaagttgttttgcatgctaggcttgtgataaatgttattatatatatgttgcatgtaacaaccctttttcttgtgaattttagtaccaactctgtgctacacaattggaggatctgaagcaaacggttagtaaattgcttgcctcaacgaaagacacagctgccttgttgaagctaatagattcgatgaagaggcttggagtggcctaccattttcaggaacagattcaacaggctttgaatcaattgaattcggatctaaatcttgtctccaattatctttccacagtcgcattgcattttcgactcctacgagaggattgctatcctattactgcagatgtgttggggaaatttaaaggtggtgatgggaggttcatggggagcttatgtggggatgttgaagggcttttgagcttgaatgaagcttcattcatggcaatacaaggcgaaaaaatccttgaagaagctaagggttttag

SEQ ID NO: 49002 - DNA, 631 bp, Gossypium hirsutum
  unsure (1)..(631): unsure at all n locations
  Clone ID: LIB3828-018-Q1-K6-G11
gattgccttagcagcacaactngnagtggnaaaatccatcaactcgatgtgaaatcagcctttctgaatggtttcttaaatgaagagatctatgttgaacaaccacaagggtttgagatagctggcagagagcatatggtctacaaactgaagaaggccctatatggcttaaaacaggctccaagggcctggtacagcagaatcgatggctacttgactaatttgggattcgatcgaagcaagagtgagccaacactgtatgtcaagaagcaagggacacaaacacagctcattgtatccctatatgttgatgacttgctggtgacaggaggagatcgagcagtgctggtcgatttcaagaccaagatgcaagaagtatttgaaatgtctgatctaagggaaatgtcttatttccttggaatggaggtgactcaagcacaaaatgggatatttctaagtcagagaaactttgccacaaagattctgaccaagttctccatgcaaaacagtaaagcaactaaaacacctgttgctgttggagaaaaactatcgagccaaggtgattttgagaaggtttgtgaaacaacctacagaagtctagttggttgtctgttatatttaactgccacta

SEQ ID NO: 49003 - DNA, 497 bp, Gossypium hirsutum
  Clone ID: LIB3828-018-Q1-N6-B11
aaatcgaaaaaacaataggtaaatgaccaaaataaaaagatacaatttcaccccaagaaaaaacacaaatggggggacactgctacgctttcgagctagccgaatacagccaactgaacccaaagtctgaagcccaaaacaagattctgcataatgactacaaaccggcgcccacaataggcaaacgaactgcaccttcgtttcatgttatgccctacggggtattctattctcgttcgcaacatcaaaaaacaaataccgtagacgaaataaagatcatttcacctgttgtaacgggtaacccaaagtaacaaaattgccaaaagagaacaataataataataacccttgagcaataataattacaaacatttttgttttccactttcctaaaaagcattatgaccaaaattttagcctatcaggtcaaaattagaaaccaaaaccattccccacaaaatcctttttttcaccactggtaaaaaatcaaccaactg

SEQ ID NO: 49004 - DNA, 589 bp, Gossypium hirsutum
  Clone ID: LIB3828-018-Q1-N6-C2
gaaaatcaatgcaatccaaataatattttccaacagtggttaatttttttttacagacccatatcttttcttttctcctgtggtctacaaaaaaaggcaataaagctggaacaatgcctctttgttccagttgctttgagacagttttttaagggggaaaaaaaaaaactagaaagcttatctaaggtcattatttgttaccataattttcttcaattattacgggaattcctaatcttcagcttggggagatggagcagcatctgaaactgaaccgtcaacagacaacctcgagacttcactggcaaggtcactgtcatcaggcccttctccttgctgctgtaggcaaaagtacatgatgctggcagtcaatgttagaatcattttctggtttacctctatgacatcctcgggtaataagaaaatggagcatccaatctttcgtgcaacactgattatataggttgcattcgacttcttgtcttcatcggtttctcccttggtaacgagattccagtcaaccacccttggctccactgcagtaagaagctcgaggaagaatacaccatttgaaaggcttttatccttg

SEQ ID NO: 49005 - DNA, 598 bp, Gossypium hirsutum
  Clone ID: LIB3828-018-Q1-N6-F12
atctataaaacaatactatcattgacaaagcaaggacatggtagtaaatagtaacaaagtcagaaaattttatgttaagggccgagattgaattttgatttttgaaggatgaaactgcaactttatcaaattatatattcaagtagtgttcgaataaataagaggttaaggtccctacttataccttcgaatccgttcggaggggcagaagcatgtaattagggtcaacgacccataatctggtccctgggagggaccatgaccaagataggttgagaatcgagcccgggatgaggcaaccttcgacggagctcgcggccttcttggcaaagagcacatatatggcagaagaaatgtgtagcaaagtcccaagctgattcacattgttcacgtcgcacttcattttccacacagctaccacagcatccacatgacccattcagtgcctcaaaggagccctttttttttgtttatccaaaaataacaaaattaaatctcggaaaccttttatgtaattcaaattgtaaacttatcgaatgttacttcttaaagatgataacgtgaattaacaggactaagacgaggtttggttcataac

SEQ ID NO: 49006 - DNA, 597 bp, Gossypium hirsutum
  Clone ID: LIB3828-018-Q1-N6-F7
acccctctcaccgtcaaaaacagttgagcatatttacatctctatccaactcaaataccaactttatccccccctcattcttcattcaatcatttcttttttgattttgagctagcaaccaagtataaatatatatattttttatttaatcatatatatttccttcactatcagaacccatcatcaacatctaccttcacactaccaggaagccaatctccattgtttcgattacatgtttcggaatcgagttccagtcggaacactagtgatgactcctccgatgccgggaatcgtgttttcagttgttgtaagcttggaaccaatgctttctcagtccattcttctaatccagttcgacctatccataccccacttgtaatcttttccagagcttcatctacgatcttgatcgttaccctgtcgccaatgacactgcagaactttttggttatgaaatcagaaatgtcgcgcctaatgggaccaaaatcgacaggtttaaaaatgatggcatcgtcgacggaattgagtagctcatggggtactgatgatgatgttgagttggataattgtctgtttgtgaggccttgtccttct

SEQ ID NO: 49007 - DNA, 574 bp, Gossypium hirsutum
  Clone ID: LIB3828-018-Q1-N6-G10
tttttaaaaaaaaacttattattcgatttaagaatattacagatataagaaaatataaaattaatttaaagtaatacaaagatttgataacattaactctttatccattacatgcatttattaagttaaatactcaaactaaaaatgtgagtaagtattggtcatctatattggaataggcctaagaattgatgaaacaatataatctttagtgacaccggttgatgtcccaactccgtcgccatgctggtacatgcatttcacagttcgagtcatgttcttagataaattcacaataactcgtgggaaacgattatcgaaaatttcttcattgatcttcttccatgaattgcttatcagttcttttacatgatttcgtgctttttcttctgttactcctttttcaatcatgtaacactgcactgcttccggtatgtctcctctctccatctcatccttggaagtacccagatcatcactgaatcgagtaatgagagatgaccagtaaaataattgagaaaaaacttaagacaatttggaaattgattaacaatggagtctgcctccacaaaac

SEQ ID NO: 49008 - DNA, 598 bp, Gossypium hirsutum
  Clone ID: LIB3828-018-Q1-N6-G12
aaattaaacactaaaaaaatatatataactttgtttggtgtaggaccaaaaacagagttggagaatcaaaaggcaaacattaaagaatcttttgaataacattcactttaaaccacttccagaatcattgttattagatttgcacagccccctacgccatggattgttcgtgtttgatgttgatgaccgaaaagaacttgactgctgcgagctccttcaccatgtctgccctcttccatgtacaaacatactgttatggctaggttcagatattttcatgtctgcaatggctttagccgtgtttgagcatgaaccagcaccacccactttgcatgtgtcaaaccttgggttccatggaaaccttgtatttgatgtctggttcgatgggtgaagatcatttctggttttttggactaactcgaacctgttatagggcggtctggttccaaggtattcatgccatagctgagttttttgaatatcagcttcagttatggcctttttgggaaattcaacaccctctagagggcgtgggatatgtggttttccgatagggatcttgaacgacaacaacatgataagtgatgatgatacatgt

SEQ ID NO: 49009 - DNA, 580 bp, Gossypium hirsutum
  Clone ID: LIB3828-018-Q1-N6-H9
ggaacaacatagactttgagcattggttaaaaacaaataaaacctgggagtttaacatattcaaattttcccctgcataagattaggatatttcaaaaaaaaaaaattcataagctgggttgcagggttctaatcagtgttctaatcctagcagaagaaggaaaactcatgagcatcttttcactcaaaatcgaaaaggacggttcagggttacgtgatcaacccaggcaacataaaatatagttccctcgtatattgaatgacataaaacataagtcgtggaatgtatgaagcaacttgctcagtgggagagcctggagcttgcagtttgaaaatagatagatgctaaacatagaatacatgtgtacagccttcattacttagtatgtgcagagaaacaaaagtggttgccgatgaaaatggcaaaagctaaagtgcttccggagagaattatgtacaaccaaatcgttgtgaaatactagcatgatcatgcacataagtagagggaataagagggattgtcattcacaaaccggttttgtaccgaagctgctcaagcagattgcaaaggcttggaaag

SEQ ID NO: 49010 - DNA, 566 bp, Gossypium hirsutum
  Clone ID: LIB3828-019-Q1-N6-A10
aacaaatcaaagttgaaaggagtgcttttattacaaggcaataatatatagatgacttcagaaactgaaatagcaagcaaacattaatttcatagtatagataaaattctgaaacccaaatgccaaacattattctatcatcttaaaaatgcgaaaacatatctaaaaaaaccctgaagctgaggcattaaactgacgagacggagagaaccccggattcaccatcttaacttcgccgggaagtacttttcaatgagtgagagataatatggcttgaccttttcgacatcgatccggactttgctcttgctgtaaagatcatatttattgaatatttggagccacttcatattctcagtatcctcctcgttcattaggtgcctgtatgctcctgacttatgcaatgcataaaacgagtggtatcgaatgatgaaaagagctgctggtggcagagtcgtattgttccccttggacaccagatacatgtagtcatcatgcccccacgacatcatcacattgttaagtccacatccctctgagtacaccccatatttagtgttgtaatc

SEQ ID NO: 49011 - DNA, 532 bp, Gossypium hirsutum
  Clone ID: LIB3828-019-Q1-N6-B6
attagcaactagagattcaatgtcatagaagcaagtaatgggagaagctattgttacaatgttcatgtttcttctatgaaaacatttgaattctcgcgtactagcaccgaaagtaaaacgaaaactcaatttgaagattgaaggaaaccgaatcctgcaaaatttcacagcttctactctcatttatagcaaatagtatatagtatatattatcaacttcatgcttctggactcagcctatgcatgtttacctttttatctgcaaaattcatgggggataaactctatacatggtctttaccgggtttgtgagtacgggttttccagctataggcttcggattttgcgtcttcttcatcttccgtactgtcacctcttgttgtggaggttcctccagtgttcgtagctaattggagagggccttgaggagaaccggattgtgaactgctacctttcgaagaatctccatattgatcatgggacagccatagaccattccccaaaacaagggctgattcatttgctggggtgg

SEQ ID NO: 49012 - DNA, 433 bp, Gossypium hirsutum
  Clone ID: LIB3828-019-Q1-N6-B8
tttttttgtcttttaaaggaccaacaactaaaacatgtgttatggtaaatgccgtacaaggggtgaaacaaaccaccacatgcgtaatatcatttgctgcccctacttaaataccggcgtaactgaaaaaacacacctagggaaacagtttactccaacatgacaatgtacccaggataagataaccggtatctaaaaaggttcaactgcatactaatagatagtgtacaccttaatttttaaggaatgacaacttgtatgcgggctattaacagcaaattgtgagctatccgccagcccccatatatgaaagaataaccaacgcatgaaatctatgttgaatttttaaacatttcatcataaaaagggggggggggtggagatactacatactttacaacatcaaacattatcaagctctgaggattgatgc

SEQ ID NO: 49013 - DNA, 411 bp, Gossypium hirsutum
  Clone ID: LIB3828-019-Q1-N6-B9
aaacagtgttgaaggttgtagcttaaattaaataacaaaaaagatcatgtgtattgccatgcacatgcattaataacatatggtcttccaaacaagaaagaaggaactttaagatatcgaaaatcgaatattgggtggagctattcattctaacataattactcttcttgggcaaaaggaatagatagcatacccttctgcgacatgataacttcttatagggtgtaagcaagaagacgactaccaactgtgacttgatgttcaatttcaataagtgatcaaacttctactctggatgcctgggtgtcacatgtctcataacctggccatatatcatacgatgtatacagtggcagcctggcaacatgctgatgagcctgtatcctggaccgactcgatgttatacccata

SEQ ID NO: 49014 - DNA, 485 bp, Gossypium hirsutum
  Clone ID: LIB3828-019-Q1-N6-C11
aatgattctttttatttcattttattttatttcaacggaaaaaggcttgaacttagcttaatcggatgtaaaaaaaaaccctttgaaattgtaacagcaaggcttgggggagaaaaatcacatcttacaggccttggaaagtaacgtcatgtgaaacattttgcaaattatgaactgcttgctgaaaaaaatggggcctttgtaatatctcaggattttttactatgtgtcgaattttaagaaagcttcaaccaaattctttttataggtgagggagatccgaacttcttctattgtgatttccggatgttgaatccgaaaagaccgtatatgctacattgaaaccatagaattgccttgttttatccaaggaacgtgaatagaagtaccgtttgtagtcatcttcgccaacagaattccctttctcacttgccttgatagccttaactgcctgtttatgtgatctactgttatggacaacgggt

SEQ ID NO: 49015 - DNA, 591 bp, Gossypium hirsutum
  Clone ID: LIB3828-019-Q1-N6-C2
gtcacactataaactccttcgcttaatattgtattaaaatatttctttaaataatacataatatatatatgtcataagatattttaggagtaattaaacgtacaatccgtaattaaataacataatgaacaagatcgtacacttttttttaaaaaaaaaaacataaatgttgcctgaattgcatcggcctttactttttggtgatgatgaagctgtcgtcaacatttttggtatcggaattcaacaaactctaatttcagctcatcctttgttgcatgtgctctaacatacccaaattcagaaatccttaccaagctccaactaggtgcatcatcagggaatttgtcgaggctgaaaccagccattccaacgatagcttggacaggtgcagtgtagttggtattatcgtatgtgtcgatgccatttttatctttttcgggcattgctagacattctgatttgtagatcgagcacgttctctcataattatgtaaatgtccgaaaaggaccagatccaccttgttattcaagagaagggttctactgtttcagaaaatgatcatcagcacctaaaaaaccgtacatgggcct

SEQ ID NO: 49016 - DNA, 329 bp, Gossypium hirsutum
  Clone ID: LIB3828-019-Q1-N6-E12
atcaaaaagcaaatgtttattagtaattttttatcccttcatttttttcatagatcaaaaaagcaaatggctatatatgaaatcttaaaccttgaataatcccatggaacaggagagaagcttatcaactgtcagaaagaaaatttggaccaaggtttaggcaaggggggaggctcaaacatggggggtttcccatatttcgaccccgggaaatgtaaaaaagtggaagaaacccggcaggttttgccatttggccccccccaaacgggaaaaaagtatttgaccccaggaaccttcaggatttgggggcctaccgcccaagaaaacgt

SEQ ID NO: 49017 - DNA, 461 bp, Gossypium hirsutum
  Clone ID: LIB3828-019-Q1-N6-E2
cggaaaaaggccgaaaattggggcacgagaataaaaaattacaacctgggtaaacagtttacagccctacatggttttggataaggggttatacaaggaaaccacattgccctacaagccaaggcaggggggtaaaaggcaaatccattctttcaaacaggggtattggggcaagggtgactgggtgggatcttaagactctggtagaatgaactcgctttccacaacacccttgccttttggtttggccaaagtgggggccgggaaaggtaatgaagcccttaagggacggggggcctgagattacgggccaaatccccgcacacaaaaatattctttacaaaaacaggggggaagtccctgtgttggtaagcctttaagaattgaggggatggatggcccaaaggagaccattgtccttggcggggaacatagccattccctgggaacggaaatagggt

SEQ ID NO: 49018 - DNA, 581 bp, Gossypium hirsutum
  Clone ID: LIB3828-019-Q1-N6-G10
gatggacgtcaaaatttttaaaatacaaccaattaaaccagaattgcttagttttggcctcagtaagcattgcaactgaacaaccagcaacattatgacatttttagtccatcctcaatggatgcaaagaacttttatagctatggacctagctattagcatgttgttcaaccaaaactctcagttccattcaagttaacttcttcagacaggataatagtaacctaatgctagaagtatcagcaccactagtgcagcaggtgcggcccatgtccagtagttggttgacttcttacatctcaggatggctcttgaaagcacctcaggtcctttagttcgatttttgtaccaaatagcattccccttttgtgctttatccttcactgaaataggagcaggaacaggtgcttcagcactagcatcaaccttctctgattctgaagcttcagccatgggttcagttggttcctcgggatttatagtattcgtagatgctgctgctttcttctttgctttcttctcacgctcctgaaaggaaaaaaactcaaaagaattcagttttaacccgcaccacttataaa

SEQ ID NO: 49019 - DNA, 441 bp, Gossypium hirsutum
  Clone ID: LIB3828-019-Q1-N6-G7
ggaaaccaaaaaaaatcaaggtggtttcaaatttaggggaaaccaacaaaaaaggggggaaaccagagggggcaatggctccctttcaaccaaaaatgggggggaaaattttgaaaattccactcgcaggagctggcccccgggggcttccaagttggggggggggaggtcaagggaaatatcgggaaggggggcctttaaacttttacaagagactagcaaagaccctagtaattttaatttacagcccgggactaaaaacttttacaaaaaatgggggaagccacccaccccttcaaaaggtacattaaccaggggggaaatatttggaaatttcattccttcattagccaaccttaaggaaaaaaaagcgtagctaacgcccttggccctaaaggcccccaaaagggggaagaaagttttcatttttttcaacagggc

SEQ ID NO: 49020 - DNA, 446 bp, Gossypium hirsutum
  Clone ID: LIB3828-019-Q1-N6-H9
acattaacatatattatgtttgttttaataataaatattaattgctatacatgcgatctttaaaaaatgccagggagcactaatccgcaatgtaatataacatgcaacggcggttctattatgcattgagggagtcgctcaaatcacatgtggctcgggcccatataaagatgatacatccgagctcaaaaataatattaccggagcccgaagcaccgacgtgaaaagataaaacttaaccgcagggaggtggaatatgtttagcgggcccaaaactttgaccgttgcgcatttttaactgaacggagcgcctttgttttatcgggaggagccgaatactctaagagaatgttgttgggggtaatgtctaggcatggaaatgtaggggtgaaagatacgactataggggttatggtaattgtgggaactctggggaaaaaataatc

SEQ ID NO: 49021 - DNA, 384 bp, Gossypium hirsutum
  Clone ID: LIB3828-020-Q1-N6-A1
ggggggacggctcaacgattttttattaatcgggtcgatgaccctaatccgcttcgattttgaaaatcccataaaataaaaaaaaattttccagaaatttaagggttaatttttattttatttttggcccaaattttgcaaaccacctacattaaacagtccagcaaggatttaattttgggggtccaaatgggtggaaacaaaaattttttgttcttatttccataggcattgaaatttcccccggttttggggtcggggaaaacttccccggggttgcccggggccccccccccaccgaaaatgcctttgcaaacggggggtgggcccagttctttaaccttgtttgaatgggaaagagcatcgttcattgggttggggatt

SEQ ID NO: 49022 - DNA, 620 bp, Gossypium hirsutum
  Clone ID: LIB3828-020-Q1-N6-B6
ggactatcataagtagataaaaaaaaaggaaactaccagtacattcaaaatgtattacacatctacaaaggtgaaacaggctactcatttaccgatccgacctttgaaacaacccctgataatgacatggataaataaatcgaggcgaaattaggaattctaaatgtctccttttactggctggaacctaattttatgcttatcactccacgggaaatgtgaggggtatcccttttccgtgtttcccactcctttatcaggtacagtctttatgcctccattttgaccgtacactgatgtactcttcttaatgcctgtcctcgcctgaacgtagctaaaataacttgtgccatgtagcacggagccggctaacctaacatacattgcccccgccatcattaaaatatacgtcatcttgattaccctcaacaggagaggtaaggcgaacaccatcagcattttcatcagctgcacgctgtaggctgccttgttcgtctaccaagggcattccctgtatggcccaaatgcatgcagaaaaagaaagaaattcaaaacattattatctaaccctacatcaaaatctccaaccctttctatagcatcggttgagccaataccac

SEQ ID NO: 49023 - DNA, 348 bp, Gossypium hirsutum
  Clone ID: LIB3828-020-Q1-N6-C1
ggccaaccaaaaaaaaaaaactttcaatgggtaaaggaaaggatccaaccaaaaaaaaaaaccatagccaaaaaggctggactccaaaccgtaaccccgggtggcaggaagggacccccccaaccaaatccaaatttgggaaagggggccgcccactatacgggaaaaaaaaacaccaaaagaggggggaatagaaaccaaagcccctacaagaggggagggtcaaacccaaaaaaaaaaaccctggccaaccggagccccaaaaaccggagccaagggcccccaaacgaaaccagaacaaaggcaggcccgcccaaacaagttgggagggcagggaaaaaaacaaaa

SEQ ID NO: 49024 - DNA, 439 bp, Gossypium hirsutum
  Clone ID: LIB3828-020-Q1-N6-C11
aaaaaaataaaagggaaaaaacccccgggggggggaaggaatccaaaaaaaaaagaaacatttcccaaaaacccccaaacatttagctcatttttggaagggaaaaagcccgccctgaggagaggtaatggggggggggcaaaaaagggttgtttggggggcccccgagggttcccgacccccccaccaggaggggccccatgggagccggcttaaatgctaaaaattgggcccccccaaatttttggggggcccccgggtcccctgatgggggaaaaaaggccccgttaaaaaaaaaaaaacccctggatccccaaccacaggttttccactttgggaaaagggcaaatcccccttggaaaacccttttaactgaaaaggaccggggggctcaaaaaagggggcccagggtgaaaatgggggggggactggtgccccc

SEQ ID NO: 49025 - DNA, 420 bp, Gossypium hirsutum
  Clone ID: LIB3828-020-Q1-N6-C2
acccaggggctaaaaaaaagacattttatttgttaaagaggaaggggaaaattttttggctatacgccaaaattggggaaaaaaaaccccggctgggaaaaaagaaaaaatattttttttttaaaaaaagggggggggggtctcccccttttttacaaggattctttttaaaaaaacaaaaaaaaaaggggcaaactttttttaattgatgaaaccccttttttgaggccttttaaacgagggaccaaaaaaaaaaataatcaaagtgttatttcaaacgggacggagggggccactccgtttataacaggacatattaggaaaatttttcctcttttaaaaaagaaagcggactcgggggtatccccgaaaattaaaagccgtgacctaccagcacacaaattttccttataaggatga

SEQ ID NO: 49026 - DNA, 589 bp, Gossypium hirsutum
  Clone ID: LIB3828-020-Q1-N6-C6
aaccatgcaatgcattcaatataaagaaaacaaacaaacagaatgacatggaccattctgttaaaaataaaaactcaaaacgccctctcccaaaactctctgtttcacttaatcttcgcaaatgtctcctgctaacttttctgctcataacaatattcctttcctagaaaatagccttgtcctcaaggctgaaaatgaggaaatttggcttggattgcagtcaaagactcccacatgtttcttcaattatgaaatctggaatgtatgatggatacgggagtgttgtggaagttgcagggtataagccattgcccctactttttggatcaccgggaaaagaccataatactttggagatagcttctggttggaaaccttccgaattgattgctgtctatatggttgcaatcgcaagtaaaccatgtcccccacttgaaaactcctctccgagcgacgtttgtcagcagatttatcacattgattctttgagaaacctaatataaccgcatgtaatagtgacttctttgaaagcttgtcaataagcatcaaccaagttgttctcctagatccccaactattctggccacct

SEQ ID NO: 49027 - DNA, 591 bp, Gossypium hirsutum
  Clone ID: LIB3828-020-Q1-N6-C9
agagaaactgcataattgtattcataacaggcaacagccatatatagttctgttcaaggaaaccatttcagtgaacaaaactggaattaatagaaataaggatcaaaagaacttacctcatagtacacttgaaaccctaaccaaatttggttgaaacccaaaaccgaataataaaaaaattaaaaaataatgtcgatgtaggaaatcggtggatctgggcttctagatatcaaatgttgtacataacaaagaaaggacgcatgcttatcacggtgttttttagcaaggcttgcccggtttgcagttgagtgttccggcatactgggtgagtttgggggccatctcaccgggattgaaaggcatcattttgtcaataccatatttcttgctggctttgggatcaccggatgaaacaaaaaaggcaccgttctcgaaatggtcaccctctgatatccagttccatttcttccacacttcgggtggtgcgtacacccttttggtcacctccctagacgcgagggtggatgacgcggtatacctgttgccctggctgataattgtagggttgcggctgccgccaatagcatacat

SEQ ID NO: 49028 - DNA, 448 bp, Gossypium hirsutum
  Clone ID: LIB3828-020-Q1-N6-D11
ggaacctaaccccggaaaataataagaaaaagaaacagggaaaaaaaaccgggaataaccccaaaacagggtcaggaaattaaaaagcccacaacttcaaattttttttaacaaatttaaacaacaaccccataaaacaaccatttaaaaaccaaggggggggaaatttaaccctaaatcccctaaaaaaaaggaaaacccccccaactagaaaaactttaaaaaagggaaaatttcttttccattaaaaaaaacctttcccaagggggaaaccctccattttttttggggggcctccctgcaaaccccggggtcccaaaaaacttgggacccaccccttggggggaaggagggggggaaccctggggttttttgaggccattcttggaacccctgaaaaaatgattgggagcgggggggttttttgacttggccatatttgcccaac

SEQ ID NO: 49029 - DNA, 568 bp, Gossypium hirsutum
  Clone ID: LIB3828-020-Q1-N6-D3
aattccaataaaacttactgttcatgagcattaagcccgattgagtaactcgcattatggatttcaaacccacagcaaccaagttcctccgtctgcacccccgcatatgatacgtggtaccatccactacatttaataactgacctgcacaagacccagccatcacaattccatatgtaccaccccataaatactccatctaccaccggagccacctggtcttgtccggcgtaccatgcgataaccagtgggtcggctgctaatttagcgacttcgtagtccaatacacacttatcattctgtcaactccaacgtcactgtagggtgactttaacggattccaccccggcatgggttgaggtacggtgaaaggaaaagcgcatacttctggacaaaacttggcagatttacccacccatgcatacgggcagcgggaaccccaccattgacggtaacgtaagcttatggaacccacaaacttagccgcaaaaatctttgacgtacacaacggcgtaggtgaacaagaggtacaacccgcttttgggatagatcggtaacagtttaaaac

SEQ ID NO: 49030 - DNA, 527 bp, Gossypium hirsutum
  Clone ID: LIB3828-020-Q1-N6-E6
ttttgcggaagcatagtgattatatcttactaggggataacactagaatcggtcggatcgcctaagaaaaaatttctgtcagtcatctcaaaacatgtccattagtactatgcgagtgtgtcaaacctagtactttaccaaagggacgacccctgcatctcattatagcttgttttgcacgcactgccgactgtgctgcttgattggtacgagccacttacactgctgtgggaccatcatgccagaagtgaaaggcgtccttgggccatcaccaacttgctagctggccctggctgacctgatggcttctaacctgcaccgatatgacccggttcatccttgtttacacaccaatacaccatgcatactgcatccccatggaataggacactacagggaatctctttatatgatccttccgaggccagacacccacattcctgtgtaatcatacccagcatatgcggtaccgtcaatggctggcacctacccactgtccaaggattggaatgactactttaatcaaa

SEQ ID NO: 49031 - DNA, 324 bp, Gossypium hirsutum
  unsure (1)..(324): unsure at all n locations
  Clone ID: LIB3828-021-Q1-N6-A4
acaaaactgcccaattcaattaatttggttttaattttgggcggggcttaccgaagtaacaccggggacccaaactaatacaattaaggggatgcaaagtttgggggggggggtccctttcaattacaacattagaaacagggacctggaaatcacctttattggttctaacccttccacgaacttttgtttctttcccaaacggggttttattcgggaaggttttagccaaattagaaataactngaagcgtagggggttgtcgggaagtgaaaaaaggggaagtgggggggttaagccagagaatgcaagttatagaatggg

SEQ ID NO: 49032 - DNA, 451 bp, Gossypium hirsutum
  Clone ID: LIB3828-021-Q1-N6-B5
ggggtggggcttaaaaaacccaaaatcaaccccgttcgactggcccaccaccaccgttttaaggggccgggaatccccaaaaaggggcctttaccctcgttttaaaaaaccctaaaaaaaccacccctaaaaacccaaaaaaaaaaagttgaataaaaagggttctaaaccccttcggggttcaattttaaaaacggagggggaccctccggggttaaaaccgggggaaaccggttttgcaacccgtgaaaggggaaatggtaaggggcgtggatccccaggagaggccaaaacccgagggggagggggggctaaactttgggggctagggtaaggggggctgctaaaaaaaaaaaaaaaaggggctagggttaaatttatttcggccatggaaatggggtttaagttggggcctaattttgaaaaggacttttattattgggactttaaa

SEQ ID NO: 49033 - DNA, 562 bp, Gossypium hirsutum
  Clone ID: LIB3828-021-Q1-N6-C11
gcaattacattgattctgctataattcatttatgagtccaaaaccctgggaaaggagcacatacataccatgctataacgctccatgcgaatgcagtcaaaccctgggtgagcgataaacaacttggggaacctactgcaaaaagaaaaaagcggtggacgtggcaagttcggaagcccatttgaactgggcgaaacaatataaccttagcacacagggtaaggcctttccgtgtaggactcgtccactaatggtgctgacaccccaacagatatgattagcagctctgaccttgagcatagacgaccaatttaaggattgacattgcacgacaaaacatgaagcactctcttacctacagaagacatggatgaactctctgtagggcctacagatgaatttatgctcacacactgagggcataaatccccataatgctgacaaagtctaacggaaaaagcgggccgaaatacccatccataattgccacaaaggtgcaagcagacgttaccttctgaatacgaaaaacatcccgcatgtaaacaaagaagtcgaaatactc

SEQ ID NO: 49034 - DNA, 145 bp, Gossypium hirsutum
  Clone ID: LIB3828-021-Q1-N6-C3
caaacctattttagtttaataattttacccaaaccttctcaaaaatatttatagtacagggtgaataacccaacctatggacagttctattactatcaatttataccaaagccaatccctacaaaatcgggcccccttccaacct

SEQ ID NO: 49035 - DNA, 496 bp, Gossypium hirsutum
  Clone ID: LIB3828-021-Q1-N6-D5
gggtcttataaatagttttgtgaccctgtgtcttcaatacctaaaattttaacttgacattccatctttagcacttccctctaagcctagggatatttacacatttttttactacaaaagtgttcacaaattcaggacatcactgcatgtgtagaatgaacccccaacttttccaacaacttggggctcttcttcttcctctcttttctcccataacatcacctaccaaccgacctcatcttcaagcagacactaaatccttcaatgtttttctttggcaagaaaccgatccatttcatcttcaccataaagaattttagccccacatcctctttcatccactgacccaagagcttcttcatcgaccaaaaccgcattcaccctgtgagattccatcttggtgtttggaatctcaaacatagcttctgtaagaatgctttccagtatggctcttaaacctcgagcaccagtattcttagccattgccttctttgaa

SEQ ID NO: 49036 - DNA, 387 bp, Gossypium hirsutum
  Clone ID: LIB3828-021-Q1-N6-F4
aaaaccaaccccccccccaaattttaatatccaccctaaaaagttaaaattctaatttaaataccaaggcttttgggggggggtaaataaaggttggccatcctaaataattaaaaaaaacaaaagggcccccaaataaaaaggaaacctaaggcccaccattttaaagtcttttttaaaaaagggaatttttttgctaaaaaaaagggaacagctcctataaaaatcaggggggaaaggggaacaattggaaacatccctgaaaataaaaaccttggagggggaaaaaattgcctcccggcaataaaaccattaaggggacctgcaaaaagggaagggtaaatcatacttgcccctgaattgctgaaaaaacctgctgttgccttt

SEQ ID NO: 49037 - DNA, 451 bp, Gossypium hirsutum
  Clone ID: LIB3828-021-Q1-N6-F5
aacaaaaacactttttatgggggctatagttagaaaaatccactggtcatgttttaaaaaaacaaaacagggggggggttacccatgaccaaattcaaagaccataactggagagaattagcaacatcactggccccccgaaggaacccctatttgattacccccacaaaaaacacaagggggggtcactattataccggccaaaattggccgacttacaggggacccaccgggtttacccccatgaaaaggaaaataacacgggggaaaacaaaaaaagagaacatgggaaaacaaaaaaaaaagggcaagggcatgaaagctaccctggtatcaaaaaatatgccataaggagcccttttggggctgaagaaaagccgaaaataaagtccaaagacagacaagttgggctaggaaaaaaaaaataacacattttgtcaagggagaaaaa

SEQ ID NO: 49038 - DNA, 381 bp, Gossypium hirsutum
  Clone ID: LIB3828-021-Q1-N6-G1
gcaaatataaagtttttatttgtttttggacaccaacgcatttttaaaatcgtttatggggagccaaaaaaaagggccgaaacaagaaaaaaaatgacaattacaaaaaaaaaacatcacgaatgggtaacacaagaaaattgtcttcgtcatcaccatcaaattcaaaccaaaattggacccgaaagggaacccggctacaagcggggcaaaagaggaaaactgggtttccaaaaaacaggagggacaatcaaattctaatataaccccaggacttaaaagcaaaaccatgtcggaatccaaaaccgaagttatccggggagcgaacgcgaagaccggccaaaggggaaagggctccctaaacgacattagaataagggg

SEQ ID NO: 49039 - DNA, 169 bp, Gossypium hirsutum
  Clone ID: LIB3828-022-Q1-N6-A11
gattggaggaagaagatgaattgtttgagggtccatgggagttttctagttggttgccatatgaggagttgattcacttgtatttgacaaagaagatgatataaaaatccatttttttgttataacttataattaatgagacattggcattctacataattttccgctt

SEQ ID NO: 49040 - DNA, 590 bp, Gossypium hirsutum
  unsure (1)..(590): unsure at all n locations
  Clone ID: LIB3828-022-Q1-N6-B10
gacaccgacccaactctctataaacttaaaagtgcagctgtgtatgaatgcatcctggtgagcaccaggagatctgttctaagggctgagtgatcccattaagcgaacattacaaaaacaaagttcagaattaccaaagaaaattacagtactaatttgtaaagtttcggtgtccagactgtagggtactgaacttctataactcaagtattataactcacagaaaattccagaaaataaggaataattatatgaatattacatgacatgcaaacaaacttctattacacaaagatctccaagtacagctgaacattagttcaccctgggctactgttccacagacatttctttacaccaatacttcgccatcagcttctcaacaatactcttcaatgcaggagcgctaatactgcacttctgttcagaaaaacaagatttgccttcttcagctgccttgcaaagctgtggatccaatggaacctttccgagaaatggtactcccatttctgtacacatttttgctgcaccaccaccactgctatcaaanatttcactggcagcaatgagatctagcatttcaggtgctt

SEQ ID NO: 49041 - DNA, 548 bp, Gossypium hirsutum
  Clone ID: LIB3828-022-Q1-N6-B5
tttttttttttttttttttttttttttttttttttttttttttttttttttttttttttttttttttttttttttttttttttttttggaaacggaaaccttgattttttttgggggggaaaagacaataggggaaggggaaccaaacccaaacccgtttttaatacacaaaagaggggggggaaactaaaggtccaacacccccaacaaaagggaattttaacccggttttagcccttattttaaggagaggggccattggcaaggggctccatttgggggggagggttggggttttttggtttataccacaccggacaaacaaaatacagggcgaagtttatcacccctagaacgggtaaaaggccaaaaaagcaatcaagtctcccaggggttatgttatccggtagccatccttgcccaaaatgggttcccggaacttttttaactacggaaaccaaaaaactgggggcaaaaaaacccaacgattggggggtgaggaaaagaccaggggataggggtttcattccttggggggagggggggag

SEQ ID NO: 49042 - DNA, 409 bp, Gossypium hirsutum
  Clone ID: LIB3828-022-Q1-N6-C1
aaataatagaaaaaggagaaacaaactttccaaccgtacatccggcttacatgcttattcactaaattttttcacgagagtaagttctatgaaatcataggctgaacaaacatataaaaacattgtagaaataaaccattgaaaacgcacactgacaaaaaggcagtggaccaccattgcaaccctttaaacatgccatgattgacctcgattatgcgctcatttacacctaggtacataacacccactaaaagccttcaccaggcgacctaccttgttaaccacttaacagcctaggtataacatattgcctggcgagagcttacactgggtttaaactacaaccctggttgtatccagggaaggtaaaatttccattactgagactaaccattgaacccttaaggaa

SEQ ID NO: 49043 - DNA, 544 bp, Gossypium hirsutum
  Clone ID: LIB3828-022-Q1-N6-C11
aaaaatcaaactctttacttatttatttatcgatcttacagcaatatggccaattggctatcattgtttaggcaacctgctagaggataacgacatgataacataatgcaaacataacacaaaaaatagtgaaaacacctaaaatagcatgaccatcaaacaaatttataatacgagttataatgtaaatataaacattgtcaccattttaacatgaagaggacattatacagcaactgttaggtctcaagaataagcccagcaaatgttatccatcttccatgtgcacctagcaataaatcaagggcaaactttaacgtgaatgagtccaagacatgttctaaggtacgccgcagtcttaagatgggagaactccttaatgacacagacatgtcgaccatgctatctccgaacaggaaattatctccaataaaaaatcttcttcttcaatggagtaactcattctttgcttcctccttgtaaagcattgctgtcttcaccgtacgagttctatcaaccctatgcgatcaagatcactcatttg

SEQ ID NO: 49044 - DNA, 489 bp, Gossypium hirsutum
  Clone ID: LIB3828-022-Q1-N6-C12
ttttttttttttttttttttttttttttttttttttttttttttttatttgtaccatatattatgcctaaaggccctaaactattttatcatatgttggcaaaaaaaaaacccataacaaatgggcgcccaaaaggaggccccaaggcaaatgattttgcaaagcaagtgggggggcatataaagacccacaaaaaaagactgacagaggggttcccaaaaaaaaggggtcccattaattggcacaaaaagcattaaaaaaaaaccagaaaaggctcaaccccggggggaaaaaaaaaagggcccctgttgttgcacaaaaacacaactttggtatcacccgaaagagttggacacagggggaccaaataaacccccgctcaagaaatagcagaaaaaaatttggtgcccttcgggggaaagaacgcccgcccacccaaaaaacgcccgtgataagagtctccggggggggggaatttcccctccgggg

SEQ ID NO: 49045 - DNA, 574 bp, Gossypium hirsutum
  Clone ID: LIB3828-022-Q1-N6-D12
gagaaactctaaaatctactattcaactatatcaactccaacagccatgactaagtcagaaagcaacgacctccaacagctccctgacggtctcttcaccaaatgcaaaccatcaccagcaccctgtacccacttagccataaaatttgcagcaatattacaagctctcggcaccttctctagcttgacagtccagtgtcactaaagcatccccataatctatcgaacaagcgagcatacatgttcccctctcgatcctctgcatagtaattgtaaggcctcaatattatcactctccctaaccacctatcagaatcccttagcccaaggcacctttaatccatcaaacaccacccacagctctgagtggagcaccgacgtcattccaatcttcttggagaacccgacatcccagctcccataatagttccggaacaggccccagtccttgcctgacaagttctttccgacacaaccccgtcaacattcgtcttcacccatcctagctccagacagcgccatcgcaaatttccagtccccgttcgcctccgactctcaaaaacaatagcaacat

SEQ ID NO: 49046 - DNA, 548 bp, Gossypium hirsutum
  Clone ID: LIB3828-022-Q1-N6-D6
ttttttttttttttttttttttttttttttttttttttttttttggtttttttttttttttttttttttttttttttttttttttttttttttaaaacaccaacaacccaaactaatgaacaaaaaacaaagcaaaccgggggattttaggggctaacccaaaaaaaaatgcgtccaaaaaaacagtcaaaaatccaaaaaaagggggtaacaaaaaaacaaaaatgccctattgataaaaaaaaaaatcttaacaaacttatttgccctgttcccctttttacccattttttaaccttacttggccaaaaaaactttgacaaacccctaaaaattgatctgcccaaaaccaaaaaaaaaagtttaacggataaattaaaaaacttcctcatttggaaacttttcacccaaatttgtcatgaaatggggaaactcaacagcaaatataaaaccattttggtccttggaaaaaaccctgaaaacccttttaaattcttcctcgaaaaaaaaaccttaattttccttgccattggggtaaggaattcagg

SEQ ID NO: 49047 - DNA, 107 bp, Gossypium hirsutum
  Clone ID: LIB3828-022-Q1-N6-F1
gattgtaaatcaagaattggtatgagctatgcattgttgataattactgtttttaagcaagaggattatataacaaaccctagagaagcatgataacttcttatgag

SEQ ID NO: 49048 - DNA, 413 bp, Gossypium hirsutum
  Clone ID: LIB3828-022-Q1-N6-F11
acccccacccaagaattttttaaattaaaaaaaaaaaataagggggggggaaaaaaaaaaccaaccgggtaaaaaaaaattttttttttaaaggggggaaaaatggaaaacccaaaccgggggggatttggaaaattggggggggaaaaataaccttgaaaaacggggcccaatttgggaaacggggtttggatggtggaattcaaatgggggcccgaaacaaattttaaagacttcaaaaagggtgagaagggtgggaattaaaccccattttttttcctaggggataattaaaaaaaccctgtgtcattgtaaatttttttaaaaaaaattttttaaaaaaaacccttttccccgggacagggggggcgacccgagaattcagaaaaggacccgggggggacacaaaattt

SEQ ID NO: 49049 - DNA, 449 bp, Gossypium hirsutum
  Clone ID: LIB3828-022-Q1-N6-F2
gggggaaaagggggtaaactttttggggcaattttaaaacccaaaattaaaggggcaaattttttaaaaaacattcaacttaaaaggctaaaaggggaaaccccaaaaaaaaaaaaagggcccccttaattggccattcaaacaatgaaagcgccccccccgacaaccttttgaaaacgtaatctctcataaaaggaaacccccgacattcgagggcggccccccgatgacaacattggaaaacttttggatataaaacagcattttttcattatttaaagtcacaaagtttatggcaaccccttttttcccaaacctaccactttttccaattcggcggagggagttttctggttgagtaggccaatcgttttttataacaagggaaacttgctgcacataaataccacgggctaaaaaatcgggggggatgaaaacaccggaaaaac

SEQ ID NO: 49050 - DNA, 506 bp, Gossypium hirsutum
  Clone ID: LIB3828-022-Q1-N6-F6
ggatggaattaggaggagatttttatttaaacccacgcgtccgcaactggcctttgaacgcgagtttacttactttcctggaccccctccacccttcttgcccaaaacgtataagtctttcacatttaacaccatctactggatatgtatgtatgtatgtatttgaggccttttataaatgggatgctttcgatgcaacagctttggctccgatgagtcgttgcctcgaaagaaacaacctttacttatggaacaaaaaaggcaaaaagtaattttgctggataaagaaattggcttcaacgaagctttgattgatgaaagaaaacagggtttcagaaaagttgaggatcaaataggacaagtaaatgaaatatttaaggaccttgctgtttttgtccacaagcagggggggggcattgatgacatttcatcaaacataaatgcttcctttgtttcaacaacccaggctagagggcaactagccaaggctttcaatagtgttaaac

SEQ ID NO: 49051 - DNA, 426 bp, Gossypium hirsutum
  Clone ID: LIB3828-022-Q1-N6-G1
gcaaaaataaaaaagtaatttttcccattccttgatctaaaaaaaaacaaagcaaaaggatttagggacccacaggtcaattggacaaaaaaggaggaaaagggccgaaaaaaggggaacccctagaaaaacagggggagcgagaaaagcgggaccagggcaaaaacccggaggaaagcagacccaaggaacaagagagggccacacacaggggaccaggcagggatccccaaggcaaatattttccttaaccttcagaaaagggaaaccccccgccgccccaaaagggacgccattgaagcaaccccggctcccagctacaacgccccccttccagggattcctcgcaggccggccataaaaaatacaggttcagcctcaaccttgaaaaccggtttagcaagacggggaatccgacccccaaaa

SEQ ID NO: 49052 - DNA, 223 bp, Gossypium hirsutum
  Clone ID: LIB3828-022-Q1-N6-H9
aataggaaatagaacatgattataacatgaaaaaaaacacaaatacggggcgaatacaataattgtcaaggctagcagatatactaatagacagggatattttacatatagattgggcaatagctcaatcgtcgtaccatgaatatctggccgaccgaccttgtgagaaatattggataactagttatgcccggatctcggaacccgttaaatggaaatgaac

SEQ ID NO: 49053 - DNA, 603 bp, Gossypium hirsutum
  Clone ID: LIB3825-003-Q1-K6-A4
ccccctcaaaaaaaaaaaaaaaacccaatcacaaatcattggaggataagcgacgaacagcctcgaaaccttgtagctaaactaagttcagtttccgaacggaccgaattgaagctttggccgacttactactgatttccaggcaggacccggaaagccgaccgttaatagccgacgccggcgccgttccttacctttccgagacccttttctcttcttctccggcaatacaagaaaacgccgacgctactttgttgaacttgtcaattacttggcgcgattctatcatgtccacacggggctctcctctatgcgttatctcacgctctgagcaattcggcttcacagggggcggttcagtcgtgcgccgtcacgcttcacagcatactaatcgccgacgagtcttaccgttcgataatagggtcgaaacgcgatatcctttacacgctgttgtcgatcataggtgataaacacgctctggctcgttcgattaatgactcgttagaagcgttgctcgggatcgcgctttaccaattgaatcgggcgagcttggtgggtctgggagcggttccagcttaggagtcattgatagctagggatgct

SEQ ID NO: 49054 - DNA, 605 bp, Gossypium hirsutum
  unsure (1)..(605): unsure at all n locations
  Clone ID: LIB3825-003-Q1-K6-A5
agttaatcgaaactcganaactggtggatactaaggcagagaaggagcattggatgaagcaatcaatctacagagtgcctgctgccattgctgagcttaacaaggaagcttacatgcctcaagttgtgtccttcggtccttaccaccatggcgaagaccgtgtaaagcccatggaggatcataagaaacgagcactccttcatttccttaaaagatccaacaagcctttggatttgtttgtggagtctttgaataaggacttgcagaaattgaaggaatgctatgatttgcttgatcctatatggcaagatgacgacaagtttttgcagctgatgattgtggatgggtgtttcatgctggagattctacgctctgctactcatacaatggatgattatgctccaaatgacccaatcttcagcaaccatgggaagatacatgttatgccattcattaaacgagatatgttgatgcttgagaatcaattgccaattcctgttctctacagcttggttgctgtagatagcaatggaactaaggatgaagagttcgtgaataaacttatactcaagttcagttccccacatacgcccatcttgaacatg

SEQ ID NO: 49055 - DNA, 570 bp, Gossypium hirsutum
  unsure (1)..(570): unsure at all n locations
  Clone ID: LIB3825-003-Q1-K6-A6
gcaattgcctgagacatgaaggatcctcccatcctagttccaccccgaacccttatttgaacatgtttcgattcgactttctgcttcggtttcatcatcagctaaactttcagacatccaaatcaactgagaaacataaacttctgttatcatcctccacccgngaaaagatttaacccttttgttacttagaaccaattctttttaccaccaaaaggaaaacccaaagcttcctctattggtgctgctaattttgaagagagtgtctttttgtcttgattttatcggttatgcagatacctagatggcgaaacgtgtttctactgaagaattcattggttccacctttcttatcttcaaaagcaacggctactgttgcaacaacccacgttgcttcgtttcattctacgcctgttacctgtgaaaaatggaagagcaaatgggattttgaggaaagaagaacacaacaaccaattaagaatcacataagatatagagtacatcaaaggcgtgctgacgcaaagagtgctctaaaaaaccttctctataatagtggttgctcaaatgttt

SEQ ID NO: 49056 - DNA, 632 bp, Gossypium hirsutum
  unsure (1)..(632): unsure at all n locations
  Clone ID: LIB3825-003-Q1-K6-B1
tctcaccctctcaaaacctcagcggcggccactatcttacagaacaactaaagaagcagaaccaatgggaggtcgaagagggtctcgtactcaaaggaaacattttaaacaaagcagagaaaatgtttggaaacgaccaaaaaccgagtcttcatctgaccccaataaccctgcttggcagccttttgctactcaaaacccttcctttgatgaatattacaaagaacaaaggattgtttctcctgaggaatgggatgctttcatggaaatgcttagaaaaccattacctgctgctttcagaattaatgccactagccaattttgtgaggatattcgttcacagttagcgaatgattttatgaaatctcttcaagctgaagctattgaagggggtgatttggagcctataaaacctttgccttggtaccctgataaccttgcttggcaatcgaatttttcacgcatgcagctaaggaaaaaccaaactcttgagaggtttcatgagtttttgaaacttgaaactgaaatagggaacatcagtcgacaggaggctgtcagcatggtgcctcctctattccttgatgtacgtcctgatcattntgtacttgatgtgtgcgcagcacccggttcaa

SEQ ID NO: 49057 - DNA, 553 bp, Gossypium hirsutum
  Clone ID: LIB3825-003-Q1-K6-B2
cttcgataccttctctgttgggtaccagcctccattaccagctgctacacgtgacaatcattcacagaagttgatcatgaacgagagggctcacctaatgaccgaggtaagggccgtggagctagaagaaggccgatgagtacatggaacggttttgtctctgctgaatatgatgaccgaagctgggaccgcactagtagctatgctacgggtagaggtcgaagaagacgacgtgaccgtccggggccgcagacgtataggatacaatggacctcatttcgataggctgcacaatgaatgctacaattatcaagcccctccctaagtggccgtagacgaagatcacagcaaggaataccgtaggaagagccgctgtgtttagatctaatgtgccaatctatgcagaataatgaggaggtgcgtggcattgcttgaagatatggaaatgaccgaatgtggatgctatgcttatctatccatatacagatgcaactttattctccttaaacgatgatcattagctcgttatctatataatatgacgtaacggtgc

SEQ ID NO: 49058 - DNA, 540 bp, Gossypium hirsutum
  unsure (1)..(540): unsure at all n locations
  Clone ID: LIB3825-003-Q1-K6-B6
ggccagaagtacaaacacaggtcccaagcaccaagggctgatctctacaagcatgaatcgacaaaactgcacgtgnaggcagaatatctacatactcctccctttagagaaccttggaaaaaggagtcagtggacttaatatagcgtatgcctatactgtgcctacaatatgaggaacacatttactgtcgaagagattgatgcctaactcccagcactgaaaaaaaaagtcgaagatgctttcactacaagccattcaatgattctacagccaccaactagcctaattcttcagtttgcagacagatggatgattggatactttaacacccacattgtatatatcctatgtgcccatggagacatgcctgatggcgtgaatgatgatattacggctgatggaagtgatgctgctcctaatattgatgtaacagactaagacattgccattgtgcatctggttcatctattgtgccttcggatgaattttgacctttaaaccgatcgatagctttacatgcacactatatcacgatcacg

SEQ ID NO: 49059 - DNA, 472 bp, Gossypium hirsutum
  Clone ID: LIB3825-003-Q1-K6-D3
gccttggctctacatcaagggatgagtatagctggactggccttgtgtattggtggcgcttaatccggttatagatgtcagaacgttccctggaatataaacctattgtcgatccattggcatctaaagcggctgatcctctagcagagcatacataatgcattcctcactgggccctttatcagagtgaattatgtcaagctcacagatgttcccttgaaagaatctaaacacaatagggttgtgcatagaaagagctagatccgttaagaagtcatttggtatgaagtgtacagatgtcttatttatcagatgataaaagaaactgcccttgaatatcgagcgtagtacgattctttcaaatgaagatagccaagggggttctacacatacgcgcttaacctcctctgaattcatatccatttaagacagagatccgtatgacggacaaacactgttgttttaaaaaccc

SEQ ID NO: 49060 - DNA, 610 bp, Gossypium hirsutum
  Clone ID: LIB3825-003-Q1-K6-E2
cggccgcgtgggttccagaggtggctcatgagacccataaggcttcctgaaccgcccataggacggaggagcgcggcggaggtgttcgaagccgggatttatgggataatcaaacgggttgttgtgataggaaatggcttctcgggagctgagaatcaatgcatcggtttggttcgggctttaggcctctcgggttgtcttactttatatcgtgttacaaggccaagaggaggaatcaataagtggctacattggcttccggtttctcttcataaaaaattggattatgttataaggcaaatttgcatctattcaggagttcaaggggaagctagatggagtaaagtggttccttttgcagttgaaaaaacgggtatctgttttcagctctcaaattatatggtttcatattgcagtaccaaagatggcacccttttatgttgaagaagtctttgatttgtccttttttttgtacccccccccaaaaaaaaatcaaaattcatatgagaactacagggctgtccagtgtaatagaagctgatgcaaaacaaattgcaatgatggcacgggatacatttgagaaggagggccctctgttggtcatagcgtc

SEQ ID NO: 49061 - DNA, 614 bp, Gossypium hirsutum
  unsure (1)..(614): unsure at all n locations
  Clone ID: LIB3825-003-Q1-K6-E4
aaaaaggaggcttttcttcaaacaaacttgtctttcaaccccaacaacaatagcaccnaccaacaaagatgggaaaaacaatgataaggctaacgctatacgttcaaaacattctgtcacggagcagaggcggaggagtaagattaatgaaagatttcaaagattgagagatttaataccaaacactgatcaaaagagagatacggcttcgttcctgctagaggtgatagagtatgttcaatatttacaggagaaggttcaaaaatatgaggattcataccagggatggagttctgagccggcgaaactaatgccatggagaaatagtcactggcatgttcagagtctcgttggtcacccacaagctattaaaaacggttctggcccaggggcaacatttgctcggaagtttgatgagaataacaccaatattaaccccacggtgatcacaagtgggccgaatgctgtagaaactgatccaatcagatatgttacatccaaaactatggattgccaaactgagttggcaaacaacggaacccatctgcccatccaaggtgagaatgtgcttgtgcatccccttcggagaccagtctctgagactcaatcgactg

SEQ ID NO: 49062 - DNA, 246 bp, Gossypium hirsutum
  Clone ID: LIB3825-003-Q1-K6-F4
caagtttggcaattggagttttgaaccttgcattgttattccacagtgattgtatctctgggagctggtccatgggatgctctatttggtggaggaaatataccagcctttattttggcttcattctgtgctcacgcagcctaagagttgcattaatccagcgctgcttctaatgccgtggtgcccgatcaagtgtagtctcctgctcttcttgtccttgggtgctgacgttgcttcttctgttgg

SEQ ID NO: 49063 - DNA, 458 bp, Gossypium hirsutum
  unsure (1)..(458): unsure at all n locations
  Clone ID: LIB3825-004-Q1-K6-E3
tggtagctttaagttactatcaatttgttcaatgataagcgattaaacgccatttgggtcattagctctttcacgaccgtttttacataaagcagaaatgaagtgttacatacaggcttgctcaggggcctctaacaaatcttgtgatttatagctatggctttggctgctcttcgtatagtcgtgcaggcgcagtgttattggcccatgggatttggtgtcacctacttatgtcttcacttgtgttgatgcttatttgacttggcctttattttatcctccacaaagctcttgcctactttagagtgcataagctttgttgactgtttcattagataatcatactctgactattgttatatttgagncccgggtggattattgtggttaatgatcgctnacaagtaggaagcacagaaacagaaacacggatcgctccttcatagatgtagaatctt

SEQ ID NO: 49064 - DNA, 214 bp, Gossypium hirsutum
  Clone ID: LIB3825-004-Q1-K6-G1
gtacattcatattctgtgtgtatagagcacacctatacatcaatgcaactggtccgatcgtgtttcacatgcagacatggacttggcaagaaacctctgttcgtatgctccaactttgaatacgctctgtgctagtcagcatgcaccctctttgtctgccccgcctcgcacagttaactgactcggataggagtgctccagtcgagccgagtca

SEQ ID NO: 49065 - DNA, 585 bp, Gossypium hirsutum
  unsure (1)..(585): unsure at all n locations
  Clone ID: LIB3825-004-Q1-K6-H4
ggngtaagtaggnaaacaaaagctccctcacatatctctatcctttttcttttaacctctttgtcctggatttaaactccttttacttatcagttttttaagattcaaagttaagttttttgccttccttaatctatgctaaaaaacaagtttccttccatttccatctgctgcctcatgcaactgctgactttcttacatcaaacaacacaccagttcttatcagcttaattcatcaaaggtaagttcttttgcaacttttagcatattttaccagtaaggccccttattatttattcccatttcctgtttgagttttcatgccaaatttatggtttttttatataattaatcccttttagtccttcaaaaaggcttcatttgtctgctcaaacacaatttcaggaaacaggttttgggtattattgcttattcctttaattaagtgaataaatgatggtgaattagggtttaaaagatattagtaaatgttttactactatatattagtttaataaaaggtcagggtgtctgggatcaagagttttttatacattagaaatcatagttttaatggaagtgaaa

SEQ ID NO: 49066 - DNA, 492 bp, Gossypium hirsutum
  Clone ID: LIB3825-005-Q1-K6-A1
tctatatcacacagatcgcgctctatataatataagatcacacacgcgcgcgtgtgacacgatatatcttttatatagtgacatatatataaaatacagtgcgcggcgttacacaacgtgcgacagtggagaaacactgtggcgacacaaatcaaaatcgtcgcgcaacatatccctttttccagaggtggtgatatagaaaagaggcccacacagagcgctcttcaacacaggcgcacactcaatggggaaagtgacacgcgctgtgtaggggcataaaaagcgcggggtgtgggggggacacgcacagtgacacctatacacttgagagcgctatagcccgctcttcttgcgctctctcccctctctttctcgacacgtgccgggtctttccgtgaagatctataaatggggctctctctatagggccgatatagagcgctacaccgcatctacaccaaaaaacacgatatgagggagagggcacatata

SEQ ID NO: 49067 - DNA, 595 bp, Gossypium hirsutum
  Clone ID: LIB3825-005-Q1-K6-B3
atctggaccgtccattttcaccccatataactcgatctctagccacccatttccccctctctctttctgcctcactcgccgagtccacctcacgctgattggtagcaagatctggtaggactctgctcaaatcgttttgtaatgagaaaacatgtcaagggatggcaccgtaaaaaaaccgataatatcagatcctattggtactccataccattatggaatctcttgccaaggatatctaattaaatctcataataaaacccagagccaccaatgatcccttattatgctgctagcctcacaataaatacaaatttctccaaccgctgaaaagcttgtctacccctttaagccacctatctggatcatcataatgaaatacgcccttccgagaacaatcgaccatgctacacggattgcattacccacaagctatctattcagaatgctattacctttctttactgaacctgcttatgaaactacgcatgtcggagcaaaaggagacaggaagatcaggtacatcacttgaggaaagtcattattctatcattacagacaatcatttacacactaataagaccgccaaaacatt

SEQ ID NO: 49068 - DNA, 490 bp, Gossypium hirsutum
  Clone ID: LIB3825-005-Q1-K6-F2
tagtaaagcacaaagcagcacatcctgagctgaagaaccgccttccccgacatcaagcacattttcaagtcaaaacccaaaggaagtagctgaagaggtgggaccttcaaggtggcttcacaggtggctaaatcagctaccccatcagcatcctcaaatagccaaaaaccagatcctgcatctgaaagtaccagtcagcctgcagataccgaagcagaagcaatgcaaattgaaccggtgttgccttctacacggaatgaagtcacaaaccctcccccaaaagtgactctcatggaagaaagcattcgagtcacacgtggtagattgaggaaaagccgttcaggaacccgttaaaatgatcgtattaattccttttctttttagtttactgaactagcacttgaattggtaggcgtatcgttgttgacattgatgtaaatttccctgttttctagtttctatttcattcgttgcttcattattatttttc

SEQ ID NO: 49069 - DNA, 613 bp, Gossypium hirsutum
  Clone ID: LIB3825-006-Q1-K6-A2
aacctctcgatcgagtcaagcgtctccttcactacgcttctcttctccctcctctccctgcttcatcccggactgattcgaaccgggttatgggctgtacagcccgagtttggctcgacgcccagatggactccgaagggaacatcagattctgggccgacagtgattccgagattaccaaagggttctgtgcttgcttggtttcggttcttgatggggcggggccggaagaagtgttgcagttgaaaacagaggatttagcggcgcttaacgtcggactccccggtggtgaaaggtctcgtgttaacacttggcataatgttttagttagtatgcagaaacgaaccagggctttggttgctcaaaaggaaggaaagacaccatttgagccatttccatcattagtgatcactactgaaggtattcagccaaagggaacctatgccgaggctcaggcaaggtatttatcccctgacaagttaaaggtgaaagaacttgtccatgttcttaaagaaaagcaaattggtgtggttgctcatttttatatggaccctgaagtgcaaggcatcttaactgaagctcagaaagatggcctcacattcatatatctgac

SEQ ID NO: 49070 - DNA, 305 bp, Gossypium hirsutum
  Clone ID: LIB3825-006-Q1-K6-A3
agcgaatacaatttctgtaaccaactacagtatagcacatggcggtgatgctcctgaatgagactgttactctggctgtacctcgatacataggtaagctcgtaaatggtcgttcatgccctagattgccgcgtttttcccacctgtaggcctgacaccatattcatgagccactgatactacctgccttctcttaggtcaatgagtatgctgctgcaactgtagcggaccatatacatgactgccatgatggtgactggaactgcatggcgatagagattgctgatacagttgtatcctttgat

SEQ ID NO: 49071 - DNA, 595 bp, Gossypium hirsutum
  Clone ID: LIB3825-006-Q1-K6-A4
gcaaatgcggatgccacttcgtcgtgaacttccgaacgagagcatagggccgccccctcgacgttcatagcgacaattcctgaagccgatctaaaaatccatcgtcataagcgccattgaagtttatcttcatcgtattcccagaaggctttccccattttccccccagattcgcactttgatagtgcacagcaaatgatacacttttggttaaacgaacacccccaatagcccaggacacactcgaaatacatgggtgattgttttagttacttcaccacatcgatggacacattgtaatatggggaagcttcttatggttcttgttcacaagagtggggatgtaattccaggagatcctccaaactgtaatatttattttcccaaggagatttaggccccaaagttgtttgtataattctttagctttgttttttaatgcataaacattaggatccataggatactttcgttatggtttgtaagtattgcgaaccgagaactccctaaagggctcgccactccacaccatctgatcgtcatgtgcttctcgtaccagcgggatacggagaattctagtggcatctttcctccc

SEQ ID NO: 49072 - DNA, 381 bp, Gossypium hirsutum
  Clone ID: LIB3825-006-Q1-K6-B6
gagcatgcctttctgtatgtatacctcatcccatctaacagacacatttactatgcctaggatagggtataatctaaaaaattacagctacaagctgaacagagcaaagtcactgcctcttctggtgatataccttgatcttattaaaaggaggacagatggttcttacagggaattataatccaagactagtagagtgtatcaactggagaaactatatatggaaatgtcactgaagaatgaattacaataaaaagggtcggaagcggaaactccgagaagacgagttagtatgttcaacctccaagctagcggataaatggagatcagaaagaaagaggggacaaagatggttgagttggtgatagaggcaatttggct

SEQ ID NO: 49073 - DNA, 612 bp, Gossypium hirsutum
  unsure (1)..(612): unsure at all n locations
  Clone ID: LIB3825-006-Q1-K6-C1
ttcagnagcagtagcctacatcaagnaactaagatcaaaaatcgataaactagaggctcaactcctagtacaantctgaaaaatccaagttgaaccccatcaatgttttcgaaaaccaaactaccaaatccgcattcgacaataccatgaaacaatcctctacttattggccaaagacagtggaagttgatgtgaagatagtaggatccgaagctatgattcgggttcgaagtccagatatcgatcatccagctgcacgattgatggatgcacttcgagacctagagctaccagttcaccatgccagtgtatcaaacgtcaatgatcttatgctacaggatgttgttgtcagagtccctactggaatattcataaccgacgagatgcttagtactgcaatccttcagagatgcacgttgaattaggtagctagctaggtagccctgcagtgagatgcactttttttcttttttgccttcttttgtttttttgtttgatcaatgtttcttgttttattcgtgcattagttctttaacatttcctatatatgttctacgtatagataggtttcaattacgacctgcttttatcagatttcatcatttcattggc

SEQ ID NO: 49074 - DNA, 569 bp, Gossypium hirsutum
  unsure (1)..(569): unsure at all n locations
  Clone ID: LIB3825-006-Q1-K6-C6
ctttgattccgccaagnatagttggnaaaaaactcaaccatccgtctctactattgcgtgatcataaccgcgactccatcccggttgcagcgtccggtgatctcgtttgttttagaaacatatctggcggttacatcgtatgcaatcccgtgactggatcttgtcgcgaactgcctcccgtggatccgggtcagtcccttcttgctattgcaatgaatgcatattccaactaccatggttcatacaagctagtgttggtctctggtgattttccaaaactttcgtttaaagtttataactcgattaccgattgctgggaagaagagattatgttgaggagaaatgccgatgattgtaccaaatccaacgacaacgacgaggatgccgtttacttccttagtacagccggaaacgtagtggtaaccaacatgcaaagaagcccttccaagcaatattcatcagtgtttacacttaaagatggtgaagagattgtttatttcctcacctcctcaggcagagtaatcgcttgcaatcttacccgaaagtgtttctccgaatacccaagactg

SEQ ID NO: 49075 - DNA, 621 bp, Gossypium hirsutum
  Clone ID: LIB3825-006-Q1-K6-D1
tttgatttcttatagaaattgaagatagcgcaatcagggtatgatattaataatctgtttcgggaagctcaatctcggtggttgaagccagctgaagtactgtttatactacaaaaccatgagaagtatcagcttgagcaagagccccctcacaagccaacaagtggctcattgtttcttttcaacaagagggttcttcggttctttcgtaaagatggccatagttggcgtaagaagaaggatggaagaactgtcggggaagcccacgaaaggcttaaggttggtaatgttgaaaccttgaattgttactatgctcatggagagcagaaccccagttttcagagacgtagctactggatgctggacccggcatacgagcatattgttcttgttcattatagagagataaatgaggctaagccctgttctgcatccactgtgcactcaccattatccaattctgctagtactccaagtccaatctcatatacttctcaaaatcctggatttaactctctatctagtgatgtacatgaatcatatcagaacttacctagtcctgggtctgctgaagttagctctgatatagtcattaagaacaatgggatagataatacagta

SEQ ID NO: 49076 - DNA, 521 bp, Gossypium hirsutum
  Clone ID: LIB3825-006-Q1-K6-E2
ccgatggcaacccctttttccccaatctgctagggcttgcaccctattttggtgcaccaaaatggagggtcatcggcaccctcatgccgttgcctccggtgcctatccacggcgaacccaggtaagtctcctttcctccgattttacttttattttttaaaaaaaaacagtttataaatggaaaacattaaacgaaaatcagaaaagaaacaggaaaaaaaaacacctctttaacctttaatctgacttttgttgatgactattgcttgtgtattctctgctgtgggtaaaaaaatcgggaaaaaaaccatcacttttacatttgttttgtttccattttatagccgacttttacaacttattctacatgtttgtaggagcacgtctctaatgtggaggtggagtggcatacaacacggaggaagtgcgtgacgtgcggaagagggactgcttcaatttgttgaaacggcacaaaatgactgatagggtttcctttactgaagatgtgctgggtttgtggg

SEQ ID NO: 49077 - DNA, 606 bp, Gossypium hirsutum
  Clone ID: LIB3825-006-Q1-K6-G5
atgattcagcagaatcaacaagtgaattctgatccttccagcaaatctcaagctgagccagcccaagctgaccaacagcccatgagtaatgcttcacttatgggtacagccacaacaatggcaatgcctcaagctgccattgattcagctgacaatgtatcggttgtttctccctctgttggccctcagtggaaaccatcagaatcagtgtgtgatctgggtttgccaaatgtggccactcaagtgggatccatggggagccctcctcatccaaattctgctcgtagtgattcgctaccttctgtcagccaagtgttagggaagagacaattatcaggtagtctaccctctaatgggagtactgatggggcacagtggccacaacagccacagatacaacaatcttccacattgccaccatctcaacaaccttaccagcagttacaaaatcagcatagtttgctgccacaacagcagccattgcaacagcagtcgcaacagcaaactctgcatctacaaacagtacagggcagcttgtattacaggccttctaattctaagctggaatgaagcaattagtggttggagcagttccaacagcaatgg

SEQ ID NO: 49078 - DNA, 477 bp, Gossypium hirsutum
  Clone ID: LIB3825-006-Q1-K6-H2
cggacgcgtgggggccactgcagaaaaatctttattgggcttgtagttcttggtttttccttttggttcgatattcgaagtccttaacctaaattctcatataaaacactagagaaaaacgaatgggttggaacggagaaagacgaagatatgtggtcacatttctttatcagtcttgttagcgttgctggcggtggtgcaaacgacggcgttccaaggggttaaactgaataagaatgagcatctggaacgcgtacgcgacgatgatgtacatggggacgcccacagattacaagttctacgtcgcgacacgtgtcttgattagatcccttgttaagctccaagtggacgctgatctcatcgatattgccttcctcgacgttaccctccgttgggttcgtgcactaagaagattgagcaaatgtactgaaggtggacaaccttaatatcccttacaaaggtcacagaaaatttcga

SEQ ID NO: 49079 - DNA, 647 bp, Gossypium hirsutum
  Clone ID: LIB3825-007-Q1-K6-A12
gtgatgatctatcatcagtctgcgttgtagaagcaacgggctttcagtacgtacatatacgaggttgtagctttcgtcttttgttatcataaagataatataattgggcccctgtatacaacaaatgggactgtcgaaaatcttagtcaataaagttaagtcgaatggccttgagtatatatccaggcttgtggaacggccatgcggtaatagacacataggaaacgggcaaccacaatcttaaacactagaagcgaaacagcgtaacatggttacatggggacgtcgacagtcgtgaatcgaaaattcaagcagcagaaaattctgaaaagaacactcaaacaaccctttccactacaaagcccatgtgaaaattctgctccggtcttaaaagttccttgatgttcctccatacaatgaatttcaaaagcaaataatgactgaggtcatacctgtaaaagacactacattgcattacgcagacattggtgcgttagaagagaccaaagaatcactgcaagatttagtgatgcttcctttttaaacggcagaccttttcaaaggtggtctactaaagccttgcaagagaatattgttgtttggtactgcaagcactggaaagacatgttagcaaatgccattgctaa

SEQ ID NO: 49080 - DNA, 607 bp, Gossypium hirsutum
  Clone ID: LIB3825-007-Q1-K6-A2
ctatctcttagggttacgcaattcggggataggaaagaaggtagtcttagcccaagttgctcagttgattttacagaataaactgaaataagcaaatccattatgattagactcatattgtctatgtgttgagttgagttgggttgggttgaagaggttggcgcgcgagttcgcttcctgtcttcctgtttcggcctttggcgttccaattcctgacgttaacaattttccaggtgcatgccgcagattgcagaagaggagataggctgaaccgccatagttgattgctggtagttataagttctaaagagaggccaggccaggccatgcctttcaaattccaattccctttattcgcttatgtcatggagggtggaaatggaaatgatccttgtgaaagttcagtattacagaaagatatttatcaagggattgatgatgatgttaaactgaattctaaagatcagagagatgctctggcggatgaacctaaatgtgttatttgcgggcgctatggcgagtatgtatgtgatgagacagatgatgatatttgcagcttggaatgtaaacaagccatactcctcagggttgctaactcattgccaga

SEQ ID NO: 49081 - DNA, 605 bp, Gossypium hirsutum
  Clone ID: LIB3825-007-Q1-K6-B10
acatgtgctgctctttaaaagggcagttggaccctacctccgaagagagaaagtcctcaaaaccgaactaaggatggaaattctggagaggatttcaacaaggattcaattgagcgtgatgaaagacgtcttacggaattgggtcgcaggacggtggaaatatttgttctctctcatattttcagcaacaagattgaagttgcctatcaggaagctgttgctttaaaaaggcaagaagaactcatccgtgaagaagctgcctggctggcagaaagcgagcagaaggctaaacgaggagcatctgagaaggagaaaaaatcaaagaaaaaacaggctaagcaaaaacgaaataatcggaaaaacaaagagaaggggagggaggacaaggctattgtggcagcagagaggaagcatcaagaatatcaccccgatgatgaaaaggaagcccctgtgatggtggaggagcagccagtgcctgaaaaggctgatgttctgggtgatgtttctgactccgttgatgctgccactgaagttcttcagcctgactccgaagacagagatgctagtcctgttaactgggatacagatacctcagaaatccatcc

SEQ ID NO: 49082 - DNA, 616 bp, Gossypium hirsutum
  unsure (1)..(616): unsure at all n locations
  Clone ID: LIB3825-007-Q1-K6-C12
gccagggaagtgtcgtcgtcttttctcagctattgagatggctctctgctctctcaggttgagaaactagtcattcctgcaattgcntgaacttacacatacatggacttcagtttttggtttcagtcctatagaggaatcactcaagcaagatatgagatccatgaatatgctggttttccctggtatagatatgctgcagaagctacttctggagcaaggaaacacgaaaacaagcttgactgctgctacaggtaagaagcaaactgaatcaggatctacggaatgtatcacacctgaggtggctaacaaatttaaacccggttccttgtttgggcatgatactgaatctgcagctgcagattcagattcccagtgtccgaatgtttctatcaatgatacttgtgggactagtggttccttggacgcatcagtcgaacctaatgaatctgcgatgaacagtatacctgatgttaaccctagctcaatccacgatgccaacgagacagaaattaaggcaggattggattctccagcagaaaataatactcagtcttgtatggagggggacaaggcaactgagtctgcttcggaggacaaaaacatgcgacctcct

SEQ ID NO: 49083 - DNA, 587 bp, Gossypium hirsutum
  Clone ID: LIB3825-007-Q1-K6-C6
gccacgctgacgatggatgcggaaggagagcggtcgctcgtagggaaatcaagattactcacccggtacgagcagacggcagtaacatccgacgtagaagggactctaagcgcagtcaacggtgccttttcttacatcctcgggcgtggggaaaacccggaggacacacatgcctattgcactggcagaactatctcatgccgccattgcctggggtaagacatgaagcacgcgcatgagctcatggcccatctggagcgcgcagtgatattggattgagacgcgcaccgtgtcttagccttacttctaggggaagcaccaggtatcattctgaatgactccttcactcgtacaaactcaaagcgccgtagacttcgctcttacagggatcttctttgcaacaggcaacgtttctccagatcacagatgatagctcttgctcaagtgcaaggatcagacgtagagagtgaccgtatctatgtactctatgttcaactctaggcggtggtgataaccattgtccattggtaaaaaaaaatgtattggcatcgttgactgtgctatccacgttcctcatagcggcactc

SEQ ID NO: 49084 - DNA, 534 bp, Gossypium hirsutum
  Clone ID: LIB3825-007-Q1-K6-E12
cccctacctatcaaccttctcatcccttctttttacctgttttctgagctgctttaagaaaagcttgaagatcggagggatggagggggaacataaaggctgcaaaaaaaccgtgctactactttaccttgaaaactcgtcctaaataacagcaattatagcagcatctaccgctacatgtctccctaaactacttgaaaggatgcttttgatgtcgttgctgttgccatgactgccgctggtactgcatgagctgctccacaatatgctactcttgaccctacacttacaggcccgtggaatggacagactgatggaaactccgtttgtaattacttatcaaatgccacgccatatgtcacgcctcatgagatgcctacagggctaaaatctgccccaaagcctattggagctcctatggtggctcaacatatcggctcaacagccttataagagtagttataagaataaatctgaccgggataatgaacgctgctgtacaggctgaaatcctgtgtcaaaactagagggtat

SEQ ID NO: 49085 - DNA, 361 bp, Gossypium hirsutum
  unsure (1)..(361): unsure at all n locations
  Clone ID: LIB3825-007-Q1-K6-E6
gntagcaccaaanacgaacctgccttaatgaacttcagcatgtcattattgtacttaagctggtcactgccttttaagactgtcagtgtgccccacttaaatcttttaggatttgtttatttacctctttctctcttctcttgctttgcaatgtctttctcttgagacacaaggtccctctttttgaatctttctttttacctacatttggaacacaacctgaataatgtcccaaactttctctcaaggttcaaataatccaccctttacttgtgttacttagcgacattggtaagacagagtaaactgataagtatgaactacagagaggtaaaatacttgtcattgttgcctaacatgc

SEQ ID NO: 49086 - DNA, 624 bp, Gossypium hirsutum
  Clone ID: LIB3825-007-Q1-K6-F2
gcgagggcttctgctgtaaaggggtgggggtatcctcatgtgtaactgactttgaggcttttaagctcccgtttggtctcaaacgactatacctgaggcagatctagcatttcttttgtcaaaagcggcatcaaactgaactgtggtaccctccgtcgccccagtataactgttgtcccttttggaagaagacctaatttcgagaactccaaacgcaccatagcacacaacaaaaggatcgacattgcttgtgacacccctaatctgaccctagtcgaaaagtgatttcgggaccatgaaatcgagttttataaataattgaaagttatattctatgttcatgaggtgagtaaatgcatgtgtaaaaatttcaagcattaattttgccatttgtatgtgaaattctgaaacgggacttatgtgaaacattggtaaaataggatggtaaaaatataaagtgatctaatagagcatgtattcaaaaatgtggacttgcatgtcaattaaaccatttttgaatgtaaatggccggccaacacatgcatgtaacaatgtgttctcttgtctccatttttaattggtgggaattatgtataataataaatttatattagtggtggtgat

SEQ ID NO: 49087 - DNA, 618 bp, Gossypium hirsutum
  Clone ID: LIB3825-007-Q1-K6-F6
gtaagtctcataaatactgtaaatcgatgaattttggtaaattgttagatattttggtaaactcatagaaattttggtaattgttaggacttggtatagtgtttagaaaatttgggaatattggtaatgtctcataaatattgataaaaaaatagaaattttggcaacttgttagatatattggtaagttcttagaaatattggtaaatcgttaaatatattggtaacttgttagatattttggtaaatccctaaatattttggtaaaattagagaaattttgataattgttaagacttggtatggtgtttagaaattttggtgaagtctcaaaagtattggcaaaagggtagaaattttggtaaatcttagaaaatttgataaactattagatatattggtaaaacaatagaaagtttggtaaatccttagatattttcataaaccctttaaaattttggtaaactttttaatatattggacctcgagttgcaaagcgatctcggtttctcaggtgatgacgccatattcacatggcaggcaaaatttgtaggttattgagctccatgacatcactgtgaatccaaacacaacttaaaactatgactacgtctccct

SEQ ID NO: 49088 - DNA, 626 bp, Gossypium hirsutum
  unsure (1)..(626): unsure at all n locations
  Clone ID: LIB3825-007-Q1-K6-G8
ggggacaacaatgagtcaaactctatggttgactgtgagattcgctggngaagatctacatttaggggaggaggttggacaaggctcttatgcagttgtttatcgtgggatttggaatggatcagatgttgcagttaaggtctattttgctggtgaatataaagaatcaacattactagattacaaaaaagagatagatataatgagaaaactgagacatccaaatgtactgctgttcatgggagcggtgtactcacaagaacgacttgcaattgtcaccgagttcttgcctaggggaagcctattcaaagcacttcacaagaataatcaggcattggacgttaaaaggcgcatgaggatggcccttgatgttgctcgaggcatgaattatttgcatcataggaatccaccaatagtgcatagagacctaaagtcttctaatctccttgttgataggaattggaatgtcaaggttggagactttggcctctctaggtggaaaaatggaactttcttaaccacaaagtctggaagaggaacgccccaatggatggccccggaagtcctcaggaatgagccttcaaatgaaaagtctgatgtattcagttttggagtcatcttgtggg

SEQ ID NO: 49089 - DNA, 520 bp, Gossypium hirsutum
  unsure (1)..(520): unsure at all n locations
  Clone ID: LIB3825-007-Q1-K6-H6
tcggtcggctttggtagttggactatccgctttgggtgattttgattctgggaagcaaaagtaaaacgacgtgtatcgtgaactggaaacgtgctgtcatcaggcatatcgatgatgctcggacgggggtaatcgctggttaggacgtaaactagtcttgcaaggaaatgatgtgtgctcgtacgaagagtttccggattgttacgaggggagacggttggaacaacctagaataccgtgaagcgggcaagtgcactacaggtggattgataagcatcttcgcagatgttgatgtaaaaggagatctcatggtgcggcggtgtgaagataaggtgttgacttacggtgaaaggtggcgtgtggtngtcggtggtgtatagaatatagattcgaacttcattcacaatggtgggtccttggctgggctgatactactacattggtgggcagcccttggttcgggatcgccgtcccaagctctatgaacttttattctcttgatgcgaatgctctatatgag

SEQ ID NO: 49090 - DNA, 141 bp, Gossypium hirsutum
  unsure (1)..(141): unsure at all n locations
  Clone ID: LIB3825-008-Q1-K6-A4
ccccgcgtccggnttgctcgtatgcaggctgaagaaagcactgtacggccttaagcagacgcctcgggcatggttttccaaacttcgggagttcttacttagttcacagtttgtgtgtgctaaatcagatgcgtcgctgtt

SEQ ID NO: 49091 - DNA, 561 bp, Gossypium hirsutum
  Clone ID: LIB3825-008-Q1-K6-B11
tgagataacaagtggggcaactaccggacagaggaaaaaaaatgggcaggagtgatcgatgctctcctgcaggaacagctgggcgtcttaccgaccatgtatatcagggtcaagattgtcggcgcaccttacctctcctaccaggcgacctgtaggctcaacaccagtccgcggatcaaccccctgatatgctgctctctaccgcccctctaacctgcacaaactgaaaataaatctataactctgactcctacggcacgatctccatacgacgatactaccaccccttggcttttgaaggcgcctgatgacggggggcctcctatgacatcctgtcatgccaaccgtggaggttatcatcatctcggacattctctgtagggcactcatgctacacatgataaattacctacatgcttgagcgatcatggaagacactgtactgactttggcaggggccactatgatgcatatgggacacagtatcacatgaggtctaaaaaggctaatgtccataccacacaaccgatccaacgtgtagaatcgcatgaaacattgggt

SEQ ID NO: 49092 - DNA, 618 bp, Gossypium hirsutum
  unsure (1)..(618): unsure at all n locations
  Clone ID: LIB3825-008-Q1-K6-B7
cagaagggaaaaaagactcttatggtctgcatggaagatttaattggaaagttaagaagaaattgtcagaagtttctcttttattcctttgctgacaagtaatgataagaacttaaggaggacaaaactggcaaaactaccatgcctctgaggaagaacatgttgatattaactccatgccagttcctaaaccatcatgngaaaaattttacttactcagagcttgctgctgctactgataatttcagtcctggtatgcaatttcattttaagcttaattttcctctctttaaatccaatgttttagcagttagaaattttagatagatgaattggttcttttttctaatcaggtttatttagatgaaacaatctttttaaagttggttaaatttgaacgttcttatatttgattctagttgaatttatcaattattacgtcggcagccaggcagtcaaacttgtctgcaattgaaggcaacttaatggtttaaagagaagagttatttaatttttgactaaaatgaaatttagttggggggttgaaatgaaattgatgttggaaaatgacccttgctgtgaaccatgtaacatccatggaactntgattgacttaat

SEQ ID NO: 49093 - DNA, 609 bp, Gossypium hirsutum
  unsure (1)..(609): unsure at all n locations
  Clone ID: LIB3825-008-Q1-K6-C1
tcctgatgttcaaccaccaanataaagagccagttcgtaattcggggaacaacccgttaacctcataaggaattctatcaagatattggagaagcataagggtacgttcaagcatatcgataataagcagaagccagaacatatagattggtttggatggaacacctgggatgctttttattgtaatgtagatcctgaaggaatcaaagatggactcgaaaatttctcaaagggaggttgtcctccaaaacttttaaccattgatgaaggctggcaaaatatctttcccagctatgaagagaacccaacaggggaattgtcaagattaattaatcttgaggaaaatgcaaaattcaagggctcaaagttggataaatcaggaaaaaatctcagagattttatcaaaactatcaagcagaaatatggattgaaatatgtatacatttggcatgctatggctggttactggggaggggttcttccagaatctgaagtgatgaaaaaatacaaccccaaaattcaacctgttgttcagtcccctggtaatctgacccatgttgtatgttcaaccctggacaatatacaggaaaagggaatcgggctaattga

SEQ ID NO: 49094 - DNA, 595 bp, Gossypium hirsutum
  Clone ID: LIB3825-008-Q1-K6-D6
aaacaaacaacaaaggttgattcaagcggaaacaggtgggggcatttgtttgaggagtttagttttgtttgctctcgtgtattgtactgtttcatccatgcagcggatggatttcttctacttgttatgaagaattttggttctgtttgattggataatcccaaaaattcaatttgtgttcttagttcttaaaaaaaaaaaaaaaaaaaaaaaaaaaaaaaaaaaaaaaaaaaaaaaaaaaaaaaaaaaaaaaaaaaaaaaaaaaaaaaaaaaaaaaaaagggggggccggttttaaagaaccaaattttcctccccggcctttcaaactaaaaattttttttttggggccccaaaaataaaatcactggccccggttttaaaaccgccggagacatgggaaaaaacacctctgggggttccaccaaaattttaatatgcctttataaagaaaataccccctttttccccacaatggcgttaataaagaaaaaagccccccccaaaccccctttccaaaatttgccccaccttaatgggaaatgggacccccccttttactggccattaaacccggggggggggggggtttcccc

SEQ ID NO: 49095 - DNA, 191 bp, Gossypium hirsutum
  unsure (1)..(191): unsure at all n locations
  Clone ID: LIB3825-008-Q1-K6-D7
ggggatagnatttggntcggnagtgnngctgaacaggactagctacgcaactcctgatgttacagaagaataggagggatctcaacaataccacgacaaggagnaaataaggggtagctntctaaagtgccccgacccattgttccggaaaagttatgaagacagatgatgctggctatggctgtatctct

SEQ ID NO: 49096 - DNA, 626 bp, Gossypium hirsutum
  unsure (1)..(626): unsure at all n locations
  Clone ID: LIB3825-008-Q1-K6-E10
gatgaagaagaggcaaanaactggaccaaattcttgaggaatgcttggaggaacataaacggaagagaaattcaggcaaatcatacggcgaacatgatgatttcatgtacatgatgttgtcgcttcttgaagatgctgaggaccacccttcttatgatgctgacacaatcaacaaagctacctgcctggttagttcttatccacaaatcgcttctgatttttttcattatttaaatccgatatttatgtcaagaattaagattggacaatatcaacgtattaagccacgctgcctttggatctgaaaatttaggtaatgttttattaatttttacaaaataaatggagatagagtgggtttcacatgtcttgttttctccatttaagcccaaaattattgaagcgtcacagttggagaaagaggtacagttgattgaattttgaatcccatggtagaatttatcttcaaaactgtttcgttccttttgcaaggcgataatcttaggtggaaccgacacaacaacagtgacgataacatgggctctatcgttactattaaaccaccgcgatgtgttgaagaaagcccaaaatgaattagacacttttgtcggtaaagacaggctagt

SEQ ID NO: 49097 - DNA, 624 bp, Gossypium hirsutum
  Clone ID: LIB3825-008-Q1-K6-E9
cggccgcgtgggcggacgcgtgggcgattttttatatgattggaaggaataagagtagaatttattggagagtattaaagattgatcggcttgatccttttgagctaaatattcgtgaagattctaccacgtatacagagtttgaatgctctgagttgttgaggcgaatacatgaaggaaataaatccaccggtggattgaaatttgttaccgcttgttatggcattgttgggtttgttaaattcctggggccttactatatgctgcttattacaaaacgaagacggattggagcaattttcggacacaatgtatatgcagtttcgaaaagtgagatgattcccctcccaaattcatctgttaacccaagcattgcggactttaggaaagagaacaggtacaagaagctcctaagctcagtggatcttacaaaggacttcttcttcagctattcatacaatgtcatgtgtagtcttcaaaagaacttgtataataatgaaccaggtgaggttctttatgagaccatgtttgtttggaatgagttcctgacccgaggaatccgcaatcacctcaagaatactctatggacagttgccttggtgtatggcttctttaagcaggcat

SEQ ID NO: 49098 - DNA, 603 bp, Gossypium hirsutum
  Clone ID: LIB3825-008-Q1-K6-F1
ctctcatttctctcttttcctctaatccaaacatgcctctccttcaactctctccttgaaacaagaaaataaggaagagcaaaatcagagaaaaaaacttgaataattcttggtttaacaaatgcttcgatgggtttggggtcaatgatggtttatttgacgacgtagtgaagtatttagatttcccattggaagatgttgaaggaacggatgatgatggtgctagtggtgaaggtgttgtaaaagattttcatctgcctctcggtgatgttgaagataaaagttatgttggtggcggcggtgatgatggtggtgaagattgggattgtaacttccaaaacttggagccgccgcccactaatgttttggccggcttgtcttctggttttttgtggcgattttttcagtgatactttggagaataagtttccagtttcttgtgatgagtcttcagagctaaaccagttgtcaggcattaccaaagcatcctccagcagaagcactactaccctaaacggagaatctgtggatgtcaaaggttcaacctggttccagacttctagtccagtgtctgtacttgaaaccagtagcgcttgctcatct

SEQ ID NO: 49099 - DNA, 603 bp, Gossypium hirsutum
  Clone ID: LIB3825-008-Q1-K6-F10
ccgtccgaaaaaaaaaaaaaaaaaaaaaaaaaaaaaaaaaaaaaaaaaagaacaggaacgtactaaaagaaacgaaaaaaaaatacacaacgcatgcaaagcaaaaaacatatactataggggtggcgctacctaaaatacactgcgctggcgctctacaacgctccggtctgggcaggaccctgccgtgaccccccctaactcgcctcgcggggcatcacttttctcctcctggtggcgggataaactaagcaggccaggcaccgcatcggccgtccctacccatcgcccgcctctgcctggagtggtgggatggcgcccctgccctcggcgcgttacatcgcgtcgcgtcgtggtggggtacgctacagcgcggacctggtccccttcgcctgccccgctaccctcccccctcctttccgtttggttctccttccttctcttggtacgccacgccagcttggccccgccccagctatacattaggtgggtgcctttactggttggtttttagtgctttgcggcacctccacccgaaaaaatttaattagggcgggggttcacgtactgggccagtcccctgaccgacggctcttcccccta

SEQ ID NO: 49100 - DNA, 609 bp, Gossypium hirsutum
  unsure (1)..(609): unsure at all n locations
  Clone ID: LIB3825-008-Q1-K6-G3
agccaaatcctttgaggtgagaatccattatggtcatccagnaatatttgacagaatcttccatttaacaagaggtggcataagcaaagcttcaaaattattaacttgagcgaggatatatttgctggattcaattctactttgcgcgggggttatgtaacgcatcatgaatatatccaagttggcaaagggcgtgatgttggtatgaatcagatatctgcttttgaggctaaggttgccaatggaaatggagagcagacacttagccgggatgtttatcggcttgggcgtcggtttgatttctatagaatgctatctttctactttacaaccgtgggcttctatttcagtagcatggttacagtgcttatcgtatatgtattcttatatggacgtttgtacatggttatgagtggattggaacaagaaattattgagaatgcaaccatacatcaaagcaaggcccttgaagaagctttggcaacacagtctgtcttccagctgggcttgttgcttgtgcttcccatggttatggaaattggcctggaaaaaggttccgtactgctctgggtgactttatcatcatgcaactacaacttgcctctgtgt

SEQ ID NO: 49101 - DNA, 567 bp, Gossypium hirsutum
  Clone ID: LIB3825-008-Q1-K6-G7
gccgctctttgttttttatagaagaagaaagcaacactgcaataatcaatttaattattattaggatttaatgtatattgccaatggcttcgaactgaagttattccactgtaggtgctcttcaaaccctaaagagaaaaaaaagagcaagggaaaggaaaaaaaaaaagacaaaaaaatgcaaaaactaaagaaacaggacgcccgccttcataacaccccagctggccatgctggcgggcgaggtattggtggttctgtctacaccacaaatggcaacaacatagccgacactgtacactatggcggctccgaaaaccatgacatccccgagttcaccaccctaggaagagatcctgatacaggcaggcgagataacctcaaaaaggtcgggtccggccgccattcacaacgtgcttacagcccaactgggaaccaagactccccatatgcggggtctatcaatcccgggactagaaggaacaccccccaaggtacccagtatgatcctcattatcgatcctatcaaaccaaaggatcgagtccttgcgctctgctacagccttg

SEQ ID NO: 49102 - DNA, 427 bp, Gossypium hirsutum
  unsure (1)..(427): unsure at all n locations
  Clone ID: LIB3825-009-Q1-K6-B11
tttctttttcattttctgggttttggtttgaagatagggtaagttttaatggtgcttgcaggaagaagtggagatagaggcaaaggtgatagcgnngagaagggaaaactttcactggtggtggtggaaattagaagaaaacgaaacggggagctaattgctttgggtaaacaatggatggccacaactaaagatagcattaacgcagcccaactgaagaaaaacattttaaagttatgcctgtgtcacctgtcctttcaagagccaaaccaaagggcgttaataatagagagtcaacatattttggatgctgggggtctgaaaatggaagaagatgctatcctacaaaaatccctgaaatggttgcgagatctatctaaaggaaacataagccacgagctggaggcactcactcttgaaagactgc

SEQ ID NO: 49103 - DNA, 611 bp, Gossypium hirsutum
  unsure (1)..(611): unsure at all n locations
  Clone ID: LIB3825-009-Q1-K6-B8
gcttctttatctttgtatgttcaaaaactaagattttttagattcgatggggccaagaccaaatcttatctattttttttcaagacttagatgtcatggatacctatttagtagaatattgtataacatccggcttacccgaaccgaacataaatgaaaaagcccctcttatgcatacgtaaacatggtatagggttaaatgaattatagcaagtggatcggtaccgaacggatgtatgaaattaaagtctatatatctagtagatccgtataggcgatcatataaaggggatgattttagatcgaagcaatttgatgaattccttctaaaagttcatatcaaaatagtactagttgatgagagttacttcggaaacaaaaaaagtaaagtcgaatttttttggttattctctcaattcgaataaaatgcaactggatctagtatgtatgagttggcgatcagaatctatatggatagaatttatagtgnggatctcgaaaaacaagcaatttttgctgggcctttatccttttttttggttcattagggtttttattagttggaacttctagttatcttggtaggaatttgatatctttatttccgtctc

SEQ ID NO: 49104 - DNA, 626 bp, Gossypium hirsutum
  Clone ID: LIB3825-009-Q1-K6-C12
aaacccttttttcccaaatttctcaggttttttcatatttgactctcgaattagagcaacttcatttctctgctgctccaaaatcaaggtgctttaatgtcgcaaaagttagtgaagaaatcgacttgaactgtgatgctgtttcggttgaccgtgaaaacggggataatgatgtaaatattaaggattctggaacttgtttgaaagaaagtgtaaatgaggcaggggaaggaagcaaagttgagagtgtaaaagatgaagaggtaaatttggaagctgatattgggtctttaggtgaagaggtggctttcggctcgggtgaagtttcgaagatggaggttgatggagagttgaaaggaaatggagatggtgagtgtgtctctgtggaagagaagaaaccagtggtggccgaagaaatggctgtgaaatcttctagtgaggttgctgaagaccttaatgttggactgtgtcgtagtggggatccattgctagagggaactagtgttcagtctgtctcaattgttgacgatactactcattctggtgacgagaggctgaattctccagatttaagtcatgaaaactctttaccttgcggggaccagaaagagagtttgaaccatcaa

SEQ ID NO: 49105 - DNA, 622 bp, Gossypium hirsutum
  Clone ID: LIB3825-009-Q1-K6-C3
ccctttctcttcctctctgttctttgccttatcccccaataaaataacccctgtttttcaattaaaattacgagaacgccacccccttttttggttgtcggtgtgaggagggacggggaaaattgtgatcggacgacggcgacggtggcggcggtgtgttgtgacgatgatggagtgcagtttatggatatccgcgggggatcataaaaataacaatagtaattctaataataatagtttgtgggggtttagcaatgaaagtgaacatgatttggctttaatggttagtgatttcctggaaaacaacggtgggagcgccggtgccgattcttggtgtagtagcgatagcgagtccggcttctccgatcttatccacctcgctgataaaatctcttactataagcactctgtgtgtcactatgatatggacttgttgtctgtggttcattcacttatattatcgatgggtgagacggacctacactctgtgaagtcgggtccatgtaatgccagttgcataaggtattcccttgtaaagctgttgaggctttctgggtatgatgctgctgtttgtgtatcgaggtggcagcgtagtggcaaagtccctggaggtgatcatgaa

SEQ ID NO: 49106 - DNA, 598 bp, Gossypium hirsutum
  Clone ID: LIB3825-009-Q1-K6-C5
ctcgaagcctttgttctttcttctgcggacttagaccctcaaactgttgtcaactttgtatcctcatttttcctttccttgttcctttttccttcctttttcttttagttttgcgattttggtgactatagttctcataaataagaaaccaatgttcttttttgtgtttttttgccttcattccataccccttcgatccttctgaatgaatggatcgacttccctcggggtttcttccactcagaaggtcggcaaatcccttcctcttccccatgctgccatcgcatgtgccgcttcatttgcttcccaagctttttgatgacggttagtgaatctccttctaaaatgatgtcttgaaaccctaaatcttctgcgaaagctactccatgaaggcatgcataggcttctactattgttggatatcgtatgttcttaatcaggtaggtgcatgaacccattacaaaacctttgtatttcttactatgattccagaatctgccttattatttggcttctgaaaaccaatgtcgaaattaactttgacttggtcttctgataagggtgtccattgtggattttgtattttgtggttgtttac

SEQ ID NO: 49107 - DNA, 580 bp, Gossypium hirsutum
  Clone ID: LIB3825-009-Q1-K6-D8
ctttgttgctgctacagtcttcacccttctagagttatgtggtgatgtaggtgctcttggctggtgggacttgttcataaattttggtattgccgagtgctttgcttttcttgtgtgtacaaagtggtccaatcctgtaattcatagaaattccccagcaatagaagctggtccatctactgcaactattagataccttgactggaacagtggcttagtagttgctcctgaggaagaccagcagcaggatacaatgtgtggcctgcaagatattggtggtcacctcatgaaaattccaataataggtttccaagtcctcctctgcatgcatttagagggaacacctcctggtgctagagatataccacttccagttttgttctctcctcttttcctattgcaaggggttggtgtgttgtttgctgcctcaatattaatagagagaattgtacttttactacggagtggggctggcacagggttgtacttcagattctcgtcccgagctcatgattgcttgggattcttgcaccatggttctaggttattaggttgggtggtcaattgatgaaagaagtag

SEQ ID NO: 49108 - DNA, 606 bp, Gossypium hirsutum
  Clone ID: LIB3825-009-Q1-K6-E4
gccgcactaaaccctaattttttcccctaacatcagcatgctgaaaaacccgcaacttaccccttcgttgcccttttcaataaagaactctacacagcagcgtctccaagctcttatagcaaggtgcccacgattactctggctctcctgtacttagaatggggctgatggtgtatctacaccgggctgacagaagataaagggaaaaggaagttgaaaactttgtctgcagttgaggagtaattccttgtggaaagaaggaatttcttgcagaacttcacccattattctatgcacagtttctgaatttaaaaggagcttaaatactgcaaattctgcatgtaatgaggtacgaaattcccttaaattgaaggatctcaccaagaaaattctctatctaggaaatacattgaaccaaggaactactatgggactgagcaatgcttcctttacaggctaagaagttagcatcacagtatcaaaaggaagcagacaagatgcaattcaggtatgggagacgtgctaagaattaagggacaaaagctgaagaagcactgtaggctcaaatgaaattaacagcaatgtgggcaaataagagctcgtcag

SEQ ID NO: 49109 - DNA, 606 bp, Gossypium hirsutum
  unsure (1)..(606): unsure at all n locations
  Clone ID: LIB3825-009-Q1-K6-G1
taccgtgttcccacaaagtgtctctacaggaagcatattcaactccaatcttgcctttggaccatcttagctgaaanaacctactgaaaacaagcttgattgggctaagaggctgcttgctaaatatggatctcaattatctgtggtctcaatagtgttattgtttatctacctagtcgctaccccatcgaaagccagtgccgcaaaagcaagcaagaagaagagctagactcaagtgtcatgaaatgatggagatggagaagattagggaaggatggggtgaatggagtcattattcaaagaaaaccttggccctcctttgcaaactagccgctcaccctttccatcccaaagtattaccttgtccgcagcagcaccggcctctaggcgggctgtgggcttttctcttctcttctctctctctctcacacgcttgctaaggaggacgtaagcgagatccttgatcaaatgggacaacattcatttgaagttctttacttattcgaataaatgaaatttttataatttggtcccttttaaattttaattatattaatctaattctttttttttttaaatatagctttgcctcccccccccccccaa

SEQ ID NO: 49110 - DNA, 611 bp, Gossypium hirsutum
  unsure (1)..(611): unsure at all n locations
  Clone ID: LIB3825-009-Q1-K6-G10
caccaaaggnaattttatgtgaaccttcttcaatagccctattcttagatcccttttcccctcctacaattttacattaataatcagacccatacaatcaaaggaaccctctcctcggtggaaatactatagcaacccccngaaaaaaacttctccaccaacatcaagaatttcactttaccctacacccgaggatcaaactacacccaactcatttcaaactccaagaaaatcattgaactccaagaaaaaatgaaaataatgcaagaacaactgcaacgacaacaaggaccacaagcaatctgaaatctccttcaaaataaaatggccccggctgatgaagaagtagcctcatctcaccgagaccattgttaggagcatccaataaataatcctgcaaattgggttgtttcaaaaagtttcactattgctgtgtattaggtaagcatatccatatatggaataatcatctattctttatcctagcctctttgtgcattgatgttcatgaggtcacatgtatcggtatgcacaagtgcacaagttcttagagttgagtagccttttcgtgcctttgggattaaaaggcctattggtcattttagcttcca

SEQ ID NO: 49111 - DNA, 601 bp, Gossypium hirsutum
  unsure (1)..(601): unsure at all n locations
  Clone ID: LIB3825-009-Q1-K6-G4
ggccaancttggttcttaaacttgcttctacaatcatctcccgtagttgttgtagtcattactttcatttttttatggatagattttgaagtttgtaggtaagtagttagttctagtttggtttttgatataaagattttcccttctagaggagaatatagggagcttgattcttattaggaagatcagatcttttggtatcagattggcccatctattggttttagatattaatgttcaaaacttttgattgtattttgaagaagaaatttaagtgtgagagtagatggggaatacttgtgtaggaccaagcatttccaagaatgggtttttccaatcggtttccgccgcaatgtggcggtcccgaatgcctgatgactcggtttcgagttctaatgggggaattgggagtgaggtagcagctagagaacctgaatcaccattgccagtcctaaacaaacctccagagcaagtgacaattcctaaaccagagaccaaacaagaggccaaagaggaggccaaaccagagaccaaaccggaaactgaacccgaaaaaccggccaaacccaagttccctcatatgaaaagggtgtccagtgca

SEQ ID NO: 49112 - DNA, 608 bp, Gossypium hirsutum
  unsure (1)..(608): unsure at all n locations
  Clone ID: LIB3825-009-Q1-K6-G5
cggnagcgtgggttgaagtcttgcaaaaggtaatcccttgtttcataccttatgtatccatacactttaaagcacatattagcaacagggtaccctgggtatatgtagccgatgatatattctgtaatcacattcaaagctggtgtcttcaaaagaaaatttacccatgtcaaaatacccaaacaaaactaacagaatataaggtcaaatcaacaagcaatcattatctgagtggaagaaaattattctcaattatgtgagcaaataatctgcaaaatttagataaaattgcatgatatatatttttttaaaatacagaacttgtgaaatagcaaaactatacctgatttgttgtggcagtaataactccgacagggagagtgaaaaaaatggctagaccacaagctaacaaaacaccccaccatggcagctggagttgatcattgtaatactggcataaaaatatggttgctgcaatgtttactataaggatacacgtaaaccaccattcaggtacttgcttgtattttctcatcagctttgtatgcacatccatctttgtctcttggaaggcagatttgcttcgttgcaaaatttcgctgcaccac

SEQ ID NO: 49113 - DNA, 600 bp, Gossypium hirsutum
  unsure (1)..(600): unsure at all n locations
  Clone ID: LIB3825-009-Q1-K6-G8
cggnagcgtgggcggncgcgtgggttttttttttttttttttttttttttttttttttttttttttttttttttttttttttttttttttttgggagaaaagaataagggatttaaattataaagcaaataaccaaaatcctggggaaaaaagggggggggggggggaaataaaggggaaaacgttccccctagggtagaaaaaattggaccctttggttaatgggtttttatcctacagccttgaataacttttattcgaaaccattttagcccagtcatgaattggtttccaggattttttatttccaagggcagcaaattgaccctgttttttaaaaacaatgagttaggagttgagcttggagctaaaaataaagggatgaacaaacataagcgggaatttctaacccttttttaatataaagataaaccaattggtttttttaggaaaatatagaccttgggaaaggaatcataggagtttgcccaaaactggaatgaaggaaaaacttgggaataaggcaggtgctccaccttgaattcgaaacatgcataataaatggcaccagctttttagcccgggggggaatgccctttt

SEQ ID NO: 49114 - DNA, 325 bp, Gossypium hirsutum
  unsure (1)..(325): unsure at all n locations
  Clone ID: LIB3825-009-Q1-K6-H2
caatctttcatctcatccgtttctccaaaaactcctctatctcttgtgcctgacagttactgggaagaaagtggagagtactgcataagaccgaggaactgaagcaagatagtttagaccaaactatctccaagtgggnnaaaaaaagatggtcggaaaaagtaaagctggtgctatctagaactgaatctgatccatcgcctgcaagagcagagaaatacaaaaagggccataagtcatctgttaggcgtagtttgcttgatgatttgactcggcaacttggcttggaggaaagagataccgaaaagggagctgttctgatgct

SEQ ID NO: 49115 - DNA, 575 bp, Gossypium hirsutum
  Clone ID: LIB3825-010-Q1-K6-A12
ccgggtcgacccagcttttctgtgccgcgtgcgggacagctccagagggggaagggctacatgacgagcctgaaggcggccagaagcagcggttcaaaccaaaagagcagtggcacccccattgcaaatagagctgaagctgcagtgacggcaggctttttaggtccttcccaaaactggacgttaagcatacgcctggggcggggcctggggctgaagcatacaacaacagccatcccagtgggaggaatctcaagcagaggatgatggggctgttgaaactgtcagtaccaaccatgctagggccccctttcttccaagtagaaatattcaagaggatcactacagaagttcattggtctatgataatgacctatgtaacgacgtgaatccctatcagccccaaagacctgcctttgagaaccaacaacctgaagatggctcttcatcagtcgctgaggatcggcaccaacttaatttgcataatgatgatagggagcccccaactgaagaggctcacccttctgggataattacaaactgtcgtcgagtccgcaccccgcactgtgcccatt

SEQ ID NO: 49116 - DNA, 592 bp, Gossypium hirsutum
  Clone ID: LIB3825-010-Q1-K6-B11
cacaaccatcatcattgcttactgagcaaccagagcaaatataggtattaagatgaaaaagcacaatcaaaagcacaacattgaaaatcaaacccctctttaaaagcaagcataacaattcaaattaagcggacgcgtgggttattagtaaaggtacgttcaaatggaaaacagtgagaaaataatataaatagaagaagaattcgatcaaatgctgagaacaggcgcctgccttgacaacactgattggcaccttagatagataggctgcacttaatctgttctgtatatatggcatgagaaaatctctgatcaatatgagatgattccttggtcaagtttcctatgtaaatggagatagaagaaggaatgcagaattgaagcttaccatgtgcaccccaacacttccacataacgtggtaagaggaatatcgtactctcgatatgcacattacctgatgatgaccttatgattattaactctaaacacctactgatctttggcactccttattgcacgtgtctgccatgtggcattcctcatccatgctaaccatgactacttttttcagactcgaaactctatattaat

SEQ ID NO: 49117 - DNA, 608 bp, Gossypium hirsutum
  unsure (1)..(608): unsure at all n locations
  Clone ID: LIB3825-010-Q1-K6-C10
aaagctagattttntgcggggnaaactatttcatataaacttaacccaacttcttgtgggaattgtaaatactgattccatgttggtttggtgtaggcaattgttgtcagatattctttgtggttataatacttgtggccatgcctggtacaaagaaggttgctttacatttttctgcctgctataggtttctttaattctagtagttcagggttttctttttcttttttttttaattgtttttctttttgtttgttaaaatttttgaggtgtgtgctatgaaatgttgtctacattgaataattttgtttctttagaagaatatttctcttcttgaatatatactagtattaatcttagtcagtacattttctactgtgatatctaattttctgttggatttttatgcaattaaattgattgtttattaaaacctttagttgtactaacttgtattaaggtttttaatcttttatataactatggatatatttattaacctttagactttcttgttgaccttcctgtttcttatatagttttttggtaaaatgtcaagaaagcttgtgttctggttttcgggtattctattgtgtataatttttttc

SEQ ID NO: 49118 - DNA, 611 bp, Gossypium hirsutum
  Clone ID: LIB3825-010-Q1-K6-C3
aactcgtaaaattcattaaattttattagatttaaaaaaatttaaattattttagtataaaatagagagggtgaaattcattttgattaaatattttataatttattgactgtacttcgaaccaacaagaattttctcattgatctctgtttcttcactaagattgtgacctttcccctaagttccaacactcggtacacaatttctcttactttacctttcatgaaagcagctcatgtcaaccctctcttcatctacattcatatataaaatctgcctatctaaataagtacagagaaataaatatatgatgtacatatatagcatgggatttgtctcccttttgtctaagataaaaaatctgggtagattttgttgggttttttaagtggatatcttcataatttcgcttctttattgccatttaaaataccattggggatgagccatggttttcatataagagatgaaaaaggaaatataagccgtggtttttactttttgtttgtagagctgagattctcaagaaccagaagcagatacgtagagttttaacatacagatacagctccatacagaaccagaagggattgaacaacacatgaagcaaa

SEQ ID NO: 49119 - DNA, 619 bp, Gossypium hirsutum
  unsure (1)..(619): unsure at all n locations
  Clone ID: LIB3825-010-Q1-K6-D11
cggnagcgtgggtgaagatttgcaagctctgccattttttttccctttcgagctttgtaattaaacaaatggttccctttggtgtcgaattatagaaattttgcttctccaatctatctagggtttagttttcagctaaaatttcataccgaaaccctctattcgagagcaatttccattttattgaggaaaaaatggcttcaacagggcagccaccgtcacttaaaagaagagatgcgccgttaacaaaagaaggagatcagcttactattacccctttaggcgctggcaatgaagttggtcgttcttgcgtttacatgacttacaaaagcaaaactgtgctgtttgattgtggaattcatcctgcttacacgggtatggccgccttgccgtatttcgatgagattgatccttcaactattgatgtccttcttattacccactttcacttggatcatgctgcctccctaccttattttctggagaagaccacattcagaggtcgagtttttatgactcatgcaacaaaagctatctataagctccttttgactgattatgtaaaagtgagcaaagtttcggttgaagacatgttatttgatgaacaagacattggtcg

SEQ ID NO: 49120 - DNA, 385 bp, Gossypium hirsutum
  Clone ID: LIB3825-010-Q1-K6-E2
atttattcatatattttctttaaaaaaaaaaaaaaaaaaaaaaaaaaaaaaaaaaaaaaaaaaaaaaaaaaaaaaaaaaaaaaaaaaaaaaaaaaaaaaaaaaaaaaaaaaaaaaaaaaaaaaaaaaaaaaaaaggggcggcccgttttgaagagaacccaactttacttccccttccttccaacttaatactttttttttagggccccctaaattaaattaattgcccgtcttttaaaaacgtcggaactggaaaacccctggcttaccccaattaaatccctttgcaaaaaatccccttttccccagttggcttaataccaaaaagcccccccccaatcccctttccaaacatttgcccaccctaattggcaaatggaacccc

SEQ ID NO: 49121 - DNA, 575 bp, Gossypium hirsutum
  unsure (1)..(575): unsure at all n locations
  Clone ID: LIB3825-010-Q1-K6-F2
cccgcgtccgnaaaaaaaaaaaaaaaaaaaaaaaaaaaaaaaaaaaaaaaaaaaaaaaaaaaaaaaaaaaaaaaaaaaaaaaaaaaaaaaaaaaaaaaaaaaaaaaaaaattggggacggccgtttttggggggtgcctgttttcttttccccgtccttccgcactcttttccctttttttctggggcccctctattttcatttctggtgaccgcctttttttcaccgctggtttttgggtatacccctggggttccccattttattcgccttgcataacttccctttttggccagctggtttttttccgagggggccccccccgatggcccttcccaaccgttctccgccttgattggtaattggcacccgccttggagcggccctttttccccggcggttgcgttgtttcccccctggtttcccttttcctttgccggccccctttttccccgcccctttcgctttttttctttcttttagcccccctttcgcgggttttccccggagggcttttttttgggggttccttttagggtccccttttacttttttacggcactttttcccctaaa

SEQ ID NO: 49122 - DNA, 555 bp, Gossypium hirsutum
  Clone ID: LIB3825-010-Q1-K6-F4
tttctccatcaccgctcattgacgaaacataaaagtacataaactcctctattcaatattccgccgaccgatggttacccacgcattgttcatctagcctctcctcttcaaccccttagaacggacaatcgcaagctctattgtaactgatgggatacaagggtcttgcctaccagccccaaatcgccactgtgtttatatggtggcaaaacaagcggagactataacacttctaaacgcatgtaatcttaatcactttcttttttctttcagatgataaagtaacataagactcgagtaaataaaaacaggaagagcggagaattaataaaagagaagggaaacacaccttatttacatctattgctttttttgcttacgctatagcatatgttctctatatattttcaaaaggggaactccattacaatcagaatcactaggctttatagccataatgttaaaactgaaagaacatacaatatgttgaaacgctatgtctataggctgtcgattcagccaccactggtatccagtgcaggctcatgcacatac

SEQ ID NO: 49123 - DNA, 600 bp, Gossypium hirsutum
  unsure (1)..(600): unsure at all n locations
  Clone ID: LIB3825-010-Q1-K6-F5
cgaaaaccgttccggnaaccgaaccggattgtctcccactctttcgtttcctctctcttctctgccgtcgtcgctgccgccagcttccgtttccaccgccgcccgatatggaagccagccggcgttcagcggttaaacccgttattgttctcaagccaagtaagagggtccctttagtggaagataccaccggcaaagcctccgacgcgttgcctcttcctttgtacctaacgaatgcggtgttcttcacgctcttcttctccgtggtttattttcttctatcccgttggcgcgaaaagatccgagcttcaatccctctccacgccgtcacctttcccgagatcgtcgcggttttcgctttggtcgcatcgttgatttatcttttggggttcttcgggatcgactttgttcagtctttgattatgcggccatcgggtgatgtttggagtggtgaggacgatgaagagggaaatgaagtgttgcttcgtgaggaagatgcccgtacagtcccttgcggccaagctcttgattgttcggtcccttcgntgcctcatatggtacggaatgtaactgcccagagactgttcgatgaaaagcctg

SEQ ID NO: 49124 - DNA, 466 bp, Gossypium hirsutum
  unsure (1)..(466): unsure at all n locations
  Clone ID: LIB3825-010-Q1-K6-F9
ctagatcgcgagcggccgcgaagtcgtagatatcgtgngaagcaatcattcctattatcagaatgcaagaaattctgtcattatttcgggaggtgagtatactataggggtgctctcactggaatcaatttcaacaccctgaagatgctacaattgaggtaggaccatttgggggagctactgcagatggtggtgttagcaaggatgtttccagctcttatgatgatggtgacgatggcattgatcttggtacctttcttgacaaagggaagggtctcgcagatctgaacacttcttttgacaagggaaaaggtctcgttgtacaataattttgtacaaattttttctttgtatacatcatttcgttttattgaaatgtatacaattttcttcaatctttgtgtttctgtatttatatttttattcccggtgtcatgatattatattaattgacaaattaacattc

SEQ ID NO: 49125 - DNA, 618 bp, Gossypium hirsutum
  Clone ID: LIB3825-010-Q1-K6-G8
tagagcggttccattttagtaatggctatgagcaccctgctattttgtgttcttcaagtgctatggcaggttcgtattgtttgactttgacaattgtgcttgtttctggatcctttcggtgtatgcattggtatttatttccctgttaaacatataacatctagacctatcaatcttgatttgaactcgaaaatcctatctgattaattgattttgaactcggcccaacccgatttgactattgaaagtcaacaagcctaacatgtctaacttgatcctgaaaaatatgatccgaacaagaaaagacctaaactcaaaataacccaattgtgaagctgttcaaacccaaaatgaattgaacccgagatgatttgacttgaaaaatctaatagtaattacaaatggctggaatttgaaacaatctgaacttgatgttgacttgaatccaaaatgagcatgaaactatttgaacccaaaatgacttaaaattttaaattccaaattgacccaacctaaattgactcaatccaaaaccatcccaaatcccaattcatctagttgaaaggtctatattaaaatttataaaaaaagggcctatgttacatcagatttttttgt

SEQ ID NO: 49126 - DNA, 621 bp, Gossypium hirsutum
  unsure (1)..(621): unsure at all n locations
  Clone ID: LIB3825-010-Q1-K6-H4
ggagaaatacgcaacaagnatctgatgaagtgggttttcgttttgccagatattgagagctacaaagctgaatatcgtggatttttttaaggaattgcctcagtttgtggtaaaagctggtcccgttttacgtaacatgtatggtgaagattgggagactcgacttgagggtacggagatgcaggccaattttgtgcacttgagccttttaagcaagtcatacaagcgtgcattttgggaactcttcttgacaagtgatgcaaatattgacaagcagcaaaatgctaccagttcgtcagattatatatcagagtgtcatcgatttggatggttactgtttttggcactccgcgtgcacgcattcagtcgttttaaagacctagtgacttgtgcaaacggttttgtttctatactggctatcttgattatacatgttcctgttcgcttcagaaacttcaagatcaatgactctccacattttgttaagaaaggtgacaaaggtgtcgacttgcttgcgtcactttgcaacatgtatgatgcttcagaagatgatttgaggaaaacaatggagacgtccaataagttaatagaggaaatattgaaaaaaaaccatgtccagca

SEQ ID NO: 49127 - DNA, 501 bp, Gossypium hirsutum
  Clone ID: LIB3825-010-Q1-K6-H5
gccagcggccgggcgcgctcataaccgtattaataatcgaatgagaacagcctgtggaacaggcaacaatgaatgcaacgaaagagacgcaaagagaagagatccgaaacacggatccagaaagctcggcaaaagaggtctgctctcaggggtgccaaccccggaacccatcccctgaaccccgcacttgtcgagccactgctccagctacagccgctcggagagcgcctcgccggggaccgactgggaaacggtctgtgaacggcttcctccgggccactaacagggcaatcaacactggacccaacactgggactgccactgggaaatcaacacaaaaattaaaaaagatccctgcgaatgctcacgcagatgcatacgcaccgagagctctgaccgtcactctgaataaaataaaccaaaaacggatcaacgggcggagtaactatgacagtcacaatgactctaaaaacgtagccatataactagtgacccacatga

SEQ ID NO: 49128 - DNA, 519 bp, Gossypium hirsutum
  unsure (1)..(519): unsure at all n locations
  Clone ID: LIB3825-010-Q1-K6-H8
gaaactagtaaacctgctcctttgatggttggtgtggagaggagggcgtgctggctgttacacagtaacttgatganagaagctatcgctgcaaacaaggctgaacgtttctatgaatcacaagaagagatggggatatgtctgatgagtatgaaaatctcaaaaaagattgctatctaatacacaactagcctattctgttctagtgctaccactgtcatgcctagctggctgtgcagatagggatactcggatggtagaaaaagatcgtatacagaggaatggaacggggtgatagaaagagcgctggtatagagagcgtgaaaatagggaaagacacctctggcgaagctaaaaaaagggtatgggaaaggatcgaccccgttactatgatcttcagccccataaacattatcgacgagatcgacaccgacgcacatacttccattgtcaaagaaagactctgagactacaatggggacctgaattgtagctcctctgaaacatttgtgagactaa

SEQ ID NO: 49129 - DNA, 490 bp, Gossypium hirsutum
  Clone ID: LIB3825-011-Q1-N6-B5
aactccctcccaaaatttccatagataaaaaagatgttaaatcgcaaaaaccaagggcaaatcttttaacctgaacaaggggtcaaataacgagcaaatgggagttgaatgcttacataccacaagaaatctagcctcaagcagtagtggtctcctttgataaaaaaacctttacccttttggtgaaatctctcataacatctataatcacggattttttttgcatccggaactgtattgctaactcagttgaaaccgaaaccccttgttttaggagaaattcatcatccattatctttgttgggaagtgtcccagtgcaatgacacaaagtgcaataatggtacgaaaagcagctacttcatttgcaactccaaggggaccttcggctgataaggattttaggacactcaaatcatacctctgcaccatttctctgtcattcgatagtagaactcgtaaagcagctaataaacgtccctctaccaattc

SEQ ID NO: 49130 - DNA, 533 bp, Gossypium hirsutum
  Clone ID: LIB3825-011-Q1-N6-B6
agtcacaaaggccattttcagggatcttaaaccattgaattttcacttcattttcaggtgtgatgttaaggccttagaagatgcattgtgtaaacgtgttatggtcacacccgaggaagtaataaagcgaagtctcgatccacaaagtgctacagttagccgggacggtttggctaaaacattatattcgcgattgtttgactggtgagataagcttgcatatgatcaactatgaaatgtattttaggttctgagataattcttctctgtttttatgcacaggttggtggacaaaattaataattcaatcggacaagatccaaactcgaacttcctaatcggagtccttgacatctatggttttgaaagctttaaggctaataggtatgctccatgcttgtaggtttaatctaggttgttccgagtccaaggatcctccaatacatgaaaaaaacttaaaaataagtaaacatatctatctctaacacttaaacccaagtccgagttatatagggtatctctctctatgcagc

SEQ ID NO: 49131 - DNA, 228 bp, Gossypium hirsutum
  Clone ID: LIB3825-011-Q1-N6-D1
attgaacagactggcgtgaacttgggacataaaataggtacatattgctcaaaattgttaaatcctgggaacagggtactataatttatagcatgtgcgttaacgtctactgccttatttaaaattctcatatttacccattaaagaaagtatgttgggatttgctacgaatctggttctatctagctgttgatggaatataacttgaaaccatctttttagcttctt

SEQ ID NO: 49132 - DNA, 580 bp, Gossypium hirsutum
  unsure (1)..(580): unsure at all n locations
  Clone ID: LIB3825-011-Q1-N6-D5
aaaataagacaatgaattaattaccacagngaaaaaaattctntagaattggggngaaaattacaaaatagtacaaaaacagttcttaaatttcaattggaggcagcagctggcccctccttataaatctgtctccatcaccgatgggttaaccattgaccctatattataccaaaagcggagttcacttcatgcctgttgttttctcttttttggtctcctctttctgcgtggtttgcgagcatcagaattggaacttaagttactattgtttccagtctttgaatttgaggattcccccgccttaaaggaagaactactgctttttgaagtgtggctagatgtggacatttcagttcttcgtattgatgaatttcggctagatgaagatccaaaccttgattttgcacgtacaaagtttgaaaaagaattacttgatggcctcggaggcggcattaaatctctcgcagatacctgtttctgattcctttcatcgctagacatgccggacgccgctatgccagaagcacgctcccttgtactttctgtccattcatcatctgcatcagcttcctcactc

SEQ ID NO: 49133 - DNA, 212 bp, Gossypium hirsutum
  Clone ID: LIB3825-011-Q1-N6-F1
attcaacaaactgccgtgaacctggtacatataataggtacacagtgcacgactatcgttaaaacctttcaagaggggagtaaaaatataacacttgcattatcatcaacagcctcatctaatattattctaatctccccctaaaaacgattgtgatggagctatgcttcaaaactgggtgtcaccagctgttaatgaaatgaagccagaaa

SEQ ID NO: 49134 - DNA, 222 bp, Gossypium hirsutum
  Clone ID: LIB3825-012-Q1-N6-A4
aaaaatgggctttttggagggtccagaagccttctccttttcatagtacaataagaatttatgagcaggtggaacttgcttcaaacgctaacatggcaaccaacgtggttcaaccggatcttgccaactaatagttggggctccatcaatgttttatcgaaaaacaggccttggtttttaagcaataataaccaaggtgttaaaaagattagtactctcaaa

SEQ ID NO: 49135 - DNA, 468 bp, Gossypium hirsutum
  Clone ID: LIB3825-012-Q1-N6-B3
aaccaagcatgtactttatgttactccgcgaaacaagagaacctagttcatactaaaatccaaactcacaatgggacatcagagagagagggttatttattctattacaaaaaaccctctccttttcagacacagcacatgacattgaattgccattgcaaaggtacttggcagacttaatccttctcttacttaacctttctgatatggaaaaggctatctctaatgactgcgatgcatttaatcctacttcgcaatgcgtgtgataccgagattcaagtcatcaaaagtgaccccgtttgaccctgcgatacactatgctacgttctgccccgtcatctgcatatgaacttctacatcatagctcactttttgttgatgaacatcgaacaatgccctgaaatcagatctgcttgcatcatatggacgagttttgataccgcctggagctttaattgtgttcccatg

SEQ ID NO: 49136 - DNA, 567 bp, Gossypium hirsutum
  Clone ID: LIB3825-012-Q1-N6-B4
ccctccccctccccccccccctccccccccttccttcttttctttgcatttaatacttgactaaacctatcaaagagtcaggcaacccgtccagtgtgataaacccaatccgtatatggctgaacaccgcatgaattattattaataataaaatattctttttatttcaatttaattataaaaagaattttataactttttgaatagtaaaacgggctgtcagtccaacacagctcatggacaggtctacatgttacattaagctatagttcaaggggcaaaggggtaggggagattaactttaaaccctatcactcctaaggagtagtaaaaactattagagtaagccttggttgttttcttcttaataaaaaatgggtccttacctaaaggtgttcatgagccggttcaaggcctgattctatgaaaactcaggctggagcccgagccaacctgcccaaatgactagttttaaagttttaaaaacaaaaaatatttttatttaatttaattataaaaatatataaatattaatatagaattatatttattattttaaaacagtaa

SEQ ID NO: 49137 - DNA, 575 bp, Gossypium hirsutum
  Clone ID: LIB3825-012-Q1-N6-D4
tttcttttacaaaattctggttacctcaccggtagactacccaacagaactaaaggaagcagtgtttgtatgtacatgctacacactaacaacaataatgcactaccaatacctaaccctcatttttatttgccaggccttctttagaatataacagaaatgaagcatagcaatgagcatgcctccttcattgactgtatgtaatatctagtttagtctagatgagctatagaaatcttaaaccgttgagaagcttctgcaatgttttacgaccccactggacatcactttgcaacacattgctgtgaaaaggctccacatcaggaagttcttctttggctactgggggctcctgaatatgctggttgggctgctcctcatcgtccttggctactgctcctgaaaagcttccggttgttcaccttcaggttctggcttctcatctaactgaatattattatgctcagacaaattgtgatctaaggcttcatcgaccccaatcaatgcattaattgtactattctcatcatcactcaacatctcttcttcagttgacactgttgttaatggaccca

SEQ ID NO: 49138 - DNA, 580 bp, Gossypium hirsutum
  Clone ID: LIB3825-012-Q1-N6-E6
cttctccaaatagcaaagcatcacagatggaaacttggtgaatacatttctttatacagcttttgagaaaagaaaaaatgaatgaagaagaacaactgaaactacagcacaatgttgctgggaaattcaacatttatatgaaatattcccatttgagatactctaacactagttacggtcagcaatttaccatatgtcagcttacacaaacaatccatgcccacactttaccatctctgcaccacaattaaatttcatttctttggttgcacacaaattgtgggaaccagaggtaaaataaggtgagagtttttagatctcaattcaacttacattgccgttttcaatcacctctggaaccttgtaagaatccaccctcacctccctcagttgtaagcccgggaacaacgaatccaattccctttgaacataacgtgcgcgtttctttggccgttttcgaggaagacgcccaaccatcaccatgaaatcctcctcgatctctttcttcgacagcggcaccgagaatttcggtcgtgctcttttgttctcgtctgccgccgtcgccgacgctaccgacggt

SEQ ID NO: 49139 - DNA, 506 bp, Gossypium hirsutum
  Clone ID: LIB3825-012-Q1-N6-F4
agaagggcacagacccaaacttaaactaaagaacaaagttaataaaaacaaagccgggtgataaaagataaaaaaggtcatcccacccaattatattcaggggaaaccaaaaacaaagcgggccgccaaacctaagaatacaagaaccaacacgtaacatgacaaaactaaaacaaaacccacccaaaaatagcaatccgccagagcagtaaaacagaacacacaactttatacagcatagggacagagcaacaaagaacagaggaaaaaagggttcaaatctatgataaaatcgggaaacaccaaaaacgggaaagggcaaaagacagcaaccttgcaaaacagcaaaaacgcaaacaaaaaacaaagacgggcttaaaaacgcaaaacaggggaaaaagcactaaaatctatgaaaaatgtttctttaacagcaaagaagccgaagaaaaaaaaaaacaggcaaggaatcaccttcgaaaaggaagagatatcggcaccgaaaa

SEQ ID NO: 49140 - DNA, 424 bp, Gossypium hirsutum
  Clone ID: LIB3825-012-Q1-N6-G1
gttgacagggaaaaaaatatcccagagcgaagctggaaaacatacttgttttttaaaaaataatacccttaaaaccgaaaaggcctatcaagcacccccccttgaaagctgggtaaaaaaaaaaggaaagtgcgaaaataattccctttccctaacatcatgcagacaaaaacaaaaaggctccggtcatagaattcccacccgggagggaaagggctcctaaacacccaacaccccatttgtaaagtagcccgaaagactgctatacgcttaaaattttggatattagcaagatttaaaatgtttgcccggacccttcataccataatctaaattggccaggacttgttcaattttttcttttaacttttcctaaaaaccttgaactttggttggccatcgtttcttggccataggaaaagtg

SEQ ID NO: 49141 - DNA, 479 bp, Gossypium hirsutum
  Clone ID: LIB3825-012-Q1-N6-H3
gttacaccataaccacctaaactgccattatccacatatctttattttcacatcataaaaaactgcgaatttcgttttcagggacagcttgcaacatctagcttgcattttttcaaatacgcacaagctaatggtatactgccgtctgttacaaacctgatcctagatactaattaacagtcatgttcatagtggtgtaacacctaactatgcgttccctgagaaccaagcctcgacgagactacatgttttatggcagagaccttaatagcaataatcatttcatgaccttattctaggcagatgactatgcttgaagtataaaatacacactacaggcaccacaaatacgagttggatactgaccttcaatgctgctgctacgttgatcgacaaaagcatcgggttttacttaatctacattccaatcataaatcatttgctcaccactgctagctccagcttctggaacagcttct

SEQ ID NO: 49142 - DNA, 462 bp, Gossypium hirsutum
  Clone ID: LIB3825-013-Q1-N6-D3
aaaagtaactttcacaccaatacattttttactgtgagggggcgaaatacaatgctttaattctataacaaaccctacacacagtatccgaactcatacgcgagtaacatgacgcgagtttgcatatgatacacttcaatcacccttccaatcaatcgcacggctatcaagcctagagatcagttcttattcacacttattacctaccctagatccagatgccgaactcatacaccaatagcatgacacgagttcgcatatgatacatacaatcacccttccaatcaatcacacggcaatcaagcctagacatcagttcttattcacacttttgccctaaaatatcataattcatggatagtcctaacaagatattagaattagaaggccttactataacttgtctatttatctgatatgcaacctctgaatatccttatttgcaggccttactttctcagg

SEQ ID NO: 49143 - DNA, 476 bp, Gossypium hirsutum
  Clone ID: LIB3825-013-Q1-N6-D6
ccgctcgcgatctagaacgttctagatcgcgagcgggcggccctttggttttttgttttttgtttgtcgtttttgtgttgtttttttttttagatagaggaagaaaaaaataaaaatggggggtagtagttggtcaaaccaacattataaaaaaaaggcacttttatttaaaacccagggggacaaaacctattggaagactttaaaaatatatgaatggcaaataccttaaaactttatcattttaaacaagggtgttgcttgagggggtttaagggccaactaccttaaaacccttggggttattgggcattggaaatccaagaaataggatgggagcttttcatataggtgaaaaattataagaaaatgaaggggaggggtaactacccgaaaaagaggcttactggtagggtgttttattggaccattccaagggagaaaggtgttttggtaaaaaaaagttttggtgaaat

SEQ ID NO: 49144 - DNA, 429 bp, Gossypium hirsutum
  Clone ID: LIB3825-013-Q1-N6-F2
aaaaaaaaaataaaatcttttcaaacccgggtttccatggtaatcgggttttcaaaaggggggctgggccaacaacaaactaggcgcattcttttaggcgggcccgaatccccaaggggctgggcccatttatcaatggggggggaacactttttatggtttgggggggggccttaggggaaaccacaaagggcgggcccttgggggggtctttccttcacccttttcattttgggacggaccatattttccttaaaggaaccgggggcatcatggcttttataaacaagggggattcaaacccctttttccatgaatcaatcaacgggggattaaagcccctagcttatttctttaaagccctcggggggagaccgacatactaagcaaagttttccatttcgggggatcggggttacattccatttc

SEQ ID NO: 49145 - DNA, 584 bp, Gossypium hirsutum
  Clone ID: LIB3825-013-Q1-N6-F3
cttcatcaaatatccaacaggtctgatatttaataacattaactaaatacctataaaagttcatattaaaaatctaataagaattttgactaaagattaactagagaaaaatcagggaaaaatgaaaaggaacaagatgctctataccaagtgtatccaccaaatatatgcttgttcctggaataagttctttatgttgagatctcaaagctacattttgccctcctttctgcaattcttcagcaatctcttgtccatgttgtggatgccgaggaacaataatggtgacaatgtctgggtgagtttgcacaagaacgttgtgaactcccaaaattactgcagaaaatgtctgttagtgctttgtccaagaaaaggataactcacagcatgtggattttcattccaactggtaaagaattgcaatgatcctgagagtttaagctataaaatgaacccataatcaccagaagaaacattaaccaaatgcaaaatgaccatgattcattaaactatcccagtgaatgcactaaattaactgcagaagccatggtcatcgaacaagtgaccaaagtaaacatgaaaat

SEQ ID NO: 49146 - DNA, 593 bp, Gossypium hirsutum
  Clone ID: LIB3825-013-Q1-N6-H3
accataagcacctcgagtgccatcagcagctacgtcatatacactcataaattacttcaaattacatttatcaaggacagcatagaaacctaagattacaaatatccaaattcacacaagctaatcatatacagccataaattacaaactagtccaaatccaaataacagccatattttatctgaaacccttccttttgttccttgtaaaccaagccttcttgagactacgtgtcgaagccaaatccttcataacaataatcagtacgtgaccttttcctaggtagatttagggcatcaggttcaaaagacaaattacagccaccagttataggtgttggattttgcccttcaatgctgctactacattgattgtcaaaagcattgggtattccttcatctaaattccaatcatcaatcatttgctcaatcctgtttccttgggcttctggaagtgcttctaaacctgcaaagacctcttcatccgttgatggtctagcagaagttgataaatcctgtatcatagagaaaaacaatcatttatttttacacaaatgcctttgattaccaaatgaatattaccattttaactga

SEQ ID NO: 49147 - DNA, 613 bp, Gossypium hirsutum
  Clone ID: LIB3825-013-Q1-N6-H4
ccgccctttcccccccccccccttcttttttttttttttttttttttttttttttttttttttttttttttttttttttttttttttttttaaccgaataaaagggaagagtccaataacaaggggtccaattacaatagggttgtttggcccaatgtcaaaaaaaccaatgccccaaaacgatacagcccaaaaaaacgacccaatacctaaaacccaaataaaccccaagcccaataaaccctaacctgatttgaaaaaccctcctaaaatccctaaggtttttaaaaccttttaaccgccgttttttaagcttttcaaagtgcgccgaaaaaaaaaaacaggccttttaacgcgcgtgccctttaaaaaatgtttttggaaaaaaataaacaagggggaacagcaagcaaaacaagaaaaacagcaaaaaaaaagcattttgtttacaaaaaaatggaaaataacttatttggggggcgggtttctatttttcctttttctggaattccggctttttaaagccaaacacgattttgtaaaacggggggatactgtttttacaaaaaaaaaaaaatcccgaaaagtggaagggggttttcggttttttttt

SEQ ID NO: 49148 - DNA, 547 bp, Gossypium hirsutum
  Clone ID: LIB3825-014-Q1-N6-A5
gggttaacaacattagagtaactaacattttaatatccgtctaacataatatagcacaaaacaacgcactccataggttcatacaagttattgcactacaaaacaagggtctcctgctttacatagagccaccatttttatttaattacatgcctgcttaaaactataaaaatttcacattaatgccataaacaccatactatggaaccataatcgcctttaactctttatgtcatatgcacgctgcctctgcctagacacgaagtaaaacttttgcgggttgctgctgaatatgttatacaccaacctccatgacaccccaaagccaactacttagctaggctatcccatagacttacatggttgattcttccagcacacgaatatcctatagctatgggctgaactaatgaaccagttgcaaaaacccaacccatgcatcctgaggatctagttttgggatgcaactaatgtaactggaaagaatgctgggactacaaatatgtctacacgctacaaccgggaccttattttcctgtattgaaca

SEQ ID NO: 49149 - DNA, 560 bp, Gossypium hirsutum
  Clone ID: LIB3825-014-Q1-N6-B2
gcatattctgtaacccaaacaatgtattactctattcctcatctattacattccacccaaccaaattgcataatatctctattcaattcccaccgaataccattccattccttctctatttcattagagcgaatttaacaaaaactagaaagactaacttgtagataagtatatcttaatggtaaggttgatcagattcttcttctattgtccactcgtgttttcttgggtgtaggtccggcttgcaaatgttcagtgcttgattgaatcttattgagtttgtccctaaccgttttaaccgtctgattcattgactgggaagggaagtagtccttgtcagatgacactcttgttattcgagcattattactgtgagacctgaactctgcatccccaacatccctcagtcgattattaatctggttaggaatatgatgagatgaagcaggaagtgatggagccttattggaagagagcacgcgatgaactggatgccctttagatctttgagaattcaatcttgcaaggatttctttccttctgccttctaacttatcttt

SEQ ID NO: 49150 - DNA, 553 bp, Gossypium hirsutum
  Clone ID: LIB3825-014-Q1-N6-B5
ccgcccccccccccccccccccccccttcctttctttttttttttttttttttttttttttttttttttttttttttttttttttttttttttttgccccaaaaataactggttaaacaaaaactggaccgaatttacatttaatcctccttaaagcaaagtttctttttaaagaggggggaaaagccgtccaaaaactaattttaacatgaaatacataattggggttttgttaaaattgcagcccaaaaaaatatttggattttagtcctaaaaaaagttaaaacacacttactggtgggatttatcccctccaaacaccccttttgttgggattcaccggttaaaccacatggacttttggtgttaaatttatcctgtacacactggtgccactcctttttttacttgaaaaaaaacttgcacacttcttaaaaaatgcaaaggcctttaatagctcccacaacaaaaatgggcaaaattcctccaagtgccggaacccttttgattgcattacccctcccaaatttgttggaggggcaacaaatttaaa

SEQ ID NO: 49151 - DNA, 570 bp, Gossypium hirsutum
  Clone ID: LIB3825-014-Q1-N6-B6
acatcaaatagaagaattagatatcagtatagtggccattgtagaccctgtttgcacatgtataaaccatttcatgctctaaacaccagcagctgtcagaggcttgctttagataatgcttttaaagcttcagaaatctcttctggcgttgctccacctttaatactggcaatcaaggggctgtcagaagggataatgtcatttctcaagtcggttgttcggagcaatgcttcggaaccctttgtcaccacttccttcatgatcaatgtcttatgagctccagctatcaactcctcataatcggtgtctccggtttcgccaacaatgacaaacatgtttgcaacattcagtctccaacgcacaaaaaggtacctgagtgcctgagctcgagatgcaaggagaggaacaacttgcattctagttgagttcctgcaatacattggatgacaacggagacctcgcatcctgagcttctgcctcaaatcatcaactttcttggccttactcagctcctttacaaagtatgcaacacagtgggcgttgctcgatttcacatcttcctcagcacat

SEQ ID NO: 49152 - DNA, 533 bp, Gossypium hirsutum
  Clone ID: LIB3825-014-Q1-N6-D2
ccgccctcccccccccccccccccccccccccccccccccccccccctttttttttttttttttcttaaacaggtatttttttatttttatttcaaatctaactacttttggttctttttattttctctccaaacacacatggtaaccttcttcatcatcatcgcccttttctttggtaaaaacatcaactttgtaaaatgggattttttttttactaatcttcatgatccctttctttagccacactttttaaaggccctgctttttttttcacaaacaactgttttccgtgcaacacttttttttgatcagggatgttcccaagagctttaaaatccttttggggcatttcccacccaaacaccttaatgttttctttgatcctaaaagggttgtttgatttggttacaacactggtccccctttgtttagccctttttaccaaaacttgtcctggggttttgttcagcttctttccttttctccccactgtttcaccatggatcagggctttaccacctttttttgaacc

SEQ ID NO: 49153 - DNA, 584 bp, Gossypium hirsutum
  unsure (1)..(584): unsure at all n locations
  Clone ID: LIB3825-014-Q1-N6-D6
caatcaagtcatggattctgggactgtttggcttcaagagatttctcatattcttcaatggatttgaagagctcagaaaagttgcctttcccaaaaccaccacatccacctttttggtattgctttccttcttcatccttcaccaggcacccaattctttgtattatctctatgaagatggttggcctaaaaataaaaggttcccactttagttaaccaaacaagaaataatatacatatatggcgatgagaagttatggaatgacaaggttgaagctttgaaaacttgaagattttaggttagagtgctacaacgaatgtaaatgtatgcgtggtcatctagatttattgttgattggttagtttgttaggttaaattagttattcagttcattacttgtgatcacaaatattgatataattatatttgtacctctaaaaaataaggaaaatatacatttataagggcatatgaactaatttttctccataaaattattgtgtattgaacctttactaaaaacaggnacaaattaatgcaatcaattttttattgctaaataacttctaatgttaatatccct

SEQ ID NO: 49154 - DNA, 219 bp, Gossypium hirsutum
  Clone ID: LIB3825-014-Q1-N6-F1
aaacaacaaaactggcatgaacattggtacatatatgtaacaaagtgcacaaaaacgacaaaaccttaaaacaaggtacgaaaaatataggatttgcaagaaaagcaatagcctcatcaaagatactaataacacacccttaaagataatcatgatgggatatgctacaaaaccggcactaaccaggagttaaaggaatgaagcttgaaaccaccttat

SEQ ID NO: 49155 - DNA, 580 bp, Gossypium hirsutum
  Clone ID: LIB3825-014-Q1-N6-F2
aaataatagtgtcattaaatgttgaaacaagaaaaaataaaagctcgttatacccaaatgacacaattaagtctatccacgaagttaaataagcaaaaataaaatgatatttgaaatccaatcacaaatcacatgaaattctattaagaatgaagtcactaaattacttgcaagataaatactatggtaaatatggaatgcataaagaatcaaaatctctcgaggaaaataaaaagaatggggaagaataaacctttgtaaatgtatcacaagcagttacgctgtcgattttgcttctggttctgcttcggcaccagattggtccttagtagccgtagtagcatcgtgttcgggggcagaaccgtttgccgtgtcatctttttcaggcgccattttctcggcagatgcagttccatttgaagcagcttcttttccgtttttagggtcgtttttgccatcctttccttctttaccttcctttgctggaggaggtggaagcatgtgaggcgggggagtatgcttcagcttcacgagaatgtgccgcattcttgaaagacagtcggttttccgggttttggtc

SEQ ID NO: 49156 - DNA, 198 bp, Gossypium hirsutum
  Clone ID: LIB3825-014-Q1-N6-F4
gttgcaaaggcttattgagaggattcatacgctatgcgttaaacgtgacaaatttggaaaacattctgacgagacgtaaaactaatgcttaagaaggcgggctttggcgattgccggaacatatagcctaatctgcaggatctgaaggtaggaggtcataaagctttttgatctgatcggctactatcccaagggcct

SEQ ID NO: 49157 - DNA, 428 bp, Gossypium hirsutum
  Clone ID: LIB3825-014-Q1-N6-F6
ggttacaaattggatttatccattctttaatggatgatgaaaacaacacgggtttagtctaaattcaaaggtaaaaacaaaaaatacgtgcattggcaagaccccgcagggaagaaaaagaaaacaaggcaaacagccgccaagaatgtgaggagaagggagcaaaggcaaccacagaaaaagcaagggaaaaaaagagtgcggaaggtactaagaaaaaggaacgccttgggggaggggccagggaacaccgcatttgaatacggcagcagcagggaacgcagacaaaaaaagggcaggagcgggcaacctaccaagaaagaacaaaacacggcttttcatgggaaggtgagaccaattataaaaaaggggacccccaaggccggtgggccccaaaaaacaacaatggaaaccccgagaccggaaac

SEQ ID NO: 49158 - DNA, 435 bp, Gossypium hirsutum
  Clone ID: LIB3825-014-Q1-N6-G2
tgagagcggaattccatcaacaacaggattaaagacacttaactagcatgaactactgttgattaagccgcgaagtaaagatatctgcttatcactgactagatctatgaattaaaaaccctttctcaagaggttacaagattaccaaagcatacacaatctgtgaaataagtgtgacaactaagacatcgaagcattttcgcataaccactgacaatcgcttaacataatattagccgactcattaacatatatgacccgataaccttgcactcagtgatactgtaaaactttgataagatttcagataaattatagacgtagtcacacaaaacgtttgaaaacaaattggtgcaaaactattcaacaacctcatcaaactacatcaagtgaagccgcaaatcacgctcatccttatgccacaatactaatgac

SEQ ID NO: 49159 - DNA, 558 bp, Gossypium hirsutum
  Clone ID: LIB3825-014-Q1-N6-G4
gatcccaaataaagctttaaaaaaaccacataaatgtcagacaaacagaaccatcggacacgcccttctatgtgtatccacaacaacatgctggagagatttgtgaaacattaacaggaatgaccacggaccctgggtcattgccagctattttgggccacgcccacccgcccgaggacaacatactccactaatgaaccgcgaaaaggctctaacactaacaaactaacaaccaaaggctgcaagaaagcggggatccttggactaactctcccaataataattcggtaatacttgagaaataaacctacgtcccctaatgggggggctaaataaatttatttggccctgccggattgccggtaaaacactgcactgaaggcgtgagccaacacaggaaccggctgttagcattgccaacaaactaccaccatggactctaccttcacgagctgaaacagataaccctccttgggagacagagcaacaagcattcggaaccccatatggcctcaaactagaacaactagtgctcgcagaagcttctacctcactcca

SEQ ID NO: 49160 - DNA, 544 bp, Gossypium hirsutum
  unsure (1)..(544): unsure at all n locations
  Clone ID: LIB3825-014-Q1-N6-H6
nntttttntatttttttantattttttattatttatatatatttttgtatttgtttgtgtatcatttatcatttgtataacttatatttattatttttctggagaggaaagagtaaacattcaagaggtacttctatcctattaatcacacaaacaaggaatgggcactaaggaatcttttcacaaacttcaaaaaacgtaaaacaaaacagggatcccaaaaccaaaagtgctggctggaacggtcctcatgaccttcaccactccggccaacaacagggcagcatcttgtccagagctgaggtgaaggcccctgtgccttcatcaatgatgaccatggttgccgggtcaaagtggaaaccattatcaattacagctaaaatgaccaggggaaccaaaaattgaacaagctggggcttcgctttaaaaacccaaatcattctctttagcttttggagagaaccctccacacataggagacaaaccgtcgagcctatgtcctatttagacaagcccctagaactgaccggatgccttccgtaat

SEQ ID NO: 49161 - DNA, 579 bp, Gossypium hirsutum
  unsure (1)..(579): unsure at all n locations
  Clone ID: LIB3825-015-Q1-K6-A11
ggatttttgtgaatctgttggagnagttactgaggttcggattatgaaaggtaaagatacaagtgaaaacaagggctttgcttttgtgacctttagaagtgtagaattggcgtctaaagccattgatgagctaaataatgctgaatttaagggtagaaaaattagatgttctacatcccaatcaaaacatcggttgtttattggtaatattccgagaaactggggggaggaagacttgaggaaggttgtgtcagaggttggtcttggagttacaggtttggaattagtgaaggatatgaagaactcaagtagtaacaggggttttgcctttgttgagtattataacaatgcatgtgccgagtattcaaggcagaagatgatgagcccggaattcaggcttggtgataatgctccaagtgtgagctgggctgatcctaagaatgctgattctcctgctgcttctcaggtaaagtccgtgtatgtgaagaatttgccaaaggacgtaacacaagatcagctaaagaagctatttgaacatcatggaaagataactaaagtggttctgcctcccgcaaaacc

SEQ ID NO: 49162 - DNA, 522 bp, Gossypium hirsutum
  unsure (1)..(522): unsure at all n locations
  Clone ID: LIB3825-015-Q1-K6-A5
ggnaagctgttnganaacccattcaggtggtggnacagnngcaaannaagcgttcaagnaaaatgaaggacagtttgagtattccatttttagtattgttttaagattttttttgtgcgtcataggcagttaaaatatattttgttcaatgaatttatatgtgttgaacggcagggtggagaatgtcatctgattatagaagaagttggttttgattttgcacgatttctctaacagtatgtatgcaagaccacgacattgagaatacgatattataaaacacacttcaattccaatataaaaaaaaaaaaaaaaaaaaaaaaaaaaaaaaaaaaaaaaaaaaaaaaaaaaaaaaaaaaaaaaaaaaaaaaaaaaaaaaaaaaaaaaaaaaaaaaaaaaaaaaaaaaaaaaaaaaaaaaaaaaaaaaaaaaaaaaaaanngggggggggnggntaaaaaaaaaaaaaaataanggggggggggggggaaaaaaaaagtttttttttggggaaataaaattaa

SEQ ID NO: 49163 - DNA, 538 bp, Gossypium hirsutum
  unsure (1)..(538): unsure at all n locations
  Clone ID: LIB3825-015-Q1-K6-A6
caggnatgatgcaaatccaanaacggtggaattggtgagacaacagattgggggatctgttttggttgtaaacaagtgccccaattcttcattaagtgtcagcagaagcagcggtgaaatggaagaaagacccagattttcattaggaaatctcttgtggtctcagcttgagcgacttacatccagtttcggtcattaaggaaccaaactaccctttcatgctgtaactaaactaccctttcatgctgtaactatgtcattgtctgtacataaatttcttcatctcttggaataaatcagcaattgcttacattgaaaaaaaaaaaaaaaaaaaaaaaaaaaaaaaaaaaaaaaaaaaaaaaaaaaaaaaaaaaaaaaaaaaaaaaaaaaaaaaaaaaaaaaaaaaaaaaaaaaaaaaaaaaaaaaaaaaaaaaaaaaaaaaaaaaaagggggcggccccttttaaaaaaaccaaattttactttccccggctttgcaaaattttaaattttttttttggggccccccaaaattaaat

SEQ ID NO: 49164 - DNA, 578 bp, Gossypium hirsutum
  Clone ID: LIB3825-015-Q1-K6-B12
gttttcatggctgatctgatgggaacgaaagatatgaaaagggttgaattttttggaggaattaaccgaaaatggtcatcgaattcaagaacaagtattagaggagatactgctgagaaatgctggaactgaatatctaactcgattcctccatggccaaactgataaacaactcttcaaaaacaatgtacccattgttacttacgaagatataaagccttacatcgatcgaattgccaatggggagacttcaaatatccttttagctgaccccatctccgagttcatccaaagctctggtacttcaggagggcagccgaagttgatacctatgacagctgaaaattttgagaaaaagacgttagaactcaccttggttgatccagtcgtaaaaaaatattttgatggcttggaaaaaggcaaaacaatgagccttttttttgtcaaaaaagggagtgaaactccatcaggtttaacagtgagaacgctcacatcgtgctacttcatgagcgatagcttcaagaaaagtgcgcccaaaatctgcacaagtcctattgagacgattctctgcttggacc

SEQ ID NO: 49165 - DNA, 594 bp, Gossypium hirsutum
  Clone ID: LIB3825-015-Q1-K6-B5
tgttaaagaggtatttttaacttaataccttgcaagaatatgaaattcaatgttgaatttaccataaataagttaattaattagcggatcgtttttttggatatcctggacttaatgttgcctgttctagctaggatgctctcttacaagctcaccttgtctggttgggatttatgatgtattaataccttataacgaagtttgtcacttggtagcatttcttccctatactgtgttggggtttagagtttaggggttatcccttttacagtttaatccacaacctccattcattttgttcttaaaggaaaggtcagaatttgggttgaaaacaattcaactcttagcatcttatgatctgcattgtttcctctaccattgcagattccatttgccacttcaaatcttgtgctcttagttgagatgactgacttcattagttggcttttgatataggttattacctttctctttcctagatgtgagccgctctgcggtgatgtagagtatgttatcaattagatcgtcacatatcagaagctacttatcagaaactaagaatgaatatgttaaaagttcataagacaatcattc

SEQ ID NO: 49166 - DNA, 579 bp, Gossypium hirsutum
  unsure (1)..(579): unsure at all n locations
  Clone ID: LIB3825-015-Q1-K6-C12
gaaacccanaaatatatataatttttgtagnaaaagnaagcaaaaatttcatatatttctagtttgtgagttgtaatttttttaataaaaatattcaaaaaagttccaaaacacctttgggtcatttttcaaatggattccgatttctggacgtctcgtctcgccgccgctaaacgccagtataatttgcagcaccgccatcaaacctctcatctggatcgtttgaccatcgatgattttgaggttgacgacgaggtccgacccgatttcccatgcccgtattgttacgaggatttcgatatcgcgtccctgtgttcccatctcgaagatgatcatccctgtgaatccaaagttacgatttgtccggtttgctatgtcaaagtttcgagagacatgctaagtcatatcacgctgcaacacggaaatttattcaagttgcagagacgttgcaggttacgtagagttgcaattccgaacagtcaggcactctctctcctcggccgggatctccgagaagcacatctgcaagtacttctgggtggtggtgcgtatagatcaagcggtgttaacgtgtccaat

SEQ ID NO: 49167 - DNA, 617 bp, Gossypium hirsutum
  Clone ID: LIB3825-015-Q1-K6-C7
attttcataaataatctagactcaatatcattttcataattgattatttttttaaaatttattaaaattatacaaatataactaatatttataatttttttttaaatcattaaaaattgtaaggattacttcaaaattataaaaatatttacattgttattaaaaacataaattagaagatgccaaaaataggaagaaattgaaaaattattatgccaagataacctacttgttcccgagtggagacatgaactttcaaggggagagttctcaagagagaaccccttgatgtcaaatgcaagcatagatgagaactacttgttcctgagtggagacttgaatagtttgcatatattcaaacaagaaatccatgcatggtttcataggaaaagagacggggtggctttccgtactaccacaggtctgtaagttcattaatttagttaaactgtgttccaaccttgccacatgctgcataactaaaaactgaagccacaacaaggacacacatacatacaacaatttaaaagaaaagcagaaaaatattgtcgccaggttagttaactttgattagttcagttacattgtcaccaggttaagtataaatctcttttttt

SEQ ID NO: 49168 - DNA, 605 bp, Gossypium hirsutum
  unsure (1)..(605): unsure at all n locations
  Clone ID: LIB3825-015-Q1-K6-C8
gngnatagcaanagagatcgagggtgaggacaaccaanaccttcatttagctgaggagagaggcgttgatcttcatgatgattttgatattgatgaggagatgagatattcgtcggtctacaggggtagaggggttgatgatagtggttatgaagaagatgaggacattttgttggattcccacaatattgagacatttggagattcatatgattctcttagtagaagcgctgatggagttcgaatgccatcaagctcttccttagtggatgatgcaccatcttcccaggcagccattagtgaagatttgaattgctctcgacctaatgatcaggcgagacagttagcatctgaactcccttctaaaagtttctctgtatctgccagtgaaagcaggatccgagacaagttgcttggtgaacatggtggaagcagtgatggtaatgagtttccagaaaagcagtctccatctgaggacttgcaattgtcaaaatctgttgattctgggtcattattgaatgacaaaattgatgggtctgataaagctagacgatctgcaaatcctactaatgctccatctaatgctntgtcaaaggttagtgaaa

SEQ ID NO: 49169 - DNA, 590 bp, Gossypium hirsutum
  unsure (1)..(590): unsure at all n locations
  Clone ID: LIB3825-015-Q1-K6-E9
gntggtaaagaaacatccccagcttcttcattacagcattgatgatggattactacccagaataaatttcctaaggagcattgggatgcgaaattctgatatcttgaaagtcttgactagtcttacacaggtgttatctctgtctctggaggacaatctaaagcctaagtacctgtacttgatcaatgaactgaataatgaggtgcattctttgacgaaatatcctatgtacttgagcctgtcactagatcagagaattcgaccccgccatcggttcttggtttccctaaagaaagctccaaaggggccatttccactcggttcattggtcccatctgatgaatgcttttgtcagcagtgggctggaactagtttagataaatatttggcatttcgtcaaaggttactactcaaagagttcgcaaagaaatatgagaagtagtgataagcttcaaaagattccttcctaatactagaatccgtgtagcagattggtatcctgtccacttcaagctatctagtattgtagctctctaacactactccgaggttttggaatgatacctgaaactacaatttaccatagcctt

SEQ ID NO: 49170 - DNA, 587 bp, Gossypium hirsutum
  Clone ID: LIB3825-015-Q1-K6-F11
ctcgcccaaaaaaaggaaaggaacgaaagaaaaatcagaatagaaaaaattggagaggaatcttaagatggaaatttaatgaaaagataatcagtttattaagttaaaacggagagggaatttttttatatgacgaatggaataatgcaagagcaaaatctagaggagcagattaggaaacaaatgggttgcatggctggtttccttcagatctttgatcgtcaccagattcttaccggcaaacgcttgtactccaccaagcgtctacctccttcgccggcgagtgaaacgacatcagaggaagagaaggcagttgagtcacctgtatcatcgagagaattagagaagcggccacaaggtcggttagcactgtcaccggaacgttcaaagcgatctccagttatatcagagctccggtctccggcgcctgaaccgtccaccccgacgggaagccagaacaagatatctcttccgcttcccattttcgaatccaaagaaggcagcgggaggtcaccgtggaaattatccaaagatgctccaaggctctcactcgacagcagagccgtcgttgatgctacaggaagcct

SEQ ID NO: 49171 - DNA, 569 bp, Gossypium hirsutum
  unsure (1)..(569): unsure at all n locations
  Clone ID: LIB3825-015-Q1-K6-F9
cttttccctttctccaaaccctttactgttagnaaacaacatattttcaaaaacgaaaatatgatgaacaccgtcttcaaacgcacaacttccttagcctccaggcggatcctcgccgcctctgctcaaactctccttcatcacttccactctacagcaacagttgcaacagccgccagagatgctgagactttctttattaacagattcaaacccttccctggctttccggcgtctgcagcgaaggggtttcacgccaaatcagggccgttgtatttcagggcatcgacgggcgtacaggcagagtatgccgtcgaggattatgtcgatgagaagggaagtgaagcgcttgagatctctaatctggggattgctcccgaaattgtttctgctttgaagaataggggtatcaccaaattatttccaatccagagggcggtgttggaaccagcaatgcaaggaagggacatgattggaagggcaaagacagggacaggcaaaacgcttgccttcgggattcctatcatggacaaaatcattcgatacaatgctaaacatggcccgtggta

SEQ ID NO: 49172 - DNA, 585 bp, Gossypium hirsutum
  unsure (1)..(585): unsure at all n locations
  Clone ID: LIB3825-015-Q1-K6-G4
ctcagcgacgccaaaagccctcgaaattgctgcgcacgccaatccgctaacgtcttcgtcgcgctcaccggcagcgagaagcaacaacaggtcaggcacatacagcatccgaaaacagaacatgtcggcactcatatcccaagataggacgaaaaacatatgaacaagccataccgccaaagagatgaaaaggtctgctggctaccgccaagccaactgaacacaaccgccaggcataaggcaaggcgtgacccatgaccaaagacgctggcaatcaatgacctcagacggaacaggagagggagaagaagaagaccaataacatccagcataacgaaaacatgccacatgaacacctcgtagacaccactaaattaacgacgcccatggccatggctaaagatttgagaagcacagtgaaggacattctgaccacctgtggatacgctgggaggaccggggaacgtaaagaccctaaacatcagcagcaccagattgatgaacgagatcttaatactcctctgcactagtaaaccactctatcactcttaagatcatatattgnttgatgttggagaccgacct

SEQ ID NO: 49173 - DNA, 573 bp, Gossypium hirsutum
  Clone ID: LIB3825-015-Q1-K6-G6
catggaaacctctggtcttaacttctcaactcacccccaaaaagatttattttctcaacacatactattacctgtttcctttttcttacaaactgtaatactgatgtgtgtacacagattttatacctttatttgcttacgacgcttgtttctccgtgtaaactatactttgttcataaaattcccaacgcatattcagatttcaggggttattttgcagttgtttttgtcagatttcaaatgacaaattctgttctatatttctctgcgcatctctattttttcccactggtatttggtttcacttgacttcaactgcaggttctatatattcattgtttgactagactcctctgttcagatttattattattttggaatcatttctgtgtctttgggaaaacccagattccgaatcaaaatctgggttttgggggctaaaaggtacttaatgggtgccaacatatctggagctatggtcgacagagatgaaggcggttctccattgaagccgagacttggtgacataccagagagctgggcggccttgggtctggccctgttagacccacc

SEQ ID NO: 49174 - DNA, 583 bp, Gossypium hirsutum
  Clone ID: LIB3825-015-Q1-K6-H2
gccattttccaatagctcttttaatctcactctcatttaaacacttaatcaatcaattaggaaaggaaattatggattcggacgaggaggattacgtgttcttcggtacaccgatagagcgggaagaggagatcaccagccgtcggaagaaagccgccgccgaagcttctggtaacctccgctccctccctccctggaagcaagaggttagagatgaagaaggacgcagaagattccatggtgcatttacaggtggattttctgctggttacttcaatacggtgggcactaaagagggttgggccccacaatcatttacatcatcaaggaagagcagagctgaagtcaaacagcagagcattttcaactttttagatgaagatgagaaagcagaattggaaggtactttgggaacatcttcacagtttgacacatttggatttacagctgctgagtttgctcgcaaacaagccgataaggagcaaaagcaaaggccatctgcaattcctggacctgttcctgatgaacttgtcctgccagcatctgagtctataggtgtgaaattgctgctgaagatgggatg

SEQ ID NO: 49175 - DNA, 131 bp, Gossypium hirsutum
  unsure (1)..(131): unsure at all n locations
  Clone ID: LIB3825-016-Q1-K6-B3
tttgacttaagtaatattagaatcatgggtgttttcacttatgactatgaatctacctctccagtcgcccctgtcaggcttttcaaggcctttactattgaagccgccaaggtttggcccacagctncccc

SEQ ID NO: 49176 - DNA, 327 bp, Gossypium hirsutum
  Clone ID: LIB3825-016-Q1-K6-B4
ggttataatttttgcaaaagacttggataaaggtgaaggtaggagatgaaatctatgttggattcccgcacccccttggttaatgaagggctttagtgtgagatacgtgaagagggttgcatatttaagtttcaaattgtaaatatattgaatggcgacttagtggaattcctagattaaactttgggttcaatttggatccctaatatatatctagattcctaattccgactttatatgcatttgatgaggaacttattcccatgttaaaggtctcatcagataaggttcccattacctgaaatagaacccacaatttttttagcc

SEQ ID NO: 49177 - DNA, 522 bp, Gossypium hirsutum
  unsure (1)..(522): unsure at all n locations
  Clone ID: LIB3825-016-Q1-K6-B6
ggtagcttctctattcaagtataataatttttgtactcttctgctgtatttctttggtttatttttcataagatataattcctattatttgaggtgtaagatctaagtcctatgactatctactaatctccattatattcagttcatttgtttctgcagaaatgttttcttcattttgctagatatgaagttcctcttccttatggcaaaggcttaaatctgtatggccaatggatatcgctatgtgtctaacacgaatagagttaatcttttaaaaagttttcatgtatttaggtctttggagagtcacaccaatgttccaatatgttccagacacaaatattttaagaaaaatgaagagtgggaacaatataagatcattatgatcacaaaccaatatctaacgttcatccgagnttggaataacataggacatctctaccctggatgaccagcagaagtatacttgtaattcacattggnttttcaggtgagggctcaagataaaaagccgttggtttt

SEQ ID NO: 49178 - DNA, 531 bp, Gossypium hirsutum
  Clone ID: LIB3825-016-Q1-K6-B8
ctgcatataagcccgatttgcaaagctctgaaaacatacatggttcaccttccggctccgtttattggtggtaggttgtctgggggattggacttaagtcatggctactcatatcaccggcgacttgatttcggtgctgaaagaaccggtcccttgaggctccgactttgactttaactcatcctgaatatgtctccctcctataatagcttactttctctaattaacccaataggcaatgtccccttctttcatgaatatagaagtcactataggtctttcggtaacataacttacccaaacccaaatgtaacattggtacatggaatatcataaatcataaatggacccttctctgaattttattacatatgcattctcaaattaattgaaatggcactacctgttttttatatgatcactgttgataaaatatatccaccatttcttcattaaatagaccattgctgggtattggctgacaatgaaaaattggagcccacggtattaaatgaacccactgatattcgc

SEQ ID NO: 49179 - DNA, 603 bp, Gossypium hirsutum
  Clone ID: LIB3825-016-Q1-K6-C1
caagttgcctggttttcttctagctcttggtatgcaatttactgttgagagcccccgctggttatgcagagtaggggacatgaaagatgcgcagacaattatccgtaatctttggggagactcagaagttgacaaagctattgaggaattccagtcaatcatcagcaatgatgggactgatgtgaacagcagatggatgcagcttctggaagagccacattctcgaggttgtatcaagttgctttcattggaggagtcctttttgttcttcaacagtttgctggaataaacggagttctttatttttcatcattgatatttcaagacgttggaattgctagtggtgctttggcaagtttatttgttggacttacaaattttgcaggtgcactctgcgcatcgtatcttatggatacacaaggaaggagaaggcttctcattggaagttatctgggaatggcagtttcaatgtttcttattgtttttgctatcaattacccattggaggaagatttcagtcacaacttatccattctagggacgctcatgtacatattcacctttgcaattggagcagggccagtaactggtctcataattcca

SEQ ID NO: 49180 - DNA, 341 bp, Gossypium hirsutum
  Clone ID: LIB3825-016-Q1-K6-C6
atgacatcgtgatcctgagttatatcccaatctttatatcttccattcaccaacataaaaaaaaaaagataatgaatgcacattagactggaaagcaaaaggaacaaagatacaaaagaaacgacagagaaaaaaaaaccataaaaataaaaaaagaaacataaaaagaaaaaacctgtcaggggggagacagctgaaaagactgggaaaaacccaggggatgcccatcgtaagatattcgccttacatcagccggccaaaaggtggagaggccgcgaaggggccccctcggaaaggcgggaacaaccggggtgcagcctgaaaggcgaccgggacgggcc

SEQ ID NO: 49181 - DNA, 566 bp, Gossypium hirsutum
  Clone ID: LIB3825-016-Q1-K6-D8
ggctccccttgtttcaggtcttgccaatgaattggtaaaggtcggaattccaactttcggcccttcagctgaggctgctgctttggaaggttctaagaaccttcatgaaaagcatatgtgacaaatatggaattcctactgctaagtatcaaacattttcagatgcatcagctgcaaagcaatatattaaagaacaaggagcacctattgttatcaaagcagatggcctggctgctggaaaaggagttattgttgccatgacactagaggaggcatatgaggctgttgattcgatgcttgttgagggtatttttggttctgctggttgccgtgtcattgttgaggaatttcttgaaggagaagaagcatcattctttgccttggtggatggagagaatgccataccactggaatctgctcaggaccataaacgggtcggagatggtgatacaggtcctaatactggtgggatgggagcatattctcctgcaccagtcttaaccgaagaacttcaatctttggtcatggaatccattattctcccaacaatgaagggtatgtcagca

SEQ ID NO: 49182 - DNA, 285 bp, Gossypium hirsutum
  unsure (1)..(285): unsure at all n locations
  Clone ID: LIB3825-016-Q1-K6-E12
gcgtgcgctcaactttaataggtaggacggcgcggctgctgtaatagtccgcgccacaggtaatcaatagctccaagttgtcactcntttagatgaatgactaactggcggatgcggttagtgaacccaagagcacgtggttacnggatgcccaactcgacgctctnctctaggagcccactgcagtgtgttcatcccgtttatggacataatgtacggacggcacatgtgtatgtcgaaactacgattaggtagtgtgtatgcaacagcacctgttgctatcaa

SEQ ID NO: 49183 - DNA, 594 bp, Gossypium hirsutum
  Clone ID: LIB3825-016-Q1-K6-E4
attttaatcctaaaatctaaagttaagacatttaacccacttatttgatttttcttatgaaatagtccatgcctctaatcagtaatagaaaatggcaggcataatagttttgaagtgaattgtgaatatttagaaggcaggcaagcagtttggttaaagattgaaacttgattttttatttttatttttattttgaagcattacagcagttttgtttataaataaaaaaaccattctcttcttcttggaagttgtaatggaatactcacaaacttttggtctttggaggagaatggcataagccatcacttccaattcaggatatattgccccttaatttcttaaatttctttggaagttgtaatttcacgttgcacaagctttcactttgctttctcttcttctttggcttcattttttatatttttataaaaaaatattttaattttaattttttaattttttaattaaaaaaagactgttttttaattataattgaattaattgaatatgtaaatataaaagtactaaaaaattaaggattagtgagtaaatggaagtgaattagggttgggtcgggcatatgcatgtagt

SEQ ID NO: 49184 - DNA, 595 bp, Gossypium hirsutum
  unsure (1)..(595): unsure at all n locations
  Clone ID: LIB3825-016-Q1-K6-F5
caggnattccctctacacgccaattgagagaaagccatgtaatttcatatccccttgtgatccccaaggcgttacaagctgatcttgcatttgaaatggaagcccaagaatataccgacacgcaaaaaacggatcactctcgttgcaagtatagaaaggagtctgtgtagtcactggatgccatgatgtaacgggaaagtctcactgctctgtgttgcaacagccttgcagtgcgattatgaaatgacaagatgaagaagcgaaagcacaaggaggagcaaaaacggcaagaagtagacgccagagagcaagggatgaacaggtgttacagaaagcgtcgtaaaagaagaaagacaagagagataccgggagcaggacaaactaaagaaaaagattcgcagacatgtggaagcgtgatggtcattatgcacgtgtgcatgcatgtatgttcaatgaaacttttggcaaaggaagtcaatattatcaactcacgaactcgattggatcttaaaaaaaataacttactgacccactggagactcaagttggtttgcttaaggtgttgtggttggatgaatcatcaatcgatccatgc

SEQ ID NO: 49185 - DNA, 214 bp, Gossypium hirsutum
  Clone ID: LIB3825-016-Q1-K6-G6
gttttatgggcacggtctttgtatccgaacactaaccggacatcctggcagacaactcaacgagcatgagcatcccattaatacatgtgacacgagaatctcaatgtcacgtaggcacgaaacgctcttacatacagatcgtgacatgggccaagaccctggagtatctcaactagacatgcgtcttgactcacataccgatacagacacatgt

SEQ ID NO: 49186 - DNA, 150 bp, Gossypium hirsutum
  Clone ID: LIB3825-016-Q1-K6-G9
caagaaaccctagctgtcaataaaaaagtacgcaagcatcataaaccactccattgctgctacctttgactgttcattagtgtcaccatagacctactctactgggcgaagctatacaacttctccactgggataccccaggccaggcag

SEQ ID NO: 49187 - DNA, 481 bp, Gossypium hirsutum
  Clone ID: LIB3825-017-Q1-K6-A11
ctttccgtcaagttgtgggaataaggcaagcatcggtggtgtcattcgcgattgtggcggggattgggttgtaggcttcacgatggatgtcagtgccactcccatcttccaagtagaggccaaagccttgtacgaggggatgcggttcgcatgggacgaagggtttgaggtggaaagcgataatggtttgcttgttgagcttattcgagattgttatggcgagaggaatgagcagtgaataatgcggtggacgggaatggagtgtccgcctgagacataatggtcgacagcataatgaggttgcagactacatatgtccaggattggttcaggtcaactaaatagactagtgatttcggacactccaccggttgcggttgtgagtttgccaggaccagatagtagtctactgtgttagagttttcttttctcttgtgtgcttcaatcggataaggtgaatcacacatctctattttaccta

SEQ ID NO: 49188 - DNA, 507 bp, Gossypium hirsutum
  Clone ID: LIB3825-017-Q1-K6-A12
ctctgtcgtacgtctccttctaaaaccctacttatacacctcctcgcaaaacccttagccccttacttttttctttcgaatggatcatgcatggagtactggggtatctgaacataaatctggacagcctattaaagcatatcctggtgctaactacatgatccatgtttcccaggcttaacttggagagtccaagaacaaagcaaaatccgacccactctatgtgaatgtagacgggaagaaacttatcctgggaaccctgtcccaccacgatggacctcaattatatctttgatcataatactttgacgagacagtgctgagctacttccacatctggaaaaaccgaagcgtgtatatcctcagggacaaaacttgcatacacagaagaaggtgatgattatggaatgtatctcgaagaacaaagccaagaggaggaacatgaggagctgcctgatgctgctgctgctgctgcagtagatggaaaaactatgcccgatggaaaaa

SEQ ID NO: 49189 - DNA, 516 bp, Gossypium hirsutum
  Clone ID: LIB3825-017-Q1-K6-A3
cttcgacaactgcggtgccaatatttcaatcctgttcaggttgccgagcgacaaggaaagttctggcaaagctattgaataaaatctgtaaagaggtggaggacatgccaacggtgctaaggacatgaacttgggggatccgtttgagtacaagcatcttggaagcatggcaactgtgggcagatttaaggctcttgttgatctaagacagagcaaggaggcaaaagggatatctctagcaggctttgtcagctggtttatatggcgctcggcatatctaacacgagtcgtcagcaggaggaacagattctatgtggctattaactggctcacaacttttgtgttcggtcgcgacataagcagaatataaactcgtagataggtatctttttttccgttttaagaggcaaatgctcgttgtccattttcatccagagtatagagttttaatcggcatcaatgcatttgtgtttgttagtcagaggttagcagcagcttggggattgggagggagga

SEQ ID NO: 49190 - DNA, 595 bp, Gossypium hirsutum
  Clone ID: LIB3825-017-Q1-K6-B11
acctttacacttgaccctcattgcttttccgttctgactatcaattgaataaccagttagtctctggccactggaaacttatttcctttagtgcatgttagtgtgtattgccaggtcattccagcattgaggatgcgctgatggcatccacaatatttacatgccgtctttgtttaatattcagggaatgtgcttttcctgcctcaaaaagataccaaaaaataaaagaatctttatttaaaattttcagttataaaaaatgttaattatcattcatattgtttcttacattgtcaactaaataagaacatgctttttatgtggtataaggtcagttaatcatagacaatttttccttgtaatattgataggatcatgtactacagaaagagaggggatagctgttgcgtgctttgcccggaaaagtagactgtccctattcagaaaaaaactttatcaaaacttaccatgatttattgcagtgataatgttcaaagattctgagaaattggaggaaataatttgctttacccggaaagatttttcattagagtacactaataagggttaaactccatagtaccgaaatacaaat

SEQ ID NO: 49191 - DNA, 576 bp, Gossypium hirsutum
  Clone ID: LIB3825-017-Q1-K6-C6
ctggaccccctgcggacaccggccgcggatattcccgggtgcaacccagcgtcccagcggcttaccacaaaggcgacccaatccctttcacgctatcttgctctcccaaaccaataatccctatacctacttccttttccctggatgccggccttacctgtatcttatcccccgccaggccgtcggtatacccgtgaaaacccaaaaacccttatcagccaatccccttgcgtctagagcctccgtcgcctccgtggccccactatgatactcgctcctatctgtcgggactcacttttcccaactgtatagtggtactgcactcgagcagccaggtcctgtctcaatgacccgaggcctaattacttgtaatgcgtcccccgaaggagacaatgttgctcgtcggctgagattttggagcattgagctcgggacgcaggagccccctaacgaggatgctaccagggatgaaataattggtagttgtagcaaaaccctatctcatttaggtgggcgatggaagacgaaactagaatgaaaatctatacaatcttctactcggcattaaaatgccct

SEQ ID NO: 49192 - DNA, 249 bp, Gossypium hirsutum
  Clone ID: LIB3825-017-Q1-K6-D7
caaatatgtcgacatccctagaacacacgaactcccctggacttgtcggactactgtgttgcaataacatatgcgactaaatgttgaagcttaaaaacaaaaccaaaaaaaaaaaccaaaaaaaagagaccgaggaaggcaggaggaagaggatcaagggcaaaaggacacgggggtgagagggcagaggaaggggcgagaggaggacgcaaaagtcaattcacggggccgcagtggcacaacagcccc

SEQ ID NO: 49193 - DNA, 466 bp, Gossypium hirsutum
  Clone ID: LIB3825-017-Q1-K6-E6
atgaattgtgatcctgtatgatttttcaatcttttttttttccattcaaaaaaaaaaaaaaaaaaaaaaaaaaaaaaaaaagggcgggcgccaaaaaaagatccaaacataaatgacacgaaacaaagcaacaaaaatagagatactataagtgcaacctaaagaaccataaactggcacgcggggttgacagcgtaaaacactggcgaaaaccctggcgaaacccatcgcaatccattcgcctttcatccccctttctactgccggcgaggcccccacgaggccccctccgaaccccctgcccaaccggggtgcaccctggttggcgccttggacccgccctttatttggcgcattatgcgcgggggaagaggaggctcaccgctacgcttccccaccacttggcagcgccttattgcccggtctttccgctttttttcctcactttatcccgctgtggcggggg

SEQ ID NO: 49194 - DNA, 615 bp, Gossypium hirsutum
  Clone ID: LIB3825-017-Q1-K6-F1
gtgctatagcaagccagctggttaatgtttggcttgaagtcttccgtaaggcaaaagtttcttcaaagagaaaatcccttaaagatccagcttcaggaaagccacctctgcactcacagcatggtgcttttgagagtaaagaaagcttgcaggatccattttctgctggaaagcagtatcctttaaacataaaggagaatggcaaatcacttgatattgaggtggaagctgtcgaccaaggaatgtcagaggaagagcaggctgcctttgctgctgaagcagctgcccgagctgcagcaaaagcagctgcagaggcacttgcatccacagaagccaattgcaacaaattactgcagcttcctaagattccttcttttcacaaatttgccagaagggagcaatacgcacaaatggatgaagggaaatggcctggtagtgtttttggaagacaagattgtatatcagaaattgactctaggaactgcagagtcagggactggtctgttgatttctctgctgcttgtgttaaccttgacaattccggaatgtcagtagataacctgtctcagaggagccacttgaagctcagagaacattctggagaaagtttggctg

SEQ ID NO: 49195 - DNA, 569 bp, Gossypium hirsutum
  Clone ID: LIB3825-017-Q1-K6-G5
catgttacgcctgcccgccttatattaccttattgcccacatctccttctcccttcaaaattagagtccatctgtctttctctcgcaaaaaacttgctcaaattttgggttttgaaaataaggtaagaaggttttccctgagacaattatgccatcattcgatatttgttgtttggagacagaaccggggttgaacagtaatgtcgtgtcgattaatgtcggcggtcggattttccaaacgaccaagcagaccctaacccaagcggatcccaaatcccttctttatcgacttgcggaaacgggttcggatcgtttcgtggaccgggacccgggtcagttctcgctcctcctctccctcctccgcagcgggacccttccttcgaaagtcaaagactttgacctccgggacctcatcgaagagtccagattctacggcgttgagtcgcttttgactagctctttaagcgacccttcccactttgacgcttttgccctccggaagtcgtctgaattacccttaaacggccgcgacaccccttctgcgattgcctcgacgccgtttgggtccc

SEQ ID NO: 49196 - DNA, 392 bp, Gossypium hirsutum
  unsure (1)..(392): unsure at all n locations
  Clone ID: LIB3825-017-Q1-K6-G6
cacacaatctatgcatgggtggtcgcagtgtgaaaacgctgcccggatactctgcacaaatgaacccatgtctcggcaaatctactatagataagggatcacacggctcgcataatatctccgacataatatccccccatgtctgcggtgcgtgtcatcatccactggtaaggagaactcgggcgcagcaccaatgacaaggaaaaagaatgncataagagagtgtacatgtggttatctttttggtctttttttctatttcattttttttaaaggggggcatttctgtacaataccactgtcttagtgtcattcaattctctcgactgcttgataatacatatatttgctattatggggtatatgtcacataccattcattgttgagtaag

SEQ ID NO: 49197 - DNA, 612 bp, Gossypium hirsutum
  unsure (1)..(612): unsure at all n locations
  Clone ID: LIB3825-017-Q1-K6-G9
cccgtccgagtacaccctaaactaattaagaaaaaggaatccgcatagcagctncaaacaccaccatccctctcaccatgtaactgtcacatccaggtccaagaatgatgcctactcctaggtaggaacacagctactgctcccctctcctctaccccatacaagcacgtacaggaggcctgtctctacatccttgccaaggtcaaggnaatctgtttaagggagtgttaaacaatcctgggaacaatttgcatgtgccacgtgcttgtcacaatcggcatcatccaagatgagagctgtgacaagcttttttgcactgagggcaaggcggatgatgtccatcttgccgttgatccgtggacaacagaatccctaggctctggattaccctcaacttacactatagaagaagctgaacgctccattaaatatcctaaccacgctgcccttgaaccacgtgtcattacagtgaagaagcgcgatataaaggataaggatgcgtgcgacaacgtttgtctgcggcacgcctaatgactaatgcctacaacatttgatccaatgcatggaggtctttaatggcacggagaaatgacatcaccccctaacacttgg

SEQ ID NO: 49198 - DNA, 582 bp, Gossypium hirsutum
  unsure (1)..(582): unsure at all n locations
  Clone ID: LIB3825-017-Q1-K6-H5
gcagtctggacttgctttgcccaaaaaatgaagaaggtgacaagttaaccaaagcaatactggcttttgccttgccctgcttgctgctgctgattcaaccagtacaaggggcttccaaaaccccaactttacagtatggcacaattgggaggaggaataatgctccttggacacaccctccacctgttaatgacccgacaaggggttgcaatgccgaaaacggttgtcgccagtttactctgagtcttgaaaaccgcagaggaaccctagttgaagctgttggcaatgttacaatggcggaaggaactttgaaccacagagagccaggtaccgaggccatagctgctgggattgccacttggttcttgaacaagactgagtccaatagcaatacatatgggcgattaaggatttcacaggacccaatttccagtgccgcagtgtcatcacaaatgttgcagctacaggctgtttctcgagggattgctcgtatgggactgcaagtgtatacatcaatgtctactgaagataactccaacacacctncggcagatggaaaaattgaaataaaagttaattcaa

SEQ ID NO: 49199 - DNA, 594 bp, Gossypium hirsutum
  Clone ID: LIB3825-017-Q1-K6-H8
gttcttctttaggtgttatgaatggacacaagttatggcaagctcacaaagcagaggttccaaacttctggagttaaataagattctgaggaagatatatgcaagcaccgggatcatgttgctaaaatgcgcaggcttcttttccgccatgaaatgaagcagaagcgcataaaaaagacaagtccaaaacctatcatcggttaaagaataaagataaactgaaagtggaatctgcagaaatgctgatggatccagaggctgccaaagagcaggctaggaagcaagagttcaaacgggctgaggagcgattgactttgaagcacaaaaataagtcaaagagggcaatgcgtatcttagaacgaggattgaatgcccaggatgaaggcactcgagcggctttggctgaacagcttcaccaacatgctgttttgacaagaaaaattaacactgttaaggacagtagtagtagcagtgatagtagtagtgacgatgatgatgagggttcaaacgaggatagggcatctgagttgctagaaaaagcaaaagataaaacgctgaaagtattagaagacgatgaagaattgcctaattctg

SEQ ID NO: 49200 - DNA, 612 bp, Gossypium hirsutum
  unsure (1)..(612): unsure at all n locations
  Clone ID: LIB3825-018-Q1-K6-A8
ctgttttcccttttcttgctcttcaatccaaaccccgagtcggtngaaaacaaatggcagcctctgcaattgtggcggaacccaaacccacggcggagccgccttttcccgccacaagatccgaccttggacagtacccgatggtggacccaacgaaagccgaggaggacgatctgtattgcaggttgaaatcctttcaaaggcagttggagttcatagacatccaagaagagtatgtgaaagacgaacagaagaatctcaagagagagctgttgagggctcaggaggaagtcaagcggatccagtcggtgcccttggtcattggccagttcatggaaatggtcgatcaaaacaatggaatcgttggctccactacgggatccaattattatgtaaggatattgagcaccatcaacagagagcttctaaagccgtcggcttcggtggctcttcaccgtcactccaacgctctagtcgacgttttgcctcccgaggccgattccagtatctctctgcttagccagtcggagaagcctgatgttacgtacaacgatattggaggatgtgacatccaaaagcaagaaattcgtgaggcagtggagctaccattga

SEQ ID NO: 49201 - DNA, 579 bp, Gossypium hirsutum
  Clone ID: LIB3825-018-Q1-K6-B2
ctcccttcttacccttattatgtatataaaccgcctatgccttacttctacatttactttcttcttatgcttaccctattgactctgaatatttaggtttaggataaggtttcaacaataggagcgtcttgcattacgtgttaggtgttcttggaaatgccactgctttgcacctcttcttgtctacgacgattacatttaataggatcattagaagtaagtccacagacaattatgtgcaattccctatggcatgaccttgcttaactgtcttctctctgcctggtatgggctagcatatgtatctaaaaacaacattttggtataaaaaatcacatgcaactggtgcactaatcgaatccatttatgtatagatcttcatcatctatgccccaaagaaagagaaggctaaaatatatgggctgttcacttatgttatcactgtgctcacgggcgcgggacttatttgcctgttttccatccatggaaatggcagaaagctctaatgcggcctatctaccaccatttactccatgatgatggatacttctgcactttcaatcatgatgctggtgatca

SEQ ID NO: 49202 - DNA, 610 bp, Gossypium hirsutum
  Clone ID: LIB3825-018-Q1-K6-B4
cggctcaaaaacgggcccagctgaggaccggaagcgtaaaggaagagaaccggacgacgccgagtgtcacagcgaggatgctgagttcgaatcccctgaaacaaagaaacaatctcgtggatcctcatctacgaaaaggtcccgtgctgcagaggttcataacctctcggagaggagacgcagagataggataaatgaaaagatgagggctttgcaagaacttattcctcgttgtaacaagtcagacaaagcttcaatgttggatgaagcaatcgagtacctaaagtcacttcagttacaagttcagatgatgtccatgggttgtggcatgctcccaatgatgtttcctcagcattacatgccaacaatggggatgggaattgggatgggcatggtcatggatatgggattaagtcggccaatgatgccatttcacaatgttatggctggatcaggtttaccaacaccagctgcttcagctcatttggatccaaggtttcccatgccagcatttcatatgtcaccacaagttccagttcctgatccatcaagaatccaaccgaacaatcagtcagatgctatgttgaacccacttggcatgcaaaaccca

SEQ ID NO: 49203 - DNA, 575 bp, Gossypium hirsutum
  Clone ID: LIB3825-018-Q1-K6-E1
tttgcttactctactttgcatgcctgtttctctttcttgggttttagttaaaattttcgtttaatttttttataatttaaattctggttcattcatttcgggtaatggtggggattgggtcgttttcttagggtttactttctcttctgtttttcttttttttggggtttttgttcttatctgtttagaattatttaattagttggtgacattaaagattttgttttttttgttaaagctaccaggtttcattaaattcgggtctaaacaaaaatccagtttccttattttttttttaaatgcaaatcataaaatttgggttataagttcacttttgaatacagggttctaataggatttggggttggtgaaactgggtttttttatccgatcatatgtatatttggttcatatttaatgctcttgtcctgaattggggaatcttgcaacttattttttaatttgagtttaaattccattgttattatcagttttgcagtttaagggtctttaattgtgtttttttatttggtgattttgttatattcttttaactatggatttcaaaactggtg

SEQ ID NO: 49204 - DNA, 579 bp, Gossypium hirsutum
  unsure (1)..(579): unsure at all n locations
  Clone ID: LIB3825-018-Q1-K6-E10
naaaaaaaaaaaaaaaaaaaaaaaaaaaaaaaaaaaaaaaaaaaaaaaaaaaaaaaaaaaaaaaaaaaaaaaaaaaaaaaaaaaaaaaaaaaaaaaaaaaaaaaaaaaaaaaaaaaaaaaaaaaaaaagagggggcggcccgttttaaagagaacccaactttacttccccggccttgcaacgtattactttttttttggggcccccaaattcaatttcacgggccggggtttaacaacgtggggacgggaaaacccctggggttcccaaattaaatccctttgcaaaaaatccccttttccccagtgggggaaataccaaaaaggccccccccaatcccctttccaaaaatttgcccaccctaattggcaaagggacccccccttttaccggccctttaaccccggggggggggggggttccccccaggggaaccgttacatttgccagccccttagcccccgttcttttggttttttccctttcctttttccccactttcgccggttttccccgtaaagctttaaatggggggctccttttagggttccaattaagggtttaacggccctttgcccc

SEQ ID NO: 49205 - DNA, 608 bp, Gossypium hirsutum
  unsure (1)..(608): unsure at all n locations
  Clone ID: LIB3825-018-Q1-K6-E7
aaanataagctttatgataaattggtgttgcttatttatggtgacattgtaacaggtggagaagcaagagggataaccccacttttgcattcaatggataaaatgagtatctatgaggaagacaagggtagaaaggacaatttacctcctccaactcatcctgttgcatcagaattataccctactggaagccataaccagttctctcccggaccaagtcctccattagacaccggaactccggcagaaaccatggacacaaagcctgaagaacacccacgtaatgttgctgcggatgagccggtaaaccagagcagttacactgagaaaatatcgtcggcgacctctgttattgcagataaagcagtgtcagctaagaacattgtagcttcaaagctcggatatggagaaaaggacgagagtaggactaccacgaatggatcaaatccgactacgcaaggatcagctatagattatggaaagaaaatggctgcaactatggcggataaactaagtcctgtttacgagaaagttgcaggagcgggaagcaccatggtgtcgaagctacacggtcccggctctgggacggcaatcgaagtgtatcctga

SEQ ID NO: 49206 - DNA, 610 bp, Gossypium hirsutum
  Clone ID: LIB3825-018-Q1-K6-F4
gtagccgtaaagggggacgacacaaatgtattggctaccattacatttgatttaaaattttcctatgttctagctggttgggaaggtagtgcacatgattcttgtattttaagtgatgcactttcacgcccaagaggattaagaattccggaaggtaaatattatcttgctgatgctggatatggcatccgtaatggatttattatcccatatcgtggtgttcgatatcacttaaaagagtttagtgctaggggcttgaaaatgcaaatgaactctttaatcttcgtcatacatcattacgaatcactattgaacgtgttttcgggattttgaagaaacggtttcgtgtattagatgctgaaccattttgaaattttcaaactcaagtagatatagttttggcttgttgcatcattcataatcatatcatgggagttgatcctagtgatttacttaatcaaggattatacgaggagcctgagtctgatttgataatatcaacttttacggagcgagaagaaagagaagaagcaagagaatggtctgctaagagagatgaaattgcacaaactatgtggactgattatatggctagaaatattaagtaggt

SEQ ID NO: 49207 - DNA, 378 bp, Gossypium hirsutum
  unsure (1)..(378): unsure at all n locations
  Clone ID: LIB3825-018-Q1-K6-G3
ctcgtcggaggggngagaaagggngaaaggatgatttaccgaaatggagtttgctgacaggaccagtctccatccttggcggaatcgttggagccactgttgttgcccacctaattttccttgacttgaatagttgcaggatcgatgtcttaaaaccaagaagaagactgccgacagagtagacagaagttgacagttgctttgttggttttggcaaatgcataggtttgttgaataataccaaatctggttgttgtataatattatttgcttagcttagtaaaagcttgaatgaaagcaaaggaacaatttgatttagctacaagacaggaaattgaatgtctcctataaatgctggggatttgtttgttcctcctg

SEQ ID NO: 49208 - DNA, 167 bp, Gossypium hirsutum
  unsure (1)..(167): unsure at all n locations
  Clone ID: LIB3825-018-Q1-K6-G7
aaatacacctctgttcatgggattataagttgctcttatcttttccatgatcacaaaatcatgttgggtgtgctttttttggcattttatccatgatatgccatgtaatatattaccaatgtaatttgtagtggttgcaanataatttgnngcaccttactgactcc

SEQ ID NO: 49209 - DNA, 519 bp, Gossypium hirsutum
  unsure (1)..(519): unsure at all n locations
  Clone ID: LIB3825-018-Q1-K6-H11
cataataaaagacgcgcgtnacttgtacgttccgtattttcatttattgcgaaaaagcgcgctaacccattcccaaaaaaatattgttaatttaattgtgatatatttgaatgaagaaaaaaaaagaaaaaaaaaaaacgagaaaacaaagaaaaaaaaaaaaaaaagaaaaagcaagaaagagaaaaaaaagaaagaaagaaaaaaaaggagcgaacggagaaataaaagggggggggggactaaagggtgcagcacttgcatccgtggaatggcaaggataacattttttagtggggcacctaaaacgagtttgtggggccgagctttaaaaacattgggacggggaaacccgtggggggccaaaggtaaaggcgtttgagaaacaacccttttgacccggggggactaaaacacagagagggcgctacccgagtcgctctttaaaacttttcggcaaaaccggaaagggaaaggggggcgccccttaacaggagattaaaagcggggagggtgggg

SEQ ID NO: 49210 - DNA, 657 bp, Gossypium hirsutum
  unsure (1)..(657): unsure at all n locations
  Clone ID: LIB3825-019-Q1-K6-A4
ctttngaacaacatatcaaatcaaaacaaaacaaanagagggtatcagactcgtttttctggggttttctcttgtttttctttctttggagttttcttcttcttctcaggcatgtttcctgctgcaactatgtccagttctacttctttgtctgaggaagctaatgtttcttctggtactagagttcaagactttggtggcttaaatcctattgttactcaccagcagctgccacagaaaattaagaagaaaagaagcctccctggaaaccctgacccagatgctgaagtgattgctttatctccaaagacgctattggctaccaacagatttatatgtgagatctgtaacaaaggtttccagagagatcagaaccttcagcttcatagaagaggacataaccttccatggaagctgaagcaaagaaacagcaaagaggtcaaaaagaaagcctatgtttgccctgagcctacatgtgtccaccaccatccttcaagggctttaggtgatcttactggcatcaagaaacactattgcagaaaacatggagagaaaaaatggaagtgtgagaaatgctccaagatctatgctgttcaatcagattggaaggctcattctaagacctgtggaacaagagaatacagatgtgattgcgga

SEQ ID NO: 49211 - DNA, 613 bp, Gossypium hirsutum
  Clone ID: LIB3825-019-Q1-K6-B10
gtctggatctcttcaaaatgaacggccaatctctctacctgtacaaccaagcatcaacgctcatagtgtcctcggccaaattctctttgatgcttgtgtccctaagaacattgaaggttgggatattagatattcaggttccagtaagggacagccatttgcatcggcccgtcggcgttcacctccccttggtatcaagtgcaatcgtcgttcaagactgtaaagattcccaatgaatcaaaatcccatactggaaatgaatgatgcttagcttcttctcaactcgagtattggaaacgaggtccgtggactttttttttttgcaggaaattgtgttggtttacctgttgtgctgcttgcttgtgatcataatcctttggctagaagtgtacaggtagtgtatatgagaacatatgcataggattgtatgtatgtatgtatgtatttttggtaaaatgtatgtatatgtgttatgtatgtatgcatgcatgtatgtacataagaggattctaagatatgtatgtattaagtgagatatgtacaaagatgccatctttatacctctgtttttatgaattctaagatatgtatgcattaagtgaggctttttatt

SEQ ID NO: 49212 - DNA, 619 bp, Gossypium hirsutum
  Clone ID: LIB3825-019-Q1-K6-B2
cggaagcgtgggttacgttccttgcgcccttgcgaacattgtggtagacatcaggatccgaagtttcagcctgatttatccagtacttaccaacctgtaaagtgcaatttggattgcaattgtgacagtgacagggtgcaatgcatttatgagagacagtatgctgaaatgagtagcagtagtggtgtccttggtgaggatatcttttcgtttgggaatcaaagtgaacttgtgcctcagcgtgctgtttttggttgcgaaaatgaggaaactggtgacctttacagtcaacatgctgatggcattatgggattgggccgtggtgatctcagtgttgttgaccagtttgttgaaaaaggtgtgattagtgattcattctcattatgttatggtgggatggatattggtgggggtgctatggttcttggaggcatatctgtcccgtcagacatggtctttagttatgcagatcctgttcgcagtttcgggatggcaacagtccatattacaacattgatttgaaagagatacatgttgcggggaagcagctatctttgaacccaagggtctttgatggaaagtatggaactgttttggatagtggtacaacatatgcata

SEQ ID NO: 49213 - DNA, 633 bp, Gossypium hirsutum
  Clone ID: LIB3825-019-Q1-K6-B7
tctttctcaaagcgctcttccctttcctttcattgttgttgttccgtagtatttcttttatttttcctttttgatttccaagagactctcatatttatagaaagagaggacccaaacgcaccgtatataagcatgagcagctcttccgcctcttctcgcaaggcactaagtaaaattgcatgcaatcggctgcaaaaggaactggtagagtggcaggtcaaccctccttctggtttcaaacacaaagtcactgataatcttcaaaggtgggtgattgaagtaaatggagctgcgggaactttgtacaccaatgaaacctatcagcttcaagtggatttccctgaacattaccctatggaagctccccaggtgatatttcttcaaccggcacctctccatccacatatttatagcaatggccatatttgtttagatatcttatatgattcatggtccccagccatgacagttagttctatatgtatcagcattctctccatgctatcaagcgcaactgtgaagcaatgccctgaagacaacgatcgctatgtaaagaactgtagaaatggtcgatctccaaagcagaccaggtggtggttccatgatgacaaagtttaacggcatcaacatctt

SEQ ID NO: 49214 - DNA, 605 bp, Gossypium hirsutum
  Clone ID: LIB3825-019-Q1-K6-C11
aaaaagagagccatatttcgagttttgtgcgtgaatctaataaaactgtaatccacacacaaaaaatgtggatttgtttcatgttagattcacgcacaaactcgtaatctgtctttccattaatttccccgtcgtttcttcatgtcgctgtccttttttctttctggtcccaaagggattggcaattttaatctataattttggagaagaaaaaggaaaaaaagagagagacagtagctgttattatcaagcctgactgtgagttaaggacagatcgatcctctaaatttgaagattcttgcccaaaattggtgcaattataaatgtgttagaaactgaaaggcaagaaattaatggtgctgctgcaaacaacatcagaaattttcgtccctgaccattagtatacacagttacacattttaagttgcttacttatgaacatctagcaagaatccataatgatagctgacgtttgctacccggattctacaatgtactttcagtaggatattctgtgttgtaataaatatgtcgaattgtgggtgaatttgttgctaacattgaacacaacatgattctctattgatgatcctgaattttgacaa

SEQ ID NO: 49215 - DNA, 640 bp, Gossypium hirsutum
  unsure (1)..(640): unsure at all n locations
  Clone ID: LIB3825-019-Q1-K6-D8
gtggtgctctccttgaaagcctcagcagagaacgaanatcgaaaattccgtaaatttgccacctgagcaggatgatatccctcttttctattcagacttgatgccactcctcgttaatgatgaaccaagtgttggggaagatgcttttgtatggttgggatcattagttccattagttgcagatatcgttaacggaagattcacattcgaaaccctgaccgcgccaaccggaaaccggctctttttccctgcatatgataagttcctaaaggagattgacaagtaagccttgaaactctgcttgaatgattgcatgaagcatttgcagaaacaagcaacaccaaaaggtgtagagttagctgatgatgaatatatattgcatgtcgaaggaacggctaccacgcgaagagtagtgcgccatattgaaggaacaagttggcccggtaggcttacgttgacaaatcatgctctctactttgaggcctctggagtcttgacatatgatgatgcacttaagatcgatctttcgagggatatagaacatggtgttaaaccagctgccacaggtccatggggtgctccacttttcgacaaagccataatctatgagtcacccgagttccaagaaggagttctgctg

SEQ ID NO: 49216 - DNA, 641 bp, Gossypium hirsutum
  unsure (1)..(641): unsure at all n locations
  Clone ID: LIB3825-019-Q1-K6-G6
cattggtcccaaatgaaacatcangnnataagccacnntttctttcgaaacccaccatgattggcacagttcgagtttacaatcactcaccgattccccacccgagtcacttctttattcatatactgaagcttttaatggcttcgctgcttctcttaatgaagaacaagctgagtctcttagcaaatcggaatcgattctgggtgtttatgaagatacagtttacactctccatactactcgttcacctcaattcctcggccttgacgccgatttggggctttgggccaccggcggtagtacccaggcttctgaggatgttattatcggggttcttgataccggagtttggccggaatctaagagttttgacgattcgggcatgccggagattccttctaagtggcggggtgaatgtgagtcgggtcctgattttggtcctaagttttgtaacaagaaactcatcggtgctcggagcttttcgaaaggttaccgtatggccatcggcggtgggattaataaaaaacccaaagagatcgattccccacgtgataaagatggtcatgggactcacacggccagcaccgccgcaggctctcacgtggctaacgctagccttttagggtacgccagtgggattg

SEQ ID NO: 49217 - DNA, 604 bp, Gossypium hirsutum
  Clone ID: LIB3825-020-Q1-K6-A1
gtccttcacttcagctcaaagaccaagttggctgcagagtatagagagcccctgttaaagaagaagcactataagaactgccctggatgtaaggttgatgaaatgaaggaattggagcaaggcctcccaattcggccactgctttccatatggattattgttttatgcactgctctgccgatatcatctctctttcctttcctatacttcatgataagggactttcatattgctgaaagagaggaagatattggctcctatgctggttatgtgggatctgcatttatgcttggaagagctttaacatccgtatcatggggaatatttgccgatcgttatggtcgaaagcctgtaataattatgggaactacttcagtggttattttcaacaccctttttggccttagtgtaaatttttggatggctgtaattacaagatttcttcttggaagtttgaatggcttacttggaccaataaaggcatatgcagtcgaaatttttcgagacgaataccaagcattaggcctatcaaccgttagcacagcttggggcataggattgatcattggccctgctctgggaggttttctagctcagccagctg

SEQ ID NO: 49218 - DNA, 550 bp, Gossypium hirsutum
  Clone ID: LIB3825-020-Q1-K6-A8
gggaagcttggactgctaaggggggcaaaagcacaccaggccaacaatgaaacctacgtgtgcctaaattcaaaaataaagacatggtgaagatgagaggagaaagtaggacaggcctgtattgttacgtattgatctaaagaagttgcaagactttgaaaagatgcgtaatgaaatcaatatgcgtgccacacttggatactatcaacgggaaccagcgtagctacaccaaaagctgcatatgtgactagtaagcactaaaagccttatggacctcagatatgaaagaaaagggaactctagaaccatctgcaggataaaatagatgagaaagtgaacgaattactagagacacatatgaccttggctgaggaaaatgacagataaccgcacagtattaatcatttatgaaaggctgctgagagagagatagatgagctgaaacacaagatacttaatatctaaaaagaatggaacatgtaatgctaactagagtcatcttgatcgacaacacatagagctacgaaaagacattgatgaccatgcatat

SEQ ID NO: 49219 - DNA, 641 bp, Gossypium hirsutum
  unsure (1)..(641): unsure at all n locations
  Clone ID: LIB3825-020-Q1-K6-B12
ttttccatcatcctttcatcttctccatccttccaagtcatcccaaaccctcaaatcagtttcttcaaactctatttctcgacaacccaaatctcccaccattaaactaccctctcacaaccctctctcgatccttcaaaactcccctattttacaaactgtagccaaaacccatgtttcttttaccttatttaacctctttacttctttcccttgtcttgccgtcgctgacacagttatatcctctcccgagcctggcaaagtaaaccttgaagcagtgttggtctcggttgatgaattttttaacaagaatccattttttgttgctggatgcactttcatttggcttgttgttgtgcctttaactaaacagtacttgagtaaatgtaagttcatacccgccattgatgcatttaggaaactccgtgatgacccaagtgcgcagcttttggatattagagagaacaagactctggcttctttggcctccccaaatttgagtttcctcaacaaggacacggttcaacttcagtttactgctgaaaagaagatgggttcgtgaaggaagtcctggagaagtttccaaaccctgcaaatactgttantttgtgttcttgacaattttgatgggaattccttga

SEQ ID NO: 49220 - DNA, 288 bp, Gossypium hirsutum
  Clone ID: LIB3825-020-Q1-K6-B3
ctctatatcagagcggagcggctcatagtaccaatccaaccttcgcgtccctgccatgcgatgtcttatctcttgtgtaacgtaacctaaattcacatggacggggcgtcacaacacaacgactggactggcaaagccgtgacctaacccaaccgacttgcatagcatcacattttcgtcagctgaggtggtataaaagagaacaggaccgatcggattgcccttcacaacagcagcccaaacggaaagtggaacgcgacgtgcactggagcattacactcagcgcga

SEQ ID NO: 49221 - DNA, 623 bp, Gossypium hirsutum
  unsure (1)..(623): unsure at all n locations
  Clone ID: LIB3825-020-Q1-K6-B5
agggtttaggcgatcagaggggngaaaaagnaacgcaaattgttttgtttttggtgangaaaaataaactgacaattcaagagaaaatcccagatggcttctgcttgataagcacagagaagatttcccttctgttttctggggaaaatatggggtagaaaatggaaggtccaatcatctgagtttagtcgagacattgattgatataatcacatatactttcaatcgcttggaaattgattcattgcttataatgtgtacgatgtggttccatctttgaaacatggtattgcagaagaggttagactatggattcaatggctatcaggtgcccactattcctcgagcaaccagatcagctaggaaaagggttccatttagaaagagagttgaaggcaaccgaattagtgcatttgatttactggccactgtagctgggacgttattgctagataaagaaagttctcctgcatctaataacgcatggaatgctgaagatcagtctgcagttgaaaaaaataatgtaaaagaggaaaggcaggatggagatcagtcattgaagctagaaacttgcaatgtttctgaacttgttccccaaactaatgacccaaattatagttcta

SEQ ID NO: 49222 - DNA, 627 bp, Gossypium hirsutum
  unsure (1)..(627): unsure at all n locations
  Clone ID: LIB3825-020-Q1-K6-B6
gcatttgttcgctacaanactttactcgcggacgatggtaagtcccctttgactgagcatgttgaccccggttatattcgccctttgccgcccaacgagaaggggaatgctcagtccgggttcgaagtgaacgacgtcgttgatgcgaggtacagagatggttggtggactggcgttgtgaggaaggttttgtcgaagtcgaaatatagggtttactttgataatcctcctgatgtcattgagtttgataggaaagatttaagggttcattgggattggatcgatggcaactgggttcgtcctgaaaagcaggtatggggtgaagtgttcattctttttaatttttcagttttttttatctggaaatttgggggggggtttattttggagttgagagcctaacttttttaggaataaatttttttcccggttttgaacttgcgaatctcgctgcatgtagctttttacactgaaaatttgctatttaagtcatgctttcatgattgcttctaaaattagggcctttctagtgctcaattaattggtgtaaataatgatctcgatcgatatgttttacctttagtgctttctttgtttaagttctgctaattttcattgcattttggc

SEQ ID NO: 49223 - DNA, 641 bp, Gossypium hirsutum
  Clone ID: LIB3825-020-Q1-K6-B7
gttgctggtggttcggttttgtacttgcaggaccagtatataaatcacattataaatgaaacaggagcaactgtcatgctacgtggatgtggttccggaaaccttgagagccttcagggttaagaagcacaaccaccactgcacttattcttgtcaagtaacaatcctaaaagtcttgatgatgccaagcgtttggcagagaatcttctggacactatcagcgtagagttcggtgcatccaggatttcatcaagtaaggtttatggtgcagttccacctccacagcagttgttgactggagttcaatgttccgcaacaggacgcaatgtgaatgctagttcagctgctggtttggcatcaatgccagttgctactccagctccacctgttgcagtccctgtggctactactggctattctcaagcgatggctgtggggatgcctaattctgggccaccccaagcaaattcagttggttatccacagcctttggtgaccagagggacaagctatattggatatggcgggatatacccccaagcaacaccattgcaacaggtagcattagctcttaaacaatcatctccaatctcctctactggttgtacctgcacatctgtagcaagtgcagttgttcctac

SEQ ID NO: 49224 - DNA, 640 bp, Gossypium hirsutum
  Clone ID: LIB3825-020-Q1-K6-B9
ggggggaaccctaaggttctgcgccgttcggccatcctttcatcactgccacgacgagtgatatccttcagtaccccccttttcgctctttcgttcactccagcatggagttcatcgttttaagccccgaaatcccatctccgactccgatttcagcgaaggagacgaggtcttcgatggctcatatgcgaaggtagggtttcgccctttttcctcttcgattcttatgttcaaaatgtgcagtatgtaaaactggagaaaaaggaacggatgggaaaacgaaaaagaactagaatctgagtctcacctttcaatttcttttgcgtttttgtatttcaaaaatgtattgattgtgcgcgtaaaaaaattacaatgagcaggggctttggctttatagtcgatacagaaataagagatattcaaaaaatagaaatagaaattgaatacaaattctctttttgctgttgttttcttttgtatgtatttgctgttgtggtttgttcttttgcaggtacggatgctgtgctggcgtacggaggtgtggcgtggcgtcgagggttgtgtgctggtcgtacggtgttgcaggctttggcgtgggcggaggcactggaggggctcggacggctgcggcacaagcaaa

SEQ ID NO: 49225 - DNA, 591 bp, Gossypium hirsutum
  Clone ID: LIB3825-020-Q1-K6-D3
ccgagtttgggcctgggaagttgagggtattgtaggggctctcatgggcaataagttcgactagtgtttgtttgtaatgttctgtttatgaatgccattttatcagtagttttaaaaaaaaaaaaaaaaaaaaaaaaaaaaaaaaaaaaaaaaaaaaaaaaaaaaaaaaaaaaaaaaaaaaaaaaaaaaaaaaaaaaaaaaaaacgggcggcccgctttaaaaaaacccaacttttcttacccgtccatgtaaatttaatagcgctttctttagtgcacccaaattccaattaaatgcccgccttttaaaaactaattaactggaaaaaccctgccgttaccaaaataaatcgccttaaaaaaaatccccttttcgacagttgttctaaaaaaaaaaaggcccgaactgatgacctttccaaacacttcctcaacctaaaaataaaatgggacgccccttttacccacacataaaccgccccgtttgttggggttacccccaccgtaacctttacattttccattcccttactccccagtcttttcggttttttccctccctttataacaaagtgggccgcttttccccgg

SEQ ID NO: 49226 - DNA, 108 bp, Gossypium hirsutum
  Clone ID: LIB3825-020-Q1-K6-G2
acgtagaggtataaacgcgtcgttctgtgacgcctatctctaatattgctgtcgtctattgcatctaggatattaacagctggtgtagtatcatatatggccttacat

SEQ ID NO: 49227 - DNA, 660 bp, Gossypium hirsutum
  unsure (1)..(660): unsure at all n locations
  Clone ID: LIB3825-020-Q1-K6-H11
ctgtcttggtaaaaggcagctttacttctacttctgggnaaagcatcagaagctattgtttatttctcgtccatcgggtgttcgcctctaattgcaatgaaccctgcagagtttctacttgaccttgcaaatgggaacttgacggatatttctgtaccatcagagcttgaggacaaagttcaaatggagaattcggaaactgaaaccggaaatgggaagcctccaccggcagttgtacacgagtatctagtggaggcttatgaatcaagagttgcagatactgaaaagaagaaacttatggctcctcttccattagacgacgaactgaaatcaaaagtgtcatcttcgaagcgacaatggggtgcgagttggtggcaacaatattgtatcttgttctgtagagggatcaaagaacgaaagcatgattactttagttggttaaggatcacacaagttctttcaacagcaatcatcttgggattactatggtggcaatcagatagtaaaacgattcgaggccgtcaagatcaggcagggttgttgttcttcattgctgttttctggggtttctttcctgttttcactgcaatctttacatttccacaagaaagagcaatgctaggcaaagagcgagccgccgatatgtatcgattgagtgca

SEQ ID NO: 49228 - DNA, 638 bp, Gossypium hirsutum
  Clone ID: LIB3825-020-Q1-K6-H3
gtggcaggtacgggtgagccaaagataatagcttctcgccgtcggatattagagctgcgatcgtttaagataggagctgacgctgctgatcaaccaccgctagagaacgatcggaaacgccatgaagactccatcgcaatctattcctaccggtatcttgtcggaattgcgattacgcggttcaaaactcaaaagacacaggtttaacaacgaaggtctattttctaatggcaacagtcaaattaatgattgagaagcccatggaagatgaaaaggaaccgccgaagttcggaatggcttctgtttgtggaacgagacgagatatggaagatgcatgtcgcgattcatccttctttttgtaaacaaagctctcaagttcaaatttcgtcggatattcactttttcgccgtgttggacggtcacgggtgcactcatgttgctatgaagtgtatagatcggtttcacgagatagtgaaagaagaagtccaagcatgcggcgtgtttgaaggcagaggagtggaagaatacgatggagaaaagctttgagaggatggatgaacaagttagagaatggacagtaaacgccaaggagagttctacctgccgatgtcagcttagaactccacagtgcgacgccg

SEQ ID NO: 49229 - DNA, 612 bp, Gossypium hirsutum
  Clone ID: LIB3825-021-Q1-K6-A2
cccacgccgtccgaagtgatgctatagttcttgggtatcaactgcaaagggtcccaggcagagatgtcagtatccctgaatggtacacaaactgctgaaaacgaacttggtctaagtaccggatcaccgacttctgaaatgagtgagagcaacgcgattacagaattttgcactgacgactttgaaattcttcatggggatcttcaaggtctttccgatacaaggagtttcctaaattctttggtagaacttaataatgtttctgattcagaaaagaataatgagaagcgtcagatgcgtgagcgtaaggctgctgctgggctttttaattgggaggtggacatctttgtgacaagggcacctggaaggctggatgttatgggaggcattgctgattactcaggcagcctagtattgcagatgcctataagggaagcctgccatgtagccgtgcaacggaatcatccaagtaaacacaggctctggaaacatgcacttgcacggcagaatgctaaaggacaaggaccaatgcctgttttgcaaattgtatcatatggttcagagttgagcaaccgtggcccaacttttgacatggatttatctgactttatg

SEQ ID NO: 49230 - DNA, 636 bp, Gossypium hirsutum
  Clone ID: LIB3825-021-Q1-K6-A9
ggctgttggacaagccccgacccaaggtgtaaaatccatttcttcaggtgatgtgaagaagtgtctcggacacaactggactctgaagaatcaacaaaacccaatgttaaggggaaaactccacctgagaaacctcccatcaataaggggaaagttaagactctgaagaaaccaaacacgggagtcttacccatgaagaaagggaaaggatcaaagctacaaaatggaaccgaggatgcttccgagtcggggttaggtaatcctgatcttgggccgtttctactcaaacaagctagggatttggtgtctgcaggagacaatccccagaaagctcttgaactagcacttcgagcagccaaatcgtatgaactttgtagcagtggaaaacccaatttagaattggtcatgtgtttacatgtcactgcagctatatattgcagcctaggccagtacaatgaggcaattcctcttcttgaacaatcaattgagattccagtgattgaggaaggccaagagcatgccctggctaagtttgctggtcatatgcagttgggtgacacttatgccatgctaggacagcttgagaactcaataacctgttacagcactggttttgaagtccagcaacgagttctt

SEQ ID NO: 49231 - DNA, 628 bp, Gossypium hirsutum
  Clone ID: LIB3825-021-Q1-K6-B4
gtttcctatctctctcatcatcttcttcctcttgctttttccccaagtttttattttggattggattagaaacttccacccacgtgtttggtttttttatttaacttcatatttttttcctcaataccctttctagattattttcctggaaaatttcccttttttcttttcataatccaatcctgtttgacaattttacatgggataaaggaatatctactttcctctggattgttcttcaaaggtttttagggtttaaaggtttacgtgctttcagtggaagtgatcctggtttcgattagcttctgaaaatctcaattgttttgactttttttttatttaaaaagaagaagaaaaaagcaggcatatgcttgagtttgaatgaaatggaaggatcgcagggaagttgtaatgggccgccgccttttcttacaaagacatacgagatggtggatgatccagtgactgactcgttggtgtcttggagtgaaactggttacagtttcgttgtatggaaccccccagatttctcaagagatttgctccctagatatttcaagcacaataacttctcaagctttgtccgtcagctcaacacctatgggttcagaaagatagatcctgatca

SEQ ID NO: 49232 - DNA, 621 bp, Gossypium hirsutum
  Clone ID: LIB3825-021-Q1-K6-B6
gtttattgtgaattatcaggaattggctggtttaagcgttgccacatcgattaatgaggtttataaaccgagtgagtataaccgtgttcttgctatttgtggtccgggaaacaatggaggtgatggtctggttgctgctcgtcatttgtatcactttgggtataagccatttgtgtgttatcctaagcgaactcagaaaccgctttattctggtcttgtcacgcaggtatgatactagctagagctgtaagtgtaatgttattgaacattgaacaataaacaatatggtttatctgagttgttattcaatctattggtaccatagctggaatctctgtcaatccctttcctttcagttgatgagttacctatggacttgtcaaaggactttgacattctagtggatgctatgttcggcttttcatttcatggtgcaccaaggccaccttttgatgatctgattaagaagcttattaacttacattattatgaacaagcacaacgaaagccccctgttattgtgtctgtagatattccatctggatggcatgttgaagagggtgatgttggtggtgatggaattaaacctgacatgttggtttctttgactgctccaaaact

SEQ ID NO: 49233 - DNA, 339 bp, Gossypium hirsutum
  Clone ID: LIB3825-021-Q1-K6-D3
cactcgccctgtacatgaacatcaagcgcggtgggtgttgcgctcacccgcaccgttaccgttgcacttgccatagccctagctcctgctcctttctctcttttccctttcttcatcgccacctgctccgcctgtcccgctctagctctaaagctgcggctacgtttacggttcagagctatagctttactgcacctcaaccaacaagaacttgattatggtgaacgttcacgtacagggccatgatccacatagactggtcctctgactttgacgttcaagtccacaatattaaactcggactctagacccaaactgcaacaacacttcaccctatct

SEQ ID NO: 49234 - DNA, 619 bp, Gossypium hirsutum
  Clone ID: LIB3825-021-Q1-K6-D9
cggacgcgtgggattttccccaaaatttccccaaggcaagaaccctaaaccttccccaaatctgctgcgctccaggacccgaaccttccccaaatctgctgctttgaaaataaccgtcccttctgccgttgatcgtctaccatcgcattcgtcgaccgtcgcagtcctctaccatcgcactcctctgccgtcgaagaaatcgaattaacactgcatttgccaaactgttaaagatatttgaaacggaaaaattgtggattaaccatttgttactgccttattgatcagctcgtatttagataaaatgcctagaagaaaagtgcgatcgcaccgcattgttcaaggtacttcaaactcggcggaaacaaatagcactgaacaatagactgctattggttcttcgaatgttccggttacacctgaggaacctatagaagttcaaaatgaaactgatgggacgcggagaggtcgcggacgtacggtactgagcgatttatacgacctagatccagtcgagcgtgtccaagtatccagtaatagctttggtcagcctgttggatcagaagctcgccttttagcaagatacatgggcattctagcacggaatgcaaaatatgtg

SEQ ID NO: 49235 - DNA, 535 bp, Gossypium hirsutum
  Clone ID: LIB3825-021-Q1-K6-E1
ccacgcccgtccgaaaaaaaaaaaaaaaaaaaaaaaaaaaaaaaaaaaaaaaaaaaaaaaaaaaaaaaaaaaaaaaaaaaaaaaaaaaaaaaaaaaaaaaaaaaaaaaaaaaaaaaaaaaaaaaaaaaaagggaaaaaaaataaaggggggcccatttttaaggaacccaggcttccccccccgggcattcccctttcttgcccccttattttgggccccctgaaccccttttttttggccccggttttaaaaaaaactgtgggggaacccccttgagtccccccggggaaaacccctttttccccacccccttttcccccgagggggcctcccccgttggccccctccaaatggcccttaaaaaccagggcaaatgggacttcccctgggggccccctttgacccgcccctttaaccccccccgctcttggggttccccccagtggcccggttccttttcccagccccttacccccccttcttttactttttttccccccttttgggcctccttcggggggtttttcttggggg

SEQ ID NO: 49236 - DNA, 614 bp, Gossypium hirsutum
  Clone ID: LIB3825-021-Q1-K6-F1
gcgtaaaaggtcggaatgttgctcctttctgtaatctctgctgctgtttttgtttgggtcgtgtatgttggcaaaggtgaataccaggatagtgacaatgttcgtaaggtgaacgatagcttaccgattaataattccggatttcccctgatatatgaagtgcaaagtgtcaaaatagacaattggacatctttagttgccagtgacagtgttgaaggaactgaagttagaaaaatgcctcctcctcctccttcatattttctcggctacactcttcctccggggcatccatgctacactttcagtttaccccctccaccagcagacaaaaaaagaacaggaccacgtccttgtcctgtatgttaccttcctgtggaagaagctattgctttgatgcctaaagtcccatcattttctccgattcttaagaatttaacatatatttatgaggaaaacttaaataaagacaaggaatttggaggttcagactttggtggatatcctactttgaagcaacgggatgattcatatgacataagagagttgatgaatgtgcgttgtggatttgtcaaaggaagcaaacctggccgtgggtcagggttcgacatcaatga

SEQ ID NO: 49237 - DNA, 581 bp, Gossypium hirsutum
  Clone ID: LIB3825-021-Q1-K6-F11
caccacgcgtccgcaataaatacaacacatagcagaaaaaattctcgcaataaatcgcatgcaatcaatgctgatgacaaggattaagctgactatatacttagtcataacattatccacaaccaaacccagatccaaaaactaacagtaaaaaaaaacagttttgcagctagagattacttgacagctaacgagtttcaaactgctattgctaatactatcgtaaacaaaaacataaaattgaagcttcaacaaaatcaaaaatcaacccatttttccaaaaccctaagactgatcacaagcatgtaaacataaacttaaaaagaaattcctctcgttttagaacagatatataatcagctaagcgaaacaccaagtacaaaatatattccttgacccatttcaagaaaaaaaaagagagagaaaatgaccatcaaacagaacagcgaacgaaaaagagagggatagagcaaggaatgaaacaaggaaagagactttaacccttagataaacccccaaaaaatcaattaaaataaaaagttaaaacaaatgaggaaactcgagagagattgcgatgttac

SEQ ID NO: 49238 - DNA, 619 bp, Gossypium hirsutum
  unsure (1)..(619): unsure at all n locations
  Clone ID: LIB3825-021-Q1-K6-F9
cggacgcgtgggtgagaagcaatcgacaccagcatgtccagaacctagatccttactaccatgaggagcgaagcagcattcaaagtgagcaagagaaagctcgtaaagagaaggagctggcgaagaagcattttaagcccaggatgattgtccatccacgcttccaaaatattactgctgatgaagctgtggagtatttatgcgacaaggagcctggagaaagtatagtccgtcccagttctcgtggaccttcttatctgactttaactctcaaagtctatgatggggtttacgcccataaagaaatagttgaaggtggtaaagagcacaaggacatcaccagcctgcttcgcattgggaagacattgaaaattggggaagacactttcgaggatttggatgaggtaatggatcgatatgttgatccccttgtgtctcatctgaaggcaatgctgagttatcgtaaattcaggaagggaactaaatcagaggttgataagcttctaacaatcgagagacaagagtatcctatgaggattgtctatttggtntgggcatttctcatgaacatccnagcactttcatttctacttatatacgaagtacgaatccgctcatg

SEQ ID NO: 49239 - DNA, 622 bp, Gossypium hirsutum
  Clone ID: LIB3825-021-Q1-K6-G4
tttcatctgacggagatttgattgtaactggatccgcagacaagaatttgaggatttggggcttggattttggtgattgccacaaatccatctttgctcatgctgacagtgttatggcagttcagtttgtccgcaacacacattacatttttagtgtggggaaagatcgccttgtaaagtactgggatgccggtaaatttgagttgcttttaactcttgaagggcatcatgcagatgtttggtgccttgcagtcagcaaccgtggtgactttgttgttacaggatctcatgatcggtccattcgccgttgggatcgtactgaggagcctttttttattgaggaagaaaaagagaaaagattggaggaaattttcgaggctgacattgacaatacatttgaagacaaacatataccaaaggaagaacttccagaggagggagctgttgcattagcagggaagagaactttggaaaccctgacagccactgattcaattattgatgcactagatgtggcagaagtggagttgaaacgaatagctgaacatgaggatgagaaagccagaggaaaagttgctgaattccagccaaatatgattatgcttgggttgtccccatctga

SEQ ID NO: 49240 - DNA, 493 bp, Gossypium hirsutum
  unsure (1)..(493): unsure at all n locations
  Clone ID: LIB3825-021-Q1-K6-H1
cggaagcgtgggcgngagcgtgggcagtatcactaatgaacttgaaaatggaacttcagggtgtctcaagtataaataagctgaactctgaggacaccgagtctaaagaacaatctcttcctgatgtagaagagcaaagtgccgaggacccatcaagactcatgatgtctcgtaaaaagagggggctttataaggccattgagatgggcaagcaacagaagaaggagcgtgttgaaaaactcaaggagcggaagaggaatattgaagcagctcagaaatctgagaagaaacataaaaaagctcaagtttcttgaggtttttatttttatgtttttggtaatattgttttatgacaaagctagtcaaggttgatagtgattgtaagtttagagttgcgccaattattggtgtaaatggctaaaattttgtctagttatggtttaaagttattgagatttggaatgataaaaaaacaaaaactgggttcatcata

SEQ ID NO: 49241 - DNA, 628 bp, Gossypium hirsutum
  unsure (1)..(628): unsure at all n locations
  Clone ID: LIB3825-021-Q1-K6-H6
cccagcgtccgctaaaatttgggtattttttgtttggtttttattttcgttcttgtttggtggttgaacaaggataaataatggctatacaagcgcagttgtattctgataatattgggttcccaatttgcggttctttggatttgatcgataatggttgtggacttgttggtgctgctgctggtttcaatcaacagatatcatcacagcttcaacaactgcaacagtttcaacaccttcaaaaccagcaccaaagggaccaaaccttttcctttggtagcactaacaacaatcgtgaatcaatcatgtttgagaagcaaagatacgagattgatcagtttatcaaatcacagaatgagaggctgaggttgttactgcaagagcaaaggaaacaacagtatgaagtattggtgaagaagatagaatcaaaggcctcttttttgcttagacaaaaagatgaagagattgttaaagcgaggaacaaaacaatggaacttcagaatatgttgaagaaattggagatggagaatcaagcatggcaaagggtggcgcaagagaatgaagccatggnttgtgtctntaaacaacaggcttgaacaagtacgggaggaacaagcttctttgtcgt

SEQ ID NO: 49242 - DNA, 629 bp, Gossypium hirsutum
  Clone ID: LIB3825-022-Q1-K6-A3
cagctatcaggttttgcacacccatttgttttgctttgctttgctttgaaagagttgaaataactattatgaatccaacaatgacaagattggcagaggaagagcaccccaacaaggcttttggatgggcagccagagacagttccggtgtcttgtctcccttcaaattttccagaagggcaacaggagaaaaggatgtggctttcaaggtgctttactatgggatatgccattccgatcttcatatggccaagaatgaatggggcatttctgtctaccctctagtccctgggcatgagattgttggtgaagtgacagaggtgggaagtaaggtccaaaagttcaaagttggagaccgagttggagttggatgcgtggtaggatcatgccattcctgcgatacctgtagcaacaatcttgagaattactgccccaaatctatacttacgtatggggccgagtaccacgatggaagtattacatacggaggctactccgacactatggttgctgatgaacattttatcgtccgcatccctgacaacctgcctcttgatgccgctgctcctctgctttgctctgggattacagtgtatagtccattgagatattatggactcgataagcct

SEQ ID NO: 49243 - DNA, 623 bp, Gossypium hirsutum
  unsure (1)..(623): unsure at all n locations
  Clone ID: LIB3825-022-Q1-K6-A6
ataatttcgacctccaanaaagctttgcttcctttcaaagccatcgatggcagctcaatctcttgccagaaccctaattctttcttcaaccctaacccctaatatcaacccaccatccttcaactgcctcaagtctatggacccgacggtgagcacaacaaccaccttagctccgccgcagagacgaaccatgtctgcgttcgaagctcgaatctcccttgtcttcgctctcgcttctcaagcttcctctgtctctcaacgacttttgatggacttggcctcagagactgcaaaatacgtgtttccgaagaggtttgagagccagaacttggaggaagcgctaatggcagtccctgatcttgagacggtgaggtttaaggttttgaataggacagacaagtatgagataagggaagtagagccttattttatagctgagacaacaatgccagggaagactggatttgattttaatggttcatccgagtctttcaatgtgttagctgagtacctgtttggtaagaatactagtaaggagaaaatggagatgactacccctgttattacaagtaggactagatctgatggggagaggatggaaatgacaacacctgtgataacga

SEQ ID NO: 49244 - DNA, 646 bp, Gossypium hirsutum
  Clone ID: LIB3825-022-Q1-K6-B10
ctctctgttcttgaatccaagttcctgcatcagaaagcttttcttctctctgaatcataaggatcaggtgtctgaaacattgtgtaaaaatccatggaagcaacgagagggacgagaaaccacagggttactagacaagatcctccctccacgcctggaagacgccggactcgaggattgcgctcttccgccagattccatacacgaggcctttctcaaagccgcttccgccatcaagtcacgagcagccaacatcttccactctgatgatgaagatgaagttgaacgcggatgcttagatgacccatttcttgacaagagtaagtgctcctccgatgttcttgtttcgccaccgtgtcccgacatgtctgacgccgtagtggttggcggagggtcgccggatccaacctcggacgctgtggagggctgcgtaaaggaaaagggatgcggtaaagaggtagaggagggtaaggatatggtgattgtgggtggtgatggtggagaagccgcggatgggaagggttgtttagatgatgagctcaagggtatgaagattaagggtgaagagaaaaagaagaagaatcaaaatcaggaggacgatgatgagagggaaaaggaaaaaccaattctggttgagggttttgtg

SEQ ID NO: 49245 - DNA, 613 bp, Gossypium hirsutum
  Clone ID: LIB3825-022-Q1-K6-C2
ggctagccaaactcaaagccgaagagcggctgctactctccatgctagcggttcttcaaaatttgattttgaccctttctttttttttttttccaaaattttcttagggttttttcctattcggtttcaatttgggttttcccaaagttttcctttaaagggactattcaagctcttctaaataatcgaatacaatctctgtagttatcttatgtggacgagcctcatttttagtaccaactatgctctttagcctttagtcatacattgtttgctgctaggtttctgaacatgaggcaaggcgagggagaagcaatatccactgttgaacaggcaattgacttgatttcagtggttaaggagattcatgggcttaactcacaggagcttaataagttgctgagagactctgaaaattttaccattctctttgttactgaacaaggtttagatgtaaagattgacgtggaaaaacttgcaggatttcttcctttgcaccttattgcagtgcttgtgtcatctgatagagatgaagctctgctcagatatttattatgtggcatccggattttgcattccttgtgtgaattagcccctcgccatactaaacttg

SEQ ID NO: 49246 - DNA, 653 bp, Gossypium hirsutum
  unsure (1)..(653): unsure at all n locations
  Clone ID: LIB3825-022-Q1-K6-D10
ggggaacccanatcgggtcttgttctaatgcttattgcattgggtcttataattttggttaacatccatgaccttttggctcatctcgccggcatcgattatcgtttcactttgatgggtttcgatccccagcttgctctcgttgaattctctgttccactggttcaaatcttaggctcactgcttctctttctgggaattctcttcctcttcattcaggcggagaaagggtacgggttttttaaactggagaggcatgctttgggaatgcttattgctggaccggttttatgggttgctgggtcgattcataactcgtgtcaaatctatgagagagccgatgcacatgttcaaatcttgcaacagagtgtccacgtcccgtttttaattggcagtgtattgttcatggtgggagctattctcaacggccgcgagcaaactggagttattcgtcatggtttacaattactgggaaaaagatgggtgtggttagggatatgtgggagcgtaatgtttatgaataggggggttgacgaatgtggtaaaggtgttcaagatgcagcagatgaacgggattaggcttgagaaattgcgtggcggagcacaagacgggttggttgaaggcagggaagggcaggtgccgctcattattg

SEQ ID NO: 49247 - DNA, 595 bp, Gossypium hirsutum
  Clone ID: LIB3825-022-Q1-K6-D3
ttttttttttttttttttttttttttttttttttttttttttttaaaaacttccaacttgttgttttccaaccaacttgcattttgaaaacttttccctacctaacatatgggtccctttcaaaaaaaaaaaaaaaaaaaaaaaaaaaggggggggcccttttaggaggacccaagcataccaaccccggcatgcaaagtaagacctcttctataggggcaccaaaattcaaaacaggggccgggggaaaaaaacggggggaagggaaaaacccgggcgtaacccaaattaaccgcctggcaaaaaacccccttttgaaaagggggggaaaaaacaaaaaggcccccaccggccccccctcccaaaagttgggcacccaaaatggaaaaggggcccccccccggagcggcccaaaaaacccggggggggggggggttacccgcaaagggcccgaaaccccggccaaccccctagcgcccggtcctttcccttccttcccttcctttccccccccggacgccggtttcccccgttaagttttaaatggggggcccccttgggggggcccattgagggcttaaaggaaccttgaccc

SEQ ID NO: 49248 - DNA, 628 bp, Gossypium hirsutum
  Clone ID: LIB3825-022-Q1-K6-E1
gtttgattagatggagaagaggaaattctgagattggagctattaaggtgtagtggaagcatttttctttgtaaatttgtttatttaaaattctatttttgagcttggcttggaataagaaatacctcaaaaagttccttcaaattccaagccaagctcaaaaatagaaggatactttttgaggtatttcttattttggagctgaatttttggttttaatggataacattgaggataatgctagacacccttcaaatccatatggtgttggtcaccagcctggttaccgttcttcgaatcatcaaaagctttctgtaagtaataatccgtatgtgaggccgaccgggaatcaatatgttgttgatgatgaagatgaggaggaagaagaaaatgatgaagatttggaagaggaggaaaatcgtaaccgaaataatggtgttcggtatgtaggaaaagatatggatgatgttgatgatgatgacaatgacgagcttgatgatgatgaagatggggatgaggatgattatgatgaaaacggtgataaacagaaaggttatgatggaaagaacgatgatgttgacatggagaggcaccccaagaagaggaaattgaagagtttgttgtcgag

SEQ ID NO: 49249 - DNA, 467 bp, Gossypium hirsutum
  Clone ID: LIB3825-022-Q1-K6-E3
ctatacgaactagacgctgggatcagaaaaaaaagacgatgactcagcactgcataaccgaaatgggttatataggaagatacgaccagattactagcagataatatattagacaacatactatgcctaagataaaatcaacagaagaaatataatcaggcagacctcatcatggaacaatcattcacaagatcatatcacaccctcagcttctaaacataaagactaagatcttttaattgtgatgtgaatgacattattataactaaaacatgtgacaaatcagatcttatattacaaggccatcatatctagaatgactacaggattgcttgataccacatctcagatgaatagggaggatcctgctcaaggcggactgtcttaacaactgatcctaactcacataatggtactcattgatgacaacagattagtatgacgcatcctcaagttcatgtcgatga

SEQ ID NO: 49250 - DNA, 546 bp, Gossypium hirsutum
  unsure (1)..(546): unsure at all n locations
  Clone ID: LIB3825-022-Q1-K6-E5
ccgagcttctgcagacagcaagaacgacgacgttttccccagtcctactggaaattcacatcgttctatccaaagagaggcagctctaacgaagttccgcttgaagcggaaagatagatgctttgagaaaaagtccgttacgagagccgaaagaaactcgctgaacagcgtccaagggttaaaggtcagtttgttcgtcaaccacaagctgatctgtcccattacggcaattcatccgatgggtagctaagagttttttaaaccgaggagatgccattgtacatatctatagcttggtaagtatactatttggttatctaaaagaggttgctatatatacttattgtaacataatattttgagcttgttttcgcattaggggattgattgcctttggtcattctttattggtttacctggtagatttgtaactagaaagatttacttagggcttttaactcggttttatacattcatcttaaagaggtaataggtaacgtagaaatccgagtttaaatctcanaaaaaaaaaaaaaaaaaaaaaaa

SEQ ID NO: 49251 - DNA, 602 bp, Gossypium hirsutum
  Clone ID: LIB3825-022-Q1-K6-F1
cacctaatccttttgatctactctttcctgggttttccttcttttttgctttaatgttccatctttgatttgattcccccgatatgggttttcgatttcatttcagaaatttgggatataatgattcaagcattgaggtcttggcagaaaactgtgatgatcatgatgatggctgtaacgacagttgtgcttcactatcctgtttccaggatgatggttctatcgctcatcatcattcagcgttgcgcaccaagtatttgataataattttcacagtacttgcgttttcgttttttatcctctgtttgtacgtttactacgtcaggtattatcgacgccgacccgattttaggagaagaagatcaaatgaaacgactgaaacccgtgatgagtttctcgatgaagatcatggtccggtcgttgatcatcatgtatggtatatcaacaccgttggtttacaaccgtcgatcattgattccattgctgtttttaagtacgtgaaaggtgagggtcttgttgaaggaacggagtgctctgtttgtttaaacgagttcgaagaaggtcccataccaattgtcctatgtgccgagcacctattgttt

SEQ ID NO: 49252 - DNA, 186 bp, Gossypium hirsutum
  Clone ID: LIB3825-022-Q1-K6-F12
ttctttttatttttatttttctgggaattctttcttggatattttaatgaaagaaaggggagaggttgcgattgatagagaatgtgattttatgcattaacagtgcgtatgacattggagcgctggttgaggctagggcgtcattgctcccgacatgctgtgccggggctccaaacttcttgttct

SEQ ID NO: 49253 - DNA, 626 bp, Gossypium hirsutum
  unsure (1)..(626): unsure at all n locations
  Clone ID: LIB3825-022-Q1-K6-G5
cggccgcgtgggctgngataccatctcagttgcagctggggttgctttcaccactttacttaaggaaactgtttgagcgtatgggtgcaacttatatcaaattaggtcagttcatagcatccgcaccaacactcttcccaccagagtatgttgaggaatttcaaaaatgctttgacagagctcctgcagttccttttgaagatattcaagcaatcttgcgtgaagaattagggagaccaattgatagcatatatgaatatattgatccaacaccaattgcctcagcttctatagcacaggtacatggtgcaaggcttaaaggctcccaagatgatgtagttataaaggtattgaaacctggaatcaaggacattttggtggcagacctcaacttcatatatatagcagctcgaaattggagttcctaaatcctgatttcagtcgtgcttcactggttggtattgttaaagatatacgggaatccatgcttgaagaagttgatttcaataaggaggctacaaatattgaatccttcaggagatatcttgaagtcatgggattaacaaggcaggcaacagcgccgagagtgtataactattgcagcacgcggcgagttttgactatgg

SEQ ID NO: 49254 - DNA, 596 bp, Gossypium hirsutum
  Clone ID: LIB3825-022-Q1-K6-G9
cacaatgactcaaccaccacatttccacatgccttttaattacctttttcccttttttgcagaagtaaaataggcgagtggggggagtgactagagtagtcacaaactttagtatggttagcgacattagtattgtttacatcctgaaaatgataaatttattgttttcgttctactgcttgggttctttcctcgctttccttagtttacctaattagaatggtcttacttttccaccttcttttaaccattctaaggatgcatttattgtacttatggcatgtagaaataaattatttttaacttctgtttgggtgagtattcatactctcccttgcagtgcggcaatcatgctgtgtttctatatatgctattataaagaatcaatatgaagctgttaattactgagcgattatgttgcaagatcactcattcagcaccaggtatacattaagatctaattctggagatgtaatactatatgcagggtgctctaagggaatgtcttggcctatacatgagatcacaatcttgtaaatattatgaatggtactgtacagtatctaacagaggctgaaaggtcatgctgcattatc

SEQ ID NO: 49255 - DNA, 570 bp, Gossypium hirsutum
  Clone ID: LIB3828-003-Q1-N6-A7
agttgggatgaaaaagaagaaaacatggcatttaagatgttcactattttttatgtctatcaaatgtgtcgtgtcataaatttatattcaaaattgtcaaatctataaaaaaaaatcagaaataagtatgaccagtttaaaagtaatttaaaagaaaacttccgtggaaattttttaaaagaagacaccacctgcttgtaaaaacaaaaaattacttacgcttaattacagggtgtcatagagccaaagccatatttgtcagcatccctccatagcgcagtgcagtgggctttctggttggcttggctatcaactgataaaacctttctctcaacacaataactccaccttctatgtagtatcgtgagtaaaatattgggaaaattatttgcaatagaataccaactgcattattgtcgaggctagttggaatgcaataaaaagcatttattgtggccataaccataactcaaccagacaaggttgctagcagcttttattgtcatgtgtggatccaaccatgatccacaagttgtttacaacatggtagtatccactggatagctccct

SEQ ID NO: 49256 - DNA, 382 bp, Gossypium hirsutum
  Clone ID: LIB3828-003-Q1-N6-B12
aaaaacccgatacttgattcgggtaatagttaaaacactaaaaacctaaggggaaaacaaaaaatttacaatccaaatggggttcaaaaaaaaaatattcaaaaccgcaaggggacgattcggatcgggacatggtctcatggtccatggggggtcccagcaaagaaccgggaccaattaaaaaaacatcaactcccacagggggggcaaaattatcacaatcccctgggggacacccacaaccagaacaactttggttcaagaaaggcaaaaacatttccgcattacattcgttatggggatcgaccggtgagccccagttttgaaggtaaccaagcacataccttttccatttcctgtgggaggggaaagggaccaaccc

SEQ ID NO: 49257 - DNA, 552 bp, Gossypium hirsutum
  Clone ID: LIB3828-003-Q1-N6-C9
ggaattcaacaaatgaatattatatataagcaaagtgggatctaattaacctgacatgaaacaatacatacatacacatatatatatatataataaataaggcaaaaaaagaaatgaaaagttaaaatttcatggcgtcaacgtcactacaggtttcgttgcgttaggtggcgtcaaatattaggggaagttgtgggcatggaactaaagatccgacatcttcccccgagtatttttgtggcatgttttgaagaagtaatgcagatgatgatttgttgtgtcatctatctatgtgaattgatgcacgcctggatttcttccaatgttttccctttagtttctgggacaaacttcactacgaataggattgttattatagagactcccgagtagatataaaatgtgccataggaactccaggtcatcatgaagttgaatgtgtaagaaactgcccaagcacctaaccagttcactaggaccaccaagctgcctgctactccttttacatttattgggaaaatctcagacattatcacccaaggagctgctccc

SEQ ID NO: 49258 - DNA, 558 bp, Gossypium hirsutum
  Clone ID: LIB3828-003-Q1-N6-D10
agagggattgattggacatatttaattaggctcaaaaaattacaagcaagttccatcttttcgcctattaattataaactcatttagttatagttgcaaatgcccaaatttgcctggagcccaacaaccaaaaaaacaaatattaaacaatccacttacatcagcctaaataaaaactaaacaggcccaaaactaaaaaccctagcccaaaaacttaaaaatttttcagaaacctaaccctaacacccccatgtgcgtcggtcctccttcggttaccccgcctgcgcctcgcccgaggcctggcattctagattgccaccacctgctccctattcgttgaccatgcctagccctgagtcatcgccgatgagaacccgaatacctcaaaaacgtgaaggttcgggcgagggatcgaacggtgttgaaacctcatttgttttttacgaatctcgctctttatttcttaaaataaacgtagtattcgaagttttttttaaataaaagaagggttggaaaggggtcaaaaagactcgattttggcacttccggccaccacca

SEQ ID NO: 49259 - DNA, 430 bp, Gossypium hirsutum
  Clone ID: LIB3828-003-Q1-N6-E11
cgggttcttaaaaggcataaagatgtctgtaagagagcatttttgaactaataagtgaaggccttaactttggggacctgacccccatggcaaacgattagggaaaaacgggggaccaaggcttaattcttaagaaacagacgcttgctttttagcccctgaaccccaaaaaaaatttcaataagcgcccaatgggtacttgcccccaaatggtggggggagaatagaaaactgttgattaaacccggcagagtaaggttgaggcttttcctacgaccgctggggcaaccccgacaattccggcccggtaacgcctggcggaccatattttccgtttttggggtgttgataacccaggcggaattgtggccacaggttcccaccaggtgaaaaagatggagcattgcaattcacaggaacagaataggcc

SEQ ID NO: 49260 - DNA, 415 bp, Gossypium hirsutum
  Clone ID: LIB3828-003-Q1-N6-E8
cggaacacagtctgtgaatttacataatttagacaaaccctacaagaaggatcgatgcgttttccaaatcacctcagtgggaagacaaataccttcttttccgtttacttggaaacggaaacacagatccaatttcccatcattttttcgagagcatattgcaaaagcttgccagtcacaaatgaccggccttataacatcttggattccccgtatgttccaccttaacaacaacatgcctattttcacctactctagtcctgttggatgaacctcaccacacattcgaccctatttaaggcatatcctcttggttcttgcaggcattactcaaatctgggccttaaccttagtcccatttatgaacaactgaaacggacgaaactcacctcccatgcgtgactctaaatttggg

SEQ ID NO: 49261 - DNA, 575 bp, Gossypium hirsutum
  Clone ID: LIB3828-003-Q1-N6-F8
atcccaatgatagcttgtaaaaatataattcctcttcattttgaaaaagtatccataaaatcttgaaacttcaattaataatatatcaaattccgggttttagggatgtatattccaaccactatgaagaaaatattaattgcgtttcaagaataacacatcacggttgaaaaaacacaggaaaataaacgatgtattagaatgtcagctgaacaacaggatcttgatgaaccccatgtccacgaatcaccaatgaatatgaatgatttatcacctaccaacatttccaacaagctgactgctatatgacttataccagtatgctgaagaagttaaacaagaagaatactaacccttctaagcggtcgcactcgcactagtcaattctttggcagcagttgctaataccattttctgtggcgcggccaactcttcttcatgtttgggaatgaaagcagtgtcaacctttccatttctgaagtcctcaatatcaaggatgagtttatgggattcaatagttggaaggaacccctgtaattaccagtgtcatcaagaaccccttttcatgccctcaa

SEQ ID NO: 49262 - DNA, 517 bp, Gossypium hirsutum
  Clone ID: LIB3828-003-Q1-N6-H9
cagaccaaatagccatttaattcttttcaaaaataataaattttaatatttttaagaaggaagtattttatttttatttttatttgggggagaaaataaaaacttaaaaggttccaaaaacaacgatggggggatggtatcactcataagctggtctttatcaataaaaccgggagaccactccaggaggacagcaaacacttgcatatgggctttttaaatcaacgcttgcttagctagacaatccgcaacttgattttgttcccttaggataaatcttaaagtccactgagtttcttgagataaaagggtatgaatatgcctgattagagcagagttagaagatgtagatgaacttccaagaagggctttaacaacttccagacaatcagaaagaatgataacttgatcatgtcctcgtctttgaacaagtttgagtccatctaaaatgtcccaaaggtccgcatcaaaaactgagcatttaccgagaaattcttcaggggggcgggtttcaaaa

SEQ ID NO: 49263 - DNA, 253 bp, Gossypium hirsutum
  Clone ID: LIB3828-004-Q1-N6-C10
ggacgaaaaaaattcctgctttcattcccagcttggggcatgagtcgggggcaagggacccaaaacataaaccaggggtcccggaaagggccaaaccctttaaatcaagaacctaatagttctctccatgactagttctggaaaagagtatgattttgggagaaaccccaacttagtcgggatgaagcccgtaatgcccaccgtagaaagaataaaccccgccaatagaacatttgaaaggcttcaatttgcc

SEQ ID NO: 49264 - DNA, 489 bp, Gossypium hirsutum
  unsure (1)..(489): unsure at all n locations
  Clone ID: LIB3828-004-Q1-N6-C7
aaaaaaaaaccaaaacccttgggtttttttttttttatttcttaaaaaaaaaaacacaacaaataaaaccgggttaaaacaatttttaagggggaaaatggccccggattctccaaacccctttaggaaaaaacgggaaggcccggccaaaaaaaaaaatgggaaaggggggggggggggcaaaaaggggagaagcaaggggcggggttcctgaaaacggggtttcgaacccagaaaaagcaaaggcccggggctccccaagggtttttgggaaaggcaaaaatcctttagggaaaaaaaaaatttcccccttttggaaaggcctggaaaaaaaaacatgggggggggggaaaaaaccaacccttaattttccttccaaaaaaaaagcaaactttaaagccccnggatggggggggggaggggtgaccccaccaacgggatagtcgaaaccaaacagggaaccccaggggggtcaaaccggggaatttt

SEQ ID NO: 49265 - DNA, 566 bp, Gossypium hirsutum
  unsure (1)..(566): unsure at all n locations
  Clone ID: LIB3828-004-Q1-N6-D10
atctaaatcgtggattctatttccatctagttttgcacatcaaaanacaggtgttacagttgtttacattccaaatatacaagccaagtgttaaatggcattgagattcatcatactccaaagatatcagcagattgagctacaaaatcatctagcagatgggactaggctgccatttgacaaatcagggctctcaatttcaagaaagctagcaagcaaagttttcctggaagattgtcccctggaactaccacaagctaactttgcattgccctcatcccctttctctatcttcattgcatcttgtatagccaaaatgatttcctgcatcttgggccgggagtatccatgctgttcgacacattgaatagccacttctgcaatcctccagattgactctattttcacatttcctaccagaaatggatctacaatgcttattacatcgcctttgcgtattaaggatcttgcccagtgaacaatgttcagttcaggaccaaaatcttctactgataccggtttctttccagagataagttccagaagaacaaccccgaaactataaa

SEQ ID NO: 49266 - DNA, 574 bp, Gossypium hirsutum
  Clone ID: LIB3828-005-Q1-N6-A11
gaataattgtaactacccattaatagaagactgttctttgttctcgacctcgacttcctcagttacataatgtcaaacaaatctgaaaacaagctgaaatgtacaatggacaagaagacaaaacgaccccgcattagcccgtttctcactgtctgttacctaacaaagcttcacgtgaatccccgacagtctcagatgactaccaaaaaaattagtaagaggcagcaaccggcaaaaaccacattgtcacccaccgccgctacccaaatagtaaacccaaaatgatagggggcagaaccgggaacgtaaaagacgcccacgacggtggtgactttggtgaggacgactgagccttctcgaactgaagagaatcaactgctaagggcatgttctcttgatcagggctgcacttagactcgtgagggtgcgcactgtacattatggccctcagcacggctgaaacggtaggtatgtaggccgttttgttgcgtgcaagaagccatgtcagccccatgagctggcagtctcggttgaacatcttgctggctctgtcggtggggctcttgtcttgcgt

SEQ ID NO: 49267 - DNA, 328 bp, Gossypium hirsutum
  Clone ID: LIB3828-005-Q1-N6-B10
aaaaaaaaaaaaaaaaaactaatgggtttaaaagggcccgacggtttcgggtaaaaaaaagagggccctcacaccaggaggggggtatcaagagggctgggaaagaaaagcaaacaggcgagggcccgcttaaaaaattttaatttaaaaaaaaactcggccacaaaagagcggggttggggtacggggacaacagcgaattgttggcaaaaaaaaaaaacaagaaagggggggcgcttttggtgcaccgttactgccaaaaaagggaaaaacagccccccccccaaaggggggctctttaaaaaacaccgcctttgaggtaaaggcc

SEQ ID NO: 49268 - DNA, 564 bp, Gossypium hirsutum
  unsure (1)..(564): unsure at all n locations
  Clone ID: LIB3828-005-Q1-N6-B9
gtgaatataatatacatatatatataacatatagatatgtccgtgtgtgtgtgtgtttgcagattacaagaaaaatgcacatgcaatgtgccggtcgaacttggctgataaagttttaaataggagccgaactaatggccaatctttattaaatattgcgttctaacagtgacgactagcattagttttgaacttctggaaaactgcgattaaccactgaaaagcctccatcaactgccaagttttggccactgatgtaaacggattcatcagaagcaagaaacaatacagcctccgaaatgtgtctagccttcaacacaatacctttcaagttgctcctagaacaagtattggcctctacttcactaggttccatatcgaaaattttacaagcaagaggcgtggccactccaaatggagaaacgcaattcactctgatcccgtaaccccctagctcactacatgctcctcgaacaagtcctacaacagcatgtttcgatgtcgtataaccaatcgttgcaattnctcctatacaagatgctacactcgcagtgcatatgatgg

SEQ ID NO: 49269 - DNA, 584 bp, Gossypium hirsutum
  Clone ID: LIB3828-005-Q1-N6-C7
gctgttaaatcccacacttaagcagattgatacatgtaaaaagaaaagcttttgtgattagttgtgcccaaagcacacagaatagtctaaaacagtaccaccataaaaggagacaaattgccaccatcccattgatttgctaaatctcacgataagtagtgttgctgtatcctggctcgattttcatcccaccacatccttgcctgcatttctccaaacctttctcggctgcaatgcatcagtcatacatatcaagaagcaaaaattgatttctttttattactattaacacttgaatcaaatattaagctctcttctactgtttgcaaatggagccgtcgagaagcggaaaaattggactcctggctcttcaaaaggaaaacaaactcatagcgggataagcagggtcagggaggtgaggggatcagcatccaactcatactagcaataatatggactaggtttttggatcatatgcactacacaagttggttgcactcccagagtaaccaaactaatctatctaatcgtttgctcctgtcagcattgttccatttcttcactcaaagcaaggaaggttgggg

SEQ ID NO: 49270 - DNA, 274 bp, Gossypium hirsutum
  Clone ID: LIB3828-005-Q1-N6-C8
agagcgctatattaccgtagaaaccaatactctttatttggtcatgccgtcgcccatgcaccggataagctgacttaaaaaaaagaaaatgggaaggtacaccccagctgagccgaagcgcgcatttgtacaggcacagaacactgggacggacaaagcctttctgagaagggtgcctgcgcaattgggggacctgaaaagaaagctttttaacgggaaaaggcaggggggctaagggggcaaaaatacctagccgcccgcttggattatggcc

SEQ ID NO: 49271 - DNA, 589 bp, Gossypium hirsutum
  Clone ID: LIB3828-005-Q1-N6-C9
aaatgaagaaatttcgaaagatatatattagcaaattaatatttgaatatacaaatgcctagcaataaaacaaaacaaaataaaaagataccatctaaattgtgagatatgtacttatcatagttgttgcagttggatccttgagcaagtgcctaataagcaacattttcatatccattggtgctgtaacgaacatagaaaaggcaaatacgacgagatcgatcgaagaaagagtcgaaccgagaaacccttgccacatccaacttggcaaacggaagaatatgcggaagaatgttcgactgccttcggtatccagctgcaataggagtgctaaccctaagagaaagaatgacctttgccgtttcctttcttgtggccaaagagtattccaagcttcaattgacatattccaattatttcttttaaaagtaagaaagcctttcgaataatctctcttgaggattttctcaatcacggaagcgtaattcggagcctcagataatgatctggcaattgaataaccagtagcaggatgcaccatgcttgcggcagcaccgaatgcaaggttcttctgtttcatgttcggcaa

SEQ ID NO: 49272 - DNA, 416 bp, Gossypium hirsutum
  Clone ID: LIB3828-005-Q1-N6-D12
caaaaattattaattaatgaaaaaaggggggtccaattcaaacaaacataaataataaagtaaacataaaaaaaattaaactattaatttcgacatcctaaccttatcctccataaaaaaaaagcatcccaagggcttacaatgcatcttgggaggcatcaatttgagtgttgatgctcttatcttgaataaccactttatgttccttccctgcaaatgccgaggcatttatttggttgttgttgttgatgatgatcttatttggcatttcttttggattttcctcttcaggggtggcactttccaagggattaatttggttgttgttgtggtcgaagccaatgaggttattttgcatctaattgggggtgtcaaccttccttgtgccttgggcatcaaattgttccccttggcta

SEQ ID NO: 49273 - DNA, 576 bp, Gossypium hirsutum
  Clone ID: LIB3828-005-Q1-N6-G7
gaaatcgcaataactttatttaaagatttaaaaatataaagaagaccgtctctaaatactgcatttactccatctaatgaatgcaaaatttcaatgaaattggtttcttcctaaggaaacaaaaatgaactcttttcttaagcccccaaaggcccaaccaataacagaaatcaccaacatcattcattgcttggctagagcgcaaaagatgaacatggaaccaagcaagacagtttttcttcatcatggcctgcaccacccaatttagttgctcaaaaatccccgtttggttcatttcaatacaacaacagatgcatgatgtgtggtgatagatatatcagatcatttttactcctcagcaatgtcttcagctttccagaccacatctttcaatcccgatgaaaattgtttgtagaacttgtgaaactccaatgtgtcacccccggttttccggagctctatcatatgtaagcagggagccacctcaaacacctcggtggccactgaaagttggccctttctcccacttttgtcacctttcaacttcatcttgtagttttgcttgtgaacgttaaa

SEQ ID NO: 49274 - DNA, 420 bp, Gossypium hirsutum
  Clone ID: LIB3828-005-Q1-N6-H12
attataaatctatcatcattatatatatgagcttgcgcacttatctagaacagatcaaataaaagaaagaatttcataaaacagctagatgtgggaattattggggcatgtatatgaatgtgatacaatgtgctttgctttgtccaattctgagccacttgtttgaatcccagctgtgatttccattttctgctcaataatggagtcatatatcccttcaacacaccctgatgtcccataacacgaaagattgaagccccattttgggtcacaatcttatgggattgatggggatgtcattcaatcttccaggcataaaggaacaagcaaaattctgatgagccaccatggttaagcccttctaatgaaccactgctccctgtttgagatgacagtgatgatgatgatgatgataatggt

SEQ ID NO: 49275 - DNA, 469 bp, Gossypium hirsutum
  Clone ID: LIB3828-005-Q1-N6-H8
attgaaaaatgttgtttgttttttttattgatcatcatactcaataaaaaaaataatgggttagtgatccattttgttggatacaatttcaagtgcctgttttataatcacttaagctgtttgtatagaattgattgtttaaagccaatgatgaagcttaagtgaaggaaagttggaaaaaacaaaacgcctcttttatggatagaaaggagcaaaaactaccactgaagggggtccaccaaatccaaatgaattggggtagggaacacagagtccatgcgagttcttaacatgggggaccggatataattgaaactgcagggtcggagtgatcttattaaacggaaggatgcagtcaatcactccaaatggcttttacggctgctatgggctacaatcctcaaatagctccaagtacatgtccaagaattgactttgtccgatgcatcaaaaacaaaaagggttgttg

SEQ ID NO: 49276 - DNA, 476 bp, Gossypium hirsutum
  Clone ID: LIB3828-006-Q1-N6-A11
gggaaccaaagggggggttttgggggtattaaaacaggagcatggggggggggggacaacttggggggaacccagaaaaaacacccctttgggggggggggggttaatttagggggagggggcaccctggggggaaaagggggggcccggggggaaaaaaaaggggtttttgggggggaaaaaagcccccatgggtaaaccaaaaaggcctggggggggtttggccccacgttccatccttagggaacctttttaaccccattccggcccccagggggttttaaaaaaccaggactggggcccacccagggggggcccaaaccccagggggggtcccccggggggaagttttggcccaaatttcccgggggaacccccccggggggggaagggggaaaccaaacccccaaaaaaaaaagccactgaaaccggggggggtgcaaaactttaaagaaaagatcctccggggggggggg

SEQ ID NO: 49277 - DNA, 186 bp, Gossypium hirsutum
  Clone ID: LIB3828-006-Q1-N6-B9
actattaactaactgggtaaactcttgtataacaagacatggggagcatcaaatgttaaaaataaacaaaagtttggggaggtttagacgagggcaaagatagtcatgggaagagaaaagtgtcgtgccatgcaaatggtgggtgagggtcaagaaactcaggagggagggggtagagggatgcca

SEQ ID NO: 49278 - DNA, 374 bp, Gossypium hirsutum
  Clone ID: LIB3828-006-Q1-N6-D12
gttcttaaatatcgaatctttttttctttccctggatctcgtactgagtccatgaagaactcagttgctacacaatcctttcccaagcttgtttccgttttcgcctccttgttgcttctctttcacctcgttttagctgctgactatgtcccaaccgaaaaattctcttaaattgcggggaaaaatccgacctatccgataacgataatcggaaatggacaccggatgtcgggtccaagttcctcaccggaactgaaaaatccggcaccccccccccctgttagcggaaaaaaaaaaaggaagagcagggaagaaagtagagatgtagggaagagttacactaaggggcggcccggccccataggtccacccgg

SEQ ID NO: 49279 - DNA, 570 bp, Gossypium hirsutum
  Clone ID: LIB3828-006-Q1-N6-E11
atcaaataaggttaatagttcattttaaattataatacaattattctttccttcttggcctttaattagtgtatattaataaatggtaaaacttaaaaaaaaatataagaattaaagtctagcatttttttactccattaagtaatgaattgaatctttcaaataaagaacacaagttgtcacaaattggagtccaaccctgatcaacttcggaataattggatgttacaccacaaaaaagcagggttgtagcaatcagtttcgaagaaaaccccaaggccccgtaccagtgcctaccctcaaaagaccagcaaacacacgcaaattcataaagatagtcaaagcaatccagataccaatatagccagtgctggaggacagtatgaacaagcaaaagatgctcacaacagcaaccaaaaccatggagtaagctgaataggcaaaatctgaagctccatagttaactccatcgaaaacaaaggctaaagtattaataggttgagttactgcaatgaaaggaaagctgaggttcatgagttgcataacatccctgtcgttcgtaaatagttg

SEQ ID NO: 49280 - DNA, 447 bp, Gossypium hirsutum
  Clone ID: LIB3828-006-Q1-N6-F10
cagcaaaaataggccattattgctacaaatcgagggaggcctgaaaaatgacaatttttatggacccctaagaacaataagaataacaataataataattataaaggactcccccaaggatctttaatacataaattaaccatatatgcttaccctctaaaccgggttcttccaggaaagccatctttctcctatcaaccccaattaacaaacaaatcacaaggaataacgccccttacatcccatgcccctaaacaattagactgtaactagaaaacgcataaccaatactatgaaacaccggcgctgataatgcaccactacggctgatccaaccattaccagacccaaacccaaaagcctggatccgaaacccgagtccctttataaaaccagataaccaaacatgaactgcagccccaagttaccaacatgcccaacaaatgg

SEQ ID NO: 49281 - DNA, 579 bp, Gossypium hirsutum
  Clone ID: LIB3828-006-Q1-N6-G11
gaagatcaaaattgttgattcactaaaattatagtgtaaagaggaatcacagaccaactcttccttctatttttttattaattatgatttaaaaaagtaaaattatagattttcagcagataacaccataaacttctttctatggccatgatttttgcatttcaatgtcttcaatatcttaatccagcagtgaacggaacgccagtcaaaggcagccaattttctttgctatgaaggaatgcttcgacagtgaatttcatcgccgtagctttgtctatcttgtggtaacccttccaattaactcttgcatcgaggttagcaccagggccacgattattgtattctgcataatagagggtatcttcgtgattttgagtagcaaagggcatccatccttcacgcctaatgaagtctcctaacgtagactccatgataatagttgtagagtacggcttccatggcctgcccaagtatgtcgggaacttaaatctgtcgatgaagagcttttgctcagggacaatcctgcagttttggattacagtaccggtattctcatcaatccgggtcttaccctgtgca

SEQ ID NO: 49282 - DNA, 417 bp, Gossypium hirsutum
  Clone ID: LIB3828-006-Q1-N6-H10
gagcaatatatgcataggatagcagtttgattcccttaaacaagatgagaccctttgtagcattcaaagccgaaaagctacactgtcatataaaaatcaacaaaattttcgggtgagaagaccaatgattatatacatacagacatgcatgttggaaggccgttgctagaaacgggaagaaggtaaaccattaatgtgagaggaagtcagccaaaataccaactagaggggccttaatgattggggtggggctcaccgtgtgcaaaatctgctctaaaaaacagcgcacaaatccttaatatcaggtccttcaacaacagctccagataacaaattagggttaggagggccacattataaagaagcggctccggcggggcattcaataaggaggggatgaaaaataatggaaaggaa

SEQ ID NO: 49283 - DNA, 592 bp, Gossypium hirsutum
  unsure (1)..(592): unsure at all n locations
  Clone ID: LIB3828-007-Q1-K6-A5
ggcagcacaagnagctgatgaggccaagtcggttgttgaaatggctaatcaagagctaagcaaattaaaggaagaggctgagcaagcaaaggctggagcaggtaccttggagagtagattacttgcagttgaaaaggagatagcggcagttaaggcttcaaaggagtcagctttagttgctatcgaaacattgcaagacatcaataatgtggattcatcagatagtgtagttctttccttagaagagtactatgaccttagaaaacgtgcatatgaggtagaggaacaggccagcatgatcgcggcagctaccgtttctcaaatcgaggaagctaagcaatcccagtcaagaagcttggtaaagctggaagaagtaaatcgagagatggctgaaagaaagaaagcactagaaatagctttggagaaggctgagaaggccaaggaagggaagttaggtgtagaacaggaattgagacaatggagggctaaacatgagaagcgccgaaaggcttctggatcaagtcatggaggaaaccctccaaggtcaagttttgagggaaagagacaaagtaataaggttgaacctgtaacc

SEQ ID NO: 49284 - DNA, 593 bp, Gossypium hirsutum
  Clone ID: LIB3828-007-Q1-K6-A6
tcttgatgctttgctcaactctggtcgcaaagaagaatttttgccagtataaaagcctcactttacaattgtctgtcagagactaatcttcaattgacagtccctggtctcaaatccaaaaccagaggcaaggttagggacatttatgatagtggggattatcttgttttggtcactactgatcgtcagagtgcatttgataggattcttgcctctatccccttcaagggccaggttcttaatgagacgagtttgtggtggttcaatagaactcggcacatgattccgagtgcagttttgtcagtaccagataaaaatgttacaattgctaagaaatgttctgtttttcctgttgaatttgttgttagagggtttgtgaccggaagtactgaaacgtcactgtggacagtttacaaaaatggagttcgaaattactgtggaaatgtacttccgaatgggctggtaaaaaatcaaaagttaactgcaaatatactcacaccaacaactaaagctgaggatcatgatgttcctgtaactcctgacgagattattgaaagaggattgatgactcaagatgagtttgatgaagcaag

SEQ ID NO: 49285 - DNA, 617 bp, Gossypium hirsutum
  unsure (1)..(617): unsure at all n locations
  Clone ID: LIB3828-007-Q1-K6-A7
ctcatcaaagtttcaatcctttctccattttagatctactccatttgttttttcaattatacgtatataaatgtaattttgaataaaaaaaatccaagctttaagtagcatttaaatggtggggtggtattttccaaatatatantggaaaaagttagaatccgaggaatggtgtaggagagggggacaagcaaagcatagagttcttgagagtaatatggattccatttgaaccctacagtaagctgtattgtgaaaaaaaaaatcaaagaaaagaaaaaagagagggaaatggtggaagtgttggttccttttccagggatttaagagtgtttttttttttcctttttttcttttaataaaggggtgagaaaggggctgcctttttagcatatgccacttgggttttttaataaaagggcaagggagcgtcaataagagataagtgaaagcaaaaacaaaagtttaaaaaaaaatgcaggaaacaaggaagaagaatggtggcaatgaagattccaagaagaaggagcgtcatatagtgacatggacccaagaggaagatgatatccttcgtggacaaatcagtttacatggaaactgaaaactgggctatcatt

SEQ ID NO: 49286 - DNA, 592 bp, Gossypium hirsutum
  unsure (1)..(592): unsure at all n locations
  Clone ID: LIB3828-007-Q1-K6-C3
cttgggtttcgaccctgccttggggagccagattggagggtcatcggcgcttcagcgcctctgcctccgatgtcggttccagaaataaacccaagttcgtgatcgaacgtgccactgacgtggcatagtggagaggcgcacgacgcgaagggacgtgcaacgtgcggcgcctagaggcttgctgtttacaaacggcgcaaaaggggctactagggtttcccttgtcgaaatgttttgggtttgtgggccaattgggccgtatttgtaaataggtatttagggtttggggtaaggtcttattttttgggtttgagtctgtttttgttggattttagtttctagtagtttgggccggacaaattttggaccccacagctggtcttctttgctctttgtcgtgtaacgagaacagagcaaagacttcaaaagggccaaaattgcctggacctgtcgagtcctgatttcttttggccacttcaagtagctttgctttaacccactgcatctctagggttataggaactcgtcttcaatctgctccactactttttaggggagatttgtatcttctaaaanaaaaaaaanaanaaaa

SEQ ID NO: 49287 - DNA, 469 bp, Gossypium hirsutum
  Clone ID: LIB3828-007-Q1-K6-C4
tccactcttactaaccctcatactaacctaccatggacatgaccaggacttgtgcgccgtcttaggcgccgtcgtctctatgagcgcggttctggctgctggcgctgctgcaggtgcatctccagcttcatctccagctgcagctgcagctgcagctgcagcatctggtccaggctcagatcccagcctagaaatcagaacaatgcctgtaatagagcccgtggttgaagccacacttggagctccacttgcctactttttacactacgccacacagaaaaatggatgaaaccatggatgattgcataatctattgaagaatggtggatgaataggtggataaatactacttgaggtgctacctggggtgctgtccatcgttgaagacagcgttgaagactgcacttgtcagtacacttgtgagatctgttaggatatcaagtggtacttcgcgctctactttgcactc

SEQ ID NO: 49288 - DNA, 600 bp, Gossypium hirsutum
  Clone ID: LIB3828-007-Q1-K6-C6
atttctagagagagggagcaaagctgaactttatgctctttttctttctcaaatttcagctaactgtaaaaagtaataattataatactaatattccataatgtcttggctgttgaagtctctccaatccgaagttcctcgttcgcccacgtcttcaccagatcacagtcccaccaacctaaacggcggcgtcaaggacgatctttctctcatcggggaaacaataggccgccaactacgtggagtcgctgcgttcttagcaccgcctccttcgcagccttccgtcaccgcctccgagggaggactagaacaggaacaagtacaagagccgcagtcagataagctcctggggatccgcaacgatttggcggagatcggtggcagcttcaagagcgggctttcgttattatcaagtaacagagcggtgacggagatctctagattcgcttcgagtttattacagttcccggatcaagatgatcatggtggtcatgatgaggatgatgacgatgaagattacgatgacggagtgccgggaattaccgatgaggtgattaaatttgttgaagaaatttccaaccgaccagagctctggactga

SEQ ID NO: 49289 - DNA, 293 bp, Gossypium hirsutum
  unsure (1)..(293): unsure at all n locations
  Clone ID: LIB3828-007-Q1-K6-D5
gnaaaacttatagaggaggctctacgtcaaccgggttcatcgccgagagttcaaaatatgagctgacagctatggatacagctcttcaagagagatttttggcaacgtaaaagaatttgtattaaggtttgaattattttttattatttctacttaaaaatagtttaaagagtaaattaattattttattaaaaattctatctaattctactgttaaaatttggtttttgtacgttaaaatgttgtgcgtcaggtgtaattgcttaattattctattagtcatattaattttt

SEQ ID NO: 49290 - DNA, 256 bp, Gossypium hirsutum
  Clone ID: LIB3828-007-Q1-K6-E12
cccagcgtccgctttaatgcgttgaaattgaatttaatgggaaatattatattatcgtattttagtcgtaaaaaaaaaaaaaaaaaaaaaaaaaaaaaaaaaaaaaaaaaaaaaaaaaaaaaaaaaaaaaaaaaaaaaaaaaaaaaaaaaaaaaaaaaaaaaaggggcgggccgttttaagaagaatcaaagtttacttccccgggcttgcaaaagtaatagcttttttatagggcaaccaaaaataaaattaatg

SEQ ID NO: 49291 - DNA, 590 bp, Gossypium hirsutum
  Clone ID: LIB3828-007-Q1-K6-E2
aaaacaagatcctctcgtctccgcagcatgacaataggccgtcgatggcgttcagaagtccagaagtgtcacctgatgacatgacaataacacaagttaacacccttcatatggtcatattcaagattcaagttgatgaattacctggacatgcggataactcgcggttgtgtcccctgcatctctgttctgtaatttgactgtacaatcaatatcttcaatcacaagaatggaacgattcgacacatgaagcaacaagtactcaagagaggagtccgagttgactgctgataagttcaagttgtaaatatcaaagttgagatgatttgccatggctgcaatcaaacttgatttgcctgttccagggggaccatatagcaagtaaccacgcttccacactttcccaattttcttatagtactccttgccattaataaagctgtcaagatcctccataatagtctttttgaggtcaccatccaaggctaatgtatcaaatgtcataggatggtctagattgacagcacttgagctccacctttcacgcctcacagtgtgaaacttcaccatccgattccggtctttcagtt

SEQ ID NO: 49292 - DNA, 612 bp, Gossypium hirsutum
  Clone ID: LIB3828-007-Q1-K6-F12
tgctggagctgtggtgttgttggcgagtaaaggcaatagttcaaagattctagtgttcagtgaggacttgttcttcctttatttgcttcctccaatcattttcaatgccggattccaagtcaagaaaaagcagttcttcaagaatttcacaataattttgatgtttggaatatttggtacagtgatttcattctgcctcatatcagtaggtgcctttttgctgttcaacagaattggtgtgacatctttaaatactcaagattacttagctgttggtgccatattgtcagcaactgatactgtgtgtacattgcaggttctcagtcaagatgaaacacccttcctttacagtgttatatttggggaaggagtggtgaacgatgctacttctatcgtgcttttcaatgcagttcaatcactcgatttcaacaatatcgatgccatgatatccttgaaactgttggggatttttctttacctcttcttcaccagtaccattcttggtgtagtagcgggtcttttaagtgcttttatcataaaaacactttactttggaaggcattcgacagaccgggaagttgcactcatgatgatcatggcttatttgtcata

SEQ ID NO: 49293 - DNA, 403 bp, Gossypium hirsutum
  Clone ID: LIB3828-007-Q1-K6-F9
tgcttactagttttatcccttcactttctttttctgacaattcagcttgtaagacctatcattttgcaaaacacaaaaagctttcttttcctgtaagccaaactcgatccaataatatttttgatcttattcatgttgacaaaaaaaaaaaaaaaaaaaaaaaaaaaaaaaaaaaaaaaaaaaaaaaaaaaaaaaaaaaaaaaaaaaaaaaaaaaaaaaaaaaaaaaaaaaaaaaaaaaaaaaaaaaaaaaaataaaaaaaaaaaaaaaaaaaaaaaaaaaggggaaattaaaaaaaaaaaaaaaaactaataccaaaagggaaaaaaaaaaaaaaaaggggggggacggcggaaaaaagaaacaaacatcgccgccccgttttaaaagaacaaacttttttt

SEQ ID NO: 49294 - DNA, 264 bp, Gossypium hirsutum
  unsure (1)..(264): unsure at all n locations
  Clone ID: LIB3828-007-Q1-K6-G10
aataaagactttcatagttggtcggcagagcatcactgtgtgatccttggcattataagaaacgaaacttgtggattgagacagaaaaataaaatatgagttcaatgaatttgagttttcaattctttatacaagctaccttggnnaagcagtggccttccttaaaaaaaaggaatgtggtgcagattacaagnnatggagtgtttgatgcctattgctgattctaggggtttctgagcnnccactacgggcattttaattaca

SEQ ID NO: 49295 - DNA, 604 bp, Gossypium hirsutum
  unsure (1)..(604): unsure at all n locations
  Clone ID: LIB3828-007-Q1-K6-G8
cggccgcgtgggtttcctccacgctttgtgcncttgacaaccactgtcaccatgaacctcctccttgccaccgctattattctcctgttgctccaccgccaccctagcaccatcatggctgccacttttgcgcaccaccatgtaaaacaacctcatttcattctattttcttcccttcctctaattcttcttgttcctttttctttctcccattattttctcttgtacagcatccttctctttcttctccttctttgtcaagttttcgtcagatcgtcattgtcgccgtcatcgggccactacgcctctaccggtttcggtgacctttctatttttcttcattattttccaacctctttcatcctctttagtacttgaaatcctatatccctattttcctttatttttaaattattttatttgatttaaatgttgtatcttgactcactctttcaagtgatttttcactagactctttctattctccgactcaagactctggtgatccaacaccccttcccattcaattgagttaggaaagcatttgggagaaaaaggagcgaaaatcagacaaaaagagtagacttcaggaaccatatgggct

SEQ ID NO: 49296 - DNA, 507 bp, Gossypium hirsutum
  Clone ID: LIB3828-008-Q1-K6-A12
atattctatgttataaagaatatttttcataaaaaaaaaaaaaaaaaaaaaaaaaaaaaaaaaaaaaaaaaaaaaaaaaaaaaaaaaaaaaaaaaaaaaaaaaaaaaaaaaaaaaaaaaaaaaaaaaaaaaaaaaaaaaaaaaaaaaaaaaaaaggggggggcccgttttaaaggaaccaaattttactccccggggttggaaaaaaaaaattttttttttggggcccccaaaataaaattaaggggccgggttttaaaaccgtgggagtgggaaaaacccgggggtccccaaatttaagggcttggaaaaaaacccccttttccccggggggggaaaaaaaaaaaaggcccccccaaatcccctttccaaaaagtgggccattttaatgggaaaagggaacccccccttagcggggctataaacccgggggggtggggggtttccccaaaggggcccctttccttttctaagggcctaaagccccgcttttttggttttttccctt

SEQ ID NO: 49297 - DNA, 597 bp, Gossypium hirsutum
  Clone ID: LIB3828-008-Q1-K6-A2
ggaagaacagggcaaggttgccaggtttctgtctaaacaggattaggcctcatgttagagtgaagtctcctccaattcaagccaagcctaatctggattcttctaaaactgatcaaaaggatgaaattagtggcaaagttggggaagataaatccagaaatggagaaaaaactgggtttttaattggaaggaaaatcatgatcgtggttgattccagcatcgaagcaaagggagctttacagtgggcactttctcacaccgttcagtgtcacgacactcttgttcttcttcatgtcacaaagccttcaaaacaagtgccaaatacaaatgaagatcatgacaagaacagagccccaagggcatgtgaacctgtttactccctccaaaacatgagcaagcagaagagacccgaggttgaagtagaggtggcagtggtggaggggaaagagaaaggtctaacaatagtggaagaagctaaaaaacaaggagtggcacttctggttttgggacagaaaaagaagtcgatgacatggcgtctggtaatgatgtgggctggcagtcgaatgacaggtggagtagtggaatactgtatccaaa

SEQ ID NO: 49298 - DNA, 565 bp, Gossypium hirsutum
  Clone ID: LIB3828-008-Q1-K6-C3
ccccgcgtgcgtttttttttttctgcactccagcgttaaactgaagccccatattgatctttttctgctctgtggacgcccggtatgctgttaaagtagtttggaacgggttactcaattctgtctttatttcttttctgtgggcgggtagtacccaagcttatgacaaatagcggacatcacggctatccacggagtctctagcatatcttattcatgtctcgtactgtgcgccttaagggttgtgtgaatctaagcaacccttccacctcacgagctgcattggctctttaccttctcaaggtggaacaccttcctaactcctattccttgctgccggtcccttcgacatgtaaaaagttcatgctgcttatatatccttcttgtcaccacttccatgagtgtctcaaatatctccacttgagcatctgctttacatctcatctaatacacatataactatggcttcacatctttcttaggcttaagagcgttaccactcgttcacttacctaccacattgataatcacgttgcgctccttgtcatatgcacacaacctgctt

SEQ ID NO: 49299 - DNA, 468 bp, Gossypium hirsutum
  unsure (1)..(468): unsure at all n locations
  Clone ID: LIB3828-008-Q1-K6-D3
attttgttgccaaaatgaagtagctgaggaagccttggaagcaaaacaaaaagtaacaaatagcttgtctactacctgttctttttctttttatcatgttttataattttgtgacaaattgttcttggtacactgaagatatttnatggaaaattaccctatgattctattgtatttaaaaaaaaaaaaaaaaaaaaaaaaaaaaaaaaaaaaaaaaaaaaaaaaaaaaaaaaaaaaaaaaaaaaaaaaaaaaaaaaaaaaaaaaaaaaaaaaaaaaaaaaaaaaaaaaaaaaaaaaaaaaaaaaaataaaatacacatacctaaaatccaatataactgcccattttcctgacacctatcctaactaccaaaaacacttaccttccccccatttacaccccctttcatcaaatttgaaaaaaccaccgattggcccaaattagaaaaagcccaaaaaaaaccccttt

SEQ ID NO: 49300 - DNA, 608 bp, Gossypium hirsutum
  unsure (1)..(608): unsure at all n locations
  Clone ID: LIB3828-008-Q1-K6-E1
gngnaatctgattacctacgatgcagccgactttaagtttgaggcatgccagccaacttcctcttcattaatggatgatttggagcaacctcagattgacaacagtgcatctgacctaaaacagacctctcaggagacaaactcacaagatcaaatgatgcaaagagaagcacattctgaaacggaggtcagttgtctttctagcaagccagaaatagagagtgagcaacccaaacgtactacgaaaagatttgcgtctgaacaactcgaaacagaggcaaagaaatttgtatttaaatctaggaagggaagtaatcctgcatttattggtgcacaaacaaaatttgaggagttgagttcaacagcctattcaagtatatcagtggattcatcccaccaagatgttggagttgaatcaaacttggatactgtgtcatctggggcagatacgagcaggtcgaaagaaccaagcatcacggaaaatgcagttctcaataataggaggggtcaatatggtgactctgaatgttggactgcagtttctattacttccactcttgattcacctgataaatcagaagttggaaccatagagtacaaacatggag

SEQ ID NO: 49301 - DNA, 586 bp, Gossypium hirsutum
  Clone ID: LIB3828-008-Q1-K6-F6
attaatgcaaaactgagcaatgcttcctttacaggtcagtttcctgtttctttgtcatggatggatgtatttattggaatatggggctaagtaacttaatacaaagaaattttacatttgattttctatgccttttagatcacctctaattttagcatgaaagcagccctctttgctgggttttttcaccatttttgctgctatcgctttcatttaggtgtcaactttattttaacagatgttatgccttatatgatgctatatgagataaatatattccatagtttttcttatccttctatttttgcactgttatactctctaatcacatgatttccctaagctaccccccgtcaataatgattgattgctgatgtaacaatgtttgattgctaatcacatgattttcacttttgttttgtctccaataatgattgattgctaatgtaacaatgttttttttttttaccaagatgctatctaacaattgcataaccgagccatgttcttaagattgattgcgaatgactgatattgtgaaataacacttacataagataaagtagtaactgtggctttggtatgc

SEQ ID NO: 49302 - DNA, 593 bp, Gossypium hirsutum
  unsure (1)..(593): unsure at all n locations
  Clone ID: LIB3828-008-Q1-K6-F7
cggncgcgtgggttttttcgtatttttttttttggtttttttcattttttcaaatgcatggataaggcgcctaaagtaaaagaccctttttggtaaatcggccatgtgaaaaaaccgtattacgggagaagtcaagtagattaaaccatggtgtttttaaatcaccactgtgctagtctatcagaggcacatatggatccaaaatatgtggtggtttgaccaacataccaaacaacgttgaaccacaattcattttgaaatgcaccgaagttatcgagtggctgaccaatcaatttgatgaagacgacattcactgatttgggaattttttttaaaaaatgcactttcacttgtgtcagaaagcacactttgattggccttacgtgcaattagctaaataacaatatcctcgcccaagtcatctgtaaaaatcatacttcaactggcataaggagtgactcctggttgatgcaccctttttgaaaagcttgtggagatgcggagggtacgtgcccatttatacggtttgtcccaccaaaggttatttcaaaagggcctatatttttttggaccactaaggggattttatgtac

SEQ ID NO: 49303 - DNA, 312 bp, Gossypium hirsutum
  unsure (1)..(312): unsure at all n locations
  Clone ID: LIB3828-008-Q1-K6-F9
gntgatggtgctttagaacacgaggnaagtttactgggggagagagggatgctagtattgttggtaggagactgactggtgaagcccatattaacagcaagagaagaggctgataaccctttttaatccaagatgtacatatatatatatatcaaaaagcgtgtcctaaatgtaataagctgaataatttgaaatcttggtgactgatttttgttgtcagagaaaccaagtaatgtcagcaaacagcaactacataattttgtacgggcaaatgcaatttctaatttaagatgtcttggtttatattgatat

SEQ ID NO: 49304 - DNA, 598 bp, Gossypium hirsutum
  unsure (1)..(598): unsure at all n locations
  Clone ID: LIB3828-008-Q1-K6-H5
gttttcaatctatttttcattcgatatactctccgaagactaaggttcaaggaacaacanccacaaagtgaaaatgatcaagccggacttgagctgactaacaagatttgtaacgtcgatgctactccaatcgcttgtcacangagaaaactttaacttccttaatgtgtttaatgaaaggttcaaagaaccgatttgtggcagcagagtaggcccgccgactcggccaaagattgcatcgattactttgtctccgagtaacagaagtagtgaggcaaatattgccgtgggtgtggagaaagatagaggaagcactagttcttctttaggtaaacgtaaaatgaaaaccgagaacattgattcagacccatcttctgaagcaaagacatttcgtaacattggttacaaaagcaaccttcaagggagtttgtggataactcggtttactcccaaggcttctagctcgttatttaaccgggataccgatggtgctgttgagtgcttgagtgactgcatgaaacctgatctttgcccccgaaatgatgttaatgtttccaacaagcccgaagaggaggcatccaccggtttacgctccctt

SEQ ID NO: 49305 - DNA, 599 bp, Gossypium hirsutum
  Clone ID: LIB3828-008-Q1-K6-H7
ggcaatgcagcagcggcacttatggctggtcttgctcccaaaaccaagtcctaagagaggaaaatggtgcgagcaagaagctgcaattttggttccaggagatatcatcagcatcaagttgggagatattatcccagcagatgcacgtctcctagagggcgatgcgctcaaggtcgatcaatctgccttaactggtgagtctttgccagtaaacaagaaccccggtgatggggtttactcgggttctactgtcaagcaaggtgagctcgaggccgttgttatcgctactggtgttcacaccttctttggtaaagcagctcacctggtcgatagcaccaacaacgtaggccacttccagaaggtgctgaccgcaattgggaacttctgcatatgctcaattgcagtgggcatgctagttgagattgtggtgatgtatccgatccagcgtcgaaagtatagagatggaattgataatctcttggtgcttctcatcggagggattcctatcgccatgccaacagttttgtctgtgacaatggctatcgggtctcaccggctttctcaacaaggagctattacaaagagaatgacagccatcg

SEQ ID NO: 49306 - DNA, 586 bp, Gossypium hirsutum
  Clone ID: LIB3828-009-Q1-K6-A2
ttgtagccaggggtgccagtattactaccactaagtaaagggtggagtcctttaatggttgcccgttcatggcgcaaaattggcttgaggaaatccttagcagtcagcctgaaggccagtcgcaagctcttccttcaccctttctgtctcttccccttatgagcattattagaattgctagagaatgtggatggaggactggtgattccttgttctcatgccaagatccatgtgctgtatgtctggacaggcagtgtacagtagctgcagaaggttgtgatcatgagttctgcacacactgtgccttatacctctgttctacaaatcacacgacaaatgtagctaaaggtccaactggctcaattgcctgtcctctttgtcggcacggaatagtatcatttgtcaagctccctggagcaaaaccaatagttaaggctgttgcaagaacaagtttgtccctgtctttctgcacatgttctagtgagatgttggagccaacttcaatgacaaccccgctttgcaagcctgtggtccattgcgctcgcatttctccccctggatcttcattctgcagcataagtggtca

SEQ ID NO: 49307 - DNA, 597 bp, Gossypium hirsutum
  unsure (1)..(597): unsure at all n locations
  Clone ID: LIB3828-009-Q1-K6-B9
cggncgcgtgggcggacgcgtgggcggacgcgtggngaaacctaccanaccgaagtgctgttggtagctcacccgcgggtgatatgtatatctcatccgtcgtcgtctccactatcctttcatttcgcttcctctgcctttttcaaatttacaattgcaacatcaaattcccacatattaggaatttccagcgtcttctctgactgttcatggcttctttgaacgtttcttctccttcttcaactgcatcactttctcgtcctcgggcatcaaagcttccaatcctttaatgaactacacagaaaaaatctagtcttcgcaaatggctacgcatccggtttagcctttgtgcgtttcggtggtagattgtcgtccgttattaaaagtgttggcaaaactagagctgcagttcaatcgggagaaggcaaaaatgttgtctccacaaatgatgctgtttctataagtaacggttttcccgttgataacgatgaattcaatttggaccgcgcgactgaaggttttgcttccattcctgaggcaatcgaggatattcgccaagggaagatggtagtggttgtagacgatgaggatagagaa

SEQ ID NO: 49308 - DNA, 619 bp, Gossypium hirsutum
  unsure (1)..(619): unsure at all n locations
  Clone ID: LIB3828-009-Q1-K6-C10
gctaacaaaacaaaacaaaacagggnaaaaagactttaaaaattttcattataacaatattcttttttatttggcgctgctcctctatttagggtttcataaaaagaaaactttgcttttttctgtactgtagcaggttgctaagacttaatctcttgccttctcttcagaaaagaaataaataaaagacacattttgctaaaaaaaaaaaaaaaaaaaaaaaaaaaaaaaaaaaaaaaaaaaaaaaaaaaaaaaaaaaaaaaaaaaaaaaaaaaaaaaaaaaaaaggaaaaaaaaaaaaaaaaaaaaaaaaaaaaaaaaaaaaaaaaaaaaaaaaaaaaaaagggggggcccctttaaaagaaccaaattttcctcccccggcctggcaagttaaaattttttttttggggcccccaaattaaattcccggggccgggttttaaaaccgtggggcggggaaaaccccggggttccccaaattaattcccttggaaaaaaacccctttttccccagtggggtaaaaaaaaaaagggcccccccaattcccctttccaaaaattgccccccccttaagggaaatgggacccccccctttagcggcccttaaacccggggg

SEQ ID NO: 49309 - DNA, 520 bp, Gossypium hirsutum
  Clone ID: LIB3828-009-Q1-K6-D2
caaacttgacaaacaactcatttatattacaattggctaacgggttgaagaaacatagaagagctaaatgcccacagacctaggatgcttgccaagctcgggggctgcttgtacacacaagccatgctctggtccccacaagtgcaaggagagctaggcatggagccttatatcgcgaaacccattgaatgctgctcttacctatagataaggcatggctataaggatgcaaagcatgttatgggagacgggaaggtcatgactgataagacctatccatacagctgcatcgatggagggatcatctctaaaacaaatgaggactatcgtctactggtacgacaccaaaaggagagaatggactacagaccatcactggcaaagaaaccaagtataaactatgcaaaggctcgatctgttcaaacaggatccgaacggctaaccatactgtgaatacatatgatggaccctctataccccaacgctgatactctgatcagagctaatgacaccatcaatc

SEQ ID NO: 49310 - DNA, 610 bp, Gossypium hirsutum
  unsure (1)..(610): unsure at all n locations
  Clone ID: LIB3828-009-Q1-K6-F10
gtgaaggatgcatctttacaacctggaaatacccgaggtctagcacgttttttgcaagtaaagagttattacaatgagngctgccgatggacgattatctcaccttaaactgcgactatatggtgtctttgaagtacagggctggatctaccgttggatgctacctcaaggcatgcatgatcgtaacttcgagagagagagtacacatcacactggtgtgatggtcggtatgggtcaaaaagcaacatatgttggcggatgaggctcaatccaatacgtggtattataactctcaagaatccgattgaacacggcattgttaacaactgggatgatatggaaaacattgggcatcatacctttaacaatgaacttcgagaggctcccgaagaacattcggttcttattaccgaggcccctcttaaccctaaagccaatcgtgagaaaatgacacaaatcatgtttgaaaccttcaatgctccggctatgtatgtcgctatccatgctgttctctccctatatgccagtggcactacaactggtattgttttcgactctggagatggggtgagtcatactgtccccatatatgaaggatatgccctccctc

SEQ ID NO: 49311 - DNA, 581 bp, Gossypium hirsutum
  unsure (1)..(581): unsure at all n locations
  Clone ID: LIB3828-009-Q1-K6-G4
atccagcttaacccttccacaacctaanatgtcgccaggtcccgtggttgaagcagccctccctgacactgaactccttcctaatccttccgctgaggaaccccagaagaagcctttgagcgaggaggaggaggctgtggttgaggacgtcaaggaaattgagatagaagatgacgaggaggaggaggaggaggaggaggatgacgatgataaggaagatagtgctcagggtgctaatgccagttcaaagcaaagcagaagcgagaagaagagccggaaggcaatgttaaagctggggatgaagcctgttactgatgtaagcagggtcaccatcaaaagaaccaagaatatattgtttttcatctccaaacctgatgtcttcaagagcccgaattctgagacgtatgtcatcttcggcgaggctaagatagaggatttgagttctcagctacagacccaagctgctcagcagttcaggatgccgggcttggcctctgtgatggcaaaatcagacacctctgcagcagcagctggaacagcagcggatgaggaagaggaagaaatcgacgagactggagtag

SEQ ID NO: 49312 - DNA, 601 bp, Gossypium hirsutum
  Clone ID: LIB3828-009-Q1-K6-G5
gtttccataattagaaagcttgaattttatgttatagtaatatttatcactttcatcagatcagctttatatttatttgtggtaattaataaattattatatccctattagaacaattttcttataaaaacctacgttttgatcatcgaatttaaaatataaaatttgttgaaaaaaaaaaaaaaaaaaaaaaaaaaaaaaaaattaaaaaaaaaaaaaaaaaaaaaaaaaaaaaaaaaaaacccaaaaaaaaaaaaaaaaaaaaaaaaaaaaaaaaaaaaaaaaaaaaaaaaaaaaaaaaaaaaaaaaaaaaggggggggcccttttaaaggaaccaaattttcttcccggggcatggaaagtaaaaactttttttttggggccccaaaattaaattccggggcccggttttaaaaaccgggggaggggaaaaacccgggggttccccaaataaaagggcttggaaaaaaacccctttttcccagggggggttaaaaaaaaaaggccccccccaaaggcctttcccaaaattgggccccccttaatgggaaaggggccccccccttgaagggccctttaaggggggggggggggggggtt

SEQ ID NO: 49313 - DNA, 426 bp, Gossypium hirsutum
  Clone ID: LIB3828-009-Q1-K6-H2
gtgccgtagcttgtctctcatgtcctattatggtactgtttgcatccaaccagatctttccaagtagctacgcttttatacttaaaatagacaccactctgggtttcactattaatagttgatttctgtgtttatataaaagagtaatcccaatcctacaatctcatatggattactatgaccagcactggactgcacgagaattggtatccattgacaacctgcacacggcctatcactacaacccggatgatgtggatcgtccttacaatgacctcttctttaggaccatgctacgagttttatatcaccaaaagggtgttggcataatcaaaactgggaacttgggacgttaccaaccacttttacagtagctgccgatagtgatcttgactcaggaacgaataacaagaagtaggccaactg

SEQ ID NO: 49314 - DNA, 592 bp, Gossypium hirsutum
  Clone ID: LIB3828-009-Q1-K6-H6
tgttacacaatcaattcaatgatcaaatttgagattaaaaaatatttcttttgcataccttaaccttctcaaagttgagacagttttaatagcccataaaataagatgactgacaaaggagcagatgaaaaccaagtaggtagattgtttttgtcacctatacttaccatacaaagccgtagaatagaagaggtttgaagagagtcacaagagaaacatgaagttatatatagtaggcaatccccccaagaagggagttcatgattttagttaatgttttggtagcttttgtccattatctttttagttttcgtgatggagactttgctttctcctttcccactacgtttgaatttagataacaaacaaaattacgattcaactcttaaatgctaatcgaacaactacttcaccaactttaagattactgcttcatcttatctcttgggggttagtttacaaatttttccattaatagctgaaattcaatgatatccgaggtgccatttcaatcctaaatcaatatcagataattttgggtttgatccaagtttaaatggatttcagtcattatggtgttttttcaatctgt

SEQ ID NO: 49315 - DNA, 602 bp, Gossypium hirsutum
  Clone ID: LIB3828-010-Q1-K6-C11
ctcctttgcaatggcgaaattgcttcttcttcccgaggcttcttcaaagcttaatttttacgattctatggacggtaagggctcagctcccgggcacatgggaacttctagtcccaaatgccggcgtagcctccatgcatacggcggttacccggtttaacacggttgttcttctggaccggaccaacatcggaccttcccgtaaaatgcttccgaaaggccactgccgtatcgactcgaacgacgtcgtacttaaaaaggattgcttcgctcattccgtcgttttggatctgcaaaccaaccaaatccggccgttgatgatactcaccgacacttggtgttcatcgggacagttcctccccgacggaacacttgtacaaactggaggagacttggacgggtttaaaaagatccggaaattcgaaccgtgtgaacctggagagttttgcgattgggtggagctgaaagacgtggagttagctaatggccgatggtatgcaacgaaccaaatattaccggacggaacggtaattatcgtcggagggagaggaacgaacaccgtcgagtactatccgccgaggaaaaacaagaacggcgcaatt

SEQ ID NO: 49316 - DNA, 602 bp, Gossypium hirsutum
  Clone ID: LIB3828-010-Q1-K6-C6
ataagtttggcccctccacctatttccaattggttttagttcagacgtttaaccattccttttgcacaggaccacaaccatcagtacattttatttcaatctatgttctatgagcattgcaacagtaaaaaccataaatcgaggaggcagcgtgcctttagtaagaaagtgcaaaatataaaactataaaggttaattttataaaaagttatctagaaatcaccctgagcaaagtcagtataagcccctaaagttgaaggaacaagaattttagatttagcattgtgtacatcattttgccagcatttgccttttgtgagatgtagatgatagataatccaaaattccaaatgctaggaataaaaattatgtagtacaaaccgatataaggataataaatgaagctccagctgcctaattagccaattaacattgatagttgacttattggagagagtggtaatttttgtagtctagagctaaacaaattattagcccttatctggctatgctaatgagattttgctaatacattcagaagattatgtagtatttgattctgataaatccatgtttgaaatggtattagattctagatttgc

SEQ ID NO: 49317 - DNA, 597 bp, Gossypium hirsutum
  unsure (1)..(597): unsure at all n locations
  Clone ID: LIB3828-010-Q1-K6-D5
gtggtcgtcctttaggaagaccgnaggtatacttcttaatggtaaagctggtaaagttggggttaaacaagaaccacttttcaccatggaaccaggcaagacatataagtatagagtctgtaatgttgggcttaaagcttcacttaattttagaatccaaggtcataagttgaagcttgttgaaatggaaggttcacatactgttcaaaacttgtatgagtccttggatgtacatatagggcaatgcttttcgatccttgttgcagctgatcaagacccaaaagattattacatggtagcatccactcggttccttaaagaagtacaaacgaccacagctatcattaggtacaaaaatggcaaaggtgaagcttcaacggagcttccacctgcacctattggttgggcttggtcattgaaccagtttcgtactttccgatggaatcttaccgctagtgctgctaggccaaacccacaaggatcttaccgttatggtgctattaacatcacgcgtacaatcaggctagtaaacagtgttagcagagctaatggtaagcttcgttatggctttaatggtgtctcacataccgacccaaa

SEQ ID NO: 49318 - DNA, 194 bp, Gossypium hirsutum
  Clone ID: LIB3828-010-Q1-K6-E1
cttagatgttttggatgattttagtattacatatcgtatggtcttgataggttacatacaacatgtatctaggtcattaagaagtattgtggagtcttaatgacgttttgaacatgtcttggatgttttggatgattttagtagtacatatcgtatggttaatgactaattttgcacaagttgatagttgattc

SEQ ID NO: 49319 - DNA, 421 bp, Gossypium hirsutum
  unsure (1)..(421): unsure at all n locations
  Clone ID: LIB3828-010-Q1-K6-E3
ttttctcccactcagtctttggaacttggtagtctttcaaggctctgctcagagaatatacctcagcattctccactttgacatcggaagccgcatgttaacagttttgagatgagattccaaaagtcttttgagtaaaaaaaagcttaattgcttttattgatgttgtgaatataattagatatatagtgttagagtttacttctttccctagttaaacacttgtaactagtaaatatgtatgatattcttacgtgtaaactgataagtttttccctcaaaaaaaaaaaaaaaaaaaaaaaaaaaaaaaaaaaaaaaaaaaaaaaaaaaaaaaaaaaaaaaaaaaaaaaaaaaaaaaaaaaaaaaaaaaaaaaaaaaaaaaaaaaaaaaaannnnnggggggnaaaaaaaaaaaaaacca

SEQ ID NO: 49320 - DNA, 191 bp, Gossypium hirsutum
  unsure (1)..(191): unsure at all n locations
  Clone ID: LIB3828-010-Q1-K6-F10
attctttgctttcggncgtgtattttctgaccttcataccagttgcaactttgccagaaaatacacgtccgaaagcaaagaatctgccgcgttgagaagcacgagtcatcttggactggcgcacgcgggtcgtaccagctaagcctctcgtgggtcgtatgacatgaactacgcgtccgaatggctggaat

SEQ ID NO: 49321 - DNA, 609 bp, Gossypium hirsutum
  unsure (1)..(609): unsure at all n locations
  Clone ID: LIB3828-010-Q1-K6-F12
cccattcctctctaacacatacaanaatcttcacatggcaaatgcatctttgtaaatggagcaaatatcatttgctcaccacaccacgctgtagccagctcaaatatacacctagataaaccacgtttctgcttgttgatttgcagtgggaaaaagggagattaattcacgctgaatgtaacttattacaagtcatttgtggcataaacagattcatgtgaggatgtagtgatagaggattgctacatatgtgttggcgatgatgcaattgcaataaagagcggttgggatcaatatggcatcgtttatggacgaccttcgagaaacattctcatccgaaacctcattgtccgttctatggtcagtgctggcgtatcaataggcagcgagatgtctggcggggtatctaatgtcaccgtggagaatgtcactgtctggagttctaggcgtgcagttcgaatcaagactgctgttggaagaggtggatatgtcaggcatataacgtaccgaaatctgacatttgatgatgcccaagttggaattgttatcaagacagactacaatgagcaccccgacatggattttgacaaaaatgctttcccaatactc

SEQ ID NO: 49322 - DNA, 600 bp, Gossypium hirsutum
  Clone ID: LIB3828-010-Q1-K6-F3
ggactattaagatttagattttttgtttacttatttgggctttaatgtagacccggacaaattggcccgtttacaaaaaaaaaaaaaaaaaaaaaaaaaaaaaaaaaaaaaaaaaaaaaaaaaaaagggaaggaagatataaaaagaacaaaaaataaaaaaacgcaagcaatgaaaaaaaataaggggggggtcgggtcaagaaaatccaatttactggccgcgggtttacaacgtaatgactgtttaaaaccgtgacgtaacccaaattaatgggctggcattaaatacccctttggcgggaaaacccctgggctaacaggccttaaccgattggccttccaaccatttttgcaccctggatggaaaatggaaggggccctgtaggggcgctttaaccaaagtgggtgcggtgtttacgcgcagtgggacccctccttttgcgagctatttagcgcggggggggtggggtttccccccttggttactggtcaatttggcaggcttttaccgccaagttttaaatcttgggctccttttttggcccccatttagggctttttcccccctaaggccctaaagaggggggctccgttgagg

SEQ ID NO: 49323 - DNA, 573 bp, Gossypium hirsutum
  unsure (1)..(573): unsure at all n locations
  Clone ID: LIB3828-010-Q1-K6-F4
gnactctgttgctgcagccccacaagcagtccatcttttccggcagccatttccacctaattactttccatatcctcactatctttcacccttttatatgcatccaatgcatcaatttttaaaccccactgggctgcctcagcaaccttcaactggcaatgtatacatgccacccggagtaactccacctggggtcaaattccctctcccacagttcaagcctggaactaatgcaggaaaccctgctcaccttgcaattccatctggttatggtccattgacttctccgcctattggtttcaatttacctcttccatcggtgacttctgggagctctagcagcaaggaggatattgcagcattgcagttgaaggaaaatcaaatatacacaactggaccactgaatgaaagttcagctctctggatgcctgcaccagggcaagatttatccaacttgcaggttaattctttatacaacctttcccttcatggtccacagcttcctttctctcctgcacaggctggtcatggtgcctttgccggactttatcagtcaccgccacaaacaatggc

SEQ ID NO: 49324 - DNA, 611 bp, Gossypium hirsutum
  Clone ID: LIB3828-010-Q1-K6-G7
gggggacttgattataacacaaatgcttctagttccagtctgtatgttggatctggaagtggtactattggaggaaatgcctttggaaacagtggaattaattggggttcttccgcaatttccagtcaaggtgaggggaataatgtttctagaaatagtgtggaatttggctatggaagcggcgataacagctttgggttggggacaacagggtatggaagaaacagtgggaccaatttgacaccaacatcagcatatgctgcatcaaatggtggttacgatggagcctttgcagatctttacagcggtgcttcggtttacggggatgccactaggggatcatcaatgtccgagcgagatggttctggttcctttgggtatggactcgatagtgccacttctggtgttctgcgtaaaagttctcctggttatattggtggttatagtgttaatagaagacaagcaaatagcggaattgctacctagaaaattatttcgggttatcacaatacggcaagtatagacaatcttgcgaagcaggtgatctactctgcatatctcccgtcttaatacgctttcatggaagttggttatctagagctaaccgcagt

SEQ ID NO: 49325 - DNA, 524 bp, Gossypium hirsutum
  unsure (1)..(524): unsure at all n locations
  Clone ID: LIB3828-010-Q1-K6-H12
ngagaggtgcacgcaacgtaacgaaccaaggcccatccaaccccgatgctatcccttgcctttcttctagcttcaattcgcaccttgctctgcgatttctcaatcgttcaccatctctagagttccaaagccaaacaaagctttaaatcgaaaggcagggataggaaaagggaagccatgataacgcgatccaatttagcagatcaattaagagagtatcagcttcgatctaagcacgattgggcctctgtttcgtttttcgcatcaacctctaatctcacaacttctagagtggatgttgtggcctttgttatatgggaactcgttatattagcttttctggttttttcagccgtttctttatattttaggcatatgcaacttgcttttattctagtatgcatcacattgttattgcttctgtgcatgaaaatcacaaagcaagtgagcgtggctgggaaaaagaaaagaaggatgctacttccattatctatgtaaaacacaaaatgataatgaatttgttt

SEQ ID NO: 49326 - DNA, 618 bp, Gossypium hirsutum
  unsure (1)..(618): unsure at all n locations
  Clone ID: LIB3828-011-Q1-K6-A9
ngtggcgtcaaggtttcaacagtttcaaacaaagactttcaagtgtcacggttggtgaccaagaatggaggtccttattacaaggagatgaaggaacgggctattcaagtttcacagttggtgaccaagaatggaggtccttattgcagggagatgatggaacgggctattcaagtttcacagttggtgaccaagaatggaggttcttattacagggagctgatgaaacggaacaaaacatacatcaaggaaccatccagcgtagaaacatgccaattgttggcaaaacaattattttatactcgacttgccagtattccaagaagatacgaggcgttctggaaagagcttgattcccttaaagagcttctgaaaacaaaggaagcttggaacattgaaaatgcaagcatggctgctctgattggagttgagtgctatgcctggttctttggtggagagatcattggaagaggcttcacaattacaggttaccatgtttaatattcaactttatttttctgagaatttgaatcaagctgatgatcttttttgtcagctggacattattatttattagcacaataagactctntaaactagttttaactttgttaaata

SEQ ID NO: 49327 - DNA, 642 bp, Gossypium hirsutum
  Clone ID: LIB3828-011-Q1-K6-B9
tggctattcaatagactttcgagtttttcacttgaagcataaacatctgtgaaacctagtgccaaaacttttgaaaactgatacttgtttgataaacagtgttgccttgaaattagggcgtggtatcataaatcattagtagacagatgggagaagtgggattaaccgtgtttagaactaaattgactgattcccttctaaaaaatataattaagcttgtgaatttgtggtgttcattctgtctgatcctctcttgatgtatctttttatttagaaaatctccatatatagaaagcgatggttcaatcataatgtccgttttggaaaggtacagagatgaagatgcaaaaacttgaccagtgctgcttaatctccatttaatatcagatttaatatcatttataatgtttgaatgggtgaaccattactgaacctagtgtcttaccttttcaggcatttgctgtagcaggatatggtgggtggaagcttcaaggcatagtgacacccagtagtaacctgtagagcatagacattccaaaatttttgaacaaatctaatccccctcccttctcagttctctctgcaaggaaaatagaaattgttcaaagaggcaatagctagagaaagagttgctatatatgg

SEQ ID NO: 49328 - DNA, 251 bp, Gossypium hirsutum
  Clone ID: LIB3828-011-Q1-K6-C7
ggcagggacagcattatataacaccagctggtgggtgactatactgcttgtgcatggcatccaagcgcggttcacgtatcaacctgctctagttagagcatcagggatgattgctggaggctctggccttactacaatgtgtcaagctgtcagagccatgtcggggaacccaaaacaatgccaaactgacaccttattgatgccaatgtcacatatgaggacattctaaaaaaggacagactcgatagcct

SEQ ID NO: 49329 - DNA, 229 bp, Gossypium hirsutum
  Clone ID: LIB3828-011-Q1-K6-D7
ggcaggcgcaccagattgggttgccataaccttactgtcttcagtatggttatcggggtcctatggtaagaggaccggtgtctccaccatggatgacggagctcttgggggtcatccaagcaacggtgttactcatgaagctgctcctgattcttgaacctatattgcacctgatgctaccgggtctcctgctaacgataggaatatgttatgaactgaataccttact

SEQ ID NO: 49330 - DNA, 565 bp, Gossypium hirsutum
  unsure (1)..(565): unsure at all n locations
  Clone ID: LIB3828-011-Q1-K6-E11
ctttttctcataatccaaataaacagtaaattaatagtgctcgaaaggcagatgaatggtaaaggccagctacctaatttgaggtttccatgttcgtatattaatgttgattcatagaaaagctcaaagaacatgctggatccatgttgcggaagaaaatcgatggccggtgttttgaagagaggtttcttggagacaaaagtgatgatattggggtataaagcagtaaacatagtttgtaataagcttttgcttcaatcacttgtcatcctctgggtaatgttacataaatcgtataccatatggcttcagagcataggctgaaaatctttctttattcatatagttcgtaacatatttgaggaaacaacccanaaaaaaaaaaaaaaaaaaaaaaaaaaaaaaaaaaaaaaaaaaaaaaaaaaaaaaaaaaaaaaaaaaaaaaaaaaaaaaaaaaaaaaaaaaaaaaaaaaaaaaaaaaaaaaaaaagggggggcccttttaaaaagatccaattttacttacccgtgcttgcaaagtaatagtttttttttggggcacccaa

SEQ ID NO: 49331 - DNA, 619 bp, Gossypium hirsutum
  unsure (1)..(619): unsure at all n locations
  Clone ID: LIB3828-011-Q1-K6-F11
attctgtcaaccccttcaatgtgttgccgctgaatggctcatagattttccacctacgaaaacactttcaccattggaagttctcatgctgtggatccttttaccgtggtaaaaacacggttctctgacaatggaaaggttggaatgctgtgccaacgtgaatggaggcccaagtcacttgtaacattttcggcagagtatgattcaaaggccataaatgcatcccctaagatggggcttgcccttgctctcaagccttgacgggaaggtctcattttggattccatatttttaaattttgatttgaccttttccccgaacccttgggagagttgttattcacccagattattttgtatcgaaacattataaaagaaaattgttcagatactgagttgatgaatgttttcaccagaacaatggtgggagaattgaacccaaatttgccaaaattttatgaggataattgcacagcagtttttgttgctgaatgcttctaatgttcatgtcgtatgatagtagggggtgtttcccctaatgttgtattgaacttcccagatttgtggtcaacaatgccttattgaagtaaanaaaaaaaaanaaaaaaaaataaaaaggg

SEQ ID NO: 49332 - DNA, 262 bp, Gossypium hirsutum
  Clone ID: LIB3828-012-Q1-K6-A11
caacactccacctatgcatggtgtctgtgaattcacaaatctccaatagttgggtatcaatggctgtaatctaaagggtagcttacccatgtgtttctccaacctcacttcccttaaaatgttatctctctcttccaatcagttttccggaaatatatctatccttaagagcctaaaattgcttaaaaaaaaaaaaaaaaaaaaaaaaaaaaaaaaaaaaaaaagaaaaaacaaaaaaaaaaaaaacaaaaaaaacatacac

SEQ ID NO: 49333 - DNA, 634 bp, Gossypium hirsutum
  unsure (1)..(634): unsure at all n locations
  Clone ID: LIB3828-012-Q1-K6-B7
gttttgaactgaaaatattgtgattattgagattttatggtcttaagtttacattgactatatgaattccttcctttctgatttgaggtattaatgttcagatgatttagatttcattgccacaaggtatactctttctttgtattcaatcgtcttccttgtttagcaaaatgattttgtttttcaatcctctttctcctttttgtaatggttttggtttacatttcaatcctctttctccttacgagcagttatttgaatgacattcctgctattttgatgctccctcctagatgaagggttttagttttaccctttccttctctgtcagtaggattagattgataatgaagcttctttgtatatgattgtgatcaactttgaagatttcttgatgtttactgaagattctattttttaagttatattgtttgtgttcattttttttgtttatgcaaaaaaaaaattgagcttaaccgttcactttttaaagtggcactgtttatattaagtagtcaaattatggtctatgatcaatcatattgtgcancagtgttgtcaagggcggaaggtgccttccaggcactagcacccttatattgcctcaagcggaaaaaagatagccaagttaagt

SEQ ID NO: 49334 - DNA, 623 bp, Gossypium hirsutum
  Clone ID: LIB3828-012-Q1-K6-C11
aaaaatctcgcccagtttttttgtttctcctcatgcattttcattttccgttcattttagcttcttaacacgatagattttcaatatctgatatcccatttggttttttttttaattttcatttcttttggatgaaccttatttgtgttttagaaattttcttttgttttcaaccgattttaagctgaattgaggattttatttttgatatatttcataatgagcggagacaattttacggacgggatacccaaagtccgtccggttttgggtgacatttcaaatcgatcagttaaaagagggttttcgtcgatttcggaaaagttagggtttgattctcaagaagaagcagattcgcaatttgcaaagcaagttcgtataggtgtagaaacatttatcaaagagaaatctcaaaaacccgaatttgaaccaaaccctaattttttgcctacttgttgtggtgacattgacatattaaaagaggatttagtgtcggtcaatgacaaatttggtgaggctaaagaagggtttgaattgtctgatagtgatgatacgttggaagaagtcaaggtgttgcggaagtagggtgtacattgaatgagaattgtaggaatgagggtgag

SEQ ID NO: 49335 - DNA, 295 bp, Gossypium hirsutum
  Clone ID: LIB3828-012-Q1-K6-D9
ggagtatgagagggcaatcaggagattaatggtggaacctgagggacaggaaatgagagagaggatcaagttaatcaaagacaagatcaatctttgtctaaaacctggaggttcatcttacaaatctttggacaatttggttagttacatactttctatgtagtccattaagtctcttatgtaatattttaataaaacatttaaacccttatattttttagagttaaaaaaaaaaaaaaaaaaaaaaaaaaaaaaaaaaaaaaaaaaaagcgatctaaaaaaaaaaaactaaagt

SEQ ID NO: 49336 - DNA, 588 bp, Gossypium hirsutum
  Clone ID: LIB3828-012-Q1-K6-E8
caggctcaaagcaactattaattacttaataccaaaaaagaaaaggaaaatgagggcgttgttatctcagttttggtggtggtagccatggttcagttgatggttaggccaggagaggcgaccataagttgtgaagaagttattaatcttgtgagaccctgcgcttcttacattatgactgggatagggagtcccaccgttgcgtgctgtaatggtttggaccaactccggaaaagtgccacaaccaccgctgacaagcagcaagcatgtcaatgtgctaaggacgctgctgctggttttcccatgataaatgaacaagctgccgcatcgcttcctactatctgcaaaattcatattgatttcccaatctccaagaacatcaattgccaggaaatccactaagatggaagccatcaagaaattaaagaaataagggcgccgataagggagccattaattaggtgttgcaatcctaatatatttatgttccaacctcaaaagtttatttaatatgcaccttgtaagagatcatgcactgtgtatctgatcgattgaacctaataataattataattaattataataatg

SEQ ID NO: 49337 - DNA, 469 bp, Gossypium hirsutum
  Clone ID: LIB3828-013-Q1-K6-A9
gagatgctggatgaaatgattaactatgtcgcagaacttcaccggcggtagcgtttctgtcaatgaagcttgcgacagtcaacccgaggctggattttagtatacaagcgcttgttgcaaaagatattatccaatcccacagctgccccttcttagactctgggatcttctacagctgtatctatgggttatcctacattgcgtccatattaacctggacttgtgtcaagctcctctcactggcatacaggaatagcacagacgttattcatacagctctcagctctcagatcacataatggaccgaatgcacgaaagaacccaaccaagtttcactccatttattcactcacacgcataggacgatgacctacccaacgtagataaaatgacctaatgaacccatgctacctctgacaacctagacgaaactgggccaatcacctccggggatacgaaactagaactt

SEQ ID NO: 49338 - DNA, 619 bp, Gossypium hirsutum
  Clone ID: LIB3828-013-Q1-K6-C12
attaaatgagctaaacaggagggctttaaggctgattctgatctcgagataaagttgtcaaacattatcctccaacaacttgatgatgtagctggtgatgtttctggattggctgtcaaatgtcttgctccattggtgaagaaggttggtgaaccaagagttgtggaaatgaccaataaactctgtgagaaattgcttaatggcaaagatcagcatcgtgacattgcaagcatagctttgaagacgatcatttctgaaatctctactccatctcttgcacaatctgttttaatttctctgtctcctcaactaataagaggaataactggcggggcaagtttctgaacacagcttgtcaatgctttgtgatttatatcttcaattaatttcacaatgaaagtgtttcttttgaagtactgttttagtttcttatttcagttaagttccaatgtgaaagtttaattccacaaagatttatggacaataatatttgcttgttaaatttctcaaatatacttcttttacagtttcatcatgctaatcatatacagggccttgactatgggatgaactgtaaggctgatatcaattactttgtactgttgtccttgtgcaatga

SEQ ID NO: 49339 - DNA, 299 bp, Gossypium hirsutum
  Clone ID: LIB3828-013-Q1-K6-C7
cgaattcccagccaggcctcgtagaagctaggaaggcgttggcgaatccaaccacgatgcaagactaacataaagtatgactgcaacagagaggcgctctatgactgtcaagaggtgctggatgtctcatattgatgacgaggaatagccgtgagtacagatgggggaatacaatgtgagtgagatcgatccttactttctgcacctgatagtgtgggtatcttgagccataactacccagcatacattgcttgacacagtcaccgagctaaatcatgatctgtggtaaaagatgaatg

SEQ ID NO: 49340 - DNA, 635 bp, Gossypium hirsutum
  Clone ID: LIB3828-013-Q1-K6-F7
gaaaaaataatctgttaacgacagtgtatgcacttttcgatccttgaccttactaaaatcatcaattattttatttatatcaattttttttgcaatttatttatcaatttttctatttttctatgaagtcgagtattcaaaatcttcatagcagaaaaagccattttgagtatactattgaaactagaagagtcaatataagatgaatcaatctgtcaacgagtgggtacatgactgactttccactctcaactaagcttctgcaaagttcaaaaagtgttgatatttttctcaaattaggatggttacatacatcaagttcataatgcttcaactcatatgggagacgttctttctcttgttgagaaaaatcttctagatagaacttgtttacaagaatgaaaattttatcaatatcaactagcatgaaaaaatccttgagatctaaagctttagtaagagtgagaagctcgacaacattatcgttaaacctgctcttcaattcttgtaattgagtatatattgtagaaaaaatatatccactcgataataatgctccactgcaaaatcttccttcttgttgcggctatgacctgtaatctattgagcattcatatctggaaaatccaactccc

SEQ ID NO: 49341 - DNA, 470 bp, Gossypium hirsutum
  unsure (1)..(470): unsure at all n locations
  Clone ID: LIB3828-013-Q1-K6-G11
aacgcttgggtacgtgctttacttgttgctgctgttgatgtatttgatactggttttctcgacggagtcgggtctcggatccaagatgttgggtttgggtcagatattcgtggggtttgccgtcgggttgcattactacgntggcggtgtttcatagagtggttttgcatggaccttccaattagtcttaggcggttgntgcanaaccactctntgatacaccgcccaatactaaccgnaccacacgagtcagcctcccacgctggacgccgggcgcctcgatagcgcacaggtacactgcctcccgagactcgacaggctcctgatctgcacacaanatcnggcacggatgccatcagatgaccccgggccatcttcaagccattatgctctacccctgcatgnccaaacagacngaancgccctcggcctnggncgcaaataaggccttcatctccatggagcgccaa

SEQ ID NO: 49342 - DNA, 384 bp, Gossypium hirsutum
  Clone ID: LIB3828-014-Q1-K6-E8
cagacgtataataactactcgaactacttactgccaacctacgaaaaatgcatatgaatggctgtgatcccttagcgagtttgtgtcggttgacagtcgttgattagatggatcggccgcgcaacgcccctcatactatgctaaaactttattatatgtaggacgaccctgctcgttttacataaccactccgcataagtagacacctcatagcgtgccattttggtttgcaccaactgcgaataatgccgcacccaccgccgacttacagcgcgcatgtgagtgctctcatgacgctgatgatggttgttccatgattaatacacaagcacgggcgtcgttgacttctatctgcaatattgattttgtttcacctaacctgac

SEQ ID NO: 49343 - DNA, 266 bp, Gossypium hirsutum
  Clone ID: LIB3828-014-Q1-K6-G8
ctcaagcggtctacttgttttccagccatgcagtggtagggctaactatgatgaacatgtaaagaagccatgttctactcgcttaacaatcactacatcacctgtgggcgggtcaagcggaccgtgtattgcggtcgaccgtacataaagagaaatgactgtggcgtaaggctagagtgaagagcttgcgatgaaactggggttgagatggcttgcaaactgactacgatggtaagaggaatcagcttgttaataatcttagccat

SEQ ID NO: 49344 - DNA, 624 bp, Gossypium hirsutum
  Clone ID: LIB3828-019-Q1-K6-A12
tgccttggccggaaatctccagtgcttgatgaacacattctctcctctttatggcctccttcgtgataacatgggcgtatattctctattttggggacaaaatgaaactcaatctcctgaaatctatcttttttgctttgtatgtctctaataattgctccataaccgatttatctatatcagtactttggcatttctttataatagtttttgaatctccaactacttccattttgttaaaacccataaaaattcctaaaatcacttcctgtaaccctgcatgtgcctctaccgtgaatggagttactatctcggagtgaataaccgtctttaatgctaggatctcccccacctcatttcgtacaatcaggcccttagtcgatctagaagattgatggtcaaaggctgcgtcaaaatgaactgtgaccctttctctttgatcatcctgttgtatatttccatcagactgaaggattaaatgtaacgcccccacgcctgaaaccgtcgccggaggcgagcttgaggggttaccaaacataatttaccaaattaagaacttcaaatcatttgtttctacattcacagctttctagctacccgcatcacagttacaagaaaatcata

SEQ ID NO: 49345 - DNA, 634 bp, Gossypium hirsutum
  Clone ID: LIB3828-019-Q1-K6-B2
gttttggttgaggaggaaggagaagaagaagaagaaaaatagcaacaagatgtgggattgaaagagtggattgagaagaacccaaagtgctgggtcataaggttttggaaaaatggggctctgatcttcctttcctgttcaaggtactgtcagtggggaaagcgctgtcaatacaggcgcatccggataaagaattggccaaagaattgcataagatgaagcccaatctgtacaaagatgctaatcacaaacctgagatggctttggctataactgagttcagggcactttgtggcttcattactctccaggagcttaaggaagtgcttgaagatgttccggagatagaagaattggtcggcactgcatccgcgaagcaagtcatggagattgacgagcgaggtggcgatactgccgacaaagctaaaactgctctgcggtcggtttttacgcaacttatgtctgcaagcaaggagatgaccacgaaagctatatccaaacttaaaagtcggctgctcctacaaagtcagttgaggagtctgacggagaaagaagagttggtgttgcagttggaaaagcaataccccggagacataggtgtgttatcggctttcttcttcaattacgtgaaact

SEQ ID NO: 49346 - DNA, 636 bp, Gossypium hirsutum
  Clone ID: LIB3828-019-Q1-K6-B9
gccagatccaagaggggttttggtcttatgaccttctttacctttatcagcttctatctctccctgggtagttgtttaattgcagcttccttggaagactcaattgcccagcaaaaacttgataaagttcataaccttccggggcagagtttcactgtggactttgcacactatgctggttatgttactgtgaataaacactcagggagagctctcttttattggttcttcgaagctgctaaggatcctgattccaagccacttttactttggctcaatggaggacccggatgttcatcagttgcttatggtgaagcagaggaaataggtccatttcatattaggccagatggaaagaccgtttacttgaacccttactcttggaatcaagttgtcaacattttatttcttgagtctcctgttggagttggtttttcatattcaaatacttcctctgatttgcttaacaatggtgataaaagaactgccaaggattcactgacgtttttgctaaagtggcttgaacgctttcctcagtataaagaaagggatttctacattgccggagagagttatggagggcattatgttccacagctaagccaagccattgtaagatacaacaaggcaaccaat

SEQ ID NO: 49347 - DNA, 638 bp, Gossypium hirsutum
  Clone ID: LIB3828-019-Q1-K6-C2
gcgaggttaggacttgcgctggctccttgtctttccatgtcgttaacattaggaccaacatcgacttcgtgttcttcgccggcgggttcagcacgccttgcattttgacaaaaaccgacgtgccgttgaaattttcaaatcccaattcacccctgcatggacatctctccagcatagattccactgccacatcgatgagattaacatgggttagtggagataaggaacctcaacaagtacaatacggagatggaaaatcacaaacatcagaagttacaacattttcagcagctgatatgtgcagtgagtttcggcttggttccgttgtggtaccaagtccagcaaaagattttggatggcatgatcctggttacattcacactgcagtgatgtcaggattgcaaccttcaagcaccttcaactacaaatatggaagtgatgcagttggatggagtgctgaaattcaatttcggacgccacctgctggaggatcggatgaactcaaatttcttgtttttggtgatatgggaaaggctcctcttgattcttctgctgagcattacatccagccaggatcaatttcagtgattaaaggaatgaccgaagaggttgagaatggcaatgtagactccattttt

SEQ ID NO: 49348 - DNA, 639 bp, Gossypium hirsutum
  Clone ID: LIB3828-019-Q1-K6-C5
gcatttataaaatcctttgaatcagacccatgataataaagctgtaacatgccaccctaaaaactgaggtttcttgctcttaaagcaatgtcaagtgagaagcaagcagaggaagccattgtttcaagcttaaatgaaactatggagcatgaagaagaagatcaaggagataattccatttttagtgttaagagtcttctttggcatggtggttcagtttatgatgcttggttcagttgtgcttcaaatcaggtggctcaagttctattaacactaccatactctttctctcaaatgggaatgctttcagggattatcttacaagttttttatggtgttcttggtagctggactgcttatctcataagtgttttatatattgagtatagaaccagaaaagaaaaagagaatgtcagcttcaagaaccatgtcatacagtggtttgaagtgttggatggtttattaggaccttattggaaagctattggattagcgtttaactgcacttttctcctctttggttctgtcattcagcttatagcttgtgcaagcaacatatattacataaatgacaagctagataagaggacatggacatatatctttggagcttgttgtgctacaacagtgttcatccct

SEQ ID NO: 49349 - DNA, 257 bp, Gossypium hirsutum
  unsure (1)..(257): unsure at all n locations
  Clone ID: LIB3828-019-Q1-K6-C7
gnaaaattaaaacgattacaaatttcatttcatcaaatatggcaatggcatggagtagattaatcagtagttgaaatatcatatatatatatatattgttacttaataatcaagttacaagttttcggcaaccataaatatatatcatagacagagagagagagagacagtgcgatttgtaatcgtgtaaatacctcagtgtgcgtgtgtgtatatataaatatatatcaatcaattcaaagttaaaactccatatg

SEQ ID NO: 49350 - DNA, 381 bp, Gossypium hirsutum
  Clone ID: LIB3828-019-Q1-K6-D10
gcgttccgaaaaacgcaaaagactttggcggtgcaaagtccttggcacaagctgtttgaaactacctgtccgagtaggtggagacaggttctagacaagctgaggattaccttatggactacggcccttttgctaatgttcctgcaactgatcctgccaagatcactgacccagtcttcagtgtcaacgatgaggaggatgcacctaaacgtctcaagaataatccgcttagcaagaggcgtcaagcgacactgtataccacatgacttttatactatccatcatgggacctcaagctggcccggttctgccagtgcactcaaattgggatacttgcgaatacataatattggacacacacatgcatccaatgaaaccttt

SEQ ID NO: 49351 - DNA, 342 bp, Gossypium hirsutum
  Clone ID: LIB3828-019-Q1-K6-D7
cttaatcacctaggcgtatttagtgtattgatgaagctgaaggccgccatattgattttgtttgtgtatgcgttgttgtaactctattacattagtcgcagaagatagagcaggataagcaagagctctcattttcaagtgccaagctgactgatataacgaccacacaaggagcttggcctggtgaagaaacctattttttgtgctgaattttactatgagcatatttgcctgcaatggtagggtcgtccccttggtatcctatacctagcaatattgcattgtatggagtcctatgctgtattagtttgtttttaatgaatatatagttttcccatttgc

SEQ ID NO: 49352 - DNA, 638 bp, Gossypium hirsutum
  unsure (1)..(638): unsure at all n locations
  Clone ID: LIB3828-019-Q1-K6-D9
gcactggctgcttcactgctgggggtggagtctggacaagacgcagtgatacggacattactgtacctgagggctaatgaaacagtgaagccatatggagtaaccgtggcaggttttaccgatcgtatatcggaaataaggaacaggcttggcagatgtgggatgaaagatgaaggcttgatagtaccaatgcaacttggtgcagagaaccgaactaccagtaacattctatcggcggatgctgattccctttcgtattcacggacgcaggccgaaattttgaggataatatatggaactggcgacgagagtaggcctggtggatttctgcctgatggtggacgtgggagaatcgccatgggattcctcgctactcgaaactaagcgatcgcatatatataaaataagggtcatatataatctaagaaaagctttacatattggaaccactattagctgaaaataatatcagtaataaataaagacagagctgaccaaggaaattcccacttgttagtcacgggaaactcccatgaagaggtagatttaggttgttaatttatactgaagctttacaacagttaatgggctacaccttataattntatttttcacttacatttgtaacaatttactat

SEQ ID NO: 49353 - DNA, 327 bp, Gossypium hirsutum
  Clone ID: LIB3828-019-Q1-K6-E12
cggtcgcgtgggcaaaaataagaaaagatggagatacatcggatcagataaagttttctcaagtggtaggggccgagaaacaaatagtttcagggatcaaatactttctaacagttgaagggattagaataatgggaaaagcaggatgtttgattcgatagttttgattaaaccttggtcaaaatctgaagacaaacagttgattagcttctctcctattcaataagattattcaaattttcttattgaatatatagaaaaatatataatgatctatgtaataaatgaagggataagaaattctaattaactatttgctttttgatt

SEQ ID NO: 49354 - DNA, 628 bp, Gossypium hirsutum
  Clone ID: LIB3828-019-Q1-K6-F3
gggtgcatcctagacggctccgcgatgatccgatccaaagagtaagcggtgaccgtgaatgtaatcgcctgctggatgcttgttaaactacgcatggcggatattgaggcccttatgaacttggcgatgatggaggttcacagccccactaaaatagattcaaactccctacgattagactacgctaactataacgctgaggatggtagacactgctcacttccacaccacgagagagcactcaccgggaggtgcggccaatacaatgcaattgcggtagagaaaactgtgcttcgggggttctgcatggcgcaatagcggccaccccactaatcacgccccctctattgtccaggtccgagtctcactctacaagacctctacatccttgtgcaagctcactgataacacagaagaggacatggatggactgtagatataactataccatcgtggaccagtccaaaccttggtgatgataaaaccagatacagagggatcaaggcccatgatgaaggacacacatgaccagtgctcttgctttgcaggttcacggctggcatgttgaaaacccacataccaggcataggctatatcagacagtgctgcccatcctgccatggtctca

SEQ ID NO: 49355 - DNA, 648 bp, Gossypium hirsutum
  Clone ID: LIB3828-019-Q1-K6-F8
cttttgtcgaatgctacgtcaaattggatcgctgcttttgacccaaatcgaccataaagcataacaaaaaagtcgacactgagcattatttcctttcttaaaaacccaggcactctcggaacacatggagactttcttcaggccaggatcggcatcgggtgcattcctcattagtaataactttcctacatctgagattaacaaaattgggaatataatcccaggagattcttcaaatagtcattgtaatttttgggggaatctgtaatccccataatttcctgtaaaattccttagtttcggtctataataaataatcagtaggattaagagtagcctcttgtaatagtttataggcgctacgtacagaaaattcgccggataattctcccttccatacttggatgtcttcgtgctctatctcagctaacggcatctataaaattttctgagctgtttcaccctgaaagatatattgtctcccctgcccactctccagcacaatcccttttggagtagaccttttgctgcccaaatgctccaccaggtgagtgaaggtttattgccagaataacacaaacacccctttttcagatttcaggaaaaaagatagaagtgaagaaggcaattagtaaaacataaaataaa

SEQ ID NO: 49356 - DNA, 648 bp, Gossypium hirsutum
  unsure (1)..(648): unsure at all n locations
  Clone ID: LIB3828-019-Q1-K6-G1
ngattacaataccatctccaccggcaaacccaattatgcaatgtgcactgaaattcgcatgttcggccgcgccaccgtcgtccgcttcaattgcgtcactgctcttccccaatacccacaacaagaagaagaagcttagaaatggatgttcaatcagagctgaactcagcgatgacaatgacccattactccaagcagcaatcaattcagcttctcttcgttttcacgagacccatcgacaagaccctctttttattgatccttatgctgggtgcttcgtttcaacgcatactcaaatggatatggaaaccaaggcgaaacaatattgcattgcaaccaagttcattgatgataagctgcttagtactgtaaaccacatggatgggcttaaacaggttgtgcttttatcagatggaatggatactcggccatataggcttaattggccaagctctaccattatgtttgatatatcccctctaagggtattccagaaggcggctgagaagcttgatggtgtcggggctaagatccccagcgatgtttgtttcttcatgttccattggaaacccctaacattcaagaaacttcggttacaaaaggctctaattgtactcgtccgagtgtatgggctatacaggnactacc

SEQ ID NO: 49357 - DNA, 509 bp, Gossypium hirsutum
  Clone ID: LIB3828-019-Q1-K6-G4
cgctgggcatctcggcaggcaaactactttttgagcctgttcaatcagagggattgacatgttcttgtgcctcgaggtctatatcatgctgctaaaggcatgtatgaacaaatgctgcctgatgtgcgtacccactcaaaatggcatgggacgcgtgcaactttgcgtttcactgtgacactctatcgggggcacactaggcactattaatacaatctcatgttgttgataagacgtgaagtgccaccttcattcttgcttactgtcgatacatttggttccccatactcatgtgtggtggcgacagtcttcttcacagacttggatcaccactaaatcatatccaagcaatcataatgcacagtgacattgctccccgcgccttctttagcaattatactgaccatgtaactgaactaataaaggctaataacacaaacttccgacacctttcttgtcttaaaaatcataaatactctgtgcaccaatgatgcaagtattgatattac

SEQ ID NO: 49358 - DNA, 636 bp, Gossypium hirsutum
  unsure (1)..(636): unsure at all n locations
  Clone ID: LIB3828-019-Q1-K6-H7
cattgttgcactttcaagtgagacaattggaaaccctttgggtactgaaacactgatgtcgatagagagttgacagaatctacttcacagcctcttgtttatgacgggtttggaccgttagattgtgacgggatttatctttcttcctgtgggcatgctgtacatcagagttgccttgatcgctatttatcatcactgaaggaaagatttgcccgaaggagtttctttgagggggcacatattgtggatcccaatcagggagagtttctgtgtcctgtgtgtcgcagactagcaaattctgtcttgcctgtagtgaatgggacttcccgaaaggctggaaggcagcctatgacttcaactgttgatcaagtgcctcctttaggttcttcatctgcagcgaacaaagaaacatgttctcttctgcttcagcaaggtttatgtcttctaaaaactgccgccaatgtggttgggagacctgatttctttgaaggtctttcttttcaaagaaaagaaagtttaagtcagaatctggagcctatatcctgtgttctgtccaaaatgtatttttcaaaaatgcaggatagattcttaggatctccaagttaagccacccataattntatgggatactcttaa

SEQ ID NO: 49359 - DNA, 611 bp, Gossypium hirsutum
  Clone ID: LIB3828-019-Q1-K6-H8
ggcactcaatagcggattctaggcaatgcatagtttgccgttctatagcctttctcctgacctaaacattgaattgtcttcttagccatgatttcatatttaaatgtttgacattcatttcctattaatatctggacgtggatacgaggagataatccttcaaggacctttcaaatacacttaaaaatagtcctttccttttgatcaccaattcatttttccttcaaataaattgatgtgtcctaccatcgaatgaatttggtattgttcaagtttctatatactcgggaaacctaaccgttccatctaaggaccgattatctcgtattttttagaaaagaaaacgtgaatgttaacaggactttatttcttttttgcttggggttaccgagaaaatatggcgtgtgttctttaatcttgtaacatcgtcttcttgcagcgctcaaggtacgatcttgaagaagagtcgagaaatgtgcaaaagaaacgtactggagccacatccagagccgctacaacagatgctcaaagttattcagtagatagaagtaggcaacattggagggaggtcagaagatcgtacggcttctcaacctccaaagcatccgaaa

SEQ ID NO: 49360 - DNA, 656 bp, Gossypium hirsutum
  Clone ID: LIB3828-020-Q1-K6-B10
cggacgcgtgggcggacgcgtgggcggacgcgtggggtgaggaggcgtaatgactggaggaaatgggtaccttatcaggtttccacggtgccgggatcactgtctcctggtggatcaagtgctgaaatgctggcaagttcttttcagcagattacagtaagggaagagtctactaaccaaagtggagcaggtaatgtgaaccctcatgctgaggatgctttaggaagacatccatctgatggccactctcatctctcaaatggggacggttctgaaggcacgtgtctgaactaaaactgatcaatcttgctgccacgaaagcacgatctggtaaggaagttgtgctttatttttttatatgagtgaagtgaatgatgcaccaaaaagaatgggacacctttttctttaattttcgccatcaccttatgtggttttgagggttgattggtgaggcgattggaggcaaacaataagaaagatacataattatctttgaaagatagagaaggagaagaaacattggggtaaaaaagaggaaaaaaagtaaagggttagttttgactgtggaggaataatgaggccttttggttgtatagttttgctattattatccatggacaattctttcttttcttttataatttgagtaggaaggt

SEQ ID NO: 49361 - DNA, 634 bp, Gossypium hirsutum
  unsure (1)..(634): unsure at all n locations
  Clone ID: LIB3828-020-Q1-K6-C4
ccanaatcagcagttgctaaactctttgcatctgcaaanaggaaggacgcatcttatggtgctctttgccactgcttgcagctattgccttctgaaggacaagttcgggcaaccgcaattgaggtgcagaatcttctggtttctggtagaaagaaagaggctctacagcttgcacaagagggtcagttgtggggacctgcgcttgttctcgcgtcacaacttggtgaacagttctacattgatactattaagcaaatggcacttcatcagctggtagcagggtctcctttacggacattatgcctgctaattgcagggcaaccggcagatgttttttccacaggctccacaattgatggcatggatttgtctcaacagcatgcagaggtaaggactaatttaatgcttgatgattgggaagagaatttggccgtaataactgcaaatagaaccaaagatgatgagcttgtaattatccatcttggagattgcctgtggaaggaaaggagtgagataacggcagcacacgtctgttatttagttgcggaagcaaactttgagtcatattcaggtagtgctagactttgtcttattggagcagaccacttggaagttccccgaacctatgctagtc

SEQ ID NO: 49362 - DNA, 619 bp, Gossypium hirsutum
  Clone ID: LIB3828-020-Q1-K6-C6
cccagcgtccgcccacgcgtccggtttggatacaaggcagttcatgtaccagaagggccaacattcggtgccccgttgggaaatggccaaattaagaacggggctgactctagccttaccgataatagccaacagactgacacttctactgatgctgacactgactataaaaaccagcttcatggagttcaacatgaagctgtaatggtgaatacggtggatcaatccaagtcaaaaagtggttatcaaaagacacttcgcaagcttgctcagaatcgaaaagctgcaagaaagagtagattgaggaaaaaagcttatgtccagcagcttgagagtagtcaactcaggctttcagaaatagagcaagagcttcaaaaggcacggcagcagggtatttttatcacatctggactttctggggaccatggccatacagttgcgggaaatgctgctctgggatttgacatggaatatggtcgctggcttgatgaacatcaacgactgataaatgacttaagattagctgtaaattctcatatgggagataatgaattgtgcattcttgttggggtgtcatggcacattatgatgaggtttacaggctaaaaagcattggtgc

SEQ ID NO: 49363 - DNA, 629 bp, Gossypium hirsutum
  Clone ID: LIB3828-020-Q1-K6-D3
ggagagcaggaagaatagaatacagttgaatctgctaaagaaattcctaaatttgtagaatttttcaaggatcaaatcaatatggctgaagtcaagtatcctttggagcactttaagacatttaatgaatttttcgtgagagagctaaaacctggagcaagaacaatagcttccattgagcgtgatgatgttgcagtatgtgctgctgattgtcggttgatggcttttaagtcagtagaagatagtctgcggttttggatcaagggtcgaaagttttcaattcaaggtcttctggggaaagaagtctgttcaaatgcttttattgatggaagtttggtgatattcaggttggccccacaggactatcataggtttcatcttccagtttctggcaccattggaaaatttgtaaatattcctggatgcttatacacagttaatcccattgctgtcaatagcaaatattgtaatgttttcactgagaataaacgagtggtgaccattatttctactgcagagtttggaaaggtggcatttgttgcaattggagctactatggttggtagcattacttttgtgaagaaggaagtgactttgtcaaaaaggagaggagtttggatatttctcat

SEQ ID NO: 49364 - DNA, 638 bp, Gossypium hirsutum
  Clone ID: LIB3828-020-Q1-K6-D7
gtcttgattgttgtcactctgagattgacgtcttgcaccatatcggacaatcacttttgaaacaaatgaaatcagtaatcacccttgttagacgtattagtatttaagtttgaaagtagacatgattgtctagtcttgattgttgtcactctgagattgacgtcttgcaccatatcggacaatcacttttgaaacaaatgaaatcagtaatcacccttgttagacgtgtaactatgtgcaacgctaatattagagtataaggctcctgaaaaacatcatcgactgttattttctgctaacagactcgtatgtggcttaacgaagtccacctatgttcgctactactcttacaataaatacaagagtggttgttattatgtttttatttctcaggttggagttggacctgtgttttacttaagaattgctctaaaacacaaataagtggttgctttgatacagggatctctttcatcaacctttcctattgagaaccagaacaacctcgtgacgatgaggacattgaagaatcatctagataggacaaagagccttccattcgtgaagcgtattgcggatttccatttgctactgtttctagccatgtctcatggccttggttccgatgttctagcact

SEQ ID NO: 49365 - DNA, 631 bp, Gossypium hirsutum
  Clone ID: LIB3828-020-Q1-K6-F12
tgattttcctttgccccttaaaccctaacaacaagcgtctaaggaattgcaaagtttagaaacttggaaggtcataggatacgatttaaaatgcgaccgttagagacactgccgccaacggaaaccctagaaatcgagaacggtttgtctctcgttccgcgcgtgaaactcaatctcacaatccacccttctctcccctcggtttcgaaaccgatcgacgaatggcagctcaagcgagccctgatagatttcctcaagacctcgctctccgtctccgttaccgttcccgaagaagacctccagatcaaacgactcaaagacctcaagaaacggaagcgagacgagccggtcgcccacggtgctctcttcattcgtgacattaggtttttgagcagtaagaagaaaattgaagaggttgataacgaagaagaggatgtgaaggaattggaaaagaaatttttggaatggagaagctatgtagcggagaaaatggatgggattgagctcaatcttgaaggagttaagtataatcttagtgttgagattccagcttcggatgattttggaagatgaggaaagattgggaggagtcgtatgcatttcgaaaccgatgttattcgaggggaggaag

SEQ ID NO: 49366 - DNA, 634 bp, Gossypium hirsutum
  Clone ID: LIB3828-020-Q1-K6-F5
cggccgcgtggggtttggctgcacttcgatttttgttaagttgagcttaaattttattagtttttttggctcattgagcttatattttctttttatacatgcaaaatggaactggatttaattgcagttaaaaatgcgcaagttctgtgcctgtgccgctgatctttttgtttattttgtggcactaattcatagattagaaatcatgtcttctcggtaagggaacgttggtttggtactaatattctcttcttcttttttttgtcttgtatctatttattattatttttattttttgcatttgtatcattttacgtgacagtggctgtcctaaggcataccacccagcctgtatcaaaagggatgaggcattctttaaatccaaggcaaaatggaactgcggtatgtttggattaattatttatcacttttagttcgatttaattaatataagtgctggggagagttgaagcatgaattctactgtctaatatatcgtaaaatatgaaggtataatgtgtctctgcccttttcagaccttattttgttgcaagataattcatagttaacaactcaaaagataagtaatgcgcatccaatattattatagcatttttattttttgatattatat

SEQ ID NO: 49367 - DNA, 622 bp, Gossypium hirsutum
  Clone ID: LIB3828-020-Q1-K6-F6
gagtagttttggtggtttgctcccaaattgtcgagtggtgtcccacaaactcaacttaactgtttccttttggagaccccatccatatggatggttaaaattcaatatttgtggtgtagctaaagaggataaagccggctgtggaggaattttgagagatttggaggggatggcaagagggatattctttggtgctgcaggtacaaatgttgctgaggaagctgagattgaagcagtgaaaatttctctcgaagtgtttgaatcaacaatctcgaagtgttctaattcactggtaattgaagtaggctctacggtggtgttttttggtgtatcaacaaggggctgagaccttggtcgcttcagacaattttttcagaaattgaatcaactaagctcaaggctggatccattgtcttctctttggtggataggaatgaaaacgacctggcgttctctttggctttggctggggtaaatcagactcaattgtttaaagcttggtggtgatttttgctttgtttagtactttaatactgctggaactatgctttaatttttgctgtatttttatttggatactactctgctttgttaccattaacagagcagtgtgaatgttgcg

SEQ ID NO: 49368 - DNA, 637 bp, Gossypium hirsutum
  unsure (1)..(637): unsure at all n locations
  Clone ID: LIB3828-020-Q1-K6-F9
ggnaactggatcggcaaaagaagtaatagctttggcgatgattcggatactgcaatatctgtgcatgataacagagcttcctcctcatcatcacccaattggggatccagctcccaacattcccattctgatggtagaactgtagcatcaagcagtgtcngaaaaagaagtagtatcttctcctggtgatgagcctgaacctgctgatgctgagctagctgagaatctagatgagtcccttgtagagtatggaagtgacataaattacatctactcccgatatggaaactataccatagagcaacaccaagacaaggaaattaaagaaatcctcaactgtgatggggcaaatccaaatgtttatattctttcatccgggcgatggagtgtcaaccaagaggctcaacaaaccaaaaggaaaccgaccattgatcaagaattcgagcagtacttttcgatgcttatgctatagaggagggagtacttaaatccaaacatgtagttcatacattgtgtaagtggcttgacattaaagtcaaaatgtaaaaattagcttctttttgggattgtcttgaggtaactctaactntgtcttttcccattctatcttcaagtcaacttaagntgattgtatata

SEQ ID NO: 49369 - DNA, 640 bp, Gossypium hirsutum
  unsure (1)..(640): unsure at all n locations
  Clone ID: LIB3828-020-Q1-K6-G11
gtttttctttttggtagtngaaagataattgccctaataaattttgtctggctagtcttggttaataaaaaaaaaaaaaaaaaaaaaaaaaaaaaaaaaaaaaaaaaaaaaaaaaaaaaaaaaaaaaaaaaaaaaaaaaaaaaaaaaaaaaaaaaaaaaaaaaaaaaaaaaaaaaaaaaaaaaaaaaaaaaaaaaaaaaaaaaaaaaaaaaaaaaaaaaaaggggggggccccttttggggaaccccaatttcccccccccggccggccaaaataaagttttttttttggggcccccaaattaaattcccgggccccgtttttaccacccggggcgggggaaacccccggggtccccccactttatccccttggaaccacccccccttttcccagggggggtaaatccaaaagggccccccccgttcccccttcccaaaatttgcccccccctaatgggaaaggggcccccccccttacggggcctttaaccccggggggggggggggttcccccccgggggcccctttcctttggcaggccccttagccccctccctttggtttttttcccttttttttttcccccgttcggggggttcccccggaaaatttttaaaggggggcccccttggggggccc

SEQ ID NO: 49370 - DNA, 410 bp, Gossypium hirsutum
  Clone ID: LIB3828-020-Q1-K6-H3
cattaagatatgcattgatggcaccaactgtaatttatgtgacgcaggtgttacatctaattgacagggaaagcctggaggtgaccaaactcatcacacgtggtaggtattcctgactttatacacttgagtgtttacagaaagagcgccgtgcctgtatgccttacgaaactggggaatgagccggattggttaatgggactacccctggctggaaaaattaacgacgctgatatgagtggtacccccaacatgggcctgtgtcatttgcctcgtccttagtaaccgaatctttcaaataattctcgtacattcatatggagcatacacagcctaccccatcagtcaataagtgaacggctaactagagagctctcactaacagaattgaaggctccacatccataaaa

SEQ ID NO: 49371 - DNA, 513 bp, Gossypium hirsutum
  unsure (1)..(513): unsure at all n locations
  Clone ID: LIB3828-020-Q1-K6-H7
naaaaaaaaaaaaaaaaaaaaaaaaaaaaaaaaaaaaaaaaaaaaaaaaaaaaaaaaaaaaaaaaaaaaaaaaaaaaaaaaaaaaaaaaaaaaggggggcccgttttaaaggggcccggcgcttttgtgacgctccaattttacgtccctcgggcttgctatggggttaacctttatttatatggccccctccgttggcatttccactgggcccgcccttgtaaaacccctggcgttggccaaacccttggcggctcccatacttttttccccttgtaaccacttggcctttttggccagttgggcccttcccatagacggcccccaccaattggccctcccgaactggcgcctgggcctgctccctgatggggcccctccttgtcgggggcctttaagttcccccgctttgtggcctctcccttggcgagccccctaactccgcctccctttggttcctgccctttttttttgcttccttcccttggtttccccgttcggcggttttccggg

SEQ ID NO: 49372 - DNA, 625 bp, Gossypium hirsutum
  Clone ID: LIB3828-020-Q1-K6-H8
gggaaggaccttttatagttactaatgtctctcatggtgcagtggacataaaagctccaaacaagaccaaaatctacaagattaatggtgtcattgtttaagacctttctatgaaggttttcaggaacatgatgttgagaccgctaatcttgagatccttatctacgggacttgataggggcattttctctggccaaagacgttaaagaaaatcacttacggagaggcaactccgaattttatttttgtttttcgctttgctttcatttcctttttcccttctttatatttatttattattgttgattttatttttttatttcctttttaatttatttttattttaattttcgactagagttggggcacggctctcctggtgtcagggtcttgtcgaactttgatttttttgatcgtttgtccttccatcgatgtcaatggttgttccttaactctagtcgaaaaataaaatataaaaataaattagaaaggaaataaaaataaataaaatcaaagtgaaatgaaagagaaatattgaaatggaaacgaagcaaaaaacgaaaataaaatctgaagttctcagataggtgcttttctttaatgtctttggctagacggaatgccc

SEQ ID NO: 49373 - DNA, 513 bp, Gossypium hirsutum
  Clone ID: LIB3828-021-Q1-K6-A4
cactatcactgctgcacatccatgtaaagctcctaggtttcagcctccactccatcactccttggcccaataacccctccattttctacctcaacggcaaacgaatctcacgcgttgaaatccttggtgtagtcacttcccgtgactataaacccaacaaattccttagattcaccctcgacgacggcacccattctattacttgcattctctggcttaaccacctcacttcccctttcttcgcttcccgtcaacccgctacgcttcgagttatttctgatttggctaaatgcttcgcggatgatatccagtttgggaaagtagctagagttcgtgggagggttagtagctatagaggtgatttgcaggtcactgtttctgatgttgttattgaaagggatcctgatgctgagactttgcatcgccttgattgtattagtttgggtcgccggtgttacttcggttagctccggccaagattaaaagcaaattaattgaattgggcagttttgt

SEQ ID NO: 49374 - DNA, 637 bp, Gossypium hirsutum
  unsure (1)..(637): unsure at all n locations
  Clone ID: LIB3828-021-Q1-K6-C12
gtcgacatcaaagcctcattgctcaatcagnatcaccttaaacaaacacatccagcaaaccctcttatcgcctcacaaaacaggaaacaccctccagaacgccaccgttttagaccccgcctatgccggttacagtttcgaccgttgcagaaaagttgacctgaaattctctgaaagaagaacaatcgaatggaaacctaaacccaataaattcttgtttgccatttgcttgtcgggtcaaatgagtaaccatctgatttgtttggaaaaacacatgttcttcgcggctgttctaaatcgggcattggtgattcccagttcgaaattcgattatcagtacaatcgagttttggataccgagcacattaacgattgtgttgggaaaaaagctgttatcccattcgaagacttcatggaaatgaagaagaatcacgctcacattgataggttcatttgctatttctccagcccgcatccgtgttacgtggacgaagagcatttgaagaagttgaggtcattaggaatttcgatggggaaattagagagtgcttggaagagtgaggatattaagaagccgagtcaaaaaacgattaaggatctggaagagagtttgcttcggatgatgatgtgatagcaa

SEQ ID NO: 49375 - DNA, 638 bp, Gossypium hirsutum
  unsure (1)..(638): unsure at all n locations
  Clone ID: LIB3828-021-Q1-K6-C3
nganagggctacatatttctgatgaagctgtcaagnacattcgctccttggttatggaaagatatgggtcccggtttaccccagaaaatgcatgtaagtattataagaaggtcaagaatgctcaagaagcacatgaagcgattagacccaccaatattcggaggttaccatctatgcttgttggagcacttgatgaagattcattgaagttatacactcttatttggtcaagaacaatggcatgtcaaatggaaccttcaatcctagagcagatacaacttgaaactgggaattgtgatgagtccatcattttccgatcttcatgctcaagagtagagttccttggttatcagtctgcttatcaggatgtggaatctggaacaatcagatttaaggataatgaagccagccataatgctgaggcttttggcattcttagttccttgaagaagggggatcaattatgtattggtgaagtagaaatcaagcagcatcatactcaggcaccaccacggtattctgaaggatctttggttaagaaactggaggagcttggaattggtagaccttcgacatatgcctcaacattgaaagttttacaggatagaaattatgtgacagtaaaaagtcgtgtactg

SEQ ID NO: 49376 - DNA, 632 bp, Gossypium hirsutum
  unsure (1)..(632): unsure at all n locations
  Clone ID: LIB3828-021-Q1-K6-D12
gctccgctcatcgattcctctaaacgatctctgaacccctgctcaagctttgacgacaacagaaagaacaggattcgacgacgaggtattttttcccttttttaattccttatattatttcctttacaaatcacgaatcaaaataaacattgagaagaaaaaaaagaaaacataaaagaataccagaaatgaaaaatgaatcaccttctntgaaaaactcagtttttttttgcttttgattgatttttttatacaatccctatccaaaaaacttacaaaggctcttccttttgttttatagccaaaataaaatcaaaaataaaatatacaatcgtcctttttctttttgctgtgttgtttttgtttgtttgtttgctgcgcaagtacggtcgtacgatgacgtggcgcggtgcgacacgtaaaggagcagctcggaggcgcggtacgtggcagtggcgcacgtgcgaaggcaaagtctgtgttcgattgcggcgcgatagcttgcttcagaaattgctagggttttctgattctttctttgttttgggctcattgggctaaagttttttttaggctagtgggctaggttaaatttggatttagatttgggccgtgttgatttggtctgtatg

SEQ ID NO: 49377 - DNA, 551 bp, Gossypium hirsutum
  Clone ID: LIB3828-021-Q1-K6-D7
gtgagaacaagcatgaaacagttgcggagaacactgaattcggttgttatctcttcttattgtgcactagccatggataatccccctcggaacaaaagaaggaaaaaggttctttcatctcaactatttccgaaagcttccatgggcataggtttcaaataaaagctataagagtttcatggtcaagcatccaactctcagattcaacttggaaacttttacaatcttattttgtatgtatatatatgttttaaagtcatacggcatgtacctaaataggtaggcttgttgcgtaagtaagttttgacacttttgataagtgacatgtaatgttatattggttgagctttaacttttgattactagttagttatatttgattatgcgagtttgaatctatgcaaattacttggtttagtaatgaaaaaaacaaaaaaaaccacttgagaggggtagagaaagatgtaaaaaggcagctccattatgtctgtaacggaaaaaaccatattatatatgtccgtaacgagaaaatatttagtagcgactaattt

SEQ ID NO: 49378 - DNA, 641 bp, Gossypium hirsutum
  Clone ID: LIB3828-021-Q1-K6-D9
actggatcttcatttgaataagcagaatgcttcttctacgggaagtttttcatcatcacccttgcgccaatcttcaggctcatctcaggcatctaattcatctcatgcacagaacaattattcccccatattcttgcagtgggttgattgtgtttcacagttgttaaggatttatccatttgctttcgaattctcctcaaatttcctggtggatttcttggattgtgtgctttcttgccgttttggaaatttcttgtgtaacagtgagaaggagagacaaatatgtggtgtagatgaaagttgtggatgcttgtgggcctatttggctgatatgcgttcttcggaggggaggtcccatgcccattataaccttttctatgatacattgaaacacaacgggccacttttacctccagcagctgctttagccccaacactttggccccaattccatcttcgttgggcatgtcctttcgaatcccaagctggtgagcttgaggctgaatgcaggaacatggctataaagttttccgaactgcaaaaggctaaagaagtggctgaaatgaaagctaaagaatacttggcggccatggaaatattgaatgtggatctacaaaatgagaaacaggtcagcagctcag

SEQ ID NO: 49379 - DNA, 606 bp, Gossypium hirsutum
  Clone ID: LIB3828-021-Q1-K6-E1
tggcatcccacgtcagccctagatgttcttgaacgacagcgctactaataacaacagcggtagcacaaatggtttcagtctaataaaaaacgtctcccagctgctctggggcgcatccctccctcctggaattctaatctcaaccgtccgtacagcatggacttccacgtggcagatcatgatgtcccaactggctccctccgatccctccggcgcttacaccaggcctccctcaaaattccgcctcaacccaaccgccgcaaccaccaaacttcacctctacgtgggcctcccctgtccatgggcccaccggaccctaatcgtccgtgccctcaagggcctcgaagaagccgtccccgtctccgtcgcaggccacggtctcgacggctcttgggaattcaaagatgtccccgacaaggacaatgatatcctggttcctaccatggatagggtaaataggtgccggaatttgaaggaagtttataggctaagaaaaggcgggtatgatgggcgggccacggtgccaatgctgtgggatgtagagaagaaagaagtagtttgcaatgagagctatgatattattgagttcttcaattcgggtctaaa

SEQ ID NO: 49380 - DNA, 579 bp, Gossypium hirsutum
  unsure (1)..(579): unsure at all n locations
  Clone ID: LIB3828-021-Q1-K6-E2
gtctttgcgcgtccaagnaagtccattgagaacattgaaagataggaataagaaacagacacgctatggaaaaaggatggcgattttatgatgtttctttccttgcggagattatattcataggtaaaaacataaacatactaaaaacaaaaaaacttgtgtccaccactatagaggaatccaagaccacttatctcttgctcaacgaccgcatacactccaatatctgtgtcacaataactacagctcactcgcgccaagaactacaacctgactactggaaaaaccctgaagaacccaacttactcgacttgcataacctcccctttgcacatcttgatatacaaaaagaatccaccgaccgaaagacattgctaaaatgaacacaatcttagagctgatcgacacgcacacctggaacggccaattaagatcgatatcatctgaaattaccagcatcctaaccggtaactttaccaatacattagcgacactaaatgtgcctttgttacactctccattgcatcaatccttcggattgactggtgaagatgcaatgacttgcctccctccaacatt

SEQ ID NO: 49381 - DNA, 650 bp, Gossypium hirsutum
  unsure (1)..(650): unsure at all n locations
  Clone ID: LIB3828-021-Q1-K6-E4
atctgaaacctctggatttcatggnagactaccagttgacgaagcatgaatgttccagtctggggcgtggaaatagtgaatgcagcacaaccgaatcgtctgatgatattgagaaacaagagcttgaggaagtttcttatgaagaaggaaccttgttctttgatacagaggagtattttactgaacctgctgttagttgtggatctgtaagaggggcaatggatcatgcagatgatctccaagaaactaaaaaacaattggataatgtggaaaagattcattctgataacgaagattgtgattccagatatcctcaaattgagagacgaaaaaaacttcctgatccagttgaagaagtgaaaggggttagcctttggtctatgatcaaagacaatgtgggaaaggatctcacacgagtatgtctccctgtttactttaatgaaccaatatcatcccttcagaaatgttttgaggacctagaatattcatatcttttggaccgagcatacaagtacggaaaagaaggtaacagtctccaacggattcttaacgttgctgcatttgctgtttctgggtatgcttcctctgaaggccgacactgtaagcccttcaatccattactaggagnaacttatgaagcagactatcct

SEQ ID NO: 49382 - DNA, 643 bp, Gossypium hirsutum
  Clone ID: LIB3828-021-Q1-K6-F4
aaacaggaggtatgaactgtcaagattgtggtaaccaagctaagaaagatgtgcgcatttgagatgccggacctgttgcaagagccgagggtttcagtgccaaactcacgttaagagtacatgggttcctgctgctaaaagcgagagaggcagcaacaactcgcagctttgcaacaaacacaacagcagcagcaaaatcaacaacaagaacaccaacaactgtttagaggagacaatcccaaaaggcagagagataatcatggttctccctctcttgcctgcactcgtttatcccccaccacgtcagggttggaactgggccaattccctcccgaagttagttctccagcagtgttccgctgtgtaaaagtaagcgctatggacgacgtagagggggagtttgcatatcaaacggctgtaaacatcgcaggtcatgtattcaagggaattctctacgatcgaggccctgaaagtcgttatacttgtggaggtgaaagctctcagcaactcaatctcatcacaactgcttctactactgcagcagctgctacaacgacaacagcagctacttccagcaatccaggcacaagtatgattgacccttccctttatccagctccacttaatgctttcattgccggta

SEQ ID NO: 49383 - DNA, 412 bp, Gossypium hirsutum
  Clone ID: LIB3828-021-Q1-K6-F7
ggcctcaactggtacactctaaattgaattttcaggtactggggtattctgtaggtttaccatttttatgcccttgaagaaatattccaaattttaaactagcttagggaactttcatcagtggtatgttttacctacttcttgttagggaaagagatcgatgaaccaaagtttcaactcttgagccatagatatagctaaatttttattaatatctagtgttaaacatatacatatacatatagcttgatgtagaaaaagaaaaaagaataaaactgatagataatatatacatatgtatatatactatattatatttaatttgctgtaggaataacagtgaaatattgtatagaaatccttcttgttgtagaatcttattattaatgatgatgcgcagttttaggaatat

SEQ ID NO: 49384 - DNA, 628 bp, Gossypium hirsutum
  Clone ID: LIB3828-021-Q1-K6-H12
aaaaaataaggtggcttgaaagaaataattttctttctattcattatttggtagagttgaaaaatgagaggaaagaaaatgaaatttttgaaaaatgcataattttaaactaatgcatatccctctctcatcttctctccttttatttgtgtttatgcaataggacggaaaatagcctatttttatactttttcactcaaccaagcacactctaagggtcttgaatgttgttgccctaatgcacttcttattacttggattcattatgattgtttctatgatcctcaatctatctgcgaaggaaatatcctctcttttttttttcttttacaggggatggaagagttaagatgccactaagtccaactgttcatggtagtcaacagacaccatttggcttgggacatagtcttggcagcagtatccagctgactgagtcttccttgtacccatcaaccagcagtgtttcacatagttattcctcaagtagcttggggcagatgcaatttgacaatagtagcgtgggttcattctggtcccctcacagaagtcagatgcgactgcaaagtaggagatcacagtcacgagaagaccttaactcctcactagctgagacacaaatggtgaa

SEQ ID NO: 49385 - DNA, 583 bp, Gossypium hirsutum
  unsure (1)..(583): unsure at all n locations
  Clone ID: LIB3828-021-Q1-K6-H2
atacgcttngaaggttgtaggcagactgtggtcaagaagagagagagaaagtttctattacccttgtccatgtgatccgttttaagcgctgaaagtagtttgattcatcatttgagctgcccgtggatggcttattacctgttttaacaaatggggcgatttcagacattgacaaaattgatcttggtcagtaagactgttgcctaccttcttttgaagtagatggtacaacttattgttcatttttcttcacaaaaccatacttgaagcccatggtcatttgccatacactttgaacctgtaacatttgacagttctgtatacaacaaaaagaacaatatgcctataaaatgaaagcaagagagagagggaacattgaagaagaaaagaaaccattttcagattgaattggcaagggaggttgaaagaaaatttgacattcttttaagtggttgtatgaagcaatatgcttcagttttcttgagggttgaccttgttaccgagtattaattagtataaattcataaccttgttgatttttcttctactacactctcatttgaatacactgtntttagtttat

SEQ ID NO: 49386 - DNA, 595 bp, Gossypium hirsutum
  Clone ID: LIB3828-021-Q1-K6-H5
ctcaactggaccaggctgcgtcgggtgagcatcgtgagcacaatattgatattattttcattgtgctgaacggctgaacccaagacctcttcgtacaagagttcactttgcaattctaataactcaccaacctaccaacttttttttttttcttttttatattatatatttataataagtttataatatttataataacaaattactacctttaatcttaatatatactctaaacctcaaatataaaatttgagcttgaaattaaacttgaaaaaaaaaaaaaaaaaaaaaaaaaaaaaaaaaaaaaaaaaaaaaaaaaaaaaaaaaaaaaaaaaaaaaaaaaaaaaaaaaaaaaaaaaaaaaaaaaaaaaaaaaaaaaaaggggggggccgtttttaaaggatcaaagtttacttcccggggcttggaaggtaatagtttttttttggggcccccaaatttaatttactgggccggggtttaaaaacggggggatgggaaaaacccgggggtacccaaattaattggcttggaagaaaatccccttttcccaagttgggttaataccaaaagggcccgccccgatggcctttcc

SEQ ID NO: 49387 - DNA, 636 bp, Gossypium hirsutum
  Clone ID: LIB3828-022-Q1-K6-A11
ctcaatccaaacatctcaagctccccccgggacctactggttggcctattgttggtaatcttttccaggttgctcgctccggcaagcctttctttcaatacgtcgacgatcttcgccgtaaatatgggcccattttcactctcaggatggggactcgaacgataattatacttagcgacgccatgctttgccatgaagctttcatcgaaaaggtgctatcttcgccagcagaccccgagaaaatcccactcgaaacatctttagttgcaacaagttcaccgtaaatagcgccgtttacggccttgagtggcggtctctaagacgaaacttggttcaaaatatgctaagctcaagtaggattaaagagtttcacagtattagaagtcaagctatggataaactcatagatcgtcttcgagccgaagctaaggccaatggcggcgttgtttcggtgttgaaaaatgctcgtttcgctgtgttttgtatactcttaatgatgtgttttgggattgaaatggatgaagaaactattgagaaaatggatctaataacgaaaaatgttctgattacattagatccaagaatcgatgattttcttcccattttaagacccttttttggcaagcaacgcaagcg

SEQ ID NO: 49388 - DNA, 637 bp, Gossypium hirsutum
  Clone ID: LIB3828-022-Q1-K6-B3
attttggtagaattcttttgttgattgcgtgggagtgaaatccgaagtggtttccgatggaaatataagatcataatttggactttgattatcgctcaatccaggtttttcttgcttcaccttattctttttaaaatatttctttttttacttcttttgattcgtcgcaaaccttagtttttggttaggctagttttgagggatttaaagaaaaagaataaaaacgaatttgagattaggaaatttgatattgattttattttcccgggtgtatacagaagtcagttacgccgccgtttttgttttcccttttttggggttttcagtttgatgttttggtattttaatgcaagaaacactctgtgaaatttttgatgccttgttttagtatgccatccaaaatcgagggtttttcttgttagattagatcctctgctaaattacccccttttttttgttgttttaattttgattttccatttttttattaaaaaaaagagagagagagagaagacaagtgaggaggaaattttttgggtttgcattttaagaaaggtcgttagggtttttggttagaattaccgtagatattgaggaaagaaagatttgggagttggttgtttgtagaacaatggcg

SEQ ID NO: 49389 - DNA, 636 bp, Gossypium hirsutum
  Clone ID: LIB3828-022-Q1-K6-B9
cggacgcgtgggggagatcactgcagtagcagaaaatgaactaaaaaagcaaatcagcaactgaagttattagatctcttactgctcagttgaaggaggtgactgataaacttccagcaggcaagagtgcgctccacaattccagttctattgccacaaacacccagcgcatgcactcggataatagccatgcgaccagcataaggcttccacgaagtgaagtaagttgtaatctagacaacatctccatgtctcatggaaccaaaggacaaaccgaaaagtcggagacaataatacaagatgaaccaggagtgtacttaactttgtcacccttgcctaatggcaatcatgaactcaagcgtgttcgctttagtcggaaacatttcacagaagaacaagcagaaaactggtgggctgaacatggggataaagtatgcgaacgccataatatccgaaatacatgttagtcgtgaagcttggacaccattagattttctaagaacactggattgggtactgccatcgccattttacttgaagcttatatcaaacattttacttgtaactgttgatttcttctccaaattacgtggaggagcttatatcaaggatcatgtcagaaattatcaggtagtg

SEQ ID NO: 49390 - DNA, 618 bp, Gossypium hirsutum
  Clone ID: LIB3828-022-Q1-K6-C11
ctaatggcaactcgcgccttttcaaaatcgaagttcccaattttaacgtcaatcctccttcaaaacctcacgaaaacagtattacgaggtccccgtttcttgtaaaacctcaaattccacctgtacaacccgatatccataaacccatttcagggtttaagctatatcatgatgggagaccgagaggtcccctttggaaaggcaaaaagctgatagggaaagaagccctttttgtaatattgggtttaaagagatttaaggatgatgaagataaagttctgaaatttatcaaaacccatgttttaaggctattgaagatggatttgattgctgttctttcagagcttgaacgtcaggaggagacttctctggctgtaaaggtttttgaggtgattcaaaagcaagactggtataaacctgacgtctatttgtataaggacttgattattgcattagcgaaatgcaggaaaatggatgaagcaatgaagttatgggaatctatgagaaaggaaaatctgttccctgattctcagacatacaccgagatcattaggggcttcctgagggatggttctcctgccgatgcaatgaacatatatgaggatatgataaaatctc

SEQ ID NO: 49391 - DNA, 631 bp, Gossypium hirsutum
  unsure (1)..(631): unsure at all n locations
  Clone ID: LIB3828-022-Q1-K6-D10
gtgaaacaacttagcaaaanactttatttgattagcaaaataatatgaacaccaagcttaactcttaaatattgtaatctagagtttaaatgacccatgtatcctttgaacaccaagcttgttattgaggctaacccatccaagtctttcacctccaatggtgatccacaaaatcacttgcaaccttctccaagttaaggaatttcttcgagctagcaaagtgactcaaggtcataatcaaacgttttcccttgcttctatctctctgtagcaaaaacctccctagagagaacagtactctctaggcttgcatgacatatggcataggctaaggaagttagtgtatttgcaaaaagcgaagtacttgatttttttttctttattgtcaaatggcaatctctgactgatgatttcagtaattttttcctaatcgtttcctccaatagtagacagaatactctaaaataagatcattaataagccaggtatttaagtggcgaattgccttatgactaagcgttattttgtaacggttgataattttgttcaaaatgtagtgttgataatgacgaagttcttcctttagaaagattttctctacactgcatatacatacgtagatatatatatg

SEQ ID NO: 49392 - DNA, 615 bp, Gossypium hirsutum
  Clone ID: LIB3828-022-Q1-K6-D12
gtagtgttgcttgaaactagggttagtggtttgagagcggacaaggtgattaagaaatccagctttaattggtctcatagagtggaagctaaaggtttttctagtgggatttggattcattgggatgaatcagtgcgcgtcgaggttctatgtaatcatagccagtttgtgcattttgcaatagtttcgaattcgttgcagcaacgagtcttatatgctgcagtttatggtagttcgaatagccggaaatagagatccctgtggacgggactgaatgcagtagcacagggtatagttgaaccatgggtacttttgggtgattttaatgctttgttgcatacggatgagaagcagggtgggttggtgagtcgtgtggcaacttgcaaacgctttcaaacctttctatttgacaacaatcttaaggatttggggttcaaaggacctaagtttacatggtgccaaggtcgggttcacgagctgctcgacggagttctttataatgcatcatgggaacgacgatatcagttttcttctgtgtatcatctccagcgcattaaatttgatcattggcctctccttttagtgttgaatgactcttgtcgacccatgggactg

SEQ ID NO: 49393 - DNA, 623 bp, Gossypium hirsutum
  Clone ID: LIB3828-022-Q1-K6-F6
aattgtaaataattataattaaaattaattattccaaacataatcacactgataattaaaatatatcgaatactgcttccaaagatactcttcaccatatttctcaaacattttatattattaaataatctcaagcgcccaaacaaaaaacttgcacctggatttcacaccaaccggaaaggaatatatataatgacagacaaaccctgtattgcactccctattgtgataataatttcataagatctatatgataagaataaggagaaagattaccagcagcaccactaaaattaccagcacccaccagcactgccaacccaaaaacaagagatgtcatacatacatatactcgattcgtacaaaggttaaggaaatatgttttatcagaccatattacactaatcaatcttaacatatttaaagttgcatcttttacttctcagagagcttcatctagaagcatttcatattcctactccttgtgcatgggactacaactatgacttaatctgttattgcagttcacagcagcaagtttatgaactagctagcactatctcattaactggtaaaagtactatggaggcccttgtactaaaagtttatgaattagtccctta

SEQ ID NO: 49394 - DNA, 650 bp, Gossypium hirsutum
  unsure (1)..(650): unsure at all n locations
  Clone ID: LIB3828-022-Q1-K6-F7
gccgctgcacgtatacaaaatgctttccgtgcacattctttcaggaagcgacaacagnaaagaagatgctaatattgcagctagtgtagatgagtatggtatcagtttgggtgaaatccaaaatctttctaccatgtcaaagctagcttttggaaatgcccgtgattacaactctgcggctttatctattcagaagaaatttcgaggctggaaaggtcggaaagactttctggcacttcgccagaaagttgtgaagatacaggtatctttactatttatcagaatttactaggttgtaaagattttcttccctttcttctctctatgtgagtgtcagatttcagtatgtgcctaacacagctatgttcaattttcttttaagttttccatgtattggaggatctttggaggattatagccccatacctatatgttcgaatatacttgaaccaaagtagtcttcccatctctaccctgtcctctccttattcaccatggtgtgtatgagatgtggaattatacacagatatgttcagtttcctccaagtttttcatatatggggatctttggacggggttttatcccacatgtttagattgcatgggacacggattctggtaaaaaaaaaaaaacagtctcctcttgcttc

SEQ ID NO: 49395 - DNA, 479 bp, Gossypium hirsutum
  Clone ID: LIB3828-022-Q1-K6-G10
gggttaaaccttcccgaacatttaaacacaactggttacaacattaacccatgaaaactaccggccctattgggttattcccctgacaaaacaagcccagccaaaccaatcttaacttttccacggggatggggccattttttgacaagaaaataaagccctaacatttcgggccggaattcaaaatatttataaaataggatataccccccttaacaagaccccggggggtgggaaccccaacaaggttgtcattaaaaaaactttcttacaaaacaaagggccgggccatattttttggaggaattgaatccccacatcccgtggacctggacccgtcctttattgcccttttaaaaccccgggtcacttttgcaacaattttgcccggcttggtgggttgaaaacccggtcctttacccggttaaataaaaacagggggaataaattatccaaatgcaaaaataatgcccccaaaa

SEQ ID NO: 49396 - DNA, 623 bp, Gossypium hirsutum
  Clone ID: LIB3828-022-Q1-K6-H3
ctcctccctcactacccaatcccatcagccaaacaccacctcctcaatctcatctccgaccaggagcggggtctcaaaacccaaaacgacactaacaaacgcgattcaataatcaaagccattgatgccatggccgttctgggccgcaatactgtcaccacaggcgactccctatccgccacgtggcggcttctatggactacggagaaagagcagctcttcattatagagaaagcttacctcttcggtactcaagcaggcgacgttttgcaggtcatagacgtcgacaacaagactctcaataacgtcattacctttccacccgacggagttttcttcgttcggtccagcattgaaattgcgtcgtcccagagagtgaatttcaagtttacgagtgcggttctcagggggaaaaactgggagttcccattgcctccatttgggcagggttggtttgaaactgtctaccttgatgatgagatacgagttgtgaaggatatcagggatgattatttagttgtcgagcgtgcaccatataactggaaagaataaagtggatgaaccttgcctctctttgtaatcaaatgtgtttgcagtcgatgctgccaatgattagttgcaaa

SEQ ID NO: 49397 - DNA, 603 bp, Gossypium hirsutum
  Clone ID: LIB3829-011-Q6-K6-A5
gcgttcgtggaaactaatggcgctaccttttgttcacaacactgctgtcattgaaggactcttgaagaaatcaatggcctccagttcgtgaagccaaaacacttacaaactgggatgggaacactccattgaaactggacctcctacttatgcctaaagttgctgtcaattatttaagcttgagcgctaccactctggcttagagattacatggacctaaacacaaatatcatccctcctgcatattatgctagtggatgactactttatcctttcaaaagcaaactttactacacattctactattcagcacttgatatattctgtaccatgagaaggggtgccaaggagttcatgttactctctacttagatggccagcttaagcttggcccatatgttgagtgggatgcttatgtgcctgatacaaccaactttcttaataagtttgactattctgaaagcgctgaacatgatgcaagattttatccacagattcggtaagtctacccaaatcttaaaaatggatctataataccaggttattcaatgattcggccagatcttcatggacctggacagtctgcctgtgattttttaatac

SEQ ID NO: 49398 - DNA, 557 bp, Gossypium hirsutum
  Clone ID: LIB3829-011-Q6-K6-C5
gaactactggtggtaactcgcaatgcgtggtttgttcttggagatcatctaggcctgcgccgccttgtgccgacttgatgcggatatctaagctacgtaaatctgagaacgctcttgctgtgcttgctcgggtactgcgtgcacagctcgtactcgctggttcagacgtaacaagatgtggttgccaggatctaaaggtgacgctagattcaagcatggacataaagcgcttatccaaaagtgtctgtcctagatcaccccacccttgaaatttatgtaggtactgggcttacacctgttactcaacaacccctacctctcaaacaaatggaggaagaatgcattcctttgtttcaacccaaatcagcagggcaccgaagaacttctggaaaggtatggaaattgaagagcacatgtctttcgcgatttaaagctttggactatatacctatgaagctcgatgggaacttcgagagcactcttggtgatctatactcggaagtttccaacctctcacgtcaactgaaagacctcttgatatgaattgctttcgaacc

SEQ ID NO: 49399 - DNA, 440 bp, Gossypium hirsutum
  unsure (1)..(440): unsure at all n locations
  Clone ID: LIB3829-011-Q6-K6-C6
gnaaagttnagcgaaaaagcgatggnanaccatcacggagaggctgtcggctctcgataatctctatttcccacgcgcccttcaatcttcggcctccgatccctccaatcgcaaatccatcctccacgacctcctttcccgtgacgtccctgtcttcttagaaagaatgggtctcagctgactagtgatgagctccatgaatttgatgcacttaacgatgattatgaggttaattggcacttaaagcatcttagaagcaagatgagcccgacttcagaagaattgaaattgaggtccgtgactgtcaagaatcggaggcgggcttacttgaataaattggtgtgtgatgggcattacttttcggaggatgcgatgagggaaagggagccttatttgcatcatgaatatttagggaggtttcaggatttaagtgggaggag

SEQ ID NO: 49400 - DNA, 600 bp, Gossypium hirsutum
  unsure (1)..(600): unsure at all n locations
  Clone ID: LIB3829-011-Q6-K6-D6
tttcgctttttcactctctccctctctttactccagnatagggttcagcttccaaaacacaaaatggcagcgtcccaactccaaaaccctctcaaaaccccatcttctcagctctcgatcaaaaaacataaaccctgttttcttaaaccccggcgtttaactgtctcagctgcccatccccaccttaacggccgaaaactccgggtcgccgtgataggtggaggtccagctggctcctccgccgcggaagccctagcttcaggcggaatcgagacgtttctcttcgaacgtagcccttccaccgccaaaccctgcggcggcgctatccctctctgcatggtcgatgaattctccatccctcaccacctcatcgaccgccacgtcaccaagatgaaaatcatttccccctcaaatcttaccgtcgatttcggatccaaatcccttcgcgcccacgaatccatccccatgctccgccgcgaggtcctcgatgccttcctccgcacccgggccgaatccgccggcgcccaactaatcccttccctcgtcacccatctcgaaatccctgcctcctccttgtctccctacatcatccaccacaca

SEQ ID NO: 49401 - DNA, 610 bp, Gossypium hirsutum
  Clone ID: LIB3829-011-Q6-K6-F4
gggtttttcagcattttccacctgcctcttcttttgggcttggaagtccagttaaattgcctcctggagagccacttgcattgccccctcttggagatgatttaggtccattacttcggacaaagaatggagggtttttacgatccatgaatccctcacttttcagaaattctaaaagtggtgggaacctgatcatgcaagtgtctggtccagttgtggtacctgcagaaatgggttctgatataatggacatacttaagcaactggcctcaattgggatcgaaaagctctctatgcaggcaaataagttgatgcctttggaggatataactggtaagacaatgcagcaagttgcatgggaagctgcctccactctcgaggtatcagagaggcaatatcggttgcagcatgatcttgagtttgggcaaaatatgcctagcaggcaaaagagaattaaaagatcacctggacccacttctaacaagtttagttcatcctctgtcaataagatggatttggattatgtatcccttgaagatcttgttccactggcaatggataagattgaagcactcatgatggaagggttgagaattcaatcgggcatgtc

SEQ ID NO: 49402 - DNA, 630 bp, Gossypium hirsutum
  Clone ID: LIB3829-011-Q6-K6-G1
cggccgcgtgggcggacgcgtgggcttgttgtgggggagatggcatcgatgctattattaatgctgcgagcaaaagattcagcgagtctcaacagaaaagctgctggttctgtggtttggtggaggatgaaagaggctactttgtttgctttggcttccttgtctgagcaattacttgaggcagaggtttcgggacttacaaaagtgagcatagggaaccttttagagcaaatgattactgaagatatgggaattggtgtacatgaatatccctttctttatgctcgtatgttcatatcagttgctaagttttcctctgtgatgagcggtggaattcttgaacactttcttcttgctgctatgaagacaattggcatggacgtccctccagctgtgaaagtaggcgcctgtcgagcactttcacagctgcttcctgaagcaaagaagaataccattgagcctcagatgatgggattattgtcatcactgactgatcttcttcatcgggcttctgatgagacattacacctggtacttgaaacactgcaagctgcaattaaagctggtcatgagtcatcagcgtctgcagagcctattatttctcctataatcctcaatatgtgggtcttt

SEQ ID NO: 49403 - DNA, 610 bp, Gossypium hirsutum
  Clone ID: LIB3829-011-Q6-K6-H4
caagcattcaccggtcatcgcaaatgtgacaatagtactgattttacggaacaagaggttggagttggccggtgagctgcttggcgtgagcatgaagttcatattgcccatgcaaggagacgtatggcaaagactctgcagagggtatctttatgcggatcgtactgttcgaccaattgagcattatcttgatgcttccatagttacaaatgggctctctagagcattttctactggagcttggtcgcatccttacaaaaagatggaaaggatatcaggtgtagtggcaaatcttggacgagcaaattcattgcacacaatggttgatttgagaaaaacacgacagcaggttcagtacactggaaaggtcggagatgcgagatacccacatccttcttattggggaaaagtttgctttctctctactcctgatggtgaaaattgtgggcttgttaagaatctggctaccactgctcttgtgagtacgaacatagtgaaatccgtagtggaatccatagtctacacgttgtttgattctggaatggagaaagtggttaatgatacttcaagctcacttgatggggaaaggaaaggtctttctgaatggggg

SEQ ID NO: 49404 - DNA, 550 bp, Gossypium hirsutum
  Clone ID: LIB3829-011-Q6-N6-A5
agggactaaaaccacgactttcgcataggccataaactgataacaatattttatcctaataaaaggatttattggttagcgtacgacatcaagttcaacatataatcacttctcaatggcgaatctccaatacatgaaaatttctacctattgcaatgcggaagacaccaacctttgttgtgaatgtacagtagattattgtccatcatccttccaaaagtgaaggagctacatattgagcaatcgccatgcttgaagtcagcccgggtgactcgataccgaaaagagtacaagaccacccactccatgcaatgaattatccctgtattacaaaatcacaggctgtactgcacacgtccatgaagatttgtgtcgaatccctgcataacctggtattaggagatccatctttgagatttgggtagcacttccgaatctatggataaaaggttgcaacatgatcagcacttacagaatacgcaaacttattaaggaagttggctggatcatgtacatgaggaatccactcaacatctgggccaaacttgag

SEQ ID NO: 49405 - DNA, 514 bp, Gossypium hirsutum
  Clone ID: LIB3829-011-Q6-N6-D6
gagttaataacaaaatttgcatttattcatgaaaaaagttgcaagttgaaggcagccatgtctctaccaacaatcttacatctcattaaactcccaaaagtacccgaaaaccatcttaagatcttcccatctatctcccttcgctaacttcttatacaagtaactatcaaaagtcatcctttgcacatactcactcccacaaacttcaaccaatgcttcccttgcctcattactcccataaaacaccctttgcaacaaatccaagaacctaaatgtactcacatactttttgtcccattccatcaaatactcccttttcaaatcatcttaacttatcatccattctccaccctccgatgctcttactattccttccccacacatcctccccgatttggccgcaaaataaatgccttcacctgagcacttcgtaacataccccgccgggtcccctactagtgccacgcgtcctcttactcttaccggtcggggatgttccgggattgggtgggcc

SEQ ID NO: 49406 - DNA, 554 bp, Gossypium hirsutum
  Clone ID: LIB3829-011-Q6-N6-F4
ggttgaggagaccaataagacaacacaattgcactaagtcagacatgagttacaccatacattcttgatcacaaaaatatataaatttacaagcccagaatgaaaatgtaacctcacctttgctttagtgttgaattgaacaataaaaataaatacaagaaaatctccacaagcagaatttaccatccctttctaatctcagagttgtataccgtggctcaccaacagtcacaacatatttagcagcagttgatcctttcaagcagactacaaagcacgaacaactcatcgcaatctgctagtttcattgtggattataacatcaggatttcgaatatgtcgattgggagctgcccagtctttccatttggctcctgtaccatgaataccggacgagatgctccacaaagtgtcacctggatgaaccttcgttgttgaaggggttgaagatttagaagcagcattggacttcagtaatggatgtttactgctctttcccattccattggcaagcaaccaacgagaaccagacttttgttgggttatgctacccc

SEQ ID NO: 49407 - DNA, 493 bp, Gossypium hirsutum
  Clone ID: LIB3829-011-Q6-N6-G1
aatagaaaaaccaaccccaatttcaatatattttttcatacgggcctatgaacaaagaaagacgaacttttagctttaaagcttgatgattaagggacttaccgtacttgacatcaacaatcgagaagtaaaaccagataagtccctcatcaatttaaagcaatcttaatagcattttgctcagcccgtgtaaaacactgacaaaaattttaaaatagttggcggtcactttgaaaaaacttcgataaaaagtcagtaaaataatttgccaagttgagctcgttaaggggatctgaaacacttaatatgtgggcttcatcctcgcccttttgattctcgttatatgcttttgccattgcttaaaaatgttcatatccaaacctgccaaatggggtggcagcagctgaggataacaaatttttgtcaaagtccatgtctccatgaattttttcccaatactatcctaatcctcggaatcccgaacttgtttttg

SEQ ID NO: 49408 - DNA, 483 bp, Gossypium hirsutum
  Clone ID: LIB3829-011-Q6-N6-G3
aaaaaaaaggggtttatggaaaacaaggcccctaaaaattggggaaaagatgttataggtcccaacaggcccacatggggggggttttcaaccaagttaatacaaaaggggaccctggaatacaactaaaaaaaggggagggaaaaatcaagcccttaaacaaaacatttggatttttaacctgggtttttctggaaaacttaaaaaggggacattaaacctttgcctttgaaaactttgggggggttgcaacttcaaacgggaggggaaaattgaggccccctttgtttggcgagtccagggcaaaaaaaaaaattgtttttgaagcaaaaaacccggacggcaggaggaacggggagttcaaccccaagacgggatcctagtttaaaaaataaaagtcttccctgggtttaagctttggctttgaaaccaactcccacaattttaaaaaagcgaaaaaatttagcttccctggggatcaaa

SEQ ID NO: 49409 - DNA, 498 bp, Gossypium hirsutum
  Clone ID: LIB3829-011-Q6-N6-H4
aaatcctgcactaacttcgatagctaatatttacctaataattcagcctaaggaacccaagtgttcgggattcgcagttataacagctgctaaagagttgagcggctaactcaacaaaggtgggtttcaaatttcaaagtaatccccctgctgaatagttcctggcacagtagcttggccccattcggtgcactaaccttcccaaagtaatcccctgtactggcaaacccggcaatagggggccctaatctttcaaccagttgctacggtcctttaaataatgttcgtaggatttttgcaaatctggcatacatgcatctgggagcaatcactaaaagtgaagaggcgctcatgcaagtagggtgatgcaccttgagcaataaggcagtgcctgtccattttaccaaatttgatcccgccataacttttcccgactggaactgggtgccttggaagtgggggcacaggtccagagcaaccaaatttcactttgtcttc

SEQ ID NO: 49410 - DNA, 601 bp, Gossypium hirsutum
  unsure (1)..(601): unsure at all n locations
  Clone ID: LIB3829-012-Q6-K6-A3
gnactttgtttttctcagnaatctgtacaaggaattttctcgggaaaaattcattttcttttcttgattgttttttttttatatatatgtatgtatattgggttttaagaaactgaagatcgtttccatttatacaaaagtgaaattgtaattatacatgcctgtcagccttaaatatggtgtttaagaagagattagattatggatttaataccttcaacgtcccagatgtgccccgtgcccctcgatctattcggaggaggtgtaggagtaagcgggtagtagaggacagtcagatttgtgcattcgaattgttagcttctttagccgggaaactattgcaggagagcgaaagttcggcttctagcaatgcatcagaaggacatgatcatgtttccataggtaaagatgtccttaaacaggaaattcagtataatgatgatgagaaaccattgaaagttgaatgtgttgagcaaggaagctgtgacgcgagtgctgttgcttctgagtcgactaatgaaaacagtgatgatttgaaggaatttaaacctgctgactccgttttggatcgtgcttcaattaagacacggcctgcttgttc

SEQ ID NO: 49411 - DNA, 621 bp, Gossypium hirsutum
  Clone ID: LIB3829-012-Q6-K6-D4
gtgaatgtatatgatattactaattcttctgatcacttgatcatgtatggtcaccaaaatcaagatggtgacctggctttattgcatgaaagcaagcttgattttggagatccattcaggaagcatcagatgatatgtagatatcatcagaaggcacccacatcatggactgcgctgaccacggccttcttattcttcgtgatctgcttattggttggctatatcttatatggtgcagcaatacacattgttaaagttgaagatgatttccatgaaatggaagagcttaaggttcgagcagaagctgctgatgtggccaaatcacagtttttggcaacagtttctcatgaaatcaggactcccatgaatggcatccttgggatgcttgctttgcttttagatactgatttaagttcaacacaaagggattatgctcaaactgctcaagtctgtggaaaggcactgataacattgataaatgaggtgcttgaccgtgctaaaattgaagctggaaagttggagctggaaactgtcccctttgaccttcggtctatcctagatgatgtgctctctttattttctgagaagtctagaaacaaaggtgttgagctggcagtgttt

SEQ ID NO: 49412 - DNA, 512 bp, Gossypium hirsutum
  Clone ID: LIB3829-012-Q6-K6-E1
ctcaaactatcgctgtagtaacggaggaagagctgaggatgaagctccggttgatacgacgccggctgcggcaagctgcaacgctggctgcgacggttcttaaagctgattttaaaaacacatctctagaatacacctttagctgcagaaacatctgatgaataaaacgctctagccgaggctgttgaagcccctgagacagcccctaagacaagtccaagtggatcacatgatggataacatgatatagatgatcttgttgaggatataaaaaaggattaattaaggcattgattgatggttgaaaagccagtgctaaaaaacaaggctcagaacaaggtctatgatattgtatcttgtgttaacagatggaaaacacagtcttgaagcaaatcttaaaacaatagctgaacaattggaagaaaagaaggccaagtacaccgccacattcaccaacacagtgacttaaattgacacttaaattcacaaagaaacagcaatagtcaaagcca

SEQ ID NO: 49413 - DNA, 106 bp, Gossypium hirsutum
  Clone ID: LIB3829-012-Q6-K6-E6
gtactcccctactggtatgttcatccagtctatagcagcaacattcttatcaaagcattacaatcctcgctcctgtcaaatctcctaacactgatggcatcaatcc

SEQ ID NO: 49414 - DNA, 615 bp, Gossypium hirsutum
  Clone ID: LIB3829-012-Q6-K6-H2
gttgtgagaaggggacaagacctggaaaagtgaactttaagattggtgatgagataatagtttgtgataggcagaagattgcttctctttcggccccatttcatgctatgcttaatgggtacttcactgagtcgtcttctcaggacattgatttatctgaaaacaatatctccccattgggtatgaggacaattggtgagttcagcatcacaggcagtttgagtgaagttcatcctgatcttttattggaaatactagttttttcaaataagttctgttgcgaaagactcaaagatgcttgtgataggaaacttgcatctttggtttgcaccaaagatgatgctgtggagtttatggaatacgccatcgaacagaattcccctgtcctggcagcatcatgtctgcaagttttcttacacgaactgcctgattgtttgaatgatgaacgggtggtggaaatatttagccatgcagatagacaacagagatcaatcatggttggactggcctcattttcgctgtattgtttgttaagtgaagtagctatgaaccttgatccccgatctgataaaactgtttgtttcctagaacaattgattgaatcagctgaaactg

SEQ ID NO: 49415 - DNA, 537 bp, Gossypium hirsutum
  Clone ID: LIB3829-012-Q6-N6-A6
aaaaaaaatttctattttcatattttttaaataaaaaagcgccatctccaagtaatataacctcatttgaaagatctctcgggcgacaccaaactactcctattcatgaagtcaaataacatggtcttagctccttgaggggggctaagatcaatagtggacaacagttgctaaaatacttatgactggatgggcgagaagtagcccctgaatgacaagaatgatcaggtgcttgctcccttggctggagctcggaaattgtgacctcatctccagaaactgccgcagtttcctttctggcattgcctacattttgtcgccccagaattcaagtcttccgaccacagcatctctacctctgattgcgtgtcactgcgcataaaaaatgcaggctgtgaaggtaatggaagtggcacagagtagctcgggagcctcaacgcaaccgcagccatgttgggtctctcagctacattctcttgaacgcaacgcagcccaatgtgtaaacatctcatcaccgcggtcgttgaactgtctttc

SEQ ID NO: 49416 - DNA, 503 bp, Gossypium hirsutum
  Clone ID: LIB3829-012-Q6-N6-C1
gtctccaaaatacattgaagtaagatatatattaaagttgcagaccttgcgagaaaattgatagcaaaacaacaatggagtcccgttcgatccatcgatttttgggaaaaaaattacagcgggacacaaaagacatagaagctttatacgtctcagttttttttcagctaaaagcagcttttttttggatactgcgcagcatttgattaacagctgctgcaatttcatccacagtgttcaaatggcacccttcctcaaccttgacgctgattgaatacaaagccatttcatcaacagtggaaacattgaggtggaaaatggtgaggcttaggctttgtaacccagcaaccagtttcaagagttgtctgggtcgttttttggagagtattttaaggttagcgtgggtttccaccatggtcacttcgatatccgccacgctttcggcggccatgggctgatcagctgccatggacgacggggaaattgttgcagtgagacgttgc

SEQ ID NO: 49417 - DNA, 522 bp, Gossypium hirsutum
  Clone ID: LIB3829-012-Q6-N6-D4
agaaaaaaaaaaacatggcacaaaggcctattccaaaaaagttccaaagtctagagagaatgagatttacaccttttgactctaatatgaagatctatacaaacagtcggggatggagtcattgtggtagtatacatgtactaagatactaatcaggttaaaattgaagttggttagaaatgaatgcaagaacatgcatgttttttctattggagaggtcaagaatcctcagaaatccaagcaaaccattcagtgattaaacccaaatgcaccagcaggacggggaaaattgctggcgatgtccaaccagcatataattcaaggttttgcttttggatgatgtaggaggtgttgctatgagtccgagatgggtttcgttttgaagaactttgctacagctaggtaaagattttcctcctcaaagggctttgagacgtatccgtccatcccacatttcaggcactcatcataggtggcgtgaattacatcagctgtcatggctaatatcgggatatgccactc

SEQ ID NO: 49418 - DNA, 560 bp, Gossypium hirsutum
  Clone ID: LIB3829-012-Q6-N6-E3
atggggagtcagagacagcatattagaaatcagcatttaaaataacaatgacttctacattttctcaacctaattttaaccctacaagcaaaaaaaagaaggaaattctcacataagcaaaaacctatagcagatgacctataccacgaaaacagaagaaaaaaatgaagttttatgagtttatttacaacataaaagaatagatcttcaagttgcagtttgtccgcaaaggatataagcttgaataagggtctgagtagtccgcaactgatacaaagttcccggcacaacaactaaacccttcgtagtcactggcttcgggtcatgaataaccgaatttgctccagaaatctgcctgaaggacaaacatttaacagatactcaagctgcagtttgtccgcatagaataaaagcttgaataaggctttgagcagtacgtaactgatccgatgttccagagacaacaactaaaccctcagtggcccctggctttgggtcatgaataaccaaatttgctccagaaatctgcctgatatggcccaggttactattactctccc

SEQ ID NO: 49419 - DNA, 265 bp, Gossypium hirsutum
  Clone ID: LIB3829-012-Q6-N6-E4
gatgaaatataaaaaatctaatatattatatataaactctgacgcaagaatattttagtgtgcataggctacaaaactatgcagtttgaatggcattcttcaccggctaagcccgggtacgtcggctgaaaaacaaatcaggcataaaagaacttgaccactcatgttcaatacagagttcaaggtttagtgataacgcataaaaagcaaaaaaagatacacggacgatggccattcaatccatacaaatgcctttaaaaccaac

SEQ ID NO: 49420 - DNA, 441 bp, Gossypium hirsutum
  Clone ID: LIB3829-012-Q6-N6-H6
aaaaaaaaaaccccctcccagaaaatttggccaaaaggatttgggagaccccttttagggaaacttttaacgacaattttaaggggggggggggaaaacttttgggggaattttaagccaaaagcccccacaaacttttaaaaggggctggctaaaaccctaaaaacttataaaaacggggggccttggggggtttcaaaaaaaacttgggaatttacctcccccccaaaaaatcctaatttaaaagggggggatttccaaaaacaaaatcccccctttggttaattaaaagcccaaaggggggggggatttaacaaaatccctaagggccggtttgggggaaaaaaacaacccccacgtttttgggcacgggttttttaaaaaaagccccccaaaaaaggggggaacattttgtggaaaactggaggccgttgggggctt

SEQ ID NO: 49421 - DNA, 604 bp, Gossypium hirsutum
  unsure (1)..(604): unsure at all n locations
  Clone ID: LIB3829-013-Q6-K6-A5
tcggnaactttcaaggtgcttctganaacaggttcattggacagaaattgaacaatatttctgcaatcttgaggtgacgttaaagaagaaatctgaagagctagtagctaaggagaaggaatatgaggtgaaagaagctgaaacccttgcattgattttagagaaggaggcagttgttgctactaaggaacaagattacttagaccgagtgcaggggctaaaagatgctgctgttgctgcaattgctgaggcacgtgcaaatttccgaccaacaactgcagaatctcttgatactgcagaaaatggagacaccaagctagccaaggcaattgctgatgagtggaaacccaagttgtctaatgcaagcagtggtgctgccattgacaattcattggaagctgaagcatttttgcagctccttgctacttttaggattgcttcggagtttgacgaagaacaactctgcaagcttgtttttgtagttgctcaccgccggcaggcacctgagctttgtcgttccattggattaacaccgaaaatgccaggccttgttgagttattgattaacagcgggagacaagtcgatgcggtacgatttattcat

SEQ ID NO: 49422 - DNA, 591 bp, Gossypium hirsutum
  Clone ID: LIB3829-013-Q6-K6-A6
tttcgattggcattgcttacttcaaccgccgttgcagttcgatccgaccagttgcactgcctcggttgagtctgataaaatatcttcgacaccacaagctccccttctttctcttcctcgtgttgacccagatggtattggtgcatcacccaattggtcttttcgggttttcggttcttgccgaaattggtgtaaagaacaaggattttcttgcaccctttttgtttaccattcaacatcaccggccttgtcttgccggttttatgccacctggtttctccgccttgtaagtcacattcggtttgtattttccttctttttcttgtcccggtagtgtaggcctttgatggtctgtggaagaaatgcctgctcaacccatctgtggtcactcctgggagtttctcaggatgggtataacaaatcccatcttcaccttcaatagtagggataaactcatcaatcaaagggtgagacttcatgtctttggcttcaactttagcttcaaggtgttctatcagttcttgatctgtgggatcaaatttcactccagctggcaaacctaaccagtccggctttccttcaagcttgtga

SEQ ID NO: 49423 - DNA, 634 bp, Gossypium hirsutum
  unsure (1)..(634): unsure at all n locations
  Clone ID: LIB3829-013-Q6-K6-B1
naaaaaacccatcaaattttagcttataaagccgataaatttatcaattgggaccatacatggcggagaatgcagaagttgatgagagggtggatcttgatgacaattacatggaggaagaggatgatgatgttgaagaacatgtagatgaagacggagtggatagtggtggtgatgaaaatggggaagaaaatgatgaagaggaatttgaggactcaaaatcaggggtggatggaaaagatcaatcattggaagtagagaaaagccacattgaaacagagcatgtggaagatgaagaaaagcccacagcttctattagtgaggaagaaaaagaaaagcatgctcaacttcttgccttgcctcctaatggttctgaggttttcattggagggcttccgaaggatacctcagaagaagacttgagggaactttgtgaagcaataggagaaatttttgagattaggttgataaaagataaagaatctggtgaaagcaagggctacgcttttgtggcattcaaaacaaaagaggttgctgaaaaggctgttgatgagctgcacagcaaagagttcaggggtaaaactataaggtgttctttctctgaaactaagaacagattatttattggtaatat

SEQ ID NO: 49424 - DNA, 582 bp, Gossypium hirsutum
  Clone ID: LIB3829-013-Q6-K6-B5
ggaccgtgggtttagggaatgggaaaatgttttcgggagtgcttgattccggtttacgatgaacggttcggaggatgctattctagcgttcgagagagcggaaaacgggtgtcatcccggatgaacaaacatttacgggactcctttcggcttgtagccattgtggtttagtcgatgaagggatggagtttcttaatcaaatgagcaaagaattcggtataatgcctaacgttcatcattatgggtgtgttgttgatcttttaggccgtgccggtttactcgaacaagcctatcgagttataatatcaatgaaggttaagcctgatgcaactatttggaggaccttgctcggagcttgtagaattcacggtcattttacgcttggtgaacgtgtgatcgaacatttgattgaactcaaggctcaagaagcaggggactatgttttgctgttgaatatatattcatcaactggtagctgggagaaagtgagtgaactgaggaagtttttgaaagataaaggaattcaaacaacacctggatgtagttcaatcgagcttaaaggaattgtacacgaattcatcg

SEQ ID NO: 49425 - DNA, 614 bp, Gossypium hirsutum
  unsure (1)..(614): unsure at all n locations
  Clone ID: LIB3829-013-Q6-K6-C1
ccccgcgtccggaacttgtcagtgagaanataatcatccggcagggaaggttcagaatgttgagaagacaggggagacatgtgctgatattggatgatgtatgggaaagcttttcgcttgaggacgttgggattcttaagccaacatcagaaaatggatgcaaattagtgttgacaacacgttcggaaagtattgttcgatcaatggagtttaagaaagttcaagtgccttgtcttcctatagaggaggccattaacttatttttaagcaaagttggacacgacatgttgcctaatccaaatttagaatcgtagatgaaacttgttgtgagggaatgtgatggacttcctcttgcaattgtcacactagctggttgtatgaggggagtaattgatcctcgtgtgtgggaaaatgctgtagatgaattgagaggatacatcagaaacatctgcaatatggaagataaggtgcatggatgcttgaaattcagctatgagcgtcttaaacaaagagacagagaatgttttttgtattgtgcattatatcctgaagattacaaaatcggaaaaaatgagttaattgaacattggatggaaagagggcttatagatgaa

SEQ ID NO: 49426 - DNA, 562 bp, Gossypium hirsutum
  Clone ID: LIB3829-013-Q6-K6-C6
ctgccgcgcgggctcagaagctgcagtgctatgttgccacccgttatggcaccctgggggttagtaatgccatgctaagctctgtggaatgaaaaaatagatgtggaattaccctaattctacaaggaactaactggctagaaggccggtcactcggaaaatataatcaaaatcaaggggtaaatatcctgacttcgctaatataatgccatgtgtatactatatttacacaataatacttttgaagacattgagatcactaatagtgctaatataccgatatacggctctaaatctaatatagaatatgcaacttgttatggttctaatgttgaggagaggcatcaggcggacaacctatatagccataaaccagaactgtttcgtgcaacacattcattataatatcatgagccctaagcataatagagtggccaagcgtggacagcgcagggagtggaaacaccctagggaaacgcaactgaattatcttatggcagattcagattaggaacactatgttttaaaggcaataggccttggcgcacaagctttccttatt

SEQ ID NO: 49427 - DNA, 617 bp, Gossypium hirsutum
  unsure (1)..(617): unsure at all n locations
  Clone ID: LIB3829-013-Q6-K6-D1
cgnaattacacctgntattcacagtattgccactagcttttatttagaagagtctgatttgaaggctttgctaacacctggctgtttctataactaccatgcttatttggagatcactgtcttcatggggagaaagggcacgcattttggtgtcggagtcaagagacagcagattgggacattcaagttggcggtgggtcctgaatggggtgaagggaagccagttattcttttcaatggatggatcgggatcggtaaaaacaagcatgaaaatggaaaaccaggagcagaacttcatttgagagtacaactagatcctgatccaagatatgtattccagtttgaagatgtgacgatgttaagtcctcagattgtacagctccaaggttctgtaaaacaaccgattttcagttgcaaattcagtcgagacagggcatcacaggttgacctattaaacgcttactggccaggttctgctgacaatttagacatagagaccggtagaagagagaggaaaggatggaaggtgaagatacatgatctgtccggcttggctgttgcggcagccttcataaccactccctttgtgccatcaacaggttgtgattgggttgcca

SEQ ID NO: 49428 - DNA, 612 bp, Gossypium hirsutum
  Clone ID: LIB3829-013-Q6-K6-F5
atgagaggctgaggaccgtggtaccgggtcaaggggcgctccaaagatgtttttgaggtgattagagagatacaggttcagtttgtgagagctgccgagtcggggactgaaattgccaagctgcttgaggttggaacacttcctcatcaccgcaaacatgtttccaagattttgcatgtagttactccttcgttatctgtagtaccatctcagccatctacttctcagactggcgagtcttcttcgtctgctgacaacactgatccagcttttctagacatcaatgaagaaatggccaggaaaacgaaaaacctttccgctactttgcagaagttgcatctttgggaaaagaagctctacaatgaagtaaaggctgaggagaagatgcgggtagcttacgacaggaaatctcacaagttaaggcgactagatcaaaggggtgctgaagctaataaaattgagtcaacccggaatacaatcaggggtctgtccacgaagataagaatagcaattcaagttgttgacaagatatctgtgacaattaataaaatcagggatgaggaactatggccactgctaaatgaactgattgaagggttagacagaatgtgg

SEQ ID NO: 49429 - DNA, 542 bp, Gossypium hirsutum
  Clone ID: LIB3829-013-Q6-N6-A5
gaaggcaaagcctcgagaaaaactgttaaattatggatttaaaaaaaggggttgggaggcaatattggaagttagcaccccagtgggcaaaaaatctaatgataaactgaacatgcatctatgataaacttttaatattaaaaaaaaaacctacagaaatggctgctgtgaatgcgaaggttgcaatccgctgccactgtagcttccatagttagaagtagctgctgcattatatgacgacgttgcaactttgtcatcttgagaatagtagtataatctttgatcattcgcttgagggacatatgcaggttgattcggtatttgataattgtagggattcggacctgcatgagtatacctttctggcattcctgtaaatgcagccctctggttgtaaactggtggagcttgcctacctggaggtccccgatatcctcgaaatccaccattgggccttgatttcttccgcgggtgatgtttaccagaatccccccctcttttcttattgtctgcttttgctttttcgagttgagccaaccttt

SEQ ID NO: 49430 - DNA, 559 bp, Gossypium hirsutum
  Clone ID: LIB3829-013-Q6-N6-A6
tcgcgatccactgtgtcacagttttctctctctcttttcttcctctattcttccttcacagtacatgaaaaaatcttcttttgaaccatacttctcatctgggttttcctcaaatttcttgtttttggttatataccacctttggttgatgataaaaatcccactgtcttcttcttcttcttcttcaatcattttgttcactaggaaaccaaactacttttttattcagacccatcactgtttaattatttgtctttttctgtgtttttttccctctagtttaaggaatatcagatctcaaaacagcttttatggtttctgttatatagagaaagctataactgggatatgagtagttggctggtgtatgaagttggtgatctgatacaagattttaagtgcttgaagcatctgccacaacaaaacaaaggagaattaaagaagcaatgaataagagtaatttgggttctgtcagcagctctgatctcatcgatgcaaagcttgaagagcatcagctgtgcggatccaagcactgccctggctgcggtcacaagcttga

SEQ ID NO: 49431 - DNA, 470 bp, Gossypium hirsutum
  Clone ID: LIB3829-013-Q6-N6-B5
attaaaaaaaccagaacccgaaattggaaaaggaatataaacccgcttaaggtaaaggaaaagtttggggggggggggaacgaaacccgcaccaaagaggaatccaagtccaataccttaaagggaaataaacccaggggcagggggaattcaaatacctttaaaaaacaaaaacagcccaaaaactttcacctagtcccaggtgccagaagataaataaaaaagcaaaacaaaaaccccggcccctggtccctgggcctaaagcaaaagcaaaggcacactcccaccaacccaaaagggaaagggaccgtaaaaaccccaagccaggggcaaggaaataaaagaagggggctaaacctaaaccgtaattaaaacaaaaacgggatgggctggaaaacggaaacggcctcggccaaaaaaacacccccacacccataaaggtgagcgctaggcccaaaaccgaggctttt

SEQ ID NO: 49432 - DNA, 545 bp, Gossypium hirsutum
  Clone ID: LIB3829-013-Q6-N6-C1
gaatgtattaccaaatattgaagccgacataattttgacaacaatccagtagggatctcttttaagcgccgggtacatccaagattgagatatctaagattcaccagcatttccaaaccttgagggattttgttgattgcagtacttcgaagattcagtttcttcaaagcttgaagcttcaatacagaaggaaaactctctaattcgtaacaataattaagcaacaatacctcgagtttctctaaactagaaatagagttaggcaaactcttaaaagggttataagaaagatcaagaatcttaaggttcgggaagtgctcaaagaaagattctgggatttctttcaatgaattaagtgaaagcaacaatgttgtgagttttggaaattttggaaaacttcatagtttgaggaattattgagatgaaattgtccattaaagaaatcttctccaaatcttcactccattcttctccgtttggtaactctttcaactgcatacgagcttttaccataaatcttttccatgttatatgcaatgccatat

SEQ ID NO: 49433 - DNA, 333 bp, Gossypium hirsutum
  Clone ID: LIB3829-013-Q6-N6-C6
acatccagtaaaactttcattattctatagaaaattcccagcactataccatgttttttgccacaattagagatcacactgccttcaaaaggtactttttgtgcatacaaacaaaagacggtattaacgtatcatacgcatgtaatttccccttggttttgcgatattcaccggtgaccggcctgtcaaacctctttagatcgaaccgaatgacggataattccactgccatgtctcaaatcccagatatactaaatctcattatttactccttggggggaccaacgggtggcataaattgaacttgattctgctggagctgcctttgtacgt

SEQ ID NO: 49434 - DNA, 549 bp, Gossypium hirsutum
  Clone ID: LIB3829-013-Q6-N6-D6
aaagaaaacataatgtgtttctctattgtttgttgcaattcaaagagaatcctatctttacgtatatgctacattactttcatatatgttacattctatgttcaatgttactccgaaacacatctaagtccaagtaacatacagatgattgaatctgctaagtgctaaaaccatcggaggcgaaccggtagagcagaggaaaggcggaaaaagctgattctttagaactggaagatgaagtgaaaccttaaaatttatacatccgagtgcatactgtcccgttttctttttgagctgcttttggatttctcaacctttccatcaatgaatgagagacatgtacgaagatgtgcagagaaggaattgttatgacttgtagaatccagttcctcaggacagtgtcgcctgtactggcgaaacatcaacaaagagtatacaaagagagctagaacacatgcgattccgcatataagaaatagtccccagaagctttgtaagtcgagctgctctgcttcatcctcagatttctcagaactacatgcacttctt

SEQ ID NO: 49435 - DNA, 544 bp, Gossypium hirsutum
  Clone ID: LIB3829-013-Q6-N6-F3
aaaaaaaaacctgcaaattccattatttcactgtgttttttatgatgttctttgatatcagcaacaaaattaaaaaccccaaaaagtaattaaccatatatatatgaagtctggagcaaggaaattaaaaccatggggagagcaaaagagttccaatttacaactcggacagtctcttatcttgctgccttaaatccttgtaaaacctgttaatgaaatcctccgcagctttgtctacgtagccgttgtcttcatcaacatcccttaacggaaatggggagtcggttatcctaagttgcctggccaatggggtttgtccgaaccctggtaacataggggaagcagcaacagtagcttccatcatggtgttgtcattgttgttaagcatctccaagacaaccttcacggcgttcatggtcaccatgtcgtcttcgtgggtaggaggagcgtgggcgcacccgaagaagtggtggtagtagttgtgaatgccgccgttcttcttcttggcggcgaggttgaaagggaagatgtagttgggggtgtt

SEQ ID NO: 49436 - DNA, 543 bp, Gossypium hirsutum
  Clone ID: LIB3829-013-Q6-N6-F5
aaaaaaaactgatgtagtttgattcaaaaatgtaaaagcaaattgcattatacaacatttgattctgggtattccagtgactcgcaaatgttcataaaaactacatttttaaaactcttcatcttacaaaactgatggagaatctgcttactccaatggttcggcacaccatctgctttcctttgcctgatattcttcaatgatacgggtgctgcttcatgccgactggacaggatatctagagttgcaccttgagtgagattttggaaatgcaatatctgtcttcggctcttgacaagcttgacagtcgatgccataagcccatccgaaacctactcctgtaaggcagatgatgaatcatctaacaattccaaggttagctcccatcttatgtctcttccaactcattcataatcaagtcttccctgacagtaaagcaaccagccaagttgtatgtttgcaggacccgtccaacccaacattgagctccatttctgagagggcaatagactgcctaaactgatcatcagttccaagggatgc

SEQ ID NO: 49437 - DNA, 376 bp, Gossypium hirsutum
  Clone ID: LIB3829-013-Q6-N6-G4
ggttaaaggcacactaatagttaattcgcacaagatatagtagtaatacagatagataattaactatgcagtaacaaatgaagattaagaacctcagacttgagggacacaaccaagacaaggttatcaagggttcacttccctactactatttttttggggggtctttgattctcatgttttcgctcttcttagttcctcattttcgagggcacaatgtcactggtgtgataggcttaatttacgtctggggcgaacattaacactcaaaggattagccatctcacaagatagtcttaaaacttcggataagtcaacgggattttgatctgagggtagccattcaaagtcgtgcaaaaaggtttgccaccccaaa

SEQ ID NO: 49438 - DNA, 524 bp, Gossypium hirsutum
  Clone ID: LIB3829-013-Q6-N6-G6
ggataacaagaaacctcacaaaccatgtactatatagcccgctatattatcacaagctaaccacatattagatgtaatgtgatcttgatatacgatgaattcccgcattacatgctgctgtaaactaagagacaaacaatcttcgaaaccatctcttttcttaaactttacagcagtaaaatatttcaagatcgattagacacactaactcaagcaagctgaccctctccaagattattcagtttttgaatattagctaagtgcttccttccccatagatgagaattcagatcctctgatcgaccgcaggttatgttacatatagtacacctaaattgaggaattttagtcttatcatgtttcttcccaacctgttgctgctgcccttgtacgttttcacttgattttacatgatttcccaccatattagttgttggtatcgccttcttcgattcttcttgtggcagattagatttgctcatctcggttttaggattaactgcattgctgcatgctgctgacga

SEQ ID NO: 49439 - DNA, 312 bp, Gossypium hirsutum
  unsure (1)..(312): unsure at all n locations
  Clone ID: LIB3829-014-Q6-K6-B1
ctctgtctcctacaaaacaaaacatgggaggaaaacgaaagnagaaagctttcaaagaagaaaccaacccacaatcttccacaggtcatctagggctgatgcatggcaaatcttatatgaaaatggcttcttcctcatcataatctggtgctatcctacctgagctttccttcgtttcttttcttttttctttttacttatttaattatataaataaataaataatatcttcttgaccttgtaagaccttttgttgggcatgtaaaaggcattccagtatttggtgttatagtagtggttgggtattgttct

SEQ ID NO: 49440 - DNA, 635 bp, Gossypium hirsutum
  unsure (1)..(635): unsure at all n locations
  Clone ID: LIB3829-014-Q6-K6-B2
ngagtttttaccagctcctgagatctcaacttatctggagaagagagttggatgatgatgcagcaccagaattaatggatgttcttgtggatactttactttccttgctgcctcagtcgtcagcccctatgcggactgctattgagcaggtttttagatatttctgtggcgatgttactgatgacgggctgatgcggatgttgcggataattaagaaagacctaaaacctgctagacatcaggaagcaggcagtgaagatgacgacgacaatgatgatgaccttctcggtattgaagaagatgaggaagaagatgaggatatggatgaagctgagactggtgaaacagctgacagtgacgaacaatctgaagactctgaggcagtagttggcagcgagggggctgataaagatattccataagattctgacgagtctgatggaggaatggatgatgatgctatgttccgcatggacacttatcttgctcagatctttaaagagaaaaagaatcaggcaggtggcgaaactgctcagtcccagctcgtcctgttcaagctccgagttctttcacttctggaaatttatttgcatgaaaatcgaggtaagccccaagtcttgacagtattctcgaac

SEQ ID NO: 49441 - DNA, 514 bp, Gossypium hirsutum
  Clone ID: LIB3829-014-Q6-K6-E1
accctaatgaagacaaaggcaccatttaccttccctttttctaaaaaatagtgtaaaaaaaatacatgccattaccccattcggttaacccccaaaactttgaacaaattaatcgctcgaccattttaattgatggtgatagacatacgcgcaccacactgtagaaaccttggtttaaagtattactcaatctgagtcccttgcaaatcttatgttgacatttgatttcaacaaaggagatgaagattactatggactatttgcgaaggtaagcactctccttcccttttagggttttaaatgcaaattaaaaacgaaaatgcacataaagaaatgataggagggagatggatgacattttagagcataggactcgaagaggtggaagcacccctaaagaggaagctactagggatagaaattattgatagttatatcaaaaaccctagctaaagtagggggcggtgattatgaagctacaatgaaaattcattcagtttctactcggaattat

SEQ ID NO: 49442 - DNA, 463 bp, Gossypium hirsutum
  unsure (1)..(463): unsure at all n locations
  Clone ID: LIB3829-014-Q6-K6-G1
gctttttcggncgcgtgggattttcaaaacgaagtgctgccaaattaaaaagaaggggcagcttcaacgctgctgtgttgatgtcttttccgaggtgaggccagagcttgaggccgtcaatacctgtaagtgttgaatgctcaaattctaattctagttttattctaggcgtgatagcataaaacaagcagtttttaccctagagttaaaaaacacaggtgagggaggtcgtttttgattaaaatgtacagttaaattggaattggataaatggatatgcatgcagttggggggtgaaatgaacacaagaaatccacccattttgtctattttttggtctttaagatggttgggaccaaatagctttgtaaattcacttgaattcatagagaaacccttttttttttttttaaaaaaaaaaaaaaaaaaaaaaaaaaaaaaaaaaaaaaaggggaggataatt

SEQ ID NO: 49443 - DNA, 477 bp, Gossypium hirsutum
  Clone ID: LIB3829-014-Q6-N6-A6
aacctcttcaatgtcactaccaaacctgtagtaaactattattttgttgggggggggggggaacccttttgggggctcccaaaaccaggaaatactcatttttgaaatgtaaacaacggtttgcccacaatgtatcggtttaattcgaaatggtcaacaaaaatttgagaacaaaataaatgaaagaggtgggatcaagtcctatgaaaaaaaaaccttctgaacctcaaaagtgaccttttttggaggcttctccccagaaaaattggcaaaaatacctttgctaccataataatggattaccggctcaatctgtcaataaaaagcctctaaccttgacttgaaaactgctggggggtcatctcttctttgaatcaatggctccccagggacatcatcaaaaccaggaactttgggaggggcaaatttggtgtggtaggttccgcccctaaaaggatgaatccaacgaccggggat

SEQ ID NO: 49444 - DNA, 537 bp, Gossypium hirsutum
  Clone ID: LIB3829-014-Q6-N6-B2
aggcaggtaaatcatcttaaatataatatatatataaataaataaaggctgataaacaaaatccctcatggttttcttttttggatgattaaaccaggatgtcaacaaattttcacccactgtcaccactttaaacaaagcaaaggcactaagcaacaatgtgagagcaagcaccatacaaaaggcaaaaaggcaaagcaaaaatgaggtttccttgataagttgtttccacaaacaagggctaaccttttatacttggctctcatttgagcttcttcaacttgagaaaaacgggaccgagttgggattcacaagcagagagagtgccgggttccaaacatttcaaaaaagccttggttaggtctagtgttgttatcatttggaagatcttatcgcagcatttatgcacttcggtttttcgagacttcttttcgggcatctttgtcaccaaggtctctataagatgaccaagactctgcaggtggcttttcaaaaatttcttcgacgcatctcgcttgctttcattagagttcatgg

SEQ ID NO: 49445 - DNA, 507 bp, Gossypium hirsutum
  Clone ID: LIB3829-014-Q6-N6-B5
aaagcactacggtaacacatcgtttcgcttggacttgtttatggttaaactagtaaggaaattgtttgtacaaataaataccatacccaattcgatatccagccatagatgacagatcacaagtgtgcttgtaaatcattatagaacacatacttttgctttatacatacatcaaattaacaaggcacgataacataattaaatgaacatatatcataatccaacaacaacaataattatggagtccgttctggatgattcatatttgtagaaaaacggtattttccaccaagccaaaccataaagtcaaagaaacccaaaatgctctgttattttacagtccacacaagaggtcttacacaccagaaaatcagccataaagtctctggcagagggaaactgattggctgttgatccggttgtctctctgatctttgtccttgtacttgccaatacatgtcgctgcataggtgtcgaaactagaaccaatcagcggcattgaaacca

SEQ ID NO: 49446 - DNA, 438 bp, Gossypium hirsutum
  Clone ID: LIB3829-014-Q6-N6-E1
cttgttgatcttattttattgttcagtttttctatttttttttttatttttttcatgcttatcattttttttttggatttacaatacccctaaaaatgtttttctgggctttatataaaacaaatggctaagaaagagaccaaaacggggaggggggggcttacctgggggaaagggcactcggaaattgcacgtcctgtggggaacctaggtggggagatgggaatttcggggctttaacaggcatgtttccaaaccaggcttaaaagggggggcccggtggcatacaacccatgtttaaaaggggggggaatgacttccataaagttagggggggaaacccataggggcaagggctaggaggcgtctttacctcccattttgaaaaaaagggggggaaaggggggcttgttttaattaggggggcacccctgggat

SEQ ID NO: 49447 - DNA, 497 bp, Gossypium hirsutum
  Clone ID: LIB3829-014-Q6-N6-F6
ataaaaaacccttctgcaacatggaggactcctggattttgcgtaataaataagacgacaaccaactgggcctgggtattggcatagggagaagggatcacccgctctactttgggggactgggttcaccgtccataacctgttctatccctttggtctttacagcagcggcctggcaacatcctgaggcgcacctgggcgggccacactcagcacaagggccaccacaaccctgacgggaacactcttcactcttacatcccgacagagcgtggatctattgggatttttgggacttgggggatctgtgggacttgggggatcggggggcccaccggaattggggggatcccgcgggaactgtgggattggggggatttctggaattcttgggatttccggaatttgaggaaatggcggaacgaatccaccagggattacaattaccggaacaggcggaagaacaacatttatcagggaccccttcaaaaccaaaa

SEQ ID NO: 49448 - DNA, 538 bp, Gossypium hirsutum
  Clone ID: LIB3829-014-Q6-N6-G2
ggctagcttaaattttgctaaaacttatttataataagaaaagtacattataatggaagagaatgtgtccaagtgttatattttgcgaggaaccgactgtgttcctctttgctaaatgcaaattgctacacatctaatagattacatttgcaaagaatcagcccaaagaaaatactcaaatctatttcgaaggatatcttttggactgaaaaatccccttcaacaaagacgaaacttgtggatggcacatgagacccaattccccaattctaattgatccgcgttacccatctgggaatgataccatccccaagcggaaataatatgttgttagatgccaattttatatttatcaaataccaaaccttaacacctctatggttagaggttcaaccctcgctcatgggagtgaaacacattttctgattaatcttttatcttagatacaaccaaaataaaaaaatcttaggcaggagggttgcagcaagacagattcatgataagggacaagttatggaatcgaaaggaaatggttcct

SEQ ID NO: 49449 - DNA, 543 bp, Gossypium hirsutum
  Clone ID: LIB3829-014-Q6-N6-H3
gggcaaagggcaacatttataagcaaatgaagtaataagctacaacaaagtaggaagtagcatggacccatatttattaccaaaatctatggagctgttatctcatctcacctgatcagtaatgggtcactctatgaatcgctacttccaacatttacaaattaattctagcaacacttaccaataagtacatataccagctattaaatcgaacatgatttgtaattgaattacggcgcaagatatggttcgctcaaggtgccgtgagcatgaaagtgtcctcatctaatagttttttcgagatcaatcaagtctttgtccaaatctgtcgtttctcctgcaaagttgagaaccttatcgtacaagaccttctcttggatctcggtgacaacatttttcatcctactatattgatctcggcctgcaggattctgggccatggacttaactctggcaagtgccttctgcaacctttcttcagtttgcttcctgccttttttcaagaaatcatagtcatcctcctttgggggcacagatacgcta

SEQ ID NO: 49450 - DNA, 443 bp, Gossypium hirsutum
  Clone ID: LIB3829-014-Q6-N6-H6
ggggggggcccccccccaacgggaatcccaaaaaaaccctccccccataggggggggacatttgcccattgggggccagaataaatttaaatgggaggggaaaaaaccccttaatcaaaaagggggatctgaatcgggttttaaaaaaattagggcccctatagcaaaagttcatttcccccaaaaggggggggggaaaaatcctaagggggcccccttaatcaagggaaaaaacttaagcttgccaggaaaaaaaagtaaaaagaaaccccccttttttgacaaaaaacaagtttttggcagctaaaaaaatcgtaattagggaggaaatacccggccatttcaaaaaaaaaccttttttacttcctggaaaaacttgcttggggcggcaatttggtgggtggagggcattttttaaaaaaccatcaaacccttggagcttt

SEQ ID NO: 49451 - DNA, 167 bp, Gossypium hirsutum
  unsure (1)..(167): unsure at all n locations
  Clone ID: LIB3829-016-Q1-N6-A12
gtaaacactaaaacactaggatgtaggattgaacactggaaaatatattatgtgataacactgactttgtactgctgcataagaacatgacaaagggnctgtgcatgtgaagataccaaactnnaaaaataacagctaatttggagatagaaaatgcactcgagcaa

SEQ ID NO: 49452 - DNA, 391 bp, Gossypium hirsutum
  Clone ID: LIB3829-016-Q1-N6-A5
aaaaaaaaaaaggggttaggggcttttaaacggaacctaacaaaggaaaaatggggggggggggagaaaaaaaaccccaaaaggggttaaaaacattattaaaaaaacccaaaacggcaaaaagggggaaattatatttggcccccccgggaattacccccaaagtcccccgggggaataaaaaaaccccggggggtttttaaacccaaaaaggggccaaacccggggggttaaaaagggggggggaaaacccctttaggggcccccctttaacccaaaaaagggggggcccccgcccatggttccaaaaacccatggtttaaaaaaaaaaaggggtcggggccaaaaccaaaccctgggggggtttggtccgcaaaaaacggggggcccc

SEQ ID NO: 49453 - DNA, 431 bp, Gossypium hirsutum
  Clone ID: LIB3829-016-Q1-N6-A9
aggaacaacttaatgatcatctcaaccgggaacaaaatcccgaaattcaagaaaaaaaatcatttaaatcatttcatattttctcaaggaatataaagcatggatgggtattagcttcggccttgctctcgaatacatgttacagcaactaaatcaagggatgggcctgattctttaccaacatataatagtttggtaaccctacacaggaaagcccctggtagtccttgaacccgttatttcatcccattactttttgggcagagggaaaggagatgattaacctttgaacttttccaacttaccaactaatgcaggatcctcatcctcatttttagcataaaatttttgctcgacgccctttaccttaggaacataatgcattaacatattttcaatgccggatttcaaagtgacggatgaactggggc

SEQ ID NO: 49454 - DNA, 457 bp, Gossypium hirsutum
  unsure (1)..(457): unsure at all n locations
  Clone ID: LIB3829-016-Q1-N6-B1
ctaatatatttcaacatggatataaaccatggttctccaaatatcaaatccataaaccaatactcactgagacttacatggttataaatatattaacctaaaagtttacaacttgaaatcaacctcctccattttattacttgaatgaggaaataaattactatgttccaatttgctaaactacaagttcattaaacaacatatgacacaattagcattctagttatagcagattatcatacaaaataaaaatcaaaatgttatagcttaacatcantcgtcgtcatcatcatcaatgtcatccaactccgaagagttgtcaacactagtggtctgcagttgttgcatctggttaataacatatcttgcatcagaaactaatacattttttgctgctttaaccttgtctacttggatttgaacatatcctctgttctcctttccaagtactgctttt

SEQ ID NO: 49455 - DNA, 482 bp, Gossypium hirsutum
  Clone ID: LIB3829-016-Q1-N6-B4
acaaaggatggaaagggcagtgtcattatatcgaaaatacactgtcagtggcaagcaaaaatttccctaagtagtatatatatgtatatatatattattctatgacttggttaggccaaaggctttgccacatagaaatctcttgttgattataaagctttctaatgccaccataaaacccatcaccttcattgcctacttctctatgattttccctatttatcattgtttttctccatcttgaacttgaaggatattgcttgaattctagcatcacagtatctgtatcttgacaacggcagtgatattcatttccattgcatgattccatgtgaccgaccacaccataccaccacccataggggaattctctgtttcttctccattggatctcgatatgatcaccgggttttaagtcaaataatgagttggaaatgtgaagatcatatgagcaagtatcgaccggcggcgctcttagccta

SEQ ID NO: 49456 - DNA, 465 bp, Gossypium hirsutum
  Clone ID: LIB3829-016-Q1-N6-B8
ggcccaaattttgctcattttatttggcaagcgcagaaaatgcatttcaaaaagaaggattagagctgctgtttggtgttcctatttgctggctgattctctagcatctatcgccctcggcatactaacaaatgacctgggtgaaatatatgataagggaggagctcttgacttgagcactgagcttaaagcaacgtgggcaccctttctcctactgcacttgggtggcccagatgccattacagcttactccctggaagacaatcagctatggttaaggcacctttttggactaattgtgcagacaattgtgacaatatacatcttattcatggcatggacaggttcccttctctccaagctaaccattccaatgattgtggctggatcaattaagtatgctgagaggacatggactctatggagagcaagcccgggcgaattacgagactcgatgctaacttc

SEQ ID NO: 49457 - DNA, 475 bp, Gossypium hirsutum
  Clone ID: LIB3829-016-Q1-N6-C2
aaagaaacaggatttgatatcaaagtagaaaattgaagaggaattgctagaattgatgaaatgttgagtcctcatcatagaaaccatttatagcaactacttttgctggaagctcagggattgtgttacacacaaaatcaattagaatttaaaagtcctcttatcctttacagttcatccacacatcaatttcctactaaaaacaaagaattttcagtagaatgatcaagccattcagataacatgtaatccttctgacgtgaatcccacagctaaacataagcatctggaggagcttcttcaggaatctctccaggagtccatttctcttttaaccaaatatttgagtccccagaagcaaccgttgttggcaagttatttcctaactgaacatttgtagcttctcgtccaaccacttcagaatttgagagcgagacattcaagaaagcaggagactgtatgctggatgagctga

SEQ ID NO: 49458 - DNA, 486 bp, Gossypium hirsutum
  Clone ID: LIB3829-016-Q1-N6-C8
aatagaaacaaacaaagagagagccaatattttgtgttgtcaatgcaacaaatcatgtcaaacttgatgcttacattccaatatagtttatctaccataaataagtaaaaaaactatagctatatatgatatttaattgtttaagctatatatatattactttattccgtgatccgagatggatacctgaggcaggttgaaccatgattttaccacgaccgtgaaactcgtcaaacttggaaatcagaaaccaatgaatggatgcagatgaagttatgaaataatgaggcataaggtgattttttcaaatcttacgaatgccgggactcgggagctactgattcgactcggattttgcagctgtgttcccgttctgctgttgctggtggaactagttgctggtgtagctggaacatctggcggctaatgggaagctgctgcgagaccatgcctttggatggatcagaatcgccacctagttcttga

SEQ ID NO: 49459 - DNA, 478 bp, Gossypium hirsutum
  Clone ID: LIB3829-016-Q1-N6-D9
aaaacacagcagatgtctacttctatcatttagcataaacttgaaacttcgtaactaatttatttacaggaaagatccaactttatagctacactatataagctcctgataaatatatatatgttgagatttgctcacaagcacatttgcattgaatgccgcattctgaaatgggagctgttagaagttatgattcagggataaggaactatgatgaaaggtggtgatatttacccacaagaacaaatgcggatgtgagacatttatcagcaactatgatggggtttcatcatcagaggaactataatgccgccttacattgagtccgggaaaaactgatggagtgggagggttttgtaatggacgtgccgaactgtatatcgttctctcattcacctttgcaacctctttgcacacttgatcaagaatggaaaggaaatccctaacgaccataaagattcggaatggatgtgcttct

SEQ ID NO: 49460 - DNA, 239 bp, Gossypium hirsutum
  Clone ID: LIB3829-016-Q1-N6-E1
aaaggtaagcataactttgcttgcagaattcatcaaaggagaggactttgaatatcacacaacaagtgaacgaattcctttttgagccagacgtcaaataaaaagcacctggttttttatcctatcagaaaggagcccacatcctaagaacacatattgattagccaggagccaggctgaagcgataaacctctaacagagatagcaaaaattcaacgcataaacactggaaagtacaa

SEQ ID NO: 49461 - DNA, 380 bp, Gossypium hirsutum
  Clone ID: LIB3829-016-Q1-N6-E5
acctatattgtgtgattacttaaattcggaaacaacatatacgcacgttaatcctatcaacagggtggaaattcgcagactcaaatggagaaatgaagaaaaaaaaaaaaaacaaaaagataacaccggaagaagcactgtgcagcataaagtccagagcacaacccaaaacaaaaaaaggaagaacccaagagcactgcaaaaaaaacaaaaatcttttaactaaaaggcgacccccaaccctccaaagcggaaagaaccacccatgtcaaccataaaataagccccccccccaaaaaaaaaccccagagcttgatccttttagccggaacacggcccctgctataaccggaaaaataggcaacactgcctgacatgcc

SEQ ID NO: 49462 - DNA, 407 bp, Gossypium hirsutum
  Clone ID: LIB3829-016-Q1-N6-E6
cccatatatgagcccgcataaaagccttggggaaaacagggccacaggccgcccccaggaaaaaaggggcaccacactgaaagggccacaaaacacccaaacaggaagcaaaaaaagaaaagccggggaagccaaaaaagcgggccaaccaaaaaaaaaggggtcgcgccaaaagcccccagaaacaaccgggaaacagaaaaagccagaagccgggggggtccccaagggggagctaaaaaggcggattggggagggggccccagggcggtttttctttaaaaaaaccggacggccaccagcaaaaagaccttccccccccggcccggaaagaggggcattaagagggccccccaggaggggccccttttgcaaaaatcccagaggagggaggtaaaaggccccaa

SEQ ID NO: 49463 - DNA, 131 bp, Gossypium hirsutum
  Clone ID: LIB3829-016-Q1-N6-F2
actggtaatatcgagggtatcaattactggaatgttaaatgttcagagtgcaaatacaagttctttttggccctgaaacaagtggcattctatttgatgatctaattgttcaagcatgtaccatatttaca

SEQ ID NO: 49464 - DNA, 493 bp, Gossypium hirsutum
  Clone ID: LIB3829-016-Q1-N6-F7
ccttccccctctttcctcctctcctttttttttttttttttttttttttttttttttttagacgagagcaaaaatcaacatttttcatttaacaaaaaggaataataggaacaatacagttttaacttttttttttgggtggaccattatcatcatcatcatcattattatcaatggctttggaaaccctttacaaggggaaatttttcattgcctgatttggcctttgagaggagatggtctttaaagtaaaaaaggggctaaactaaattttcttaggaaaattggaaatggggaacccggcaaagatgggaatcagggggcctttagccaatggttgttttcttttaaaatatcttaaacagcagtcccccttgtgtagcaaagaagggggcaaaaacaagggattcaacagccatgagcttgatgagtatgttcagggatggcccaaatgtatcctttaaagggtctccaatgggtgtcaccaataaca

SEQ ID NO: 49465 - DNA, 481 bp, Gossypium hirsutum
  unsure (1)..(481): unsure at all n locations
  Clone ID: LIB3829-016-Q1-N6-G1
aaaacatagaattcctttgtttctgtattcatcaaatgatgaactttatatcatacaacaatgaaagagttacttttgtgccagagtcaaataaaatgcaccgtttttttttcctatcagaagcagcataaatctaagaacacaagtgattagtagtagtagctcaagcagaaaccctacagtgatacaaaaattcaacgcataacacttgaattacaaaatatagttacgactacagttataaaagaatgtgataataatcagaacttcatttcagccgcagctcaaccgagaatcagctgctcgcaatgtcatctgacggcggggaactccgatttcacatgcattcactctagcagcaaaacggagggagcacagagactcacccaccgaagaaggatnccggtgatacattcacaaacataaggggtttttgaatctccaccaagacaaggctggagaagatatgtcagcttggaat

SEQ ID NO: 49466 - DNA, 429 bp, Gossypium hirsutum
  Clone ID: LIB3829-016-Q1-N6-G6
ggcaaaaaaggaacgccttccattacaaaaaaggaaatcataaaatgggttatgccaaaacctacattggaaaacgggaaaacactttttaaaaagggtaaggggggccccaaaaatacaacgggaaaaaaattggggttcctactaaagggaaaggttttaaaaccttatcacctacgggtttacgggatcttgggtttttttctttttttttttcttttggctttaaaaaaccccgggcccattaacagaaacagggggttccccgctcccctgggtctttttttttttttttttcaaaaacttttttggatcgggggaaaaaacttaaaccttaacctgggtctttttttttttttccttcccaacctttttttaagtttaagaaaaagaatccccttcactctttttaggggccttcttcttttt

SEQ ID NO: 49467 - DNA, 474 bp, Gossypium hirsutum
  Clone ID: LIB3829-016-Q1-N6-H6
attaccacggatatattattaattttgtaaacgtgggtgaggtacaacaagacgttatgctaacccagagaagatcatttagatgtgagtcgaatttgcattaggctacctgatcctgcacttattaattgacacatgcttcacatattaaaaaaaaaacgagagccgcggaggctacagtctatacaaaaggaggagagccggccggcagatgaggacttatccttcaaccaaagaccacagaggttcttgtgtgaaactgggattgtgagcctatgggcaaatccacgctggccttttcagagcctatctttggagtgactctcgatggacagaacatgaccctgttcttatcaatgtaagaaacaatgtatctgtttggccctatgaccctcatatggagtaatatccacattatctgatttaaactgaacaagtgggcaacctgctacattagagttgtcattcaatata

SEQ ID NO: 49468 - DNA, 436 bp, Gossypium hirsutum
  Clone ID: LIB3829-016-Q1-N6-H8
ggaacggtattaaaatgaataagcacccaacctgaaagcacacccagcagagatggtcaagaactaaaaagcaataccaaggaaccagggggggtttcccactcaaaaatgaagacttaaaaatagacagcttcattggcttggtttaacgatggaaaggccaaggccagttctttaaaaggttatttggaactttaccattcccctgggttaatgaacctacgttgaccaccccgtggtctttcatacaaaacatagttactcaacaaaaacgcctttcccaaaaccacccaatgcaggaagaaaacaggctcgcctaacccgtcaagcattttgaattttaaaacccaattatttttcctcacggtagaccaaaagtaccccaataaatgcgacgtttgggggatgataaataccgaaacagacccttgaaata

SEQ ID NO: 49469 - DNA, 473 bp, Gossypium hirsutum
  Clone ID: LIB3829-016-Q1-N6-H9
attcttggcggcaattaaagatagtcattacaattgatttgtgaggccaatggttctgaaaaggttttgcaattgaaaaaaacaaagacagctcatctgggtgcaatgatgaggatgtccactacatgtatacatactgtcctactaaaaccgatgtgggaataaccggaaccacattccagtaaccggttaaaaaatagagctgccaaaatttagtgcccattgatctaatgccttaggagctgaacccactggcaccacataaggtggtttgccgtcagacaggatgacccatttatccactatatcctatatctgttttctgatctgaaaatgatgagcaaaaagctcgaacaaactccaaagatacatgctgcttttccatagcaaacaccaatgcctttaagagagacttgtgtaggatacttcatgagttttctcacattctcatgggatggactcctctgctgccg

SEQ ID NO: 49470 - DNA, 597 bp, Gossypium hirsutum
  Clone ID: LIB3825-003-Q1-K6-A10
ccagcttataattctattatttcttgtaaatcagtgtttaatatttttagaagcataagttcatttttctaattctttaatttttattggttcttttaattttcttattttattggtcaacaaattctcagactaaaatgattcataaacgtccttacaccgatgactctcaagaggttgcctgtaagcatatgaggcaatgtgatgatactgtccacattgcttcctttgttgatgtcaatgatgttcatcccaacaacgcttttcaaaaccatcaaattcctgaaggtaaatgggaggacatttacactgggtgccaagatgaaggtaggtttgctgaagatcaatgcaacaatgttcatcgtggcaccaataaggaatacgaaagtggtgcttctgcttgtgttcctcatttttggtgggtaaatggcaatggcatggatgcagatgcagagtcaaatgtggcagttcatcttccactgtttccggagtattttgcatccgggaaccaagtccaggcttttcttcattctgatgaaatctattcatctcttctttctcctaaaaaagtttctgttggaccagagtatcaagctg

SEQ ID NO: 49471 - DNA, 557 bp, Gossypium hirsutum
  Clone ID: LIB3825-003-Q1-K6-B7
cactatcattgagatatggagtcaacaccagcgtaggcgtggagacaaccaccacatgcgacagagacatgggttaggcggagaacagacacgtagttggctcctacatgttggaatgctcttgccgagaaatccaagcctacccaagagggagctgctgtcaagcccaatgctattcatggctgagctgccatagaatcatcagctccctaagaatgccaaagcgctgtgactatgactgtatccgcttcataatcatccaaactgaacgcgagaccagcccccataaggaaaatggaaacacctacaagagacatagggacaaccttgccccatatggaaagtgcaagtgactgctcttggagctgcagctggagctcgagctcgacaggagagatgtactttaatggcggctaacgccgaacactagagtgatcaagagaaaggaccaccgagttatgctgatggaactggacacgacagatgtacttcattggcgtctatagccgaacacgagagtgataaagtagaaagacgaccgagttatgctgctgctg

SEQ ID NO: 49472 - DNA, 589 bp, Gossypium hirsutum
  unsure (1)..(589): unsure at all n locations
  Clone ID: LIB3825-003-Q1-K6-D9
taaaanatgcctccgaggttgaaaagagctctcatgttgtagacatagctagcagcgacgatgacggcgacgctcaaactgtcgccagaaagcaagcttcctctctcggagaacgacaancttcgacgggaatantatccccagtcctgaaataccacagagctcaggacccatcacgccgcctgcactaccctccggtgaaaccctagactctcgaagtttctggaaggcagggaattatgtcattggccccacttccaaaccagctctgcttgaaggtgcattggagcatgcgcgtgtacaccccaagtttcttcattcaaatgcgacgtcgcataagtgggcgtttggagcaattgcagagctaatggacaatgctgtggatgaaattcaacatagtgcaacttttataaaggttgataaaatcgatataaagatggataattctccaggtccagctttactttttctagatgatggtggtggaatggatcctgtattgctacggaaatgtatgagcttgggttattcttctaagaaatcaaatacaacaattggacagtatggaaatggattcaagacaagtacc

SEQ ID NO: 49473 - DNA, 581 bp, Gossypium hirsutum
  Clone ID: LIB3825-003-Q1-K6-F10
ctttgagctgagttcccgaccccattaggtcctgcaatgcaattggtagcagtgaatggtttcatgcgctcgaattcacaagtaaaaacagctaacctatgaatcgaagtgcttggtggagtttaatagcctcttctgtttcttgctttccagttcatgcattgcagaatgtggaatggccagagcagttccccttcaaggacgaggatttccaacgcttcaatgaaacaccagattcattgttctatgaagctccacgctttgttacacatattgatgatgcagccattgccgcacttactaaatactactcagaggttttccctcccagcaatactcctggagtgagcatcttggatatgtgcagtagttgggtcagtcattttccaaaaggatacaagcaagaacgggtagttggaatgggtatgaatgaggaagagcttaagcggaaccctgttctaacagaatatgttgtgcaagacttaaatttgaaacctaagcttccctttgaagataattcctttgatgtcattaccaatgtggtcagtgttgattatctaacaaagcctcttgatgttttc

SEQ ID NO: 49474 - DNA, 568 bp, Gossypium hirsutum
  Clone ID: LIB3825-003-Q1-K6-F12
cggccgcgtgggtcgcgcttaaagcttctcttttttccccttgcactggacgcgtgtaggggtagcggagacatttttccttccctctcccttcttctattctgccttacctttctttcttcttgtcttctttttttttttcaatccgagggaagtttaatttttatactgttgaatacccttttgttctttgtgctgaattagtggtgggttttatctgaaagtgaagtagcattggttatacaaatttctttcggttcatatgactgaaattttatgcctttctttgtttctttatttttaatttttttctgagaagggaagagaatattatgaagattacggcgaggaaaaggatgttggaagtggcgggaagaaggttagaaaggaagaatgttagaaaggaagaatggtataacaacgtagaggccggcgctggaggaaatacagctttggcgagagtattagttccagtagagaagaaaggagaaggaaggtcaagtgttgaccgtgaatccaataatcaacaacttatacagttggaagaaaaggatgttgggacatctgc

SEQ ID NO: 49475 - DNA, 325 bp, Gossypium hirsutum
  Clone ID: LIB3825-003-Q1-K6-G12
agacgcaccctgtatcggcgcattaatcacgggcggtgtggggggtacgcacacccagaccgatacactcgccagcgacctacctaccgctcctttctttttcttcccttcctttcttgccacgtacgccggctttccccgccaagctataaataaggggctggctttatggatgcgatctattgattgacggaacctacaccccaaaaaactagattagggagatggatcacgtactgagccatccacctgatagacagactgtcgtccttcgacggacgagggcacgcacttaataaagaactctcgctcgaaactggaacaa

SEQ ID NO: 49476 - DNA, 527 bp, Gossypium hirsutum
  Clone ID: LIB3825-003-Q1-N6-A10
caaatcggttggacttatcactttttattcaaggtatacagtagtagactcactggaacaattaattcccgattcaaactattttaatgtctggtgttggccaatgtctaccactaataatacatgtactgagtactgacagtctggcagacataaattagattttaaaaaaaaaaaaaaaaccatgtcttgctggccacattcaggataacctaggctattcatgaactgtttcctattttaatcacacgtctgcagtatttttcttaatcagaagttaaacactttttttgtaccaaaaatgaagccaccattgaacaaagaagagagcaaatacatcatacttgcaaaaagaccaaattttaaatcaaatcgagagctgctgaaattttggagtgtcaccactcgtatgcttttatattatttccaacatccatgatcctggttaagagaaaaaagaaaaacacggaatcatgtcttggcagtacaagtgcttgcagattgcatacagaaggcaatattccatg

SEQ ID NO: 49477 - DNA, 539 bp, Gossypium hirsutum
  Clone ID: LIB3825-003-Q1-N6-A5
ggtaataatagtgcatgtataaccacttcttataatagtgttgaatcatgcagtaaaagagcaaaatccacttatttcttatttgtatacacatattatgatatcatcaatattaagaatcaaattaattcaaaaaacaaaaattcttgtaaaaatctgcaatgaatccaacctgcgcatgatgggggtggccagaaacagcatatcttattagctggaagggaattatattttaccatatcatatatcaatggtgagttcgattggattgtgaaggaaccctatgtttcggagaggccattggtggagctgtaggaggctgagcaattggtggaggagccttaggtggcggagcaagtggaggagggggtgagggagaagagtcgtggtagtaaggatatatagtgtacacagtttgtactatagtgagggcaaaaagaaaaatggcaccaatcaaagaaagcatagcccatgggtttctaaaataggtatggatgaggttagctcgccattcattccaagctttcttgcagtacttg

SEQ ID NO: 49478 - DNA, 536 bp, Gossypium hirsutum
  Clone ID: LIB3825-003-Q1-N6-A6
aaatcagaatgtaactacttttttttggagttttagcaacaaaataatggaccattgtcaattgttgggccaaacaaattttttgacaatttgactatgattatgatcagaataaaatagaacagattcagttagctattattctccgagactacttacttggttggagctacgatagagcatggcataatgatttgtacgcccctacacacatcttaaatttctcttcagccatctcctgtgaaggaccttgatgcttatcaggatgccacttcaaagctgatatgtgaaaggcattcttaacgtcttcaatctttatggggcctgctcaaggcaaaccaaggatttctctatcagaacatgatcctacatcatatgacttctcctcctcagactcagactcagagtcactagtattttcccactccttcgtcctttgatttatccagcctgatttttctctccactcaaatccagattctggattcttgaaagacttatctccaccagaagtccaagtataccatttgttccca

SEQ ID NO: 49479 - DNA, 516 bp, Gossypium hirsutum
  Clone ID: LIB3825-003-Q1-N6-A7
aaaagggaaaagggaaaatttttatttttaaaaaaaaagcttaaacaaccaaggtacccaacccacacttattacaaccaagcgtttggaaccggacgttatttaaaacccctcacgttcatattggaacttttattattattttaaccctacatgctaccctaaaccttcctaggaacaggagccgggtaattatggtcattctcatcgggattagccattccaaagggttgtttcaccggattaatcccaccttgggcccggttccttaattttttccccggctggtggaagatccccccgcttggctccttgggttccttcgcctttcctttaacaacttccggtggctggtttggcttggcggtgggtggcttggggggccctttgggcttttggttcgctggttttggtggctccattggcttttggttcgctggttctggtggctccaatggcttttggttcgctggttctggtttctccttcaagccctccttcatttgctcacccttt

SEQ ID NO: 49480 - DNA, 465 bp, Gossypium hirsutum
  Clone ID: LIB3825-003-Q1-N6-B1
ggggggaaccaaatgggtgggaaaacgggtttgttccattatacccacgggggcaaaaaaaaaaccttaaaatttctaaataataaaaaaagcttcgggctagcagtcaggaagaccttaaaattactaaaggttttatagaaccttgaaactttttcatttttaggcctattaactagcatggggatccgggattttaatgggttaaaaattgggaacctccagggggggtccattttaaccactcaaatttgggtttttatttaacaccccaagggtttggggggccaaagttccatttttttaaggctccatggggggggaaagcctttccagcagttcctgggagtccattggtggaaccataaaactaaaacttgaccgggcttttcaggagccaaggggtattgccaaagcatttggttggatatgggcttttttaaaaaaatcacacaggagcctaaa

SEQ ID NO: 49481 - DNA, 529 bp, Gossypium hirsutum
  Clone ID: LIB3825-003-Q1-N6-B12
gcaagataaattttcaaaactgaaatttcaagcagctgacggatcaaaatgctgtaaaatttacatgtaaaaagcttgctagactactttgttttcaactgaaatgcacatttacaaactgcacttgagtgaatacctaagaagaaacattatacaacatcctattaaaagctgacttatgcaaaaaagcataatcacaatcttcagaaaagcattagagcaaatcttggaattctacatgcacacttatgccaggataaggccactttattataacctcttgacagcaatgcagttgtgcaagcaagatgtgccagatttcaactcacacctcgatatatggcattagttctaaggtcgtccaaattgtcaatgtttctgtatccattaatctccctgagacctgtgtagcctcgacggagtagatattcacggtaatcatcttctacataaaagatcttctcctctgtgtggactggtatatgatccgactcatcataaaggcaaacttttataggcaaaccttcat

SEQ ID NO: 49482 - DNA, 533 bp, Gossypium hirsutum
  Clone ID: LIB3825-003-Q1-N6-B2
aaacattctttcaaatcatctaacaattgaaaagctcatatatttgcttacgccacatattaaaccttaataagaaactctttcttcctctcttatatgagaagagagcatcgtctatacagaaacacgactaggcctcattctttaaaaaaaccatgagcatctgcctctgaaaaaatctcatgatcaaacacattggcaaatacccaaaaaaaaaacctttaacccgcaccttccctgatatatatacagagccagataccatattacccatagccttcaaccctctagggctgtaacttggtgatcttctcctccatgaatacattgcgaacaccggataacttgaaaaacatgtcacccccacttaccaaataggaggtacattgcataaaatatgaccggttaagcatactttgcaccaccgtaatattccataaaaggtcatgaaatgcctcatattcatcttatatcagtgaaagcgatcgccccattagatcgacaaccacatggccgcaccagctatctccacc

SEQ ID NO: 49483 - DNA, 536 bp, Gossypium hirsutum
  Clone ID: LIB3825-003-Q1-N6-B4
aagatgaaccctaaagaggtacaataacatagaaaattgccacgattttattacacagcttgcgctgacatctaaaatcataatttacttacaacagagaatcattcaatttcatcatctatctatctatatatttgtaatctatgaaacaatagtggaaaggctatatagataccagccctcagaaactaatatattgtattttttttttcttcgaatgaaagaaggcacgatggaatccgaacttcggacttgctggatgctacttcttaaagataacagccatagattggactttcgacttgtggaggtaagagatgaaggtctttacactgttgtcttccgtaatcccgagtacctggtattgctccagtgcaaagtcgaaggaattcattccctgtgagacaatagtgagcaaatgctattcctccatcgaccatctctgagagggttggcattgaaaccgatcttgcaattagttttccgtttgattttctaaccattgtaccactatgttcgttattcaagattctgtc

SEQ ID NO: 49484 - DNA, 405 bp, Gossypium hirsutum
  unsure (1)..(405): unsure at all n locations
  Clone ID: LIB3825-003-Q1-N6-B6
acttgaataatactatattttatatgttaactaggcacataaacacaaaaaattgagagcattatacacatcataatgagaggatcctgcgatacaaacaagaacactaaaacctgctactgatactaggatatcaaaaagggaaaccaaccggtatcaactaccacaaaagatacagtcaacaccttatctgaatactaggcctaacaaaatcaatgtctgtatacaacactactaaaatctttacgactcaaaaccactctgcaccataacacgaacatactttatttcattcaaccaacgcatgttcttatatgagcaccctgcaccatcattagcaattatggtcgatcgtaaatactactaaaanctcctttatattgtcgcacaaattcatatggattc

SEQ ID NO: 49485 - DNA, 556 bp, Gossypium hirsutum
  Clone ID: LIB3825-003-Q1-N6-C12
ggaaaaaagcacacgacattcaagctataccaggaaaacagagtaaatgcaatctatgcacatcgacatcccttacaagcaatgcaaacggataacctatcttcatcacctgtgccactagagagaagtaaagcacacactatatcctagggtcaataaactttggcgcaagtgctgtatgcttttcttaaaaagagaaagaacgaaagttttgtttgtataccacaaaaggctctgcatcatcttttggcatcttgagaaggtcctccaatccggttctcaccctttgatccttccgggaatcagaatctggtgacacacttcttgcattgctaggatcagcatttggtatttgtcccaatagactttgtcaaagtgctgtatgcttttcttaaaaagcgaaaaagaatagaagttttgtttgtataccacaaaaggctcgtcatcttttggcatcttgagaaggtcctccaatctggttctcacccttttgatccttccgggaagcatcagaatctggtgataaacttcttgcattgctaggatcagcgttcgg

SEQ ID NO: 49486 - DNA, 455 bp, Gossypium hirsutum
  Clone ID: LIB3825-003-Q1-N6-C2
caaggggaaccaccatccgtccaaaaaaaaaaaaaaggcaaagccaaaccggggggggaacatggggccccaaataatagtcaaacccaaaaaaaagggcggcaacaaaagagagggatttaatccgaaaaacccatcccctctcccagggaaaattcatttatgggggacaaagctaccaaaaaaaaatctaacctaaccaacaaccccaaatttaaggcccttcaaaattttggaagtcaacccatttaaaaacggaaaaattggtttccccaggcaggggaaaagtcccaacttaaaaagcggccccccctaaacagggaatatggtttcgggggcaaacagggggtaaaatgggcccaaaccaaacaaaaaacccaaaaactatccccaacggggggggggctggccctggccaaagtcggaaagcccccaaaaaagctttttctttaaac

SEQ ID NO: 49487 - DNA, 497 bp, Gossypium hirsutum
  Clone ID: LIB3825-003-Q1-N6-C7
agctaagaaacactaaccataaatttgctgggaaagaaacagagacaaaattcagaatatcggcactgacaaagcaaccatgctgaaattacactcaaaagcctaggtattctttaacgaaactagtccacacagtttggaacaagaactaaataacctagctaagaaactatgccgcaaaagggacaataaaagaatgtaatcaaagctaggaaccaacaactagcaactatcagcattcacagtataactacgacaaaatttcattactggttttctagctagggctgatgccccttattcttaaaaaaaagaaaagaaaacaaatcgggccttaaaatgaaatagacgtttagaaaccaaaccctttgtgactttgacgaattgccaagtctactgaagccccatgaaccgatggttctgcaattatctcccagatccagtaagaacatcaagcaatccgcagcaactgaacaacgaggttctttgcaccactg

SEQ ID NO: 49488 - DNA, 547 bp, Gossypium hirsutum
  Clone ID: LIB3825-003-Q1-N6-D11
ggcactaaagcattaaatgcatactaatgtaacattcacggtgagtcaaaattaacacatggtactatgcaatttgaagcaatttctacaaatgcttctatcaaaactgagccgagcagagagcagcagcaatatatacacatattcaatgattgaaacacgcccaaaaaaatttaatctaaatcttttcctttgagcttccctttcaatcattctttttaagtcgtggtattcttgtcggttgcatcagttctcgaggcatatccatgtctgcaactccggcatcacttcgtgcctagcgtaatggatctctgagcgactgacttgaaactcgtgtttgcttttccagtcacttcgatgacaattttgcttagagttgtcgggtgtggcaaaccggaaagtctcgaacgttcatatccatcttatcgaaggtgaggttcgcgatagttcgatcgatggtgttggtctctgattcagttgtttcctttttcccagaccttattttctcctctgagattgtccacttcggagaatgagttcgaacatg

SEQ ID NO: 49489 - DNA, 450 bp, Gossypium hirsutum
  Clone ID: LIB3825-003-Q1-N6-D6
aagcccaaaacaaaggtccattaaacaaacccccgggggttcatattacaaaaaattcaagggctaaaaaaacgcccgctcaccaacttttttttacggggggaaccaacccccggtgggttttatgggggtggcgggggccgcaaatctaaaaaatcacaaatttaaggggggtggccttctcttgcaagggggcgaaaagggtggaaaagcttttttggaaagaccccaccccctcgttttccaggggggaaccgactttgccccagaaaatccccaacttttaaagggccctatagaggccttcagcttaaaacacgttgggggaaatcgcccttgaaacggggccgggggctaaaaaggcttggagggcttggccaggcatgggtgaaaccgggtcagggccaagggggggggccaccttttgggggtcaggggaggcagggtttt

SEQ ID NO: 49490 - DNA, 537 bp, Gossypium hirsutum
  Clone ID: LIB3825-003-Q1-N6-D9
ggttgacaataatttcaacactgctttcatctgtagtatatgaatcggttttcttttgatttgttttgctttcaaaaaaaaaaaaaaaaaaaaaaaaaaaaaaaaaaaaaaaaaaaaaaaaaaaaaaaaaaaaaaaaaaaaaaaaaaaaaaaaaaaaaaaaaaaaaaaaaaaaaaaaaaaaaaaaaaaaaaaaaaaaggggggggccccccctttttttttttttttaaaaaaaaaaaaatttttttaaaaaaaaattggggcccaaaaaataatttttgaaccaaaattttttaaaaaaaaaccctttcccaaaaaagttcccccccttaaaaattaaaaggaaaaaaaggggggttttaccccccaaaaaaaggtttttttcccggggaaaaacctttccacggggtttgggggacaaaaaggggttttcccccccggggaaattgggttaaaaaaccccaaaagggtcctttggggccctttgggaaaaaaaaagggggccccctttttttttttattttttcacccccttttt

SEQ ID NO: 49491 - DNA, 519 bp, Gossypium hirsutum
  Clone ID: LIB3825-003-Q1-N6-E2
agagagaaacagagtgtgattcttttatccatttgcctttggatcaaaatatgatgaacaaagtagaattcatgtctcttttaccatacactcaaaatttgtggtgtgaacaagaagcaaggtgtgacaaaattaattgtgaaagaaaaagaactacagaaaaaacttttctgatatgtcctcacttggacatgtgtgcaaaagaagatcaatcagttggtacagactggattaaactctgttcaaaggtggaagcaattgcaaaagcttggataaaaatcgagcactgcaagcagattatgcgtctattgtccatccttgagcagcaagtgccttcatcacctggctagcggcctctgctgtgtcatttaacggtgtatagctccagctctcagatatatcctctttgccagtgaaaggacaaactgctcctcgttcccgcagagacttttggaagtcagcaaacttccatgtacatctctcagctcctataacatagactggttttcctgtagtgca

SEQ ID NO: 49492 - DNA, 480 bp, Gossypium hirsutum
  Clone ID: LIB3825-003-Q1-N6-F10
gggcaaaaaaaaaaactcattggtgggaagaaaatcctcataatcttcaaactggtagggatagcttcttaagcagtagaaagcttcctagagaaaacaatgtacataggatctgggcgtcctggattaggagatatttcaacagcctgtagacaaaaatgaatttcttttaggctcaaattaatggccaccataaacttggatgcttttaaattggatatattcataatgcacgttttcacatcaatgcaaactggcaacccctagtttccatttggaaactttggggcttatcttaaaatatttgcaacagcgtatatagagttaaaaaattgccggctaatggttgtccaaaaaacacttggggggggaagagccttttatgagacaaaatattaaatactggttacctgaggagggtcaaatccccccgcataatggaaatatgacccaacaatcaaagcatgatcggggtcacca

SEQ ID NO: 49493 - DNA, 480 bp, Gossypium hirsutum
  Clone ID: LIB3825-003-Q1-N6-F11
cataaaaaaaaaccccattaaccataaaaagagggctcctacaaggggcctcaaccccataaccatccataaaaaattaaaccttttgcaaaaggataaatccacgtcctacctagtagagtaaaaccagccaacccagtaaaacaggggttcaggaattaaaaaaaaaattaccaaaacatgaccctactttgacccactgttttaaccagggccagcggtttttttcacatcgacaggaaacctatcctcctgaccacaacctaggtaaaaatcccccatgaaatccaaagggtatcccttctccgaaccttcagggggaccaacaaattaaagtttcaccttccctttcctttaaaaaacacccttttaataacaaccacctggttactattggggtaaccaacaaccagccaccacccttaattttttgctttggggtccctggaaccataaactggcccaacctttgtcttcccc

SEQ ID NO: 49494 - DNA, 354 bp, Gossypium hirsutum
  Clone ID: LIB3825-003-Q1-N6-H8
caaacaacaaaacccaacctggggaaacgggcaaaaaagggctgccggggcgaaaaaactttatgaagtcccgggggcgaaagcttaagaaaccctcccaatcgggggggcccaacaaaaaaactatcccggggccgaccaaaaccccgggaccaaaaaccccgcaattggaagataagtaaaccttaagcctactaatgcccaaagccttctaaggggccgggggaaaaggaattttggacctggctttccaaataggcccagcccaatcttgtagtttctttttcgaaagccagtcttgcatggatcttgcccgctgccttaacaaacaattttaccatatcaggcaactta

SEQ ID NO: 49495 - DNA, 593 bp, Gossypium hirsutum
  Clone ID: LIB3825-004-Q1-K6-A10
cagcagcagcagcagcagcagcagcagcagcagcaagaggagaatctcttgttcctatttcacttcgttctctttcttcttctttttctcgtatcattctaaggattttttcaaacagtcggtggtgttctgcaattatcgagggcaaaaaaggtgtttgtttgtttatttatttgttgtttcctgtcatggtttcgaggtcttattctaatctcttggaccttgcctccggtgattccccgagtttcggtggggagcgaaagaggtttcctcgagtagcgaccgtccccgggctattgtccgaggttgacgatgagacctgcaacagtgttggctctgaggctccttcttctgtttctcaagaacggatgattatagtagggaaccagcttccactgcgagcacatcgaaacgaagacaatggagaatggtgctttagttgggacgaagattcgcttcttttgcaactcaaagacgggctcggggaagatgtagaagtcatctatgtaggttgtttgaaagaacaagttgctctgaacgaacaagacgatgtcgcccaaacattgctcgaaactttcaaatgtgtccctgca

SEQ ID NO: 49496 - DNA, 564 bp, Gossypium hirsutum
  unsure (1)..(564): unsure at all n locations
  Clone ID: LIB3825-004-Q1-K6-B8
gtttttgttctcgatgtagattgctcattatgaaaaaanagatagatgtaatacgagccaaagacattgcacaaggtgggttgacacaaggccagcaaactcagattgctaggaatgaacaaagaataacacagatactggaggagcttgaaagcttggaagagactttaaatgaaagtatccgtgaaagcataggtgcacgtggtggaacaactcgtggtaagcgaaaaggagggccagacgatgatgaagaagacttttcaagtgatgatgatgaattctatgaccggacaaagaagaaacctactgtgcagaaaattggtgaaacacagtctattgaaactgctgatagtcttcttgataagagagatgccattaccaaagaaattgaagacaaaaaagagttgctgttgactgagaagaacaaaatggcctcagatactggtttagaaactgaagctggagatgcacttgatgcttacatgtctgggctttcatcccagttagtgcttgataggacagtgcaaattgagaaggaactctctgcccttcagtccgagttgg

SEQ ID NO: 49497 - DNA, 632 bp, Gossypium hirsutum
  Clone ID: LIB3825-004-Q1-K6-C12
aagctggtcacgctgttacggacaccggccccggatattcccggtccgaccaaccgtcgcgtcggagttgcgtatccttattgaactcaagtgagaagctattaattgcccttcaaccataagatggttatgaatgggctatctggagacacaatgggatctcagctgtgtccctcttgtgccattggtgcaggatcgcatacaaatataaatgacctctcggttgccactaccactctttggtggagaggatacctaactctaggatatttacccaatacgcatccttcatgagcatcaacatagtctggttacattagatgactctgacgtacagaacggtatatgtaccgatgattggatctcactcagcacttggaagccgcgcaagtccatgccatcgggactcgacaactgtgaatggcttgaatccaaggcagcctctaccttccaaagagcgtgctatggacactgtttctctgatgcttgatatgaatgagagtagaaatgggaagtcaagtatgaataagaacatagagcccgtttactcatcttactccgcaaaaaacgggtcagtttctacccaagattgatctcttctctattggacatccggacacccagaaatattg

SEQ ID NO: 49498 - DNA, 316 bp, Gossypium hirsutum
  Clone ID: LIB3825-004-Q1-K6-E12
ctccgaattgatggcctgcacatctgcaaaggcaactcactccatttcactcaccaatttctcacctttgactcgccctttacgcccatcacgactcggacgcctcaactctttccactgcaaacctttgcttttctctcccctctccacccgctacaagcccctctttcttcctctgaattccgacactatctcgaaccgctgcgtcgctaatgacgaacacacccatactcatgagtctggccatgacaatgatcacttgtcatgacactcacctaccacaccctaccaccaccatctgtgtggttatgttcta

SEQ ID NO: 49499 - DNA, 577 bp, Gossypium hirsutum
  Clone ID: LIB3825-004-Q1-K6-F10
gccgatgatgcatcgaacgacatttaaagaggcgaatcatacctgttatgaggctgctctaaactgtccgacgatgcctacgtgatacatagaaagaatgcaccaggataaagacgcactgtgcctggttaagcatacttgacttctgacgatgaatctacactgccaggggaagaaaaccagaatcaaatcatggaaaggatatttctgaggagaaataccgactcaagaaatgatcaaaacacagcgggtggagaatatgggagtggaaatggtaaatatgggcagatggatacaaaatatggagagatacatttaaagtctggacaaaacacataatgaaggtggcgaaacgaataacagtgtgcaagcaaaaatcacatgagaactcaagtgagatcagatctgagtcagctgagggtggcaagaacactgatgaagaatgcagtgaatattaataaaacatgttgacaaagaggatattaacgactgaggaaaattacgaagagaatcaggatgagaacttaaaaccaagtgccgctgacaacacagcggaaagcgaggaaaacaatcaaac

SEQ ID NO: 49500 - DNA, 279 bp, Gossypium hirsutum
  Clone ID: LIB3825-004-Q1-K6-G12
taaaacatgttgggatacgaagacaggctaattaatagtgagaaggaacgtgtatgtgtggcatgctttggttggcttttggggaggagtgaaaactgtaggtgctggtatacaacattaaaataaacggttgacctatcactgttcagtttccagtggtgatggaccaccagatatagttaagtatggacaggattactgttcatggcctggaattgattgatcccataagagtgtttaagtataagagagaggatttttcatgcctgggtttcattg

SEQ ID NO: 49501 - DNA, 555 bp, Gossypium hirsutum
  Clone ID: LIB3825-004-Q1-K6-H7
aaacctaaaatggatttctctttttggtaaaatgatggcgaccgagacgacccagaacccggcgcccgccaacaaagcttccatggggtgaattatacgaagacgacagggaggatttgaatttcttgttgccgccaatagcaagtaattcggacaccctcgaagaacggggatcaaggaatgtgatagagtacaagttcaactactgaggtgaaacaaagtcaaaattacaacgacgacccggcttctaaaactacttaatgcccggctcagtaaacaagcagaggacctatagtcttatcccaagtattacgatgctgcaagggaatatgtttgtagccgactcactatagtatccactgaagaaatcatccttgaacgacctagagctcctggtacctaagcataagaaccgaatgctaccagagattacttggctcaactaagaaaaggaggtgctgttcttattgtgtgtaggacttgtagtaacaagggtgatcactgaacatatatgtgccacatacaaggacctacttctgccggctgagtaattcg

SEQ ID NO: 49502 - DNA, 450 bp, Gossypium hirsutum
  Clone ID: LIB3825-004-Q1-N6-A2
gggaaaaagaaaaagaacgggaaaaggggggggattaaaatttcgcccgaggactcccacttatcctccacctaagagggggttcaaaaaagctggaccagggtcaagctcaaccgggtcttttttccccggggatgttgccaagccccttcccttggatggggtttccctggatagtaaacagggacagggggaatttgcttaaaccatttatgccccctactaattacaggacgaggcttttggctacctaaagagagtcataagtcctcccgcctgttacccgcgctgggttgaatctcttcaatttgacattaaaagaactgggcaaaaatcacattgcgggagcctccgcagggaccaacggaatgcttggctttaattaaacagtgggattccccttgtccgtaccagttaaaagtaaagtgttaatcccccgggaaaggcccc

SEQ ID NO: 49503 - DNA, 542 bp, Gossypium hirsutum
  Clone ID: LIB3825-004-Q1-N6-A8
cagtgaaaaggtgtaccatgcatacttcatttcccagcacataccaagatttaatacacacaaaaaagggggctatttcagttgacaactaaaccaacctacaaaccagttaaagatcctccgattaaatattctaacagtacgaagaacaaactgaaacagtgttttacagagctagggttgggttgggttgggttgtgttgtgtgctaccaggagccttaaaatgtcccggagccctgcagccatttttatcaatcaaactgcagtcctttttatctccgatcaatctctatccccattgcttattatagctctgcttcatgctctatatctcacttccgattttggatattagagctagcctgagctgctcctgtgtgtaaaatgggttccccatctttacggtggcttgttggatcatcaagtcattcactaccgtcacactagcgtgctgcacatcaagatttaattcctttaaagcagccattaaccttgctgccggatggttctttctcttgcattggattcgaatcattgcgtc

SEQ ID NO: 49504 - DNA, 455 bp, Gossypium hirsutum
  Clone ID: LIB3825-004-Q1-N6-B9
aattaaaaatttttttgtatttttaatattggttaaaatccggtttaatgaccttaaaatatgaatttaacatgcaaacaagacccaggggacaacaaaaaaaaaaacactcggggacattccaaccaaaaaaaaaccgagttccaacccaaaaaaaagaaaatgaaaaatataaaaatatcggggaaaaaacaaggcatggaaaacaaacccaaccccccaaaaaaaaaaagaagctgccccccaaaaaaaattcccgaaaactccctttactgtggccaaaaaaaccttgggggaaaaaaaaaaaaaacctcggttttaatggaaaaaaagcccaaccccttcattttttcaaaaaaagcagatgcagggggaatttcctcttttggttcccgggaaaaaaaaacttctgggaacttttgcaaaaaaggttagcaatttttcacagatgcaaa

SEQ ID NO: 49505 - DNA, 533 bp, Gossypium hirsutum
  Clone ID: LIB3825-004-Q1-N6-C6
attggaaaattgttaaattaatatttaatatgaaatcaaggaatatttgccagtaattcatataacatctaattaacaagctctaatattaagaaaaagaaaagaaaatttgggaccacaacaagatcaatctctgcaggagatcattggcaccttgtatgtttgaacattcacacctaaaaactattcttcttctattgccaatttttgttgtgaagtaactctactttgatactctcgggtacgggcagtattactgctcgagctatgaaccaacccgaaatttagagttatcacacctatatatattcagattctcaagcaaggcagagattaaagattatgatttctggaccaagaaatatacgtaaagctattcaaagtacgacttagctccatgtcacatgaagtttttctccacaatctttattaactcccccagcttttcgattatcttcggattcatcaaatctctagcttcccttaagagagtgccttcatggctgaaattataagcatccaccacagctctc

SEQ ID NO: 49506 - DNA, 469 bp, Gossypium hirsutum
  Clone ID: LIB3825-004-Q1-N6-C9
caaaaaacaaaaataaaaaaatcggcccaaccggcctggaaaacaattaaaaggcgggttctaattttaagggaaactttcccccaaataaaaaaggggaaaaacgggggggaaagggcaaaaaaaaaaaaaaaagggggcccaggccatcccaaaaatttaacttcaaaaacccaaaacataataaaaggaaaaaaaaggggaaaaaaccccaaaaaaaaaacggaaccacccccccggaaaaaacaaaaattaacgggaacacaccaaaccattgggaaaagttccaaaacttggggaaaccggggggggaaaaaaaagttggaacccaggcttggccagttaactggagggggggggctccccccaaaaaaaaggctcccttttttggaaaagcttttctttttgggcctaaaaacgcggggcctaaccaaaaaaaaacatcctttaaaaagttttggggaagggg

SEQ ID NO: 49507 - DNA, 472 bp, Gossypium hirsutum
  Clone ID: LIB3825-004-Q1-N6-D4
aacaccaacctggggcttaggaatataaaaaaaactggaagagggcaaaactatttttatacttaaaaaaggacggggccttaaattttaaacccaagggataaaaaaaaaaattttttttttaaaaaaaaacctagaagggatcaccattaaggccacaaggcccgggggaaaaaaaaaacaaaaaatttaaggggccccaaatcactataaattatcctaaaaaaccccttttaaaaaaacaaaaaaaacttttggcatagggggaatttcacggggaaaaaacggatcttaaaaccccaaaggtttgcaaaaaaaaaaaaaggggttccattttggaaaaactacccgagcaataatacgtccacggggaatttgtaaattaaaaaaaagggtttaagcccttgaatttgaaacatcgggttcaaatatatgcaagggagccccggccatgggcgggttgggggccacc

SEQ ID NO: 49508 - DNA, 534 bp, Gossypium hirsutum
  Clone ID: LIB3825-004-Q1-N6-E1
tcgcgatctagaacccgccgcgtgggtaccacccgaataattgcagaccgcctcctggcggcctaccagctcttcttatgaggagtcttataacagctcggcgtaatgatggtcattgctgcctgctgggaaaaattgttctccgataacaataccccacataataccagccggcatcataagagtgagaaggctgtggcgcctaaggagggaacttaataacattagttgcgtgctgattactggctgtttagcaggcaaaaaacctgtgccgcctgctgtattaaagaatccaacaacccgcgagaagaggctggttgattattcgccaccatggtggttttttttttcaccaagaagaccgacaacagatggttgttcttcacctgctgctcctagaagagtagcaagaagcgcaccacgcttggtcgccccaggagaaaaaaatgctgtatgatggtggacaacggcataatataacatcagctgtcttcatcatcgtatcctactactaccataatatccgcaacaacc

SEQ ID NO: 49509 - DNA, 525 bp, Gossypium hirsutum
  Clone ID: LIB3825-004-Q1-N6-E10
aggaagaaatccaatattattttaatattcaaaactagctataaagggagagtttacatcattgttctaataaaaatatgttacacaagtttcagctgaaactgatttctaaaagaagaaagctgatatgccacaccttgcaataccagaggtgtcagatgcatttctatatgaagatcaaagctggaaaacaaattaacctgcgaaacatctggttcacatgaagaggcaaacactatctccaaccaaatcaacaagcaaaggttgcaacttcgttgaatgcaagtccctcacctcaattaaggccatttaacaataatgtgaaaaactaaaacatgaacattaaatggcactgatggatgaactttctctcagccaaacaaaccaccagtcccaaattccccttgctgcaactcctttctacattgctcttccaaaggatctggactcttcaacattcttctcatgcgcctgtcttgagcatgctgagcagggaaagtgggcatgaaagctttggtcttggga

SEQ ID NO: 49510 - DNA, 526 bp, Gossypium hirsutum
  Clone ID: LIB3825-004-Q1-N6-E11
accatgaacatatcgactgcaaaatagcatagaaacagatataacctgtatccaacaacacaatggataactgatacaccaaggaagctcaagcagttatttgaaatctgtgaatcaaatgtgggaaaatagtgcagatgaacgcatacacactcaattacattcccagcttgcattcccaacttttaaaagttcacaactaaggaccttattaacactcaaaacgaccatagaataagtaaaagtcacctctggttcattaaggtccttagttgtgaattttaaaagctgggaatgcaagcttatcgcgaaataagggatttgctccaatcagcatcttaagctctacaagcatgatattccgagcagatttcttgtcactgtagtttgaaagctgcttattttgtctaaagttatcaagagtaagcaactgtgtaatctctttaaaatgttccttgttaagggatgcaaaaaccttcaaatcctttacaagaatttaaacagcctttgctcgatcctgcctgtt

SEQ ID NO: 49511 - DNA, 392 bp, Gossypium hirsutum
  Clone ID: LIB3825-004-Q1-N6-E3
aaagtagcattttaaaaacaaccaaacgttctcaatatcctaatacagcttgcaattaatggcagtcaaaatgttactaccctacataatcaatagcttgttagttataataagttaccgtaaaagaccaaaaaataattcaacaataaaaaaaacacaaattgatattaaactggatagcgactgaaactatagaagctagacaagcaaactaaaataaagaaagtttgaaattttactttcagttttcagattttcttcacaatctcaacggtaaaaaagtaaaagatacacagccaaaatccacatctacttcaataaatgaaaactaatacaactaaatcaagaagaaaagaagtaaaagcaagcgtgtcggcagaactggaaaaagg

SEQ ID NO: 49512 - DNA, 430 bp, Gossypium hirsutum
  Clone ID: LIB3825-004-Q1-N6-F10
ggttaagaaactacactctttaataactaaactggacacacgggacaactactgaaccctattctaacgtcacctaatatataatccgacactggtccaacaaggatggcatacaatatacaagctacgctattctaagaaaaaaggtaaaacttgattcctaaaggtggaaaagacggattccgtcaatacacctgtaaaaacaatggtagcctttataagatttttcacggggggacaggagaagctttcgctaacacagagcatgactcagaccgtactatcaaataaatactctatactgccaaagttaagatttatcattgctctgcaccgaacttataacctctgatccgtctcatacaatacaacttgccttctgactctgaggatccgaacaacatttgcattaaccgaaaccaactaaaac

SEQ ID NO: 49513 - DNA, 536 bp, Gossypium hirsutum
  Clone ID: LIB3825-004-Q1-N6-F6
agaaagaaaactagcagcagttagtatagaaagagaaaaaataaaagaagtttgtattgtattttatttgtatgtaaataaattagtatttgaattatctttattattacgcttacaacactaggttgacggctcaggagacaaatcacaaaaaaagaacacagcaaaactctaatgcaaaaagattctaaaactaaacgagaattacaccgacgaagaaacctacgaatataactagttcacacaatatcaagcaatcgaaacaataaggaaacaagcacaagaacaatcaaagcaatatcaaaagggagataaacaatacagaaataatctccacgagaaggacccgagcaaagacccccacaaaccaggccgaagcagcgacaatccaggagccccagcaaacgataaaagaacaaccccgaacgaagacagatcgaagccaaaggaaagtacagagaaaaggaagaaaagccacgtcaagaacttaaggcattccctaaaacagtcctgaagccaagggacgtggaagcacc

SEQ ID NO: 49514 - DNA, 507 bp, Gossypium hirsutum
  Clone ID: LIB3825-004-Q1-N6-G8
gataaggaattattctacgtaattgacaatatacactgtaaaggcccaagtttgtctggcccaaaaataaaatccatttaaaaattaattaaaaaaccaaagcccattaacccaaagcctaatagcccccacccgaggttacccaccccctaagactgcactctgccaccatttcaccaaaatggcatgtggcgccactctcaccgacattgactgaaagtctccttgccaacaccacaaaagtaccttttggattgagagcacaaaatatactagcctgagttgccttcatttggcttcggaattcttttgtaatcatagttgtttatatcaaccttctgttgcaaagcctttaattcttcctctaatgaaatcttttttggcttatatgcatcaatgggtcctgttcttgataatgctttcctcgtctcgataatttcccattcttgatcatctttcacctttgctatatccttgctgccctgcaagaggtgaccaaggccgact

SEQ ID NO: 49515 - DNA, 532 bp, Gossypium hirsutum
  Clone ID: LIB3825-004-Q1-N6-H3
atcaaaccacgttaacacttaattttcaatatatcaaataatttttataatacaaattcaatgctgataaatttaatacttaatttttcaacatttaacttatttcgacctgtaaactaaccaaatataaatacaaatacatgaccttatctaccattttagatttgaaccgacttgaactagcagtaacccttaacgcaatccatgttatttgcttgcaggctactctatgaagattattatgttgagtttggtgaacatgatgttatcagtaagcaaaagctatatcggtggaacggtaatcgtaacgtgtaatatcggaatatggtaaagattggcttcaacttccaaacgaatttctactgagagaaggcgatgagttcaacatctcttgaccgagctcctttatcttgttcagtagaagcatctgctcggtttcgagctgtaccatgtattcgtcttgtatatcttgaagagcttcgagttcactgagtggagttgaaatcccttcgaggttgccattatcgattaa

SEQ ID NO: 49516 - DNA, 511 bp, Gossypium hirsutum
  Clone ID: LIB3825-004-Q1-N6-H4
gtaagaactgtaatatatccgaatctgaaatacaataaacaaacattaagaagaagaatgccagatttaaatgatgttaattaaacaaacattactttctgaaaaaaacagggattatagtaagagttctaatctatttctttatgcacatctctgacctaaatttattctctcttgctactaatatttttaaagggtttggtacaaaaatcttccttacatttgctttttcttcatagcttgtttactgttgtgcatccaaactttaaaaacctgtctcttaactcccacttgagcacaaaattgctgcacttctggttcatcttgtttctggattctccaacccaatttctcagcaaattccatcatcttatccttttgatctcggctgaactttgttcgaaacctcttctttgatgactgtggatatgatggttgtcgacctcctgcttcattagaatgaaacatgttcagttcttcacttgatgactccgccgggccgccacggaag

SEQ ID NO: 49517 - DNA, 352 bp, Gossypium hirsutum
  Clone ID: LIB3825-004-Q1-N6-H8
gaaataaattactatagaaaatattattagtgataaaaaataacctttttacagggaataagctccctctctcacacaccggcctttcactcgagtaacactaaaggccctcaacacattgatgaaccatgcatgagcgagaaacaaaacaaccactctggtgatcaattggaaccaggatcctgtaggggaaaatagattcccggaatctgctagcctcaaatacaaaatggctagcgtcgcccttcaactttgtcaaacccttgaaggactcctcagacctcttctgtcccggtggaacccgaagactcctggacacgaaatctggtgatggcagctgaataaatccgac

SEQ ID NO: 49518 - DNA, 571 bp, Gossypium hirsutum
  Clone ID: LIB3825-005-Q1-K6-A9
agattagcactgaaaatttgttgagaggaaggccgagaactgtacgaagaattttaaaaaatgatgaatctatcctccacaatgaatgcctatggatgccgctattgcgtgtcaccattaaagcaactcttacacaccactaatcaccatctccgttttcgaccatgctctccttccttattctcttcttcatttaacaatcttaagctccccaactttaatcttcttctcacttctaactctttcttcttcaccatggagcacttgtgggatcgaagtgggatgaacactaacaagaaaatggtggagcatttgcagcagtatggggtgatttcatccgagaaagttgctcgagtaatggagactatcgatagggcgttatttgtaccagataagaccccagcttatgctgactgtccgcaggaaataggttacaatgctaccatttctgcacctcatatgcatgctacctgccttcaattattggaggaaaaattgcagcctggcatgcatgctctagatgttggctcaggaactggctacttgactgcttgctttgcaatgatggttg

SEQ ID NO: 49519 - DNA, 409 bp, Gossypium hirsutum
  Clone ID: LIB3825-005-Q1-K6-B12
gcgcatcaacctagtgtgcctcctgacctacaggctgaatcacctgccataagaacatgtcctgactcctatcccttctcttctactaccccatactaccagacttcgaccaagcctttagtgaaggcggcatcttttattggaggtgtattcggggattgtttgagcagtttgccaacaactttgccctctagggagcaaccgtgagccttcacgtacgtgaagtctcaagaggagaaggatgcacatgacagtcacgagatcctgaggaaggctaacacctcacgcgcctaggacccgctggctgtatctcgctgattcggggtacgataagaactgcaaataattcatagctgaggttttaaaagcatttggtcagatcgatatattggcatacaatgcagttgac

SEQ ID NO: 49520 - DNA, 554 bp, Gossypium hirsutum
  unsure (1)..(554): unsure at all n locations
  Clone ID: LIB3825-005-Q1-K6-B8
ctgcaaacatcagtgcgcagtcaattgggngaatttcggcccttcaggcaaggggtttggtgttagtgggtctcttggtctggatggaaccggtgggttgcaattgttggatataaaaaacaatggtgatgatgttgatggattaatgggtttgtctctaactcttgatgaatggatgagacttgattccggtgaactcaatgatgatgaagatcaaataagtgagcggacttctagaatccttgctgctcatcatgctatatcattggacttgattcgcagagggtcaaaaggagagaaaaggcgggttaaaaagtgtggtttgttaggaaataactttacggtggcattgatggtgcaacttcgtgatcctttaagaaactatgagccagtcggtacacccatgcttgcacttattcaggtggagagagtatttgtgccaccaaagccaaagatatatactacagtgtcagcttctaggaatgacaatcaagaggatgatgactcagactctgcggtgaacgaggtgaatgaggaggagataaaagaagaaa

SEQ ID NO: 49521 - DNA, 591 bp, Gossypium hirsutum
  Clone ID: LIB3825-005-Q1-K6-B9
gttttcagttgagatttttgatagagacccaaaatcaggaatagctcaaaaagtaagtgcgagtggaaaaaaacttggagactaatagtttttgtaagaataaatttgtgtgtacttggtttgggttttgtggaagaatacaagaacacaaaactgaaagtgaagagggttctgtacagcatatcaaatgaatgtgtaaatcttaaatagagcagtgctgaagcttgtaagctgatcatagccaatgagacaggacaagttcacctagtaatgaggcaatctcaagactctcaagatctgaacaaatcatttagtgctgcccactatgacgagggcaagagcacgcaatgaacccctatatcgctcttatggcacgcttctgactacgctgatcgtgaattgcaagataacctgttctgccttcgttccgcatctgtgtaaaattgcaaaacctctgatgcagaagatgcacacaagtcactgaattacaataaactcgacttaggagcaataaagtagcctctagctgctgcttggactgattggcataagttcatgccttttgatgaaaaagaaagcatcgagggataa

SEQ ID NO: 49522 - DNA, 595 bp, Gossypium hirsutum
  Clone ID: LIB3825-005-Q1-K6-C7
cggccgcgtgggttttgatgatcaaagcaaaacagcaagataattaagaagttgaagaagataatgatggagaggaagcatctttcttctatcgccaaccatgtccttcaacgaagcgcagaggaacttggttcttcagtagatcatttggtaaaagaatttgaagctaaatggacacccgaagtaggcgattattcgaagaaattagtggaattttgcagttcaaaggccctcattaaattttgtcaaaatataaatgaaaagataagcgatggatcatatagccgcttcacatatgacatgatgcttgcctgggacaaccccagagctgtggacgaagagtcttcaactgcgagaatatattaacttctctcaatcatagtcaaagcttggaatttacttcaattctgaattgcaatcttttggctgaatagtcacatttcgatgaaatatttagtgaatcctcgtaacatttgccttacaagtttgtcagaatttatgtgttgatgactttctccacatacattgttactgattctatcatttgagttaggaggagagcattgggaaggagaaagaagatagaaaatacaag

SEQ ID NO: 49523 - DNA, 541 bp, Gossypium hirsutum
  Clone ID: LIB3825-005-Q1-K6-C8
caaaaggtgcatgtttttagctggttaatgacggtctggtttttgggttgaacaaggatctttatacactatgttcttcttctcttaaaccttttctttttttgggatctgggttttgcgggttgtagttatactacggcttcagttgtttagcctttgactcgtgaatctcttcattgggttccctcccaagtttttgtcttttttgtactttttccttcaaggaaaaatgggcttttgactttttctgtacttccaattctatgttcttgtctgtgtgttgtgcaccagaatattttttttggtcctgtcatcggtttcttttctcaggttggagcctgagattttttatttttttttggaatttccttcctcttaaacttttttggttccttatgagttgctcctctcttaatcgaatcctttttagctgaatttagggcttttctgatcttgtacaagattcctcccttttgctttgagccttaggttttgaaaattgaacccatctggtagaaaaaaaaaatggtgtggggagggg

SEQ ID NO: 49524 - DNA, 356 bp, Gossypium hirsutum
  Clone ID: LIB3825-005-Q1-K6-C9
ctctttctttgctaccttctatagcgaacagacaactcctcattcattgcaatccggtggtctctagccaaagcctctcctctacaagagaccatcttgttcaacgcatgccagaccactcctgggattgccctgtgcaggcaaaagctttctgcactctcgagagccttcgttgaagatagtaagcgaaaagctattaaactctaggaacgaccaaagacccaacctttaggtaactacgctcattgctctacatatgtcagcctatcgctgctatcaccgggctatcaatacgtacaatttatgaactgctgggtacccggagttcagtctcccataactcgcagcttgctagc

SEQ ID NO: 49525 - DNA, 548 bp, Gossypium hirsutum
  Clone ID: LIB3825-005-Q1-K6-F10
cggacgcgctatgtgagtgagcaagaggcggatgaggacaagccaatgctcacggcctcagtgattgatggaacgatgagatgcccaagcgtgtatgttagctcatgcacttctacaggcggggactcgaagcttggtactcagcttatataaaacaaagcggcactactagaaaaagattcttgaatcagtctaacgcttgcctataactcagtgaccttactaattcatagcataatactttatacatgatgtgctcatatccatgcatgtaaccatacaaacttgtaactgatacactgttctattacaagcaatattctttagttgatgaggcctattttgatggcgagaatcaattgtgaacttttgtacttatagtgcatgatctaaatcccataaagctaacttcaagtgcattaatgttgtttactcgtctttttggcccaaaattggagatctctatcatgactacagattcatacacacaggctgggtagcgggctaatgagcacattctggctggagatattttccatattgcatta

SEQ ID NO: 49526 - DNA, 481 bp, Gossypium hirsutum
  Clone ID: LIB3825-005-Q1-N6-A3
ccccccaaaaggcccccaataaaaatcccaaacccaaaaaaaataaaaagaaaagagggaaaacccaagttcagccacaactttacccccaaaaaagggacagtttttttaaagtcccaaaacagtcctgaataaaaaaaaaaaaccccagtttttatcctttaaaccaacccaactaatttttaccacattataggccaacacttctaccaactaataaaaaagggtttttattaaaaaacaataaacccagttgatcaacacccccaccagcttgctgttgtggctggccaacagccctaaaaacttccattgttttggaaactttggctttaaaacctttggggaacccaaccaagtgaaaaacccccgttgggcccatctcaaaaaacacccctgtaacttgggctgctgcatcgggtcccacctccccaaaaagggaaaaaaaattcccccccaccatcgttttttggtgttcgga

SEQ ID NO: 49527 - DNA, 476 bp, Gossypium hirsutum
  Clone ID: LIB3825-005-Q1-N6-A9
cgggggaggttattaaaatatttatttcccccccaaaaaaaactaaaaaaggaaaccggaaacctcccccccccataagggggatatattcccagccttctggaaaatgaacccttaaaccccaagccttctgcagcccaagggataaagtttcaaacaagctttaagccaattggggcctttcccgaattccattaactctgcaactgagcctcaccactcggcaaaggaacataccggacaaaaccctcgcttcggatgctaatcgacccctccggatttttggcaaccactttcaaaacttggaatatatttcccacaggaaacaccatcctgccccccggttttaattgaaccaggagggcccgaggcatttcaggggctgctgcccccacatgtatagcatcaagagggggcccattttggccaaccttcccttccattgccaacatggcgtagaaaaaaagccttttttc

SEQ ID NO: 49528 - DNA, 534 bp, Gossypium hirsutum
  unsure (1)..(534): unsure at all n locations
  Clone ID: LIB3825-005-Q1-N6-B12
aaaataagtgcttgaagttgagcaagtaaaggattatattgggaattaaaatacaattcagagtctaaacctaataaatattagaattaacaaaaagggactagattgaaaatcgaatggcatgtaacggtgcaaaagtctaaataaagtgaactagggagaccatacttgcaatgtcgaccaatagaaatggaagtggaccacaagnacaaaatatccctaccatccaaaacgttgtactttacgcgggactaaattgaaggcgcaaattaaaaataaaaagaaacttaattactaactaattaaaaagtagaagggctgaaagtgcaattatcccttacactaaaaacacgtggaccttggctaaccaagtcgggtcttgggtcgtcctcccttaaacgacactgttttggcacttaaatggccaaaatgaaacggcgtcggttcaccctattataaaagccaaatttattttaaaaaatatttcatttctactcttcttgaacaaaaaaataaaaaccaaccctcttaaat

SEQ ID NO: 49529 - DNA, 530 bp, Gossypium hirsutum
  Clone ID: LIB3825-005-Q1-N6-B8
gccacaaaatttccttacttggccgtcttttgcaaaacacaattgcattaagtgagacataaattacatcaagcacttatgatcattggaaacatataatttacaagacccaaacgagaaatgtaaccacaccttttgcttttgacttgaatttgcatgaacgaacacattcaacataaacacaagaggatctccacaggcggaacccatcaaccttgtttgatctcaaatctgtataatgtggttctccatcagtcatgtcatctaatttaggagcttaaccctttcaacaagattccaatgcatgtgcatctcatttcaacctgatggtttcattggggaatataacattgggatttcgaatatggggattaagggctgccaattctttccatttggctccggtaccatgaatacgagacgagatgctccacagagtgtcacctggttgaacctttgctgttgaaggggttgaagttttgggagcagtcttggagtaggacttcaacaatggatgtttattgctctta

SEQ ID NO: 49530 - DNA, 526 bp, Gossypium hirsutum
  Clone ID: LIB3825-005-Q1-N6-B9
acaaaaggtcagtttaaaatagcagaaattgtgaaacattttcttagtcaataaactccacaattttggatcttacattgcattcccatctttccattttcaattcaatatgaatcaattggaaccctaatccctgaatacatatctttaggtcacggtccccgatatctccgaaaacataaacaaccttgagcttgatcatgtgggatcattcctccacctttcgatgtatctatcgcctccatcatcgacaccacttcgtccatctccggtcttttgtccgggttggcatcccagcatcgcttcattacgtttgcaagtgaactcggacagcaacgaggtatttccggccttagattctggcggacgacagctgacgtcacttccgagaagctgagatcgggatatggcatgtcacagcagtatatttcccataaacagataccaaaactgtacacatcgcactttctattgtagggattgccgttaaggacctcgggtgccatgtaaccaagtgttccggtct

SEQ ID NO: 49531 - DNA, 532 bp, Gossypium hirsutum
  Clone ID: LIB3825-005-Q1-N6-C9
caaaataaactcatggcaatgtttaaattatgaaaaatcaacattcttttttagtacaaatacagaacagggggttaggggtgacgttacaatgatccttcgagttagaagagctaatgatcttaagcggtatctagggttgcctagcttggtggggaaacagaaaaagtcatcttttcaaagtttgaaggatagactcaaaggattgacaattggagtattacgtttctctcccaagggggaaagaatgtttatctaagcggttctacaaaccattccaacttattcaatgagttgttttcttctccctaagaccttttgcgcagatttggaaagaattgttgctaatttctggtggaggaagagaatgaataggaaaagtatacattggctcacttgggagaatttatgtttgttaaaagaagatggaggttttggttttcgtaattttgcgaaatttaatattgcattattagcgaagcaaggttggcgtcttgttaattgtccaaattcattattggcacgtgttttg

SEQ ID NO: 49532 - DNA, 522 bp, Gossypium hirsutum
  Clone ID: LIB3825-005-Q1-N6-D1
aagccaagtgaatcattttgaatgaaaaaaatatcaaaaacataaaattcagactcgtaaataaattgacaaaaaaatctaaaactaagagtataacaaaccctaaaatatttaatccaataacaattaaacccggttcaacctcaaacctatcctagtatacctaacttcaaaaactcggaaccaaccgggttgactcgactgaatcgttcactgccagttctttccttttcctcatttccaaaactttcctatggctattggagtgcaaatcaccggaaaatgtgggactacaagccggtctatattcaggaaaaagtcgaccggacttgtaacgaaccccacaagcgttgcacaaggttttggcaccaagaggaccggttcgccactgtggagtcttctgaacttggcaatgactgcatcgccgttggaaagggttcccacttgacaacccactaccttgaaccgccaccggttttttcttctgtttctttgtcggcggtactccgaaaccattagcca

SEQ ID NO: 49533 - DNA, 532 bp, Gossypium hirsutum
  Clone ID: LIB3825-005-Q1-N6-D3
aaccgaaataatgattcatcattaaatacggaattggaaacggaaaaaaaaaccaatttcacagtttttatggcactagttttcccacataaaataaagagaaaatatataatactaaaaacttacctgaagagaacagtatcatctgctgtaaacctttttatctgcaccgacagtcaagagtacaagtatgcggattgaggaatgcagctttgctttaccagtcagcatcaagggatggaacatacgatctatgcacagtgcaccaaaagcttatttggctccaaaacaaaacatcttctgcccacagttttgcatcactaagaaacgacacagtaaggatttgttatcaacgattctgctcaaacatgtttgcattctcacgaccaggattgcccacagtttcttattctattttatgggacaccccagtcctccagttcatgttttgtacacagcttgaacaagaggaccaaacaattagactttaagtttgtacactcggaacagcaagatggacaggactagtaat

SEQ ID NO: 49534 - DNA, 522 bp, Gossypium hirsutum
  Clone ID: LIB3825-005-Q1-N6-F10
aaaaaacaaccagctttaaagatttaaaacataaacttcactgccaccactacaagctcataacaaaaggcataatggtcacccgcaaatgcaatcctaaaaaccaaactcctcccttgttacaaaaacagcaccatccagtgcaaacttggacggaccctccatggctaagagctagatcctgacataattattaagccttagatgactttgacatatcgttgtcgccgacgggaacactggttcaaaagctacaacatgctatgccatttatcttggtacactagctggaacaatctcggctcctgcttgcaggagagcatcacctaacttgacatctcgctcgcttttttctttattacatattgtgatacctgagaccactttgaaaaacaatggtctttagagcaagggcaatataactatcacccgcgaatgaaaagcctgcaaacccaccactatatcgtgcccgcctaccaacttttaattgatcaatcaacttcatagcttgtacctttgggg

SEQ ID NO: 49535 - DNA, 451 bp, Gossypium hirsutum
  Clone ID: LIB3825-005-Q1-N6-F5
cttaaataatcccaaactttaatggataaaaaaaacggcccgggctaaccctaaaaaataaaaacgggaccaaacttttttttataggggaaaacaggccgatcttaaaaaaaaaaaagggaaagcaaaaaaacaaaaaacacagactaagggggggagcaaagaaaaaaaacccgctcctttaattaaaagggaccaaaaaaaaggaccacccggggaacccccgggggggttcctttaagcccaaaaattgtaaaacccccaattgggaaagtttgggtcccccggggaaccgaaagaaccctttgtttttccgcaaaacccaaaacgggggggggaatttggccggccggaaaaaaacccaaaaccggggggggggaacccaggggggtaatggcaaccgggcccgcaaaagccacaaggggcgcctatggggaccccagtggggggg

SEQ ID NO: 49536 - DNA, 457 bp, Gossypium hirsutum
  Clone ID: LIB3825-005-Q1-N6-F7
ggagggaagagggccaagccccaagctttaaacaaaggggttccgggggtaataaaaattaaagggtggaaaattacatacatccgccgcctataactttgggttttggatgggaaacaactatggcaaaattaacaaaagctttgtctaaaaaccaaaaggttgggtctcagtaaaaattaaaaaaagggaaacctaaaaatgaaaaaccaaccccgtttcagtaacaaccacaggtgtttttaaaccttttttttttcccatgccatggtatttggatggaggaccctttgttatgctataaaacatcccctaaaggggaaaaagttccattttttgacccgctggcaattggatgcccaaatataaggggaaggccccccaaatttaaaactcaagtaaacacacacccccacacccaaccattgaaaaccgggggtttaaaaaaacagggttt

SEQ ID NO: 49537 - DNA, 474 bp, Gossypium hirsutum
  Clone ID: LIB3825-005-Q1-N6-H6
gaaaaaaaacccgccgcaaaaaagagctttttggaaattccgataggggaaaaaattgatctaaaaggggaaccgcttcaaagctaatctttgggggtgcttggcaagggtatccaaaaataggcgggtctcaggtatctgtatgtctcccagacaaaaaaacaaagagaatgggccgaatgtcaacaaaaacatggcccaaataaccccaaaaaaggggtcatcccaggtggaggcttaaccaaaaaaggggaaaaagccggtgatgggctccaatggaacactatacagcagcgatttttttaagctcaggatgggtaaaatcgtttcgagggaagacttttagttgacccctgccaggacccttttgaaaaatccaacccctgttggccgcccggggttcaagggattcgtccaaggttagaccttccgtgttaatagccccaacaaggacaggtctgggaattttttgga

SEQ ID NO: 49538 - DNA, 468 bp, Gossypium hirsutum
  Clone ID: LIB3825-006-Q1-K6-B12
tttattttttttaagacaaactcaggccatgtaacctgagaatactgtaaaatgacagaattgttaataaactttttttttttcacttcatatggtgttgaaagctggactgcaatgcaacatggagccagatgcttgctactgtcgagaccagcagctatcgagctcagctcattttgcttggtgcgcacgaatggtttttgaaccgaatgaagcaaccaactttgctgttttattttgatgtaatttggttcggttcaattttagtttgattgtaatactagttaaacttaagttagtgataagatcttttgatgtaatggctgattggtcagctatatttgattatttttggctagtgattaggtttgtattagttggggcagttaaatacattaggtaactgtcaatgtacattgtaactcttttatatttcaaatttgaatgaaaaatgatgaatgttcagtt

SEQ ID NO: 49539 - DNA, 594 bp, Gossypium hirsutum
  unsure (1)..(594): unsure at all n locations
  Clone ID: LIB3825-006-Q1-K6-C11
gtggaaaactatcgaactgaagacaggaagcctcctgtggctactcttgaagtttgtctgctgctccaaatttaaccctaacaccggaattgattaatttagctggagctaatcaaaatgttatggacgatgatttttggtctgtactttactcaggtcatgggtctggcacctctacttctaggacagatacccaagttggtggcactgagtctacgcngaaattttacagtatcaccagtattttctgatgctgtctctccagcactcaatcgagctgatgctcatggtaatgctaatcttgcaacacctgggattcaaaatcaagttgctactacaaataatttgccgttacatccttcacaagtgacaaattcaatgtcaaatcatgaatatggaagtttgcagaacatacctagacatgtaagcagatcatcaattgcagttcaggccctcccagcaatgtctcagactcagacaccaacacaacagagatcaagtaatagtgtgaatactaagaacacaaccagctctgcgcgtattccacatcagatgcagagtangattcagcaagaacgatcatttgttcctgcc

SEQ ID NO: 49540 - DNA, 601 bp, Gossypium hirsutum
  unsure (1)..(601): unsure at all n locations
  Clone ID: LIB3825-006-Q1-K6-C7
cgcggtcttcggcttcctagacctggnagaaacttcgaggagcttgctcacaatagggaagtagcatttatttatttgggttaattgttgtcttcagatttaaaacatttatatttttttgaattttaggttctgggtttccatcaagtttgctatggctgcaggtttaatcggaggggctgctttaggggcaggtttcggggagctgcttagagtcattgtagaagcgagtaaaacagctgccatgtttcgtgataacttggaggaactggcgtccatgctatcacctattgaacctgtaatcaaagaaatacaatcattcaacaaagcgtttgataaagagtacgaaacagagcagctcgtcgagatcgtcaagagagggaagaaacttgtcacgaagtgctgtaaaattcgcaggtgggacatcatcaaaaagccttattactcgcacaaacttcttggattgaagaaatcgcttgagagattctgtcagattgttatgcaaacacatcaagcgagggacatcaaagaggtgttgtttgaaactaaagagattagtgtggggaattagaaaattaagtttgaaagaggggagtagcaa

SEQ ID NO: 49541 - DNA, 581 bp, Gossypium hirsutum
  Clone ID: LIB3825-006-Q1-K6-H11
agctgaaactgtcatatacagaatcttttatcacatgaagagacgggaaaggccgtcttaccctcagggagctcaaacgtggagaactgatttctgccatgcaacaagcagacgaggaagatgacattaataaagtccttaggttagaatccgggtgaactttatattattgaaagcagcaacatacaaatccttacacacgaaacagtaattatgtaaactgagactacaatatctctctctactttagttggttggtaaaagcatgggaattcttgcccttttctctcctgaatggtcaataaacaattgaaaattgtggatagcttgggtttattaaattgttgtgtcagggaattactgatgctgtaaattatacaacttcctcttttcttcgtcttttaggtacttctcctatgagcacttctatgttatatactgtaagttctgggagttggacacagaccatgatttcttcatcgacagagaaaacctcatcagatatggcaatcatgcccttacctacagaatcgttgatagaatttttttcacaggctcctcagaagtttgctggtgatgta

SEQ ID NO: 49542 - DNA, 481 bp, Gossypium hirsutum
  Clone ID: LIB3825-006-Q1-K6-H8
gaagaaatataaagagctatagatactgacttagaaatctagaaaaaagaaagaatagaaagaaaaaaaatataaaaaataaaaaaaaaaacaaaacatgaagaaccataataaagaaaagaaagaaacctgaagtaaatgattcagtggtagcacaaaagcaattgtctgggatcaatcaaagttgggacctaatttgtgggcctttttataaataacccttttggcccgggggggccttagggaaaatgctccaaacccgggggcccttcccaatttttgggctgtcctgtttggccaccggtacccgcgctgccccttttcgttattcccccccttcctgtcgggggtttccccccgggtgccctcttttttggggtaccccatagcgcccccttgtgcgggtttttttccctgagtttggttgggttccccccgttttttccccctttttttcgttttgcgccttattccctttttg

SEQ ID NO: 49543 - DNA, 587 bp, Gossypium hirsutum
  Clone ID: LIB3825-006-Q1-K6-H9
cccacgcgtccgcccacgcgtccggtttggataccaacatatgggtcaaggcaagagctgtgaagtggataaaggtttagccaccagcttcttcaaacaattgaaaagaaaattggtagaaaatcggtcattgagaaaaaggtgtgcaatgactatggctggtgaattcccggctggttagaagattctcattgttgatgatgatagaacatgtctcttagtattggaaagaatgctccggaagttttcataccaagttaccaagtgtcagctagcgagggaagcccttgctttgctttgacaagacaaaaacagatttgatatcgacctatgtgatttacatatgcctgatattaatggatttgagcttgttcaaatcattgaagtaaagatggatttaccgggtgttatgatgtcttctgatgatggaaaaggagttgctatgaagggtatagtccatggagcttgtgattattcggtaaaaccagttcgcatggaagctattggactcattaggcagcatgtggttcgaaagaagaagaaacgtttgtcgggagaaattactaagtcattgccattacaacggg

SEQ ID NO: 49544 - DNA, 543 bp, Gossypium hirsutum
  Clone ID: LIB3825-006-Q1-N6-A12
ggggataataaactacaaaagattagagagtttgatttttaatggatcaaagagacgaattcaaaaagaacataaaagcaaaacacagcaattcagcaactaaacgagcacaaatccttttttttttgcgtaaatacaaaatgtcaccccctactctcccctcccctctactacatccctaacccaaacttcatttcaagaaggtatccattgcatccgcatacatccccgcgtccgcctgttgctgctgctgctgatctaacaacgccgaagatgaagatgtcgccattcttgctggcaatgtaaagctcctcttgaacttgttttccatctttcttatattctctggatgactatccaagctcaagaactcagtagggttagcatcggtgtccgagttttgattagaatcttttccttcgaccatgaggggatggtggttcgggtcctgtttgtttcccaagctctccgggttaactaaaagcttggcgtcttcattccgtccagtgagagcgttgaagaaagtcaagccgttaggccatt

SEQ ID NO: 49545 - DNA, 444 bp, Gossypium hirsutum
  Clone ID: LIB3825-006-Q1-N6-A3
aacccttctattccaattatctatattaatcgactctatggtacaacggcaacatcgctaaactctgtgagtttcctacctcctgaatcacacacacatggaaacgcacaaagctttacctatttctaaaacggaatttcatcccgtacgaaaatcaaccgccaaaaactgattaactttcaatgctatgcttgcctcaatacctaaagtgtacgtctaatacccaaatgctacagtaacagctgctcctaccccaagtacaatattggaacagaatcctaccctcgctgacagacactgcattatgatgcgactcccagcatcttcttagcctcttttggcccaacttagacattgttcactgagcctgcaccaaactgggaggttcataatatgaagttcacacacacatgtctgaaaaatttggcctttctaactatcata

SEQ ID NO: 49546 - DNA, 437 bp, Gossypium hirsutum
  Clone ID: LIB3825-006-Q1-N6-B10
aaaaagggtaaaaacccaaacccaaaaaaaaaaaaaacacccttagcaaacatgtttttagatcaacacccccctcccctaaaaaaaaacaagacgggaggccccaaaaacatgtccccttggaactttttttaaccccacaaaagcatcaaccctgaaaacaaggggggtgcataggaaaaaaaacagttttgcacccaaaaccccccatcagaacgggaatcgggggggaccccagttccgggggggccaaagccggggccaaccccccccaaaattccaagggggggggccaaaccaaagggggttggccttgggggggggttgttgatggggtccaccgacaagggggggggggaaaaccgggaaattgtgggggttggggggggccccgcggtcctggccctagaggggaaagcccaccccgttttgcgggg

SEQ ID NO: 49547 - DNA, 519 bp, Gossypium hirsutum
  Clone ID: LIB3825-006-Q1-N6-B4
acatgaactagtcacatgaagaccgaaaaataaaacatagtatccagcaccataaaagtaattagacttaacgttaaacgaaacaagaaataaaaagatgaacctacaacccgatataaaatatcctgggtgataatgaattcttaatgccagtatcatcgcagttccttaccgacaaactattactgggagttctctcttattgtctgcaactgagagaatgaaattcggattattgacccaccaagtgaggttgcgtgcttggaaacaagggcttctgtagcttgctcctcattttcaaacataacaagggcttgcttctttccgttcatttcaaagagcttggtattaacgatggtgccatgttccgccaagtggttcacaatttcctcttcagtgacatcctgaggtaaagtagaaagatggaccatctttgttggggagcagcagtaacggtagttcttcgcagcatggcgattaaagcggttgagatttgagttcatatattcatgggtatca

SEQ ID NO: 49548 - DNA, 495 bp, Gossypium hirsutum
  Clone ID: LIB3825-006-Q1-N6-C1
aaagccaaggaaagggtgaaatctgataaaagcggggcgtaattgaaacctttctttccgtagaacatttttgggaaaggttaaagaactaaggcccgaataaaacaagaaacattggtcaaacaaaaaaacaaaagaggggcaaaaagaaaaaaggggcatttcactgggggggtacctagctggctccctaattaaacgggcatttttgaggggtgggaggactaagcatttcgggggttatgaatattccaggggggactttgacaacaacatcctgtagcaaaaaaacattgacgtttgatacactggcatggggaactggtagctttagggctcgaagggcatccataaatcgggcagctggatgaacgatatttggacttcgaaccccaaaatagcttcgggatcctactattttcacataaacttccactggttttggccaataagtaaaggattgtttcatggtattgccaaatgcggatttggtag

SEQ ID NO: 49549 - DNA, 498 bp, Gossypium hirsutum
  Clone ID: LIB3825-006-Q1-N6-C11
gataaagcttaaaaatctagacttgattaaaaccaaatacagggggaagctgaactctcactctaagcccagggaggaactgtacaacaatatcagtgatgcacaaaattggacataaatatttgtatttacagcttcatcatattcattactcctacatacagctaagtcaagactaatgcatcccactagacctatctggcaggacccgaaccaccatttgtggctgtggtttcagttgttgcattgtttcgcatttgaggggtaacaggattcctgctatttgcaagaaacgcctgcagatgtggtggaacactaggtggagatgttatatttgtttggggcctcgcagcttgtgttgactgggtgggttgaatcatcatctggctaaaagattcaaaatatactcgacctgtgaggcttccacgcattcgtcctgtaggtcgccagttctgctcaaatgccaaatcagctgacgtatcaggtcttgaagctgca

SEQ ID NO: 49550 - DNA, 496 bp, Gossypium hirsutum
  Clone ID: LIB3825-006-Q1-N6-C7
tttttttttttttttttttttttttttttttttttttttttttttttttttttttttttttttttttttttttttttttttttttttttatcgggggccaaataaaaggggtttttgggtaaagaacgggtcccttaaaattagggggaaaagatttcgggaacccccatgggggggggggctcctaaaaaaaaaaaaaatccttaaaagggggaagcttcgggatgggggaagggaagggaaaaatagggcaccctttaaaaaaaaggtttgttagagggggcagttaaaggacccggggggggaagtttttgaggcttaaacagggggaaagggaaaaaaaaggggggggggaaaagcccccaaggggctaaggcaacaaaatgggggcaggggaggaggttagtttaaaaacttccaagtttaaaaggtttcaaaggccttaagggagggcacggagcttggggcaatgggggaaactaaacttcataaggtg

SEQ ID NO: 49551 - DNA, 463 bp, Gossypium hirsutum
  Clone ID: LIB3825-006-Q1-N6-D12
ggattaaaaaattctagtccccattaattggccccccacccaaagaggaaatcattggttaagggggggaggggctttaacaaaaggccccccaaaaggaaaaggctgggcccccccccaaaaataaaaaagccccaagcccccctcaaggtcgaaatccattcaagcccccccatgccaaaaggcctttgggaatctaaaccccgaaatctaaggggagaccgactggttttcccaaaaactttccccccttcaaaaaaaccaaagcttcaaagggccaacaaactgaaccccccccgacagaggactgaaaaaggggggcctcccatcccttcaaattaaaaccccttccggggaacaaaagcggggcccgattcatcaaacccccccttggaaaacccatctgcgggaaggggctaaaaaatcctaaaagggatcccccaatccaaaccctggtttttcc

SEQ ID NO: 49552 - DNA, 459 bp, Gossypium hirsutum
  Clone ID: LIB3825-006-Q1-N6-D9
aaccaaaaagaaaggttacccttaaggggaagggggagccaaaggccaaacccctatcaaatgggggccagacccggggccaaggggggttttttccaacggaagggggccccctaaacagggggggcaaaacttaaaagggggaaccccaaaaaaaaaagggggccccaaaaaaaacccaatctttaaaaaaccaaagcaacaggaaacgggaaaaattaaaacctattttccacaaaaaggaaaccttaaaaaaatttaaaaaaactgggggttaaaaacgggggaagcaaagacacaaaggcaacctggggggggggggaccatcacaccctggaagcccacaatttggaaaaaaacgggcccaccggtggggaagaaaacgggaccccaaccttttgcttccaaataaaagaaaaacaaggggaaaattttaaaaattgccagggggttttaaaa

SEQ ID NO: 49553 - DNA, 490 bp, Gossypium hirsutum
  Clone ID: LIB3825-006-Q1-N6-F3
aataaaaaggggttgatttcatatttatttcagcctctaaaaagtagagaaatgttcaaaaaatgcagagtcttacgttatatatcaacagcatcaactggaagggaagttgttctatgaaaagaattgtggaagcagtggtccagtaaaaaaattttgagcagtgaccatctccttaactcttggagattctgccggtttgcgatactggccacctcggttagctgaattggggcacctcttattcttattgtcatggaaatcggagttaaaatgcttgttaggggcaaaagtcgataatggcggaatgtcattgtttctgttcttgtctttgttactgcagtttgaaaagtctgatacaattcctaattgttgttgatctctaagttctcttaattccatctggtactgggctttaagccatctcagttcctgttggacttcattctcgtaattgtcggagagatcacagtataatgaatgaacttcg

SEQ ID NO: 49554 - DNA, 321 bp, Gossypium hirsutum
  Clone ID: LIB3825-006-Q1-N6-G1
aaaggggggcccaaaaggggattaagggggcccggcatttccataggaaaaaaaacagggggaaaaaacatttacttaggcgaagggaaacgcccggccgttaatggcccggaaagggtaaaaggccccacatgggatggccaggaaaaagggcccaggaacaaacccccaggggggggctaaattcccaaacctggaccaaaaagggaaaacttcaccctttgggttttaaaaaaaacaaacgaaattaggggggggtttgcaaaaacggaccaaaaatttttccaaaaaaaacgggaagcctgggcccacgcgtccggg

SEQ ID NO: 49555 - DNA, 525 bp, Gossypium hirsutum
  Clone ID: LIB3825-006-Q1-N6-G5
gcaccaattaaaggatttttttattatgagaatctgatgactgtttacaaattacaaataaatgcttgggtgggaatggccatggctatagcagtgacggctgctggtcgttctaatagcagtgaccagtgtctacaccacaacaaaccttaatattcacaaaattccccgaaggctttttgcccataacaatgattgctagatacccactagacctcaaagggtaataaatacatgcactgatctactgggccaaaaagaaagaaaccgtgaaaaagggagatgtgacctatgtacaaatgccactatatctgtctccacttccctatactctaagtggttatatacatgatgccctaaaaaccaaaaagtagaaaccccaaaaaatgtccaatactttccgtgtatttctaacctgcaaatagcagcaacctctttccacattgcaatgccaatatgatattaccagcttcatctgtacactgctgttacttgggcaaacaaactcaatcatggcaggaccca

SEQ ID NO: 49556 - DNA, 513 bp, Gossypium hirsutum
  Clone ID: LIB3825-006-Q1-N6-G9
attataagctgctcttaatagcaaaatatgtaaaaggttattttacagcttttgccatacaatttctaagcattgactagttctaatgctaaaaggggaagggaagaaaaagaagttttcaaaatgctgtcctacccataaatctgtcacatttaacattagcctattccatagttgcctacatagatacatgtaaaattctcctgctatggcttatttagagattaaacaaataacagacacaccttgtgcttgcaaatatgcatatcttattcaggctaaaattgaaaaccctgtaacccaatatccgcacaagtagtcttctgtccatatatttggcagctaaactgtatattacctatgactatgagcggttgaatgcggcattgggtatgttgcaggacccatgttcatcggtgcaccaggaactgtgactccataacccatatgtgctgaggcaggaagattcactggccttccaactgcagagacaaggggacctcctattggttg

SEQ ID NO: 49557 - DNA, 539 bp, Gossypium hirsutum
  unsure (1)..(539): unsure at all n locations
  Clone ID: LIB3825-006-Q1-N6-H11
aaaagaacataggtctacgacattcttcctcccaaataatcttttacattatgcntgaaactccagtggaatcctagaagagcatgttaaagaaaaaacagcagtgaaaggaaaggaaagagcccatcggggggacccatactagcaatgtagttgatacccgggtggctgatggtttagttaaggggcagggcagggaagggatcatcgattatcctcttccctttttgaatgaagcaattggctttccctagcagcacaattttcattgcgtcaaacttcagtcttcagtgcagcgcagcataaatttgcaaaagggcgagcatatagcatgctggtagacatatacatgtaaaatgctatttggctgataatctgatcagctatatctccatgtagccactcttcattcatctcgaatatgtttgacaaagggtcctacgaaactagcttcggggattttagaatggtgcttcaagggactcatcccatacatcagcacttccatttgaggcatcttcaacatcttcttccattga

SEQ ID NO: 49558 - DNA, 544 bp, Gossypium hirsutum
  unsure (1)..(544): unsure at all n locations
  Clone ID: LIB3825-006-Q1-N6-H2
gggtaaaaggccaataatgccacttataaaattaaaaatttgcacgcatcgggttattaaatgattattccattcattctaagattaatataaacattacatatcattgtaaataaatatcactagaattttgaacacaacataaatgaatttagttctagatattttttaatgatatactcaaatggagtgctttaaatatgaaatcgtcatttgaaaatgaggaaaattagtgaaatctatacataacaatangtataacgtgacttattcaagagaaattaatcagatgacaaaacattgaattaacaaaaacaatctaatcaaaagtctcctttgcatggtctcacgtctgagtctcaatacaccctggtgaagcccaaagttggtgaacattcagccacttttgggaaaaattgatccctttcaagcgaaactttaaaacatgccatgaccttacccacccaaccccaatcaatacgggcataacaaaacgcatagagctaaaacagctaaagctcttacaacatacttagggtaccaa

SEQ ID NO: 49559 - DNA, 533 bp, Gossypium hirsutum
  Clone ID: LIB3825-006-Q1-N6-H7
tttttttttttttttttttttttttttttttttttttttttttttttttttttttttttttttttttttttttttttttttttttttttttttttttaacaaaagaagagggcccccaagggggtcttttaaaccccttcttgggaaaaaccccccaaaaaacaaaaggggggaatcctggaagacaaaattgggaaaatccccaaaatctttgggaacacctaagggggccttttcctttttaaacaaagaaggggttgggccaaaaaccccaggtttttggggctgggccaaaaggatcttgaattgggggaaggcatgggggggggcccttttttttggaacaaaaaggtttttcccccaggggctattccccccctgggtttaaaaaaaagctttttccatgggttaaaaaaggggcttttttttggggacccgggggggggcaattttgaaaacagccaatgggagccccttaaaggtcattgggccccccaccaaatgggggggaaaaaaaaagagcctggttgggg

SEQ ID NO: 49560 - DNA, 543 bp, Gossypium hirsutum
  Clone ID: LIB3825-006-Q1-N6-H9
atcgctaatatagaagcaagctcctctttttcaaagtcttacatctttatatacatataagaagaagggaaaggatatgtaacattgaaagaaatttttgaactaatttaatgtctaaataaaacaaatagaactgcacgagacgtacagaggatagaaaaccaggatttgttttgcgaagaaaatcttcaaaaggcttatccgttaaataacatatcagtgaacaattttagctaaccctattcaaattggtccacgaaagaaggcttgttgatcatattgtccgaccaaaaatgagggctcgtggatcaaatcctcaacagctgaaagtgggttcgaaagctctgtaccgtctactgcaacagctgaaagtgggttcgaaagctccgtaccgtctactgcaacagctgaaaatgggttcgaaagctccgtaccgtctactacgttacagtacaaactttcatcattagagttggcaacaccatcgttaggaggaaattcattgtcattagagatagcaacaccattactaataggaggaaa

SEQ ID NO: 49561 - DNA, 483 bp, Gossypium hirsutum
  Clone ID: LIB3825-007-Q1-N6-A12
aatattacggcaccggcccttgcatgctgtccagcttatctcataattagtcgttggagacacgtcgtctgcatgggcatacaatgctcctgcgttgaaatgatattccctcaccacattccacatcatactagccatgggcacattaaggaaactcggaccagcctattgagcgatggccctcacatacattgcgtttcgctcactgggcggtccaaacaacagaatacctgtgcgcggcttgaagaaaccacctttgcaaaggtctgggctaggaagaggaagcatcactaacccctgcagggattctttggtactcttgtaaacgcaccaacatctgaaaatgctacaccgacttctcctgacagagtgacctaaggccttaaccctttttcaaattcattggctagaagaatttccgaaacttttgaagccggagcaatatcatcaccctcgttctttgttgccggatgggactaccca

SEQ ID NO: 49562 - DNA, 536 bp, Gossypium hirsutum
  Clone ID: LIB3825-007-Q1-N6-A2
atgaactacttcaaactaccaaacctgcttcagcagaatttaatacacaatcttttgtaaacaaaagcttttacatttttggcttctttaaccatgtgtgatgtgatgaactgaaaaaaaaaagcggctaacagataaaaggcacgcaacttcagccaccatattttcttttcttgaagttcttgcctgatggcaaagaaacaacattataccgtgaattaccaagttctcgaggaataatagctccagaggattttaaaatatctacaaactccggaatcaatttcttatcctcatcgttcacaaaaacaattgcattaccctcctcccctaatcttgatgccctaccaatctgatgcacatactccttaatggaattgggcatatcaaacactatcacctgtctcacagctaaaagatcaattccgcgacccaaaatcccagtagacacaactactgatacttctccaactaaaaacatcctcattatttccctcctttccttcatggacttcgtcccatgtattgacaaagct

SEQ ID NO: 49563 - DNA, 393 bp, Gossypium hirsutum
  Clone ID: LIB3825-007-Q1-N6-B1
caataattatattgggcttcaatttaatttgaaaacaaactgagctgaatccataaaggaggagtaaaactctctcagcattgtttttctatatctacaatattcaaattcaataataaggttttagctctaatattgaaagtctgaatgctgtttgagtttacccatttttcatgaatataatatattatttttatttaataatattatctatactattatggaaatttatcaaaattttttttgaacagaaatccgtttatagcaattgggcctgagcagcaaacaggagaagtccatcagcaacaaacaaaccaaagtaaataaaaaaacaaaacaaattggaaaaacaaacagcaaaaagggaaaattaaaaacagaaatcgacaaaca

SEQ ID NO: 49564 - DNA, 555 bp, Gossypium hirsutum
  Clone ID: LIB3825-007-Q1-N6-B11
cttcaaagttgaacaactcttacaattttacacatcatttaaacccctcaccaccaccgccctgaacattaaccaaaaaaagaaggaaaaaaaatggtcatatggcacaaaatgggatactcactaaaaaccctaataatttttggggaaggttagccggtgttatcaaaagccacctatcatcaacatccccaccacccaattttccaacagaatgagcccaaaattcgtttagctgacgccttcaacacctgccataaaaacgcatcggacacacttccggatgagcaaacagaatctgaatcactccaaaaccaagaataaatccttgaactaaaggacctgctatagctgctacgagctcaaacgtgtatccttttcaatcaacacggatgggaacacaagaacatagggattacgtgcccaagaactacaaactgctctccaacatcaccttagaggggtttcttgatgtccataggaacctaaatcgtcaccagggacgcctataccctatggccaacataggatacggagttgatcgccatcaatgct

SEQ ID NO: 49565 - DNA, 560 bp, Gossypium hirsutum
  Clone ID: LIB3825-007-Q1-N6-B6
aagtacattatcacttttattgatgatttttgtagatatgtatggatggatttcatgagaaaaaatcaaaagttttaatgaagtttaaagcaattaaagacatggtcgaaaaggagcttgatcgaaatttacgatgcctttatacagatgacgtctaaagaatatgcgaagatagccaccatgtcagacgaccccacaaaaaaagtaattgtcgagtagaagaaccgacatacttaccaaagcatgttacatacaaagaatgtgccactacgattttgggtagagtatatgaaaataactgctgatgttatcgatccactgccacaggcaaagcttaatttcatgacaccatacaaaaaacttgggaaaatcaagtctaaggttatatcggctacgtatttgtgcctaaccaaagtttgataagaaggcaatcgaatacatagccgtaagctttgatactcaaagaaatgattgaaagtgtcgtgatctaaccactgaacgatgttatacatctaaaagtgtcgtgagctatgatactcaatgaggcgtcatccaatgtt

SEQ ID NO: 49566 - DNA, 526 bp, Gossypium hirsutum
  unsure (1)..(526): unsure at all n locations
  Clone ID: LIB3825-007-Q1-N6-B7
gtcccaaaatattcttccataaaattagaaaaaaaaagttacaaagccaggaaaattaaaactgaaatagacctagtacagaataatgttaaatagaccaaataaaaacactgggtttgacataacaaatgaccctcacattaaccaaccattcaaaacctagcagtgcaatggaaatccattatctgtcttttgggattggttttattttatatagttcattagtctgaatcctaaaagcagcaacccattataggagtacaatcgaaggccaatcttttaatttggtcttgcaaattcatacgttcttggtaatagttttgatcttactaattgtactcaattcccagctgctaactagttggtacgattttccgtgccgtatcccctacctcttccaccataaccatagcctcttccgtaataagaacctctagctcgaccaccatggaaaggtccccggccacctctaccgncacgatgccttgggaaatcgccaaaggtctctgtatccctcctcatttgc

SEQ ID NO: 49567 - DNA, 463 bp, Gossypium hirsutum
  Clone ID: LIB3825-007-Q1-N6-F12
cccccctcacatgaaaatataacattggaaaaagggttgaagtttgaaaatgtccaaactaaagacggggccccaaactgccaattccttgttttggtggaggggcctccaaaggcttatttggggtttttttttttcagcaaaaaaaatttcaggggtaacaccctccatttaaacaatgggtttaaacatttgctctaaaaatcgaaaaaacctggcgatgatcaaaaaaaaaactttgaatccagcagtcccctttttccaagggaaaaaccccacataaccaaagcaagcttttagccccccttttgaaaaattaagggaaatttgttgggcttcctaatttgggggcggagcctgatttttgcaaaaaaataaaacaaagatttgtttggtaaatctttaacaaaccaaagggcttgcaagggatcaacttttttgttttaaaaaataacattgttta

SEQ ID NO: 49568 - DNA, 567 bp, Gossypium hirsutum
  Clone ID: LIB3825-007-Q1-N6-F2
aacatacatcatgtatttataatatttgtgcagccaattatccatggtcatacacacacaatcaaaaataaataccaaattttcatatcctttatgccctaagccgaatacacttgtcatgttcacctacatttttcaagtacaacattctcatattcggcattagtatcaagcataatttaatcatagtttgttcaagcactcatacaacaagatacatccaatttaacaagaaacaaaaaccttatttaatacaattaacaccgaattcctcatgtaaaaagtaccattgccgaatatcatttagttcaccttaatccacctcatgatcgaatgcctttaagcttaatatcatggtatcgtaactcaacatttatcaatatgtcattaacaaaatatgctcatatcaaatttactcccaattatatctcaaaattcaacaagcttataactaattaataattaaattccatttcaaagtatcaaaacattatcaaatgtatactcatcctaaatgaccgaatgcacattaactaagcacttaataattttctttagccattgaac

SEQ ID NO: 49569 - DNA, 367 bp, Gossypium hirsutum
  Clone ID: LIB3825-007-Q1-N6-F5
ttttttttttttttttttttttttttttttttttttttttttttttttttttattgtttttttttgttagtttgtacacgaattttcaaaattagggactaaaaaaaatttactagactgtaggtgtttgccacaaaatcttgaaccaatcgctatgaccaattaagcaaatcaaggggtcctctaaaacaaagttaaaaaaagggagcgaaaacaccatcaaattaaaacaactaacctgtcccaccacggtcaaaccccagaaaaaaataagtaaaggaaaaaaaacaaacaaacacaacgcgaagggcgacccagaaagaccggaacagtccacccagacggacaaaacgtacccataacgagg

SEQ ID NO: 49570 - DNA, 475 bp, Gossypium hirsutum
  Clone ID: LIB3825-007-Q1-N6-F6
gcgggttgaaattttcgggtttaaagatttatttctctccctttaagggggacctagccctagttttaaggtgggtttggattcacaggggtgtcatggggcccaataacccacaaattttgcccgccctgggaatatggcgtcatcccccgaaaaacccaaatcgctttgcaacccgggggccaattttttaaaaagtttcccaaaattttaaagggtttatgaaaatatctaagggtttaccaaactttctattggtttaccaatatatctaaaagtttatcaaattttctaaaatttaccaaaatttctacccttttgccaatacttttgaaacttccccaaaatttctaaaccccctccccagtcttaacaattttcaaaatttctctaattttaccaaaatatttaggggtttaccaaaatatctaacaagttccccatttttttaacgatttacccatatttctaaaaa

SEQ ID NO: 49571 - DNA, 544 bp, Gossypium hirsutum
  Clone ID: LIB3825-007-Q1-N6-G3
aaaagaaatattaataaaaaagagctcattctccttgaaaactttagtaaatgtgcttattcatattatcacaaagcaagttataatacttattgaggaacacaataaaacaccattatagtgtttcccacctaacatgggcacaaaccaatcattttaaagggcggttgataaaaaaataaatggtccaaaaacatcctcatgacacgcctaattattcctgcaaatgctaatttgctgatagaacatacttaccacctttgccacttgagctaaccagaaattcggtaccatttggacaagtaggacacacttgctctaaatatgccagcgcatacaacgtattcaacattgggattttgccctacataaaagataacctcttgaaagctgcgttatatcacaaatggttccatgaaaatccacttaaaaccaattgcgtacgcgatcttttttgtaaaaggatagaaggatgcaaaaagtgcttcaacgtaaacaatgactgaatgcgaaggaacatgtttctactcctaatgaaaatttc

SEQ ID NO: 49572 - DNA, 550 bp, Gossypium hirsutum
  Clone ID: LIB3825-007-Q1-N6-H1
ccttggaaatgatagcacttggcgtagttcaatgaacatatttatagttacaacattataatttatgtggctcatgctatgatatgttgcctatggttcagtcaatatcaagttgcaaagccaagtagtggcatttagttgttgggaatctaggattctatgataaactattatgatttctgggaattgccaaataccacctccatttaagccgtcgtcaaggctgttttgactgaacaaatcgctgatgtgctatttgattattcataatgactgcagccaatgtattgtaagatgaaaactgtcttaggtgtctgaatagatatttgtaagaattgaaactccaggccacgtgttctattttcttgttcctttgtattcctggcagtgacatatttttgctttacaatggacaactcagacttctcattattcttagtctttctctagctttccgggcttttgtttgtgttttcgttttccattcctcaaagcactgctgctttcttttcctctcgagttctgccagagcctgcttaaggtgggcatt

SEQ ID NO: 49573 - DNA, 300 bp, Gossypium hirsutum
  Clone ID: LIB3825-007-Q1-N6-H6
gtgaaacgagaaaatgttattccaaaatcttatattacctgtcgaaattaccacccattaattgtttcaagcacccaaacccaaaccaaaacgacctaaaaactttataacctgaattaaaccgatctaaattgatccaaccaaaacccaatctgacccaatcaattgaaaattctacctgaaaagcatcaagtcacagccataatcacaatcatcctccacccctcctttgccttaccattaacacaaaattccattatttgtgtcgttaggaaggaaagagcaaattttaaatgtgaa

SEQ ID NO: 49574 - DNA, 445 bp, Gossypium hirsutum
  unsure (1)..(445): unsure at all n locations
  Clone ID: LIB3825-007-Q1-N6-H8
caaaaaaaaaaaaaattaatgggaaatggggggaaaaagggggggaggggaaaaaagaaaacaaagattccgggggacaaaataataaaagaaactaaccgggaaagggggggggagggtaaaaaaaaaaagggggggaaaaaaacaaaccggggaaataaaacccggaaaccgggaagggaaaaaccctcaaaacaaaaaaggggaaaggccataaaaggggggggggaaattggaagaaagggggttgcatgggggaaaagagggcaccaaaggtggaaatcacggttgggggaaaaaaaaagagaaggggtacccccaggactattaaaaaaagcccgggaggaccgctgcctttntggggaaggaaaaaaaaatgggttttaaaactttggggaatccaaccggggaagcaggaacctgggaggaaaaatttttgagaaaa

SEQ ID NO: 49575 - DNA, 434 bp, Gossypium hirsutum
  Clone ID: LIB3825-008-Q1-N6-A1
gactcttctggacgggtaaaacggttgggcatttacgggcgacaaaagtcaaacaataattccagaaaagtttagaaatacacaagtactatccaatacaaacaatttggtcgtggaagccgtacagtccaccactcatttttacaacaaataaatcatgtatctatctatctaatctaggaccgtcttgcaaaagaatcaaaaggaaaaccctaccccccccccccccaaaccaacacctgaattaatttctggcgaataattacatttatattttaatacacactaacttttcctacaaggaaatttgcacaactgggctcggaatttggcaaattacaatatatgatttgcatcattatgtggccaaaaaactccacaggttttttcctatccatacttcaccagggggctataaattattctactcccct

SEQ ID NO: 49576 - DNA, 550 bp, Gossypium hirsutum
  Clone ID: LIB3825-008-Q1-N6-A4
gtattaacaactcaatatacttctattattatcaaaagaacatacgattacaacacaaaactttactatttataaaacaaatgttaactacccttaactactaactaacaaggcttctacctcctaaccgttaactgctgctaactgctgctaactacctcagctattatatactctaatatgccaccatcctcttcagctcctgctaatcaacacctggtaaacacatgctttttgggccgagcttaagacctgttctgaacttagtaaacaatggtgctgacagcggcttagtgaacacatctgcaatctgctcgtatgttggtatgtgccctacagtaagttgtccagcggtgactttctcacggacaaagaaaagatccaactcaacgtgtttaaatttaaaatgtaggactgggtttgcagagaccgcaaccactcctgagctatcacaccacacagcaggttttcacagagaaaaaacatacagttctttcaacaggactcgagccaaacgacttcagcaacagtatgagccaaccccctgtac

SEQ ID NO: 49577 - DNA, 543 bp, Gossypium hirsutum
  Clone ID: LIB3825-008-Q1-N6-B11
aatcaacaaccgttaatcaagttaaacgaatcgacaatacacgggttaaacataatcctaatccttaattaaaggtataataaaatagagatcaaaccctacccatgctttaaaagaaggaacctaggctccatgcaaacattattagttagctaaaatggatctaaagaaacattggctgcttatttaattaagactaaaggctgaactactgaatttcagctgagacatgtgagactactgtgtgggaattttaggcgtgaacttattatggcaatcgccaaccttacctttgcgaaaataaaaaacggtttgaatattcagatcccctaggcctcaacgacgtgtcccatttttattcacttgcaagtggctcaagaactcaaaactacacatttttataatcacttcaggttcccctggtggccagacctttagccgataaaggacaaaaaataatactctgccaatctcttaagagacaaaacaatatctccattgattccttcatattacaagagcataaactccaccggatgttcc

SEQ ID NO: 49578 - DNA, 576 bp, Gossypium hirsutum
  Clone ID: LIB3825-008-Q1-N6-B3
caaatagaaccttattttattttattttttaaattagttttcattcttttggccctttttagaaaaccaaaatattgcacaccataaccataatacaatataccaaaattggtttctcatattgtacatgtaaatccctctccaacccatgatgaaaggtggaaggaaaaaatttatgcaaaatgtgaagtgagcaaaataggataactccggggaccaaagattaaaaagttaaaatgcagctattttggtggtgaagtttttggttgaagacaagatttcattaattatcatctgcaatcagcaccaacagcttcatggattgatttgaaaccatccctttctaaacactcagcaagttcagcctttatttggggaattaaggcagggcctccatatgcaaatgctgtataaagctgaacgagcgttgctccagctcgtatttttttgtatgcatcctcaccactgctaatacctccacagcctattaaagggatctttccccttgttaggacatacatctccttcaagatgttggttgacaaattaaaaagaggctttccgcttaagccacca

SEQ ID NO: 49579 - DNA, 511 bp, Gossypium hirsutum
  Clone ID: LIB3825-008-Q1-N6-B4
ccaaggtgcaggggacacacgctcgtggtcaggccgtatggctcacacgaccaagtgacacacccgtgttctagacaatgtggtatttgaagtagggcacatggccgtgtccctagcccgtgtaactctttaacttgtaatacatttaaatttaggggtcacgcggccaagccacacatccgtgtgccaagccgtgtgatcaattttgagcattctgttttgaaattttaagatgtaggggaaacacagccagaacgcacgcccatgtgctaggcatgactgaaacgcacgcctgtgtctctgtccatgtggacaaaataatgtcatttccaagccttatttttcacccaatttcaccttccaccgaaaagtccaagggatagtgtgatgtagctctgaccaacttccaaactttacgagcctccgagtactttccggaggatgtaacagagaagatccccagtatcccactagctgaaacaccgcacgaagatttccatttttggagcgt

SEQ ID NO: 49580 - DNA, 538 bp, Gossypium hirsutum
  Clone ID: LIB3825-008-Q1-N6-B5
gagcaataggagattattaattagaaattacgtaaaactcagttattacatacaactactatatcattagataactcgaacacaatttttaaacctacaaatgatgggagaacactgctgaaggaagcatttattacaagccagaggaaatacaaacatgacgcagtacttaagtaacataactacacgaacactcttgagagagatgattgattgttaggtcgtgacttaaattatatggaggaagcagttggacatgggggaatgcatatatcagtaatgccttccagcatcatcactacagtcttgatggaaggacgaagtgctggttcatcttggatacaccaaagtgccaccatcaccattctttccaagcttttcttatctacttcttcaccaagcacaagcttatccaactttttttcaaccagacatttatacaccaaaatcgacagaatgatctcctctgggtttgatacagtggtgtccaagtttcgtctgcaaaacacagtttccaatagcacaattccgtaactgt

SEQ ID NO: 49581 - DNA, 515 bp, Gossypium hirsutum
  Clone ID: LIB3825-008-Q1-N6-B8
agtcaagttagtctcaatctgtatttatagttatacgtgtcattttacatgttttgcaacatattagaattaaactactcaatttgttagtaaaaggaccgaattgcactccacctttaaatacaggaattattggtattcttttacctatgagaaaagaaacatcacctgaactggacacgatttgccattggaacttgaatgcactaattactagaaaatgaaaatggattaggctaaactttagacttgaaatgacatgctcattctaaaacagaaaccacgtgttccgcctgctacaaatcacctggaaacattaacaattaaaagcactaccatactctttctaatttcaccaagcttaatccattacattacaaaaatcaataccatttaaagcttgtgcctgcctggactggacatttacctttcaaaactgtcaaataatctccatagtatgcatgaatatgaattttgacaaaaaaagactatgtcaacattattaatgcatatta

SEQ ID NO: 49582 - DNA, 463 bp, Gossypium hirsutum
  Clone ID: LIB3825-008-Q1-N6-C1
aattcaaaatcccccatacaacctggtttaaataaaaaaaaaccattttttttgagctgtactcaccttaaaccttaactgtcactagtccatctatgggatggtttatgaactcctaatttttttggttcatgctgaaacatttgggttttttattcgaatatgctccgaaccgtccacaccctgggattctcacctttatcttacattctgatgattggttttgggagtccatagcttaaactgcccctcctgaattgtacatgtcgagtaatccgataggagcaaaccgaaaatcctcgctgaatgccctgataggaaaaacagtaaagacttcacatttcaaatgttctaaggccacttgaaattttgcattttttgacattgtcttcagggaacctgaaggcatgcatatactgcacaatgtcctctccaattctcacctgcaaccttttaaagggca

SEQ ID NO: 49583 - DNA, 498 bp, Gossypium hirsutum
  Clone ID: LIB3825-008-Q1-N6-C3
ctctaattatccccaacttttatgggttaaaaaaacggcccgggctaacactgaacattacaacaggaccaaacttttttttattggggccaacagtccgaacttgaaaaaaaaaaaaggggaagcaaacaaacaacaaacacagcctcaggggggtggcaaagcacaaaaaggcgcccctttcattaaatgggaccgataataggggtcatccgggggccccccgggggggctccttttagtcccagcattgttaggccccccacttgggaagttttggtttcccgttgacccgaaagcaccccctgtttttccgccaaaccccatactggggagggaattttgcctgcctgtataaaacccactacctgggggggggtccccacggttgtaatgtccaccggtccccccataaccaccagaatcccctttgttgtccccagctgggggggagccagtcccaccaataccaccaccaccagtttggccagccggggc

SEQ ID NO: 49584 - DNA, 552 bp, Gossypium hirsutum
  Clone ID: LIB3825-008-Q1-N6-D12
gcataaagataaagtaggtacttgcattcaccaaaacatgtcaggcaacagctgtaatcgatgtttttacaacacgaagttaagtccacagttccaagaaaacctctcattctatttacaacatactatctgtccttgcgggcagacgacggaagaaattgatcggtgccgaaggtgtcttgtggcgaaacctgggatgcctcataacataaaacccagcaagaagagcaatcatctgaaaaggtgtgacatacaaaacaatggcagccaccagacataataacacaaatattgtcgtggcacgaggatcccgccagcttaggagtgcctgaagccgctcgccttgtgtagctatgtcaccaacaacagtctgaattcgccctgcgacactccttaaacgatcatacctcatccgaactatatccgagcttttcgatgcaggaaaggtctcgaattcttcatctagctcatcaggagaaactgcatcggcacaagaaagactagtgttcatatgaggagggtaccttggtcgataacgatagttccaaaccc

SEQ ID NO: 49585 - DNA, 370 bp, Gossypium hirsutum
  Clone ID: LIB3825-008-Q1-N6-E10
aggggagagttttgacatccatttttcagggtcaaaatacagccctaaattggcccttgcccccattcctttgagaacatgccaccttataaaattttaattttccagcaaacaactttttttttttggggggatttattcatacaaaaaagggggaaaaccaggggtaaaaacaacattaaagggggggggtttgaaataatcaaaccgggatcctcacccatggggacttggtcattaaacggggggggaatcttaaacgattgtcacaaaattccaagggggaaatgtaaaacttggaaagcaaatgaaattccggggcaaaatctttgacccctgcccaaagggatgaatataaaatttttgcccc

SEQ ID NO: 49586 - DNA, 487 bp, Gossypium hirsutum
  Clone ID: LIB3825-008-Q1-N6-E2
attaaatacccatagtttatattttgtttttttacacataccgttactatttgggcgtggggcaacctcctagtatccttgaaactgacttgcctgaggggatacatacagtaggaaatttttaaaactgaaaactatagccagctcttgcttgcaccaagactcaaaacacccacaaaagggtttatttaaacctaaaaagaatcgaaaagggaagcttggggaaggtctgggcggcacatataaaccattcacaatgggaccaccaaccttatggaaggggaggccagtcatgtttgaggagcaaagtttacttgcaaggaacacaaagcgtgaaacatcctcactggggtaacaaggggggaaaattggaacttgaactccaaactgaccccataactttttatgagaccctgctggaatccaccggagtacatatgggcccgggtgccactgcaatgagacgtacaccaaaaaataccttttg

SEQ ID NO: 49587 - DNA, 536 bp, Gossypium hirsutum
  Clone ID: LIB3825-008-Q1-N6-E9
aaactgttgactatttactcgttcgggataatctttacataaaagagagtaccggtagaactgcttccgcttctcggtttttgttattggtttccttggatggtttgtaacggtgccgcagcttgaatccgtggggtcattgacgactgacttgaggagaatgagaccaaaagtttaatagcaaagcatctctccggagttcacccactgcacaaaactatctgagaattcctcgagaacgttggactgttgtgaattaccaaaagatagctcagttccggtttgctgccttcccttcatactcgatccacattcgctactggatggagttgcttccccgattacaccgttaacaacattctccaatgaaagaccagcgaacgaagagcttgtaagaactgatgacccatcaaatggttcatcctcgcaagaatttccggacgatgaaatacagtccaggtcgacaaagttagagtaattgaagccatccccacgttcagagaagaaaattcgaccggtttcaagacagcggtctc

SEQ ID NO: 49588 - DNA, 309 bp, Gossypium hirsutum
  Clone ID: LIB3825-008-Q1-N6-F10
tttttttttttttttttttttttttttttttttttttttttttgggttgtttcttttaattttatacgggaactggcatgggagccaaactaacttatagggaggggaatgaaagcaaggcccggccaaggcaagagcaaagcggggagggaaaatttcatccttttagaggacaacaaaacaaaaaaggccgagcgcgaaggagtgagaagcaaagcgcgcctaaagaaagaagggaacaaaaaaaaaagaagggggaggagcgcccgagaaaaatgaaggaaaaaaaacgggccagaccaactaagt

SEQ ID NO: 49589 - DNA, 415 bp, Gossypium hirsutum
  Clone ID: LIB3825-008-Q1-N6-G7
aattgtcttggtttacctttttagaatacaaccggaccaaaaataattttatttggaacaacaaaaaaaacctgaaaaacaaaaaagatagagaaaacaaacatcgaaccctgagctaaggctttttcaaaaaaaaaaaacacggccggtcccggggggggacccggaaaaaggggcaccgcgggctaccggcgggggagttccccctattgcgaggattgttagaccccggggtagggaaggccagggccccccccggggcgaaagggccctccggttccaagccaaaccccaaaccgagggggaaacataagagctgaaagcctcgggccccctaacggggggggggacccacactgatgtgatgtccacccgctcccgcctttccaccagggaaacctgtggtgccccctgc

SEQ ID NO: 49590 - DNA, 565 bp, Gossypium hirsutum
  Clone ID: LIB3825-008-Q1-N6-H3
gtaaataagaatcataaattcataaaatttcaggcaaaatatggagataacataattggagggatatccattcatcaattttattaggcataacacacaattttattaccataacaaattgtacaaaagaaaacaaatcaaagtcattcaccattatagagccccaaacccgagccagatttcactgtgtcgatggggttggaggtttccatgtggtagtcaggaaaaccatctaccatgatctcacagatattatcaatctccttactccgacatggttgcttaggactcaaggcagaggagtagcaatgaaggctagttcctttttctgattcagccagtgagacattttgacagtccctcgtatcatgtaatcttgaagaaggatgtcagacgagtttttcccacattgatgaaaacaaattagcagtccaggccaaggtgctgtcagacataacttgagctgtatttagcatctcatgagactgattctgctgtttttccactctctggaacattgattccgatagcactcgcgatactattttaggcattttgacttctt

SEQ ID NO: 49591 - DNA, 544 bp, Gossypium hirsutum
  unsure (1)..(544): unsure at all n locations
  Clone ID: LIB3825-009-Q1-N6-B8
ttttttttcttgcttattttgttactgaattaagttgagcggttttacatttacagacgcataaaaaactatttttgtggacaaaaaaaactgtttttttatgttatgactcttccgtatacgtccgctttggtttgaatgggcattctgaagaaacttcagtttagttctgctatagaaaaaagaggattcttggattgagctttttcctcccggcgagaaagcttttattctgcaattcatttcaaaagacttcaatcggtacacgcaaaaaataggccaattcagcagctttttgttcaatttcgcgcggagtcaaattctcatcagtacgagtcaagggaacggccccctggcctctgatttccatataaaggacacgacgagcataaataccctctttaacttctattctgatggactgaatatctttcataaggaatcgtagaaagatgcgacgattttttccaggaaaaccccaacgaaaaatacagactattcncctcctttctatcgaatcgatcataaccactgcctacattcc

SEQ ID NO: 49592 - DNA, 535 bp, Gossypium hirsutum
  Clone ID: LIB3825-009-Q1-N6-D10
attgcaatgacatagtgatcatatatagagagagagaaatacatttcatagctctcacaaagtatcagttttcctctaaaatgagtgcatccattgcaggttaaatcatagaaacatggccagaagcataccttagaacctatatttacacaaattatatctatatctcaaaggttgctttcattttcttacgatagttatcaatccaaccttggatcagcttgatctcggttgccctctgttccactaaccagtcagggtcctctgtcgaagaggcacgcaagtcgatgtgatgggcgccttctttcgtgatgagagcaataatcgtttcagatatattcttcagaacactgccaccactccaaggatctaataaaccatttgagaatatgatgttgcttccaaaggatttcaatacatgctcgatatcatgtccaccaaattcggttgttatccatctaggccttggtgtcacctggaaatcctcctggcacccttctcggaaagcagagtaatcccaatcatatgctggaac

SEQ ID NO: 49593 - DNA, 473 bp, Gossypium hirsutum
  Clone ID: LIB3825-009-Q1-N6-D9
tttttttttttttttttttttttttttttttttttttttttttttttttttttttttttttttttttttttttttttttttttttttttttttttttttttttttttttttttttttgaggagggacaaagggggccccaaagaacccccttggggattttaaacccaagaaaaaagaggccaaggccaagggggaaaaagaaaggggggccggcaaaagcggaaaaaggcacccaaaaaggggacaggggttttgggggggccacaaaaaaaaaaaaaaacccccaagaccaacggggagggaaaaacgggggggggcccatgggccctgggggaaaaaacaaaaggaccaaaatccttcctttaaccaaaagggttttgggaatattgtattccaaggccaaaaaaaccaaaattggggaccaacaacccccgaaaaagggggggcacatggggggggaaccccacacttt

SEQ ID NO: 49594 - DNA, 492 bp, Gossypium hirsutum
  Clone ID: LIB3825-009-Q1-N6-E10
aggaacctgttttaggaacccggaataatttagctaaacaaaaaggctcttccaaaagaatcctcccaaaagtttccaccttaagaaaacctcccgaaaaaaatccaagacaaaaccaaattccacacccaacctatgccctttacccaagctctttgggcaaccccacggaacattcaaacccgcaacttattcgcccgccccaaggtccaggcccttggggcaaacccccccggaaaaaaggcccatttttatggaaaagtgatccttaccttccatgggtttttacggggggttttcacgttcaagccccaccttaaacccaaaagaaaaatttgaaggaaaccttttccaagggccttccctgagtgcccaccatcaagaccttgacctaaaaccttcccgtataccaatcttgccttgaaacacaagaaatgaaacccgggaataatatttttaaaaataacccctttaaaaaaccacttccttttt

SEQ ID NO: 49595 - DNA, 489 bp, Gossypium hirsutum
  Clone ID: LIB3825-009-Q1-N6-E5
aaaaagcaagactaagccatggggatagcaacatgcatattttttcagtaaacatccaaattcaaaatacacatgggcattcaaatagaaaaaaaggacctaggaataagtccccaactgcaaatataaacatataacagcttaggggggacatatcggtaaagctataactttccctgggggtaaaaacaggccaatgttttttacaagggcagggaaatataaagcccttttgggaaccataacaaaatttgaaacaagcttaaaaacggacaattttaagggcccactaggcccgtaatttacaggaacatattgctccatttgaaaatacgaagggacttatagctaaatgcctaattaaacacccgaacatcatttctcaaggtcctttccattagtcaaaagccaattgaaaggaaaaaaaaaacccctgtagttaaaaacgtagttttatgtctgaaaagccctaaatccatatgcttgctt

SEQ ID NO: 49596 - DNA, 504 bp, Gossypium hirsutum
  Clone ID: LIB3825-009-Q1-N6-E9
tgtttgctgttttaataaatggaacgcccgagagcgctcttaccgatgcgaccaggaagccggtggtgatagaacgaactgtaaaagccggaccatgaacagcccacgtactaacctgccttgccctccttccaattggcggacctcgtccttgcattacaccgggctaaccctcaccggcaccgacataggcctatgcgtggcatcgccactcttgctcatctcaagcccggctctgctgccaactgccatggcggctttcatggctgaggccggtttcttggcgtacggcgcttacgggtggacgggactggactgggtctcctacgtctcaaaccgcggcagacaggcgactggcaccgaccaactcgactcggaccgaaccaagaggggcatgcaggatgtggcggggtgtgtgggacaaaagactgaggaagctgggcagactatcgaaaacactgctcatgagggtggctcgacatgagtatgaaccatggcaggatg

SEQ ID NO: 49597 - DNA, 556 bp, Gossypium hirsutum
  Clone ID: LIB3825-009-Q1-N6-F1
aacgtattcaagtggatattgtaccgagacaagaaaaaatgcttacaactagtacccactagagtcacgattggtttacaagggtgatgatggacatacaaaaatcaattcctgaactgacgaaacctcactgacctaaataaatccccctccatcttgacagacaagacaagccataaaagggttaacaccgaattacaatacatactacagtctacaaataatacgggcatgccatattattatcctcatcatagtttacaggtcattttacactaaactatgagcacattattagtacaacatacttcatctcacccgtcccttccctctcctgttgtttctgctcactttctttacctcctgcttctccataacactgttgcttttcctttttgagtgtcgtgtattcggcttctgtgccaaatcttcaccttcaccttcaccttcaccttcaaatttcatgcttgaactgtgctgggaatcggatatggcgacatcattttcatttacttctgccacttctatggaagcctcacccactcttgttgcattc

SEQ ID NO: 49598 - DNA, 446 bp, Gossypium hirsutum
  Clone ID: LIB3825-009-Q1-N6-G10
cctgggaaataaaaatttaaaatttttaccccaagaaaaaaccctaaaccgggggaaagaaaaaccttaaaccccgctaaaaaccagcccccccccaaaaggggaaattgggggggaggcaaaaaggcccaaagggcctttaaaccccaagggcccaaaagggccccccaccctaaaaaactggggccctggggccccccgacccaggggcccccaggaacataaaggcccaaagggggggggaaaaaaaaaaaaggattttcccaaaagggggagggcccccccaaaccccagcaaaggggaaacttttgaaaacaccccaatgggcgggataatttaggggggcccccaaacaagggcccgggggaaaggggggtcctttttaaaaagcgggggcctttttttttggagggaaatacaaaaaggctgggggccccggggggcaa

SEQ ID NO: 49599 - DNA, 549 bp, Gossypium hirsutum
  Clone ID: LIB3825-009-Q1-N6-G5
caaatagttcattaatcattttgtagatttttgaagttaaagtcactaaaatctcacagggcattacatgagaaagaggagagagctaagggcagattgacaagaaaccagtttttcctcatagctttcacttgcagctttgcctactatgtacttccaggctaccttttcccaactttaacttccctgtcctggatttgctgggtattcccaacttctatcctagcacatcagctaggttcaggacttcatggcttgggtattggtgccattggatttgattggtccagcatatccgcctaccttggaagtcctcttgctagcccttggtttgcaactgttaacattgctgttggttttgctcttatcacctatatcatcactcccattgcttattggctcaatctcttcaatgccaagcatttccccatattctcagacggcttgtttacttctactgggcagagttacaatatttcagctattatagactcaaacttccacattgacatggcggcatatgagcgtgggggtagcctgtatctcagc

SEQ ID NO: 49600 - DNA, 157 bp, Gossypium hirsutum
  Clone ID: LIB3825-009-Q1-N6-H4
tcgcgatctagaactagacgcacgcgtggacccaccaattaatgaccgacccctgcctgcatgccaaccatctctatctatagtgagatgaaagctagctggacgtatggatatagatagctgctgtctgaaagaaatagccattcacacacacaca

SEQ ID NO: 49601 - DNA, 506 bp, Gossypium hirsutum
  Clone ID: LIB3825-010-Q1-N6-B11
accaaggaatggcattgactagattctttgaggacatcatgcggactttcttgggcgttgaactaatttaattgtacattgagagtagcaaaaacgctgcgggtaacatttctatgctagtaagatgtagatgatcaacttctgaagaagacccataattgccataccaccctgcctaacttacgccaaaggagaaggcatttcaattgaaagtaggcgcatacaccatctgtctctaccctgactgaccaatatgttaatggtcttaactgattacagacccaaaccaccttatggaaaatgaggtttcctaccacccgcgaaactgtgacaactcccaagttacatgttgagagggacctttaaagatctccggatctataaatttacgtctttattcccccacaaaattacaccaaactttaatgttcaatcaccctaattgattgctgcacttcatgatgaatccgattaaacctgataattttactcaaacaaccttaacc

SEQ ID NO: 49602 - DNA, 575 bp, Gossypium hirsutum
  Clone ID: LIB3825-010-Q1-N6-C2
aaaacgaacaatacgactttgcacttgaataagttcatttttagttaaaattccatgaaatagcttaacattttagctttcctctcggtttcaagatgtagacaggaggcggaaagagaagcttttttgtggcagtggttgagcatttcataattgttgctccgaacctgggtcaccaagagagctccatgaagtcattgaggatacaagagtcgagtgaattataattgtgttagcaccagcaaatgtcttgtgcattgcatgttccttaacaagtttatgtcttggaagttatcttttcttcttcgtatttaggttgtaatctaatcatttcacatggaagctctagaatatgctgcagggcatgataagatacattcttttgttgtagatggaagattatccagctgaaattctggtgaagtcgacagatcactctggtccagttagcaacgttgtccaaagtcccttggaggaatctgctttgatatgcagtatgggaacaagatttagcagcatagatagtgaaactggaattccagctgaaagcagttctgcagccagtcagaattcct

SEQ ID NO: 49603 - DNA, 546 bp, Gossypium hirsutum
  Clone ID: LIB3825-010-Q1-N6-C3
gctcaaacataaaacatcccactttataatattaaaatgttcaaaatcaataccaaaaccaaatccagctcaaatctatatctatattctagacagcattaaaaacaaagctcttctttcagttacagcaacacccaacattacctaagttaaaaccagattgaaaccagagacaacaatagcagttaaacagacaaacaaaatgattcaatataagtgtggtttaatggtcttcagtttatagacgtcaacattaagctgtttacctatggagcaccataagctggaagatcaggccattgatttgggctcaaagaagaagcagttttgctgttactggtgttagtgactttaacggtgcttgtgaccgcttcattgatgaaattttgatgccaattctgctgataataagagttacctgcagcgggccattggaactgggtctgctgatggtgttgtgaccccaaaaatgggacaccatatccctgcagaagacccaaatttgaagaactactgccgaagtcaccaccaccaatacgtagagcc

SEQ ID NO: 49604 - DNA, 542 bp, Gossypium hirsutum
  Clone ID: LIB3825-010-Q1-N6-D4
gatagtaacaagagttgtataaaagaaaaacctaaacagccttttactttggccctgtttagtggaatatctgaagggttagtagggatcaaagtatgagggagtgtccgtatttagcattgcttttgactgttcaaaagtaattgtttttgcagcaaaaacaatgctaaacaagagtttttgccattcaaaactggcaaaatacttctaaagagtgcttttgaagccacacgaaggaactggctcgaagagtttattttaggcaattgcgattgtgaacggctataccaggcaacatgtatgagtagacagagctctcagggcagctccccttccacaccaatttcttcttctctccttttgcatatgttttattgaagattgagttctctattgtacccacttttcacttgaccgtggctcgaagcatcaaaaactgccatcatcttcaagctttttgcaccggacattgctggttttttttccttggtcttcatccaccaagttctgatctgacacctttatgaaagaccaaatactaa

SEQ ID NO: 49605 - DNA, 303 bp, Gossypium hirsutum
  Clone ID: LIB3825-010-Q1-N6-E10
aaaaagaaacccggaggggattttctggcaaaacattttaccagggaggggcaaaaaaacccaccttttttttccccaagggaaggggctttccttttttaaaagaaaaaaaaggggttggcccaaagggggggaaaaaaggtggaagggggggccaaaatggcccatttttataaggggggaaaaagttcggggccgcggtattgtgatttcggggcaccctcccaacgggtggaacagcccggcgaaaaaaaccaggcccgggtctttcgggtcccaccaacaaaattgggggggggggaa

SEQ ID NO: 49606 - DNA, 353 bp, Gossypium hirsutum
  unsure (1)..(353): unsure at all n locations
  Clone ID: LIB3825-010-Q1-N6-E7
ccccaaaaataaatatttggggaaacccattgggccaagaacattttcccccaataataaaacaaaagcccccggattatttacgttcccagaaaacacagccccttctaagaagcaaaaacctaaaaacttggcaacaactacagaaaaggggaaagaaaaaacttcttacaaacaaaaaacggggcctaaaacatggtaaaaaaggaaaaaagaacctcccaccccccgggaaaggataaaaaaccccagggttcccaccatccttttgggcggaaaacaatttttacaaaaggggggggaaaaggngaaccctttaggtgtcaaaaaggggaggatccccccccggggcc

SEQ ID NO: 49607 - DNA, 286 bp, Gossypium hirsutum
  Clone ID: LIB3825-010-Q1-N6-G12
cacattaacttatgattcattaattatccgttttattgctgtcaagaaaaaaaatatcccggagaagaaaaaccaaaaagcgcccccaaaaaaaaaagatactcgcccgaaaaaagccaaaaccggagcaaaagactacagcggatacagaaaacacacagccttttagacaatcaggtccgctcccaaaaaaaaatggagagaaaaagacatggtccagcagggagcccccacaaggaacgggggttgcatgcccaaactcaaaaaaaaaaaaaaccacgacatc

SEQ ID NO: 49608 - DNA, 433 bp, Gossypium hirsutum
  Clone ID: LIB3825-010-Q1-N6-H1
aaagaacaaaaaacctttccggcccttttttttttggaaattgggttttccctttcctacgataccctggaaccattttggacggcaatttttttccaatttaatttaattaagggtaagatcccaactggaaaggggggactaaaattggggtttgggccgggaatccccgggggccatcgaacgacggggtttttttaaggttccaaggggggccgcctggggggcgggaaaaaaaaacactgggaaaaacaacttgacatgctgggggaacaggacagggggccctcctgcacaaaaaagcatccccagcagcaaacgggttttgggccttcccataaaaggaggcccaagcgggactttggtttttaaagggccccccttttcgcaatgggacatgcccaggcaatatcggggggggaaacgaaaatga

SEQ ID NO: 49609 - DNA, 529 bp, Gossypium hirsutum
  Clone ID: LIB3825-010-Q1-N6-H8
gtaccataaacgaggagataaaataattaactgaaataatacaaaaatcaaaactatactatattaccaaaactgagggccccccgacccactaaacacacaacccatgcaactttagagcctattcaagaccaaggagccgagctaactcacaaagatctaatcgagacacatttcggaaccagattaatagcgaccacacggttcgtgaaccaataaaaccttctgtctagctccccagacatatcatactctgtttactgcggcacaacgaataagacctgcttccaccctttcccctatatcccacttgagacaataccacgggatgcctccctatatccacgctcggtaataacgctacagattacatcaaccacaaaccttcataaaagcttagcttcttgatatagagcaacccatttctctaatcttacaatcagcactgttcaaaacaaagtcaaactctggcatgataaaaactgtgagcgctgctgctcgaaagcttttcttaatattgacaagactg

SEQ ID NO: 49610 - DNA, 576 bp, Gossypium hirsutum
  Clone ID: LIB3825-011-Q1-K6-A9
attgttctggttttctcattgaagtttgcatttagtttatgataacctacctgctggtaaggacgtgctacaccattctgattaaccataataactcaaccagatattgcatttatatctccaggtataaaaaataataaaaatgtttttctcttctttcatgattctagattttttaaatatacctacttaagatgatgcatgtctgaggaagtccttatcttttgtggataagtgcatcaaaatttgtttgaacagcttgccagtggcccaaatggaattttatttgaaagagttggtcaacttattactaaagctaggagtcaattgcaaacatagtacaaagtagcattccgtgctaaatattctaaaatttatgcaaaaaccattggaggtctatttaatggttgtagaagaaatttgggctgaaatttgaagaaattcttctgaaagcagtagtgcggaacataattaatctaattagtattccccgcttgatcctgtaatgaacttaaatgcaatataacgcttatgctatttgcattctggattggcaaagaatttctggacaaccac

SEQ ID NO: 49611 - DNA, 591 bp, Gossypium hirsutum
  Clone ID: LIB3825-011-Q1-K6-B11
tactctttcaccttttgtgaagttctcaaattttttttcttctcagtatcctttttttttttttttgaaatactgtacttaattataatcctgtaagctgaacgattcccgctgagcagccggcgaggcagaacggcagccggttgcaggtataacttgtgatggacccttccatagtgaagctccttgaagaagaagaggacgagtctatgcattctggagctgacgttgaggctttccaggcggcgttgaatcgagacattgaaggcgatgcgtcgaattctcagcagtctggttcaaatatcgcagttctgtctcaaggaagcaatccagcttccagtcaatcggttgcgcaatggccggcctcggggcaagacggaaactccaactttcaaaatcaacaagtccttcaaagtgcacagcaacagcagcagactttgtctgaatcagagcaaaagcagcacggagctgttgtcactggaagtcagcaacaagtgcaacagccaaatgatgttccaaaagaacatagtcgtctaccaccacaacaaaaacaaccccaagaggaccatccacaaggagtgaccgaacaaa

SEQ ID NO: 49612 - DNA, 579 bp, Gossypium hirsutum
  unsure (1)..(579): unsure at all n locations
  Clone ID: LIB3825-011-Q1-K6-B6
ccaagcttcatcaaaaagagcaacgattcctcctggtttctgccaagtaaaagaaagaaaaaacgtatcattaagcaaaataatgaaggataatataaatgaaacagagggttatgtccgatttattcgagtttaaggcttgattatgttcanatatcagaaaacaaagcagtatggaagatcaaaccagctgcagaatagtaggagtgaagttaatgcatagttcaggtttgaacgaaaggagttaagccacatgaggagtgtgacactgatatgcacaaagagaaatctcatcgatacttcatgtaatattaatggttaacataatctatgggggatctaaccttttcaataagatccaggacatcttgattatcaacaaattctatgtagctccagttaatcttctcttttgtgtactcttcttgctccatcttgaagacatgctgaaaaacataccagaaacacataaatatatagtttcgggtcaaattgatatagctgaaatgatcaaagcatgattcaagaccttacctgattgaaatgctgttgcaacttctcatttgtaaagttaataca

SEQ ID NO: 49613 - DNA, 517 bp, Gossypium hirsutum
  Clone ID: LIB3825-011-Q1-K6-C12
ccgtccggctctaagttatgcatagcctgtacaagctagaaggctccgagctggcactggcgaggttgccactctagctctatgctatgaacaaacctagcttcaatccagagcgctggtcaatgctcagcttcaagatctatggaaacatgagagggctcacgcggtcaataaaatagcattacactccattatctctttcatcatgtgcgtgcaaaactgacatgtccatatctaaacagggtcagaacacgagcaaatgctgataagtgaatgtcacgcggcaagtagcatatcataataatgtatcattgatggatggttacccgctttgactaccctaacacgtgccatgatgctagggccaaaacgtgtgaggagcccaccaccatacttggtcacgatgaagggccacctctgctgacctgtataacattgggaaaaaacatggggcaacggaatgtgaacagaaccggcggctaaccctagaaaaaatcaatgcctgaaccttcactcc

SEQ ID NO: 49614 - DNA, 568 bp, Gossypium hirsutum
  unsure (1)..(568): unsure at all n locations
  Clone ID: LIB3825-011-Q1-K6-C9
aagagcattaccgccatggaggttgtgactgggngagacatcattgcaacaaatttggtccgaattccaaaagatcgggaaagggactcctcggatgacatctttgaggacatttgtggtgtcttaagaaaggaccttgctggggatgccattaacggttgggatggttgccccattcagatgtcggaagcgatcctggacatcgaacgcctaatatttagagacctaatcagtgaaactatccgagatctcgctgcattggcttgaaaaaagtaataacatcccagcacctcgtaggaagttggtgttctgattgcgacttgatgaaaaagagagtgccctttatattattcttcccgcacttacttttagatccctgctcttttccttttcttttctttttttcattctaattatatttatattgacccccctttttccttctaatctttcattttacctgaagtccaggcatagctaatgatcgcttttgcaagctgtaaaaaaaggtgggttaatattcgtgtccacgatggaaaaagttgttgtcaatgtcaagcactagtga

SEQ ID NO: 49615 - DNA, 608 bp, Gossypium hirsutum
  unsure (1)..(608): unsure at all n locations
  Clone ID: LIB3825-011-Q1-K6-D10
gnatatattgtggtttgattgtttgttaggttttgatattcatagggtttttaattcgaatttctagcttaagtaaggacctcatttcttctgcctcaaattaattaaatttaatggttagtatttgtaaaatttaatgtaatgtaaaatttttggcatgttattaattataaaatatttggtctttggggtttttcattgttactgcaattatataattggtttcagcatgttatataattggtttttcattgtaaaatttttgacatatatgtttcagcaagtaaatatttagggatgggatacttgtattttaagcctgaaaagtcattaataagttgaataaatactgcttataatttttgttcaattttttcttgaattttggtgaactctttttttctttaaatcacatgatctcaaatttcaatttcttttaacatttattggaagaataatgtggtctcatttgattgtttctcctacctggttcttgcttctactcgtatttctttttggatgaataaatttatttgtttaatcctcatcatcctgtacaatatcatgcttgcaagtttctgctttcctccttattgcagatttactat

SEQ ID NO: 49616 - DNA, 598 bp, Gossypium hirsutum
  unsure (1)..(598): unsure at all n locations
  Clone ID: LIB3825-011-Q1-K6-D5
ntggttaaaaacaaacaacgggaaacctaggtcgtcagtcgtcatctctttagcgaaagtaacaaaaaaaaaatggcacatggtggctacggtaagcggcgcgtgggggagggcaagcgcgtagggaggcgatcaaaaggacctggcctagacaagaaactaaagcctaaagccgtttctcttaagaaccagatacgctccattgaacgcatgctacgaaaggatcttcctcctgaagttagagaagctcaagagacgaaattagaagggcttaagaaacaagaagaaatacatactcgacttgctgtggaacgaaagctattcttgcgtgatcggaagattaagttttttgaaagaagaaagattgaaaggcgaataaggcggttggagaagcagcaacggatttcgccaggtcaggcacaagacatggagattgctgaacagctgtctaaattaaaagaggatcttgaatatgttaggtttttccccaagactgagaaatatgtatccttatttacgggaggtgatggttcggacctaattgataagagaaatagattgcggaagcagataaaagccaacttagttgctgctgctg

SEQ ID NO: 49617 - DNA, 577 bp, Gossypium hirsutum
  Clone ID: LIB3825-011-Q1-K6-E6
cttgatagaaaataccagttcatttaggcgccccagcatttcctatcttctttcacatctatataacgctgaattctaaaggcagctggttcgccgttcgttcaaatttttattttaagaaaagatatgcctcttcttttatctcattaaagattaatgagacaaaattcccagcgaaattagagatatttttaaataaaaaattatccattttggcgcattcaaaaccctaatctgtatgtttgatcggatttcgcagcagtgttatccggagtgtaattctttctgtcattgattgtctgcagggaaagaaaaagtcaagacattcccaaactgctccactctcttcatctctctctctcacgggcattccttcctggtttagaattttatctgcttgctggctcatttgaccagagctttgtggttcagttgactatggagctagaaaataacaaaaatgaagctgacactaaggcggaagacttggcaaaatcagaatcatctgaaaagaaaagccctaatttattgaaagccaaatctgatattgcaaagtcagtggctaagaatttcttga

SEQ ID NO: 49618 - DNA, 554 bp, Gossypium hirsutum
  Clone ID: LIB3825-011-Q1-K6-E7
cctacgcgtccgcccatgcgtccgcttagccacgtcctccaggtacagttctgatatttaccccatggattctggcatgctatatcctgaagtttacgttatattttctgcagttcgcccacctgttggtttcttctttctgcagtttttacagtttttatataactgattctccatttggatgattggcgagggtcaccttgtcagtcgttcgtaaatggagcataaatgggtagtcagagttgaaatctgagtttcccgaagttgagaatgaatgtcgaatgcgcgactgacatgggtatgatcaaaatgttttagttgtatacatttgaagatcatattatatgcatacctctgtttgaatacgttggagacaaatctgaaaaaatgcatatcaaacaccaaattggatgaaacttcaattccttatccaatttgtgcgatatattgaaccgatttagataaagaaactagattgaatggtattagtctttatactttgtgaatgaaagttgtggatttaactgtcctttaatttgaacaattttagtctt

SEQ ID NO: 49619 - DNA, 321 bp, Gossypium hirsutum
  Clone ID: LIB3825-011-Q1-K6-E9
gagcacatcaaaggaggaagtgaaatatgcaacgaggaccacacacactgcagtatcccacaagaccacagtagatgctcactattctctaactcttcctggcacaacggacacacagtctccatggactattttctacgcgtcaaattaccatagtgaggcaccagattgttgaacagcctccatacatgaattttaatttttccaggaatgttcgaatgcccataaatcagtgtaaaatcctttgtaatacgcaccactagtagactgatgtaaattgctttgtaaacattctgtaatgagaacccgatacccactcct

SEQ ID NO: 49620 - DNA, 550 bp, Gossypium hirsutum
  unsure (1)..(550): unsure at all n locations
  Clone ID: LIB3825-011-Q1-K6-F1
ggnaaagttaccaagaaaaaaagggtctcaaagagttaaactctggggggtttatagaactgtctgaagaagaacagaagagggacgaggaaggagataaaggggagagtgtcacgtgcctgtcacatgggtttatatcggtaatcggacggcggagagcgatggaagacgcggtgaaggtggcgattggagtgatacaagggtatgattttttcgctgtgtacgacggtcatggtggagcaggagtcgctaacgcttgccgtgacaggatgcaccggttggtggtaaaggaggtgcaggaaaggacacgtggtggtggtggtggagggaagggagtaggatggngagaaggtgatgtcagcttgtttngagaagatggatgaggaggtcaccggtgttgagtgtgggacgacggctgcagtcgatgaggtcatggaaacgatgggatcaacggctgtggtggtgttggtaagcagggaagaagtagtggtcgcaaattgcggtgactcgagagctgttctctgtcgtgccggcaccgccgtggctttgt

SEQ ID NO: 49621 - DNA, 586 bp, Gossypium hirsutum
  Clone ID: LIB3825-011-Q1-K6-G1
catcgtggtattgccttcgttcaatttgctgttgccgaagagctaaccgtgcaattgagttgaagaatggttcttcagttggaggtcggaaaattggagttaaacatgcaatgcaccgtgcttcattggagcaacgacggtcaaaggcaacacaagatgatgcgacaaagacaaagaatgacaaagatggtcttcttacttcagctgtagaagcacatggttcagacctgccaaaattagagaaacccgtgcaacctaaaaaagcagcaacactttgttctgatctagctgataaagagaattgttcagagaagcagagggttgctaggactgttgtatttggtggtcttcgtaatgctgagatggcagaagatgttcaccgacttgcaaaagagattggcactgtttgtgctgtaacttatcctcttccaaaagaagagcttgaagaacatggtcttgcacaagatggatgcaaaatggatgcttcagctgtacttttcacaagtgtcaaatcagctcataccgctgtggcaatgttacaccaaaaagagatacatggaagcattgtttgggcacgccagctagg

SEQ ID NO: 49622 - DNA, 583 bp, Gossypium hirsutum
  unsure (1)..(583): unsure at all n locations
  Clone ID: LIB3825-011-Q1-K6-H11
ccccgcgtccgagcatctcagttttcttttctagnaatgaatggtcggattgggggtttttcctttttccattaagctgtcgtgaagcctggcggtgctgaacccttaagagcaaanagaaatggagaaacaagtggaaaactccagcaggttggtgcttgtcatatatccatttcaaggccatataaatcccatgctccagctagccactatatttcatgcaaaaggctactcaatcaccataattcaccctgaattcaactctccaaacccttcaaaccatcctcaattcaccttcatatccatcccagataagctgcttgagtccaaagtctccctctcacccggggattttatgaatttggttttggctctcaacaacaactgtgcagcaccgtttaagaaatgcttgaaacaaatgttggatgacgagcatccccatgaacgtattgctggtgtaatatatgatggtctcatgtacttcgctcaaacggtcgccgatgatcttggtttaccaggcattagcatgcgtcccactgcagcagcaatgttactttttgctgttattcctcaaattgagcaa

SEQ ID NO: 49623 - DNA, 575 bp, Gossypium hirsutum
  Clone ID: LIB3825-011-Q1-N6-B12
tcgcgatctagaactagacgcgcgcgtggacccaccaattactgaccgacccctgcctgcatgccaactatctctatctatagtgagattaaagctagctggactcatggatatagatagctgctgtctgaaagagatagccgttcacaaacacacacacactacaaaccagccgcatacatagagaagccagccgggcgtgacgagtgagcgaactaacatacattgattggcgctcactgactgctctctattcaggaaacaaacctggccagctacatgaatgaatgaatcaaccaacgcgcagagggaggctgcgtgttgatcgccagcgagggtggtctttttaccaaccagacagacaacaaacaattgatcttcatcgactggctgtgacagagagagatgaagcaagccacgcacgcttgcccgaccaagcaagaaaacattctgatggatggtaacgaacggatataacaaaaactagctgccgtatggatcgatgccactaactacatatatatacgaacgaacacgcaggactgactaatggatggcattgattgcacccacat

SEQ ID NO: 49624 - DNA, 372 bp, Gossypium hirsutum
  Clone ID: LIB3825-011-Q1-N6-B8
gggtcccccgttttaaaactttcacacaaattattattttagcttttaacatggaggggaacggtaggatctttcgggcccgggggggaaaaaattcccggggggcccccctgggggggggaaaaaaaaaaacttttataaacccgaggggccttttaaaaaaaaaacagagggcttatccctccgggaaaaccccgccgctttatatggtttggccccatgggttggaaaaaaaaggccccccgcccttggggggtttaaaaaaactccatttccggccccgaaaaaaaaaccacccttaaaatcaaggcccccccaaagggttgggaaaaaaaaaaaccctgggtgttaaacaaaaggggtgggttttta

SEQ ID NO: 49625 - DNA, 306 bp, Gossypium hirsutum
  Clone ID: LIB3825-011-Q1-N6-C8
gccacttcgtaaacaagatagcccgagctcgtctacaaaatgatacctcttgtccctgaaaaggctggacaccaaaaagactaggtaaaagaatcttttacctccattaatttatacactttgattctatcaacaatctgaacaaccttacacaacccatcaaccaaacaatctatatgcaaccaaatttgaatcaaagcccatcatattcatatacttcaaatgtagagctgcccctttaatgttacctgccctgcacaatccatcaaatattataatgagtgtatacttatgacactccaaccc

SEQ ID NO: 49626 - DNA, 367 bp, Gossypium hirsutum
  Clone ID: LIB3825-011-Q1-N6-D11
aaattgaatcctattaattacttaagaccgaccaaaaaaaaagaatctcacaagaatggagggaacctacggctgccctaaaaaatagcaattactggttggcagactgggtggggttatttccctaagctggctaaacgcagggacaggaaagtcccctcaaaggatgcacgccccggtggctgggggtgggaaaaaaaaagcctgcctgtcttcaaagaatgcccctggttttaaaaaaaaacaccacccaccaaggcccacttgtttggtttgctggaaggaaaatatagccctccaaaaatgaaaggaggacctattgaaaacaatgatccattttcatgcagggggaaccgacgcgtgggcc

SEQ ID NO: 49627 - DNA, 153 bp, Gossypium hirsutum
  unsure (1)..(153): unsure at all n locations
  Clone ID: LIB3825-011-Q1-N6-G7
aagtgactaaaacataacatttcaaacataagtgactaaaatgtaacttaagataaacaaaaataactattttgatagtttaccctactattaatatagatcaatttnaataccattatactattagnnaaaagatcgaatnnaaaatcaaat

SEQ ID NO: 49628 - DNA, 563 bp, Gossypium hirsutum
  Clone ID: LIB3825-011-Q1-N6-H11
gataataaatacattttcaatcacatagcgtttaccatatcattgtgcagactagaaacgctaaccaacaaattaatatcactgattgtcatgaactagaaaccatgaagtatacaatagactcccaactttaaaattaactgcagaaaacgccattaaagaacaaaccaaacaggaaaaagctactacttaatgttagagcatctcctcaagtgatcaaacggataagatacgctttgtgaactcatccaaggagctcgatgaagagccgccttctcttagacaaagttctgttttccccttagattccatagctttatttctcatctcctttccttctatattgagtagtagtgttttaatagctccttctatctttcccctctccaattcattctccaattccaggcctatattccatatataacagatgtacctcatgttaagaaactggtccccgaaacaaggcctgcataacatcggtaccccttcggagacactctcaagtgttgaattccatccacagtgagtccaaaatccgcccactgcacaatgcgccaaca

SEQ ID NO: 49629 - DNA, 539 bp, Gossypium hirsutum
  Clone ID: LIB3825-012-Q1-K6-A7
gcgatcaccaatgctgtggctgtgtactaattatacgagcggcgcatcgtggagtttggctgcgaatcatgctgctaagattcaactattatgatcgcttgaacttgtgctctattcaaccgatcctcattcaacggaactgtctataatacactctgtgagtacagatagacaatgtggttgttgaccttagagatagtgtggaaagcgtacgtattgtaggatgcccaatactgggaaagctgtcaacagactaaaaggagcctactgcactataattttgtttcacttatgtcaccctgtatggacacattgtaccaactgtgaatcaggacactaggtctaggttgtgcgacataacaaacctgaagacattcctagctatatagaagggaagaatgcgagcatatagagagagaaactcacatgtgatggtatgatcctggccataactgaacctgcatgatgtaacacacatgttaaatacgaagtgagtgtatgttacattgccaatacaagatattaaagcgtgaaatatc

SEQ ID NO: 49630 - DNA, 545 bp, Gossypium hirsutum
  Clone ID: LIB3825-012-Q1-K6-B1
cgtataatcccaactaaacccccctttttttaatcctttaacctatcccaattagggttttaccaattttttaatattatatgaatggctacagggcaaattgaaggtgaagaagcaaagaacaataaggtttataccaggaaaaaccacaataaacccaaaaattccactttcatccctcatcaaactcttgctaccactactacaactgatgataacaactctcagcagttgcccctccaacccttcgatgccgtggcgtcagatgattcttctagtcatagtaggttgcagcagggtgtacggaatgttaccaatggggtttcaacatctgggtatgtaaaatatgataatcttgtttcgattagcttgaatgttttgtcaaagaatgaggtgagaggtttgaaggggaagctagtgaacttgaacaagttcgggatttagttaagaaatttgaaggtaaagaaagtaggcttagtgggggatatgcgaattctcgggtttcggggaatgagaatgttgatagaggtggtggggtgttttag

SEQ ID NO: 49631 - DNA, 399 bp, Gossypium hirsutum
  Clone ID: LIB3825-012-Q1-K6-B6
gttatagagggggcgcgggcgctataaaagctacatattttaatacgccggcgtgcgattcgatacctcttgtatcgagtgacccagatgaattccactcgacccttattaacaagctccatcatgcctaaactgttgttgctctctattgagcctccgttgagaacgtaccactttcgtctgctcgagctataaataaaacgctcgaaccgatatcccttgcctcacagttgctcaaacaacatggacaaggagacactccttctagcatctcatttagcgcaactactctgaaggatccagcgcaacgtatgaggtacactccacagcgctcttcaacacaatattcagattatgttgaacttgtttgtcatcctgaacccactgtaaacatggatc

SEQ ID NO: 49632 - DNA, 585 bp, Gossypium hirsutum
  Clone ID: LIB3825-012-Q1-K6-D1
aaaaactgaaaaggcggccgaaaagaaaaatagcttttccgttcagccatggatcttcttttcaaagcctactccaacacttcagacgatgaacccgaacccgaacccgaccctgaacccaaacctgtaaaccatcaccacctccctttccgcccttccaaacggcccaaacccgaatacctatttcccacattggatcttcaaaagagagaagaagctccgcttcccggcaggtacatatcgaaaagggaacgagcacttgctggtgcggtttcccaggctcatgaaccgaacccgattcaccgggatcatcatgtcatcaatcaatcagttcttggaagcatttcagaactggatctaccacatgatgttctttcattgatgcggcataaaccaaagggccgtacacagctaagtcaaattcctggaaagctttctgtagctctgcatgggcatgcaaaagctgttaatgctgttcattggtcaccgactcatgttcatctacttgcttctgcggggatggatcaaacaatctgcatatggaatgtatggagcagaggtcagaaaaaagctcgtgtgtttagc

SEQ ID NO: 49633 - DNA, 595 bp, Gossypium hirsutum
  Clone ID: LIB3825-012-Q1-K6-D10
ctcatcaagcttaagttgtttgtatattcggatggaagattggtacttgagcactgattgaaagtttgagggtctgtactctaactaaaagtacagagaagtttaggcgtgttttcttagtgatggacctggaaatttgaccaaattatgtttaaaacaaaaacagttctttcttggatgcacaacaatgatagaaaattcttggcttttgagttcaattgtggtaacacaaattcctgaaggtaaaacatttttttgtgctgttgggaatctcaatgtttttatttaagttaaagctacttgcaattttgttatatgcagggaaatgaatttgttgagcagaatgcttctaatattggtggtgaaccaaatgaaatccgccgcttcgaacaattaaggaatgaactgattgagcttgagaaacgtgttacaacaagtgctcagacagcatatgaggaggatattaaggttacagatggttatcctggctctattaatgatgctggccatgctcaagtggttgaggttcagaagaaggaaagtattattgaaaaatcattggtgaagataaaagaaacaagcacggatgtcttgc

SEQ ID NO: 49634 - DNA, 588 bp, Gossypium hirsutum
  Clone ID: LIB3825-012-Q1-K6-D4
tccaagcccatcattgagaggcataatgatgtagggttttcttgtttcaaggatctttctcttaatagacctcaactatgcttatttccttcaaaagagttgctagaatccggttcttgcatttgctttctttgcaacacaagcgtctgcaccctcttctttcatcacaggactcgcaggtggagttggaaacggtggaaactcaacctgaacaagaaattccatcaaagactgttaatgtcagattccagttagagaaggagtgctcctttggagaacatttttttattgtaggtgatcatccaatgttagggttatgggaccctgacaatgctgtaccactgacttggtctgaaggacatgtttggacagtagagctggatgtacctgttggagtatcaatccagttcaaattcattcttaaaactagcactgggaaccttttatggcagccggaccctgatcggatatttgaatcccgtgaaactgagaccaatagtacaattgttgtttgcgaagattgggataaagctgaacatcagaaaattatagaggaagaggcattaactaatcaagacggacctcttc

SEQ ID NO: 49635 - DNA, 554 bp, Gossypium hirsutum
  unsure (1)..(554): unsure at all n locations
  Clone ID: LIB3825-012-Q1-K6-D5
ccccgcgtccgccccgcgtccgcttttcttgggcccttgtaatgcatatgaccctggncataggaggatttactttgaatcttcggaagatggtcattgggaagttatagacaccgaagaggcattgcgggccttattggcagttttggatgacaggggtaaacgtgaagctcttcttattgaatcattagagaagcggggaacttcactacgtcaagaaatgtcaagtagacatttacatgatgcagaaatcaggcacacaccgtcttattcacctgaaatggatgcagtcagagaagatagctgttctccagtttctgatgttgacaacctcagcttgacggtggccatgaatgcatctttaacctcatgcggtgctatagttcttcatgctggaaagaagggagcagaacaaaatcgaatgtggagacgtcttcaagaatttgatgtgtggatatgggattgcttttacttgaaccttaatgctgtaaagcacaacaagcgttcttatcttgattctcttaccagatgtgaaagttgtcatgatttgtact

SEQ ID NO: 49636 - DNA, 259 bp, Gossypium hirsutum
  Clone ID: LIB3825-012-Q1-K6-E6
ttatacactgatcgcgcaatgcatccggatgatagcgtgtgtataagatggaggttggagggacggatccctgacattacggtgtggagacacactactggttcggttaaacgacctaggtatgcttctttgttgatatgtgggatggcttgttgggccacccatcaactggcctttgagtcaggggctgctgctataatgatggttgctgatctaagttcaacaccgaaaactctggcgggattgctcattggaagga

SEQ ID NO: 49637 - DNA, 506 bp, Gossypium hirsutum
  unsure (1)..(506): unsure at all n locations
  Clone ID: LIB3825-012-Q1-K6-F1
aaaattactagcttctttgtggttggatatgtttgcatggaaggccggataaccatgattggttccttatatatgttgataatattttagttaattttacttcctagtcaaatttgttctcaaagttggtgtaaaaactgtaaatgggaattcatctaaatcttgtattgggttctaaggtaccaaaacaacttttttctacttaggattatatgctctgttaaatttcatttcatgtatatcatatttcaagagtttgtgtcgtatttttatttgtttgcgttaaaaaaaaaaaaaaaaaaaaaaaaaaaaaaaaaaaaaaaaaaaaaaaaaaaaaaaaaaaaaaaaaaaaaaaaaaaaaaaaaaaaaaaaaaaaaaaaaaaaaaaaaaaaaaaaaaaaaaaaaaaaaaaaaaaaaaaaaaaaaaannnggggggngccccgttaaaaaaaaaccaaatttccccccggggggttgaaaaataaatttttttttttttggggccc

SEQ ID NO: 49638 - DNA, 591 bp, Gossypium hirsutum
  unsure (1)..(591): unsure at all n locations
  Clone ID: LIB3825-012-Q1-K6-H1
ctgaatnacagccgtcgttgatgaccgtagtgttgaccaaaactttgaccggcaggtatcgctgccaaggttctcgagtggtagtagctatgctgggagtttgttttccgctacgacattggatggcaacttgtcgagtgatgttaaagatacatggactaaggagacatcatcgaccaccgtgccgccgaccggggaagtcgaggcacaggaggaagctaaagataacttagcgctcaagtcaaaggaaagttattatttacaggttatgctggctaggaggcttacttctcaagcaagtctactcggcgaacctttgcttttacaatgcagtggaccggatgtcgtcgatgcagaaactgtttcttatcgtctttgggttagtggctgtttatcatacaacgataagatatcagatggcttttacaatattcttgggatgaatccatatctatgggtaatgtgtaatgagttggaagaaggcagacgcttgccacctttgatgtctcttaaagaaattgaaccaagcgagacgtcaatggaggttgtacttgttgacagacgcggtgattcgcgcctcaaggagcttga

SEQ ID NO: 49639 - DNA, 581 bp, Gossypium hirsutum
  Clone ID: LIB3825-012-Q1-K6-H10
cggccgcgtgggtctgtttggccggtgagaaaaagataggaaaaagtggaaaaaaacaggaattcgttgtagagtttgaatcgttccatttttattttcgttctgaaatttttcatgtgtttcgaattttattttcacctattctcctctactgtttctctgcagtcaaactagaaattctaagaaactgaatttccagcggaattagcacctggaatgggagtttcctgatccaaaatcaaatacttgaatcaaaattaaattcttagttcgtactttcaaaatcatttaattcttgattgttaatgcgatgacaatcgggataataagctccgctttagcaaattcagagacgattttagcctctgatcatggctcaatagtttcaataaacttattcgttgcgcttctttgcgggtgtatcgtgattggtcatttactagaggaaaatcgatggatgaacgagtctattactgctctggccataggagtatgtactggagttataattttgcttacaacaggaggaaaaagctcacgtcttctagttttcagtgaagatttgttcttcatttatttgc

SEQ ID NO: 49640 - DNA, 320 bp, Gossypium hirsutum
  Clone ID: LIB3825-012-Q1-N6-C11
ataatgtaacaaaaaattgaatgggttaccaagtagcaaataatcccacactaatacgaaacaaaacaaaaaaaagggtacaattatagaccctaagaaataaagtacacaaatataaaattcatttagttgatgggaattacatatataaaacttaaattactttccttttaatgacaccaaatgagtaaccatggctaaaccctgaaagaccaaaccttgttgcagggtttgcacagccaagttcatgcatttgatccctgggttgtacaatgtggtggtttcttgcttagatcatatggtgatgcagtcataatcct

SEQ ID NO: 49641 - DNA, 552 bp, Gossypium hirsutum
  Clone ID: LIB3825-012-Q1-N6-D10
atgtggatacatcatcttattacaacaaaagacctagacttcattaccgacaaagttacggtacaatatttaggctactcttcacattgcctcaaatccagtattccagtactccatgaacgaaaaaaaaacacatttaagatgattgccattttaagtcatgaaatatttcaaggactaatttcacctggttacctaaaaatcgaaaaccaacatggggatatttgcacaaaactgccttacgggaatcaagtttaatacctatgtaacaagctaggtatgatatttatgctccaacttacggagtgttaacaggttgtaaatgttgacatttgggaattctagctgatatttaaatattaaactttatattatttccttggagagtttatagtattttgtatatatcgggtaaatcaaatcaatagagaatattatcatttttccttcaaattctcctggcttgacagaggtaatccccaaactgcgatggaggaccaacagcccaaaaaaaaaaagagaagaaataaaaaccatttaattgaagccatt

SEQ ID NO: 49642 - DNA, 574 bp, Gossypium hirsutum
  Clone ID: LIB3825-012-Q1-N6-D11
tcgcgatctaggtgaatttttttgtttcacatgaccccttgataagttacttgaatatggtaggatgtagaactcgtctccagaaatagttgatctttccactctttaggttttgttctaccattaagaagcatcctataaaaggtatccctggtaaggggctcattatgttgtttctcattccccaatatttttacaatcctagtccaaagatgttactttattcctgcaaagcaaagctgaaaaattatgttgagcggagcaattgtgcattgtgccttttcgccttcattttcgagcatcaaaaggtggctgacatctgctctttttcgtgctgtgggtaaaacaaaattgggagtattagcatctctttcttttgttatttaaatttttagcccatccttttcctgctaataaaagctttacttttggcttttaaaggctatcaaaaacatatcagcagttgagaaggtgttctggtattttctagtctataactattttcaattttttaaaaaaaatatttcctggtaaggggagtttagtttgttcaacaattggtaaatatgccatg

SEQ ID NO: 49643 - DNA, 556 bp, Gossypium hirsutum
  Clone ID: LIB3825-012-Q1-N6-D12
aataaaataaaattaaaaatttaaataccatttttaagaaaaaaaccaataaaaggtaataaggctaagcttagaactaaaaggtaagcttattaatacatatatatatataatattacctaactgcttatctctctatccattttcattctcttagcattcggagcatccgaaacgttgttctgggacaatgtatcatgttggaaagcacaattgactccattcctgcatcctctggcagtgttgaagtacaaacacggcttcattatccttgtcttcgaatctctcgatttggggttacttgttacttctaggttcggttttagctggtgattgtatcggctatcgaaactctgtgtcgttcctggtctttctcctccatgctgctgaattaagttcttgtaatagttttcatctttcttctgcggaactccgacagcaggaatagggccttgtttatttgagggcgctactccgaccccatttgaccaagcataaaacgaaccatcagaagtagcagcagaggattggggtggaagatggaccggaaacgttc

SEQ ID NO: 49644 - DNA, 574 bp, Gossypium hirsutum
  Clone ID: LIB3825-012-Q1-N6-E12
ctcaaactatattgtattcccacatcaggcaattttgttccatattccaagtgtacaatgctcttatccaactaaattactgattatgagttttatgttcaactatgctgccatgccgttgcattgccacaacaggctcactgcaccgggaacaccggaacgatggagctgccgcacatcgtgttcgtaggcagtagtagcaatacctgtgctgacatgggagagcaagatacggagttgtcggacttgcccggcaaatgggacaagtcgaatcgtcctctgtagaacttgaagatttgttcttcgagaacgggtgaagaacgcttttaaccgttgaagagtttagaagagggagaagcagcaacagcatttccgagaactcattccacactaactggcgattcatgtactcaaagctaactgctcgattcatgttagggctttcatagacaagcctagctcttaacgctctttcaatgaggttcctataccttcctgtgtaaagaaataagagtaggttgccaaatgacgcagccttataaagcccttcaatacgttgcatcaaaccccaaac

SEQ ID NO: 49645 - DNA, 482 bp, Gossypium hirsutum
  Clone ID: LIB3825-012-Q1-N6-F10
cacccaaaaaaaaaccggccttccagttcaaatttactgccaaatgggcggccttacccctccaaaaaatccaattttggaaggggggggaaaatataaaatacccccccccaaggaaatgggagtgggaaaaacaaacaaggcggggcccaaaaaaataccttacaaaaaaggctggcttaaccccttcggactaaaaactttacagcctttttggttggaaaaaccccaacagcccaatttaaagggcatcaggaaaaaatttcccccccagggagcggccataaaaaatttcagaaaaggggatttaaaatggggccactggggtaaaagcgacgggacatagggcgactaaggctttcccatgtggccccaaaaacccttggccggttttaataatccaaaatctttgttttgggacccatccccataaaaggggggggaaaaccccagggggggggggcccttggttgaaaccccca

SEQ ID NO: 49646 - DNA, 367 bp, Gossypium hirsutum
  Clone ID: LIB3825-012-Q1-N6-G12
gcccggacacttttatcaattaacaaaccgcagaactaaatttttttacaaaaaactttggcattaacaaatccctccagaaaaaacgctacaatagggggaaatttctgggaccaattccttaatttcgattataccaaaataaacccaacgggcgaaaaggcccaattttcccagaaacccctgggggagggggacccttatgatatctttacaggcagccttggggttccagagccgggaaaaaccaacaaggtgccatttttttggctgggctcggacatgattcggcagaaaaatgcgcccggctatctgaccgaaagacggccataatatactcatactaaagcccctgggaacaccccaa

SEQ ID NO: 49647 - DNA, 579 bp, Gossypium hirsutum
  Clone ID: LIB3825-012-Q1-N6-G8
acaaaataaataaaaattaaactcaattaatagtccaacgtccagaattattacaatagcctaaataaacccagacccgatacccattacaagcccaaacctaaattaaatataacccaaatcaaagcaagcctaataggcccatctctttaacagtttcataaaccctaggtcaccccacttttgtgtcgcaactagacaaccccctcatgtacggcctccgtgcgcccaaagactggctccgtacgctccagcgctccaacagtcatgctccacgtcaagcgccacgtaccaccgcgccaacgggctctgtacctgcgaagaaacagacaaacaacagcaggaaggaaggcttccactacatagagcaagaacatcctgaatttgccgcgccagttttggagtcagcttaccattaataaattcctcatgaggaactctagaaccggaggtgctcaactcatccagagttaaaacatttccctcagcaaaattatcagaaacaatctgagctctcaaacgaggtgcaagctgattcagaccctctaacacacgcaacagtgccaatatagtataagt

SEQ ID NO: 49648 - DNA, 207 bp, Gossypium hirsutum
  Clone ID: LIB3825-012-Q1-N6-H9
cgagtaaactcatctttacttatcatcaaatgcactctatacaagctaagttttatttaaacatgtactgaaacaagttctatcctaaatttgggaaatttacacaacttcttgaagggggggatgtgtagctgcttgcattctaaggcaacaaactatttatagaaccaactactagcattctttattttcgaacaagcttttgca

SEQ ID NO: 49649 - DNA, 262 bp, Gossypium hirsutum
  Clone ID: LIB3825-013-Q1-K6-C5
ctgggatagggcttatgaattatgagattgaagaaaggaggttgggaaactctcttgttttgagttaatagaaaataggttaatttgatgtatagaagctacaagcatgagtatcatgttatcttttttaggtaagaattggataacagcatcactctaatactctcatctttttttatttatttattaagagtaggattcattttatgcataacttttattatctaaataaaacaaattcacaatattgatttacggcttt

SEQ ID NO: 49650 - DNA, 510 bp, Gossypium hirsutum
  unsure (1)..(510): unsure at all n locations
  Clone ID: LIB3825-013-Q1-K6-C6
ctttatttttgtgtaagttctgtgtttttaacttaacaatctttatgtaaaaggcggagtatgtatagcattggattgactgatatttatcttcattctttttggtgacatgatagattatttgctaaattttgccaaataaaagaccaaataattactcgctcatttagtgcacagccatacattctttaatgattgctgtatgctgtaactctgcactattaatgatatcgaaccctttctgccaaaatgagctggcattatatatacaatgagctgaaaagagggataggtttgtaatggatattcctgttgcatgaataagtacatcgaattagctttcttgagtttcttaaanaaaaatgagaggctttcttgaattagtaacaaaatcttgcgttgaggacaaagttttatcctgacttttaaaatgctatgttgtatagatgcatcatctgcattttacttgctcttgtgttcatatgtctggtggattgtgcaaattgatag

SEQ ID NO: 49651 - DNA, 463 bp, Gossypium hirsutum
  Clone ID: LIB3825-013-Q1-K6-C9
ctttccccaatttggcaaatgagtgaagatccattggcaagtgtgcccgggggcaattcatttctagactctattttcctcgttttccgacacaggttctttttgttgtttgattttcatgttggttgtaggaatgttgacacacctgtgttgtttgatatcattgtctcataaatatagcaagtggtcctacatatttagtgatcattgtaagaagaagtagaaactaaatactgattgtacatgattaggttattgatccaaagagattggagattccttttccaataaggaactcaagtacatcgacgtaagctccctacgaagaatgatactccctaagagagcagcggagggtcacttaccaatcctggagtccatagaaaggatcctcaatcaacatggacgacttagatggactgaatgtgtctagcttcgaatacagagtttgtcctgataacaa

SEQ ID NO: 49652 - DNA, 576 bp, Gossypium hirsutum
  unsure (1)..(576): unsure at all n locations
  Clone ID: LIB3825-013-Q1-K6-E11
ctatcaccaaacaacaccttgggtttttctctgatagtaagctttatctctcaataggtgaagatacangatgaaaaatctattttagtgtagactgtaattttcactgttcaatcaagtcagcatgactcctgtgatcccatattctgttagcaacattacattcatccctggagctgcctgtacagtaaggaagaacactagtttgacaagatgcagttcatcaaggaaacacacgagatatgctttaccctctcagagattcatcctacctctatcaacctctgttacttcatttcgaaaatacggaacagggtatgccttacatggaaaactgggaatttgtttatcaaccgcagggactgatgtggcggtggaggaatctgattcttctgtgacaaaagtttccagtggaggatccgaaataccttcagatgccgttgaaacaagtgaagattcgactagccaaccagattctactcctccaactcaatcaaaacgagcaagacctgttaggaaaagtgagatgccacctgtaaagaatgaggagcttattcctggtgcaatgtttactgg

SEQ ID NO: 49653 - DNA, 458 bp, Gossypium hirsutum
  Clone ID: LIB3825-013-Q1-K6-F10
agcgactacctatcttttatatagagctacctaaattcaattgaccggccgtcgacaaacaacggactgactgaaaaataccctggccccacccaacttaattggcttgaaatacatccttctttagccagctggctaaataacaagcaggccccgaccgatcttcctaacaaacactcgcgcagactgaatagtgaaacgcaccctccctgtagccattcatcaagcgcggtgggtggggtactcacacgcagaccgacccattcactagccagctacctaccgcccgttcctttcgctttctttcctttctttctacgcacgtccgctggctctgccaagcaatctataaatggctggcttcctggatgcgaccgattgattgcctgaccgtacctccaccacaactaacttaatgagagtgatgacttacggagccatccatctgcctgacagac

SEQ ID NO: 49654 - DNA, 573 bp, Gossypium hirsutum
  unsure (1)..(573): unsure at all n locations
  Clone ID: LIB3825-013-Q1-K6-F8
tggttctagatcgcgagcggccgctcgccccgcgtccgcngaagcatttcgtgactcaaagctgattcgcaaggagttcaaggtggggngaaaaggtattgctatttaattctaaacttaaactgtttcctgataagttaaaatcaaggtggcttggtccatttataataaccgaggtgcatcatcatggggcaatcgaaattaggagcctcaaaactaataaaattttcaaagtgaatggtcacaggttgaaacattttcatgaaggagagcaagcagcttggttggaggagatcaatctcgaggatccatgagaaattgtgatgtcgagccaccgacttaaaagaaaggcgcttgtgggaggcagcccacatattcagggaagttttctttaccattattgtttctttccattaagttaatcttactttttaatttttcttttgcattagggacaatgcaaacattaagtatgggggagaatcaattcattgattttctaacatatttgatgcttgcaactttcatgaataagtcttgtcgaatttcctttaggaaaatatttaaataaaa

SEQ ID NO: 49655 - DNA, 316 bp, Gossypium hirsutum
  Clone ID: LIB3825-013-Q1-K6-G12
gtacgactgagacctccggcctatatgaaccaatcttacgtaccccatgcattcccaaatgatccacatccctcaacgagcaccattcagccctgtcacggttgcgcccgcgaatcaacaacccatactgtccacaacccatctgatcaccgctctactctctcagctcgcatcgcgcgcacatcgaccatttacaactgttcgattgatctctcacattatcaaacattccgaacgtaatcccaagatattatcgcatattggtaactcgtccctgtaggaggacatttgaaaactccatatgttttggtaacac

SEQ ID NO: 49656 - DNA, 569 bp, Gossypium hirsutum
  Clone ID: LIB3825-013-Q1-K6-G2
caaactttgttggtactactgcttaggtccaagtctggaaagatttatcaattttgtccgataagtttttgtatagttctttataaatttattactaagaccactgttaatagattacgacctttaatggttaagctaatttgtcagaaccaattaagatttatcccaggcaggaatattacataaaacatagtcatggcacaagaagttgtgcatttgctaaagggttttaaaggtaacatatatgggatggtgctaaaaattgatttggaaaaggcttacaatagaatcaggtgggattttctaaaggacacaccttctgaagcctggtttcctcagcttttagttgatgtgatttagactatgtttccttttcgacacttcaagttctttggaatggatctgttacagagtcttttcagtctacgcaaggaataaggtagagaggtccactatctctttatctttttatgttgtgtatggagagattgaggaatcttgttggggaggcggtggaacaaggctagtggaaaccgttgtttctttcacggagaggtctaaccttatct

SEQ ID NO: 49657 - DNA, 193 bp, Gossypium hirsutum
  Clone ID: LIB3825-013-Q1-K6-G3
tgatcgttcattttaaagggaaatccaagaatcattaacagtagatagagaacaatggcctgactaagatcgtgttgacagagatttgggtaaggtaaaatctttgtcactggtaattgttctatcatacgaaccacttctcttccctccaattctgtctactatctcgctactcagggtatccgcctgtttc

SEQ ID NO: 49658 - DNA, 472 bp, Gossypium hirsutum
  Clone ID: LIB3825-013-Q1-K6-H10
gtttcaccaacctcactcatgtcggtcaactcgatcaaaaacagaaaaggcctctacttcatatttcactctgcgctcatggctctgctaagtgttgtaccatctttttcgatgggtccacccagttcattccctgccgagtaccactacccaccaccagtcaaaacggtctcatagctcactaccctacgctatcgtcgggggcttactacgcactatacccgatagctactgctgctatcgcttgtcggatcgaccccatatacttctgccgtaacttgctaatgaaaaaaggaaaaaacaagatcagctctttaactgtgggggctaacaagaaaggctatgcccatcgctctgaccaacccatggcttgagctcccttgggaaggatcctctacaatgacttaacgatgcgtccaatgtagaaccattattgacggaactcgttatcttggaacatgaacagctgtta

SEQ ID NO: 49659 - DNA, 599 bp, Gossypium hirsutum
  unsure (1)..(599): unsure at all n locations
  Clone ID: LIB3825-013-Q1-K6-H4
ccgtccgtttaanaaggaaagcagaggggagggggagttctctgctaggattttataccctgcccgagccgctgccatgcccaccgtggagccaccgcgaaccgtgctcgaagccaggtaagtcgttcctttctttattttatcttttgtaagaaaaatgaaaatcgagcaaaagaaaaacgcgaaaaaaatgaaaaagaaaccgaaaatcaccttctacttctctgtattctttttttttttgtaaaatcagtatccctccgttttacagattcgtgtttggctttatatagccgaaataacagagaaaggaaaaatagaaatccgtcctctaattatgttattttccatttttttgtaatctaattgcttcttttttgctgttttccttgttttgcttgctgttgccgcttgtttattctgttgcaggagcatgcttggaggggcacgcgcgtggagaggcctggtttcctgttgcggcgcacgtgggaaggctggaggagcggcggctaaagggtttcagaaacctttaggatttcaggagcgttcttcaagtcaggctagggtttattgggcttggggttgatttgggttttagg

SEQ ID NO: 49660 - DNA, 378 bp, Gossypium hirsutum
  Clone ID: LIB3825-013-Q1-K6-H8
gacgatgcatcgcttatatgtgtacccaccaaagttcactgtccgtacaagttacaacggccggactgggaacaccctggagtgccccatctaaataggcccgctacacatccacatttcttctgatggaatggggacgagaaggcccacaccgagcgtcctctacagcatcacctcaaactactgggcaaaagacacgccccctgtgacccaacgtaaatcgcggttgatggggcggatacaggacaggtgaccactactctcgtcagctctcatacaacacctcattcggatgcattacatagattgctggatatatgaagctgttgaacgcattgagatctaattgggtatctacattatatactatgattgtaa

SEQ ID NO: 49661 - DNA, 492 bp, Gossypium hirsutum
  Clone ID: LIB3825-013-Q1-N6-C10
aggacatcggaaaggtgctttatggaacaaaagggtcacaggtcaaaggggaaggccaaaaaaaaaggcccctaaaagccataaaatcaaaatttaccctggcaacaaacattcaattttgtttatggacccaaaaatcatccttggtctctaccccaaaacccaacagcttaaccaattttccaccctgatatgcctaaacaaaatcggctgaccccccgatgggttttccattaaaaaaaacctgggggacaaaacccccaccaacaatttcactcaagggatcccgaatattccatccataatctcgctcaaaaagccccacaaaaaaaggaacttttttaaaccccttaaacacaaattttgccttcctacaaaacgggcaaaaggactttgaaaaaaaaaccatcttgggggcaaaaaaggtctttttgacaaaagcagcttaaaacgaatcaacccacgatccccaaaaaaaaaaagccgcaatta

SEQ ID NO: 49662 - DNA, 560 bp, Gossypium hirsutum
  Clone ID: LIB3825-013-Q1-N6-C9
aaacaccaaaataagggataaagttggccccatcctttgacatttcatgatgaaagccttttttgttttgttgtttaacaaaatataaaacaaacagtatccatggtgatattaaagttgataaaactcatcaagtgacaagttttcaacagacccaaagctttccagagaccccatccttgaatagttggtcattgatccacccagaaaatcaagtgggcagtcatttgagaagctcaaggtggtgtcatatataaatgacatcccattatcatccatcattggatagtaatagttgctggacttagttgcctcataatcatggagaaataggtcattcactccgttcctagctatgtcactatatacatcttcgtccgaagccttcttcgcctggattacataattctggtttaggctatcttgatacaccatgatgaaatccccgagctgtaatccgtgcgtgctaacgaattccccggtattttcgagcacgtacatacggctgttgttattcggccaaaacctgtacttgaagctccatacatgcagtccatcta

SEQ ID NO: 49663 - DNA, 534 bp, Gossypium hirsutum
  Clone ID: LIB3825-013-Q1-N6-F8
agaacaaaatagatttcatatcacttgtgcccggtttcataagtgtcaaactaagcttaaataaactagccactcatagctaataaaacagaacacgaatccaatggaaagaacatgaattacaaactagttcccggaaggcagagttcttcaaatcgtccgacttcccttctcccaattagccgaatttactagctgctactccagctccttgatcgggttgctggtcaaatttcttaaaaaaattctgcttgctgccacgctgctgtattttttctctgtttttctccacacactcttttcagctgctgtcatctctatttatgggataataacctcccacaattcaaaattaaattcgatcttatccccctttttcttagcctcacccgtcgcatgaaaatagcttcatcttagtagagttttaatttaactcttcaaagttgatttggcttctaattgattaaactagagtcggccaccgcttggcaagaaggaaatattaattcccttcttaattttgtcgcatatttg

SEQ ID NO: 49664 - DNA, 532 bp, Gossypium hirsutum
  Clone ID: LIB3825-013-Q1-N6-H10
ataaaaaacaataacaaattctcttttttataagaacaaaaagtcacaaaaggcacctcaataatgcacagcaaagaaacctttgctgctaaaacaacaacctccgaagtacaaaccgtaattctgttggataatcctaaccatactggatgacactcagccaccagaaaccgatacgatatcctaattagccattcacctcttctgatacccaacaatactaattcccacccaaaaagttgaaaccccaactcaataacttaccctacattgatacaccaatatggtaaaacactaatttaaaaagaaactaactgatcatcgaaaaggatccaagaaacaaggagaaacccaaacagtttctacagccttgcttaaatcatcggactttttaccaggctattaccagctcatagccaataacgatcaggattataacaaggaagctccccaaaaaattgggtgatattaagtatccacctttatagaccccactaattgaatttacatgaatgccggctaaaccttgtcg

SEQ ID NO: 49665 - DNA, 344 bp, Gossypium hirsutum
  Clone ID: LIB3825-013-Q1-N6-H7
aaagaaaggggggagggtttaaaaaaaaaggaattggtttttaaaaagaaaagggttccaaaaaaaaataaatttaaaaccaatatccgcctgaaagagatttcccaaccgggggtttaatttttaggttcaaaaaaaaagggggaataattttttccatgggggaaccccaaaccccccatggggggcccctttccccccctaaaaaggggggggggcaaaaatttaaaaggggcgcccccggaaaaaaggccggggaacccggggggtttttataaattataaaagcaacgggcaaacccccgggaaaccttttataaaaaaaaagcggccccgggggcccc

SEQ ID NO: 49666 - DNA, 567 bp, Gossypium hirsutum
  Clone ID: LIB3825-013-Q1-N6-H9
agagaattcactttttcattaaatgaatagcaaatttgaaatgtgatacaatttgtttattattcatacaacaacaaaaccaagttttaactttgaaccgaacgaactatcaaaatcggtcaaaagaaaatggggcaattaaagattcttcaagttcccgaaatcctctataaacagcctcagtccgactctgtggaagtggcaatctcctcacctccgtcatgtacctgtttgctgcactagtgatcttgtcccgaatcccctggtttagaaccattgtttgttctggcgagaatgctccacctaatattaaagaagcaccagcagcagtcgtgcccatcctctgtgcaaatacagacattgcccattcgcgaagtaccactagcactgattgaagaaggcgtaatctgagattcggtgatgacaaaatagccccatttgataatagttgatcgtaagtgttcaaagaaggttcagctgcacccttgcaagcagccagaagagcccttgccacatcttcatccccaacagattcagttccagattccaccctctccaatgcagcct

SEQ ID NO: 49667 - DNA, 410 bp, Gossypium hirsutum
  Clone ID: LIB3825-014-Q1-K6-A9
caagatgtgtactgttctcgttttcgatcataaaagggatttgcaggtcctttgtttgaccgcttcagtcaaccgtaagcttcgagctatagcgaaacggttattatggcggaagctctgtgtatatcgagcgcctcgcatggtatcggcattggttaatggctcacctagtggaagaataggtggtggatgggatgctctcgcgaagctcatgtttttctgttgtggttgtgagtcgactcgcaatttcaaactgagtcggtcttctccgggtcatttcgcgggtgcgtctcggttctcgaagacttcgggtcggagcttcttgaccaaaaaagtcgggcggatctgttgttcgtcagtgacccgtgtgagcacccagtgggggataaaagagacgatttagggatcta

SEQ ID NO: 49668 - DNA, 574 bp, Gossypium hirsutum
  unsure (1)..(574): unsure at all n locations
  Clone ID: LIB3825-014-Q1-K6-B6
caaatccccacaagccaatgatcttggccttatctagacctgatccaaanaagaacattaccactcttttgaaagcctttggagaatgtcgtcctttacgagagcttgctaatcttacacttataatggggaacagggatgatattgatgaaatgactggtgggaatgctagtgtcctcataacagtattgaaactcattgataagtatgacctctatggactagttgcctatccaaagcatcacaaacagactgatgttcctgatatttatcgacttgcagcaaaaacaaagggagttttcataaatcctgctctggtcgagccttttggacttacattgatagaggcagcagctcatggcctgccaatggtggcaaccaaaaatggtggaccagttgacatccagcgggcactaaataatggtcttcttgtggatccccatgatcagcaagcaattgctgatgccctgctgaagttggtatcggagaaaaacttgtggcatgactgcagaaggaatggttggaagaacatacatctatactcatggccggaacactgccgtacctacttgac

SEQ ID NO: 49669 - DNA, 572 bp, Gossypium hirsutum
  Clone ID: LIB3825-014-Q1-K6-C2
taactataatcaaggatttcctatctgcactatacacccacatttctctcttttatttgttaactgttttaagggaagggtttttggtggtgtaattggcctttgttgttttagttgaatttcccttaactgtggctagtactgctatatatgctcgacgttcaagattgagggtaactgttggatcttcaccaacttttagaagtgctgaacgtgctgaaaaagcggagggaggtacgttcttagtcctaatggtcaatatatgaattctatttgcatactttttgtcagtcttaggttatatctcccgattcattttcaactgatcatagttatatgtatgtatatatatccatccagttttaccagaagttataggaaaaataccgagctttggaggctgagagaagccagtgggaggcaaggaccaaggtacatggcattttaagcttcttatcataatatttatgctgatcgttctcctcatgcagtcatatatgtgacatttatatatattttgagaattaacaaaatggactgaccctcatgctttcttgcatgaagagcaagca

SEQ ID NO: 49670 - DNA, 438 bp, Gossypium hirsutum
  Clone ID: LIB3825-014-Q1-K6-E3
tttagtttttccattaaaaaatttaggcagaatagtattctttatgcgcccagtttgtatagtatatgttaagccaattgattgttaattgcctaattgcccgtcaaaaaaaaaaaaaaaaaaaaaaaaaaaaaaaaaaaaaaaaaaaaaaaaaaaaaaaaaaaaaaaaaaaccaaaaaaaaaaaaaaaaaaaaaaaaaaaaaaaaaaaaaaaaaaaaaaaaaaaaaaaaaaaaaaaaaacaaaaaaaaaaaaaaaacggggggggccctttacaaggaggccattgttcaaccccgtgactgggcaaaacttaggcgtttttgtagggcacccccatttaatcacttggcgctttattaaacaatgcccaaaggggaaaaaccccgaacagcccccctttaataacttttgaaaaaaaacacccttttttttggggg

SEQ ID NO: 49671 - DNA, 606 bp, Gossypium hirsutum
  unsure (1)..(606): unsure at all n locations
  Clone ID: LIB3825-014-Q1-K6-F8
attgggagcatgttgagggcggtgcaagaaacgttcgggcatgccaaagaggccgtcgtaggtaataagggccacgaggcggaggatttcactggtcgaggtacagagaagacatgggagatgaaagataaagctggtgagtacaaagactatgcaactgacaagacaaaggacgccgcagagagggcgaaagaggcaacggatgctaccaaggaaaaggcttctgagtatacagattatgctgctcacaaggcaaaggaaaccagggactccaccgcccacaaggccaaagaatcaaaggattcagtaacaggtaaagcttccgagtatggagattatgttgcccagaaggcgaaggaatccaaggatgcggcgaccggtaaggcggctgattatgcagattatgcttctcagaaggccaaggaaactagggactcggcttcccagaaggcgaaagaagccaaggataatatcacagggaaggcttccgagtataaagactatgcagcagagaaagccaaggaagcaaaggacatgacagccgagaaggcgaaggaagcggcggngaaggcaagagaggggacggaatatgcggcagagaaagct

SEQ ID NO: 49672 - DNA, 496 bp, Gossypium hirsutum
  Clone ID: LIB3825-014-Q1-K6-G1
agcaagagtctcttaaatggatggtggttaagcgcgcgaagcttatgcccgtgcgaactggcatgggccaggcactggactattatggaggagacgcggggaggcgacttgataacccggtgcgcggagcacctgacaggggcggaccgttacatcatatctagatgacgtgtagcaaatatgcaagggaaacattagaacgccgaatagtggtatggttccatgtaacacggaacttgcacttgtgatagaatactctaaaacacggaggaagtacatgttcgtactgcgcgtgcagcacgagcttcaaaagggaataacattaaaattcttgaaccgccattcggtagctgacagccacttaaagtagactgtagacttcggaatgggcctgattaagagttatcttttgtgttgaactgacatccaacgctgcaaactgcttacactgatgtttacacaactgtcataacagcacttgacgtgtggtgcagtg

SEQ ID NO: 49673 - DNA, 614 bp, Gossypium hirsutum
  Clone ID: LIB3825-014-Q1-K6-G2
gtgattgttcatatcccaaatccagccatgtgggtgtaggccttgtccttggtaaaagcatggaaaaacgttttctgaacccttaacactgtaattgctcgactagttgatctacttggtgacagccaaggttctcacagtgaagcagcacttattgagcgcggtcagggtgaacaatcggactgagtgtgcgaaatcgaaagttctgctgaagcaatccgttattgtgcatgaaaacatgctcacttgaaaaacaacctgctgaccaattacacatttaattgtgaccatatgctgaatgataggggccacactgctgtttatttgatatatgctaacgctctaatctgtataatcatgcggaggtctggtaaagacatactggaactgaccaacactgggacattagtattggggcataacgatgagcgtgatttggggcttcacttgctgaatgttgctgaggttgtcgaataggcctgcaccaatttgttgccaaacgttttgtgtgactacctctataatttatctgaaatcttctgaaagttgtacagtaaccccgagtgcaaggttatcagctcagatatggaaacgagtcaactactattatgtga

SEQ ID NO: 49674 - DNA, 572 bp, Gossypium hirsutum
  unsure (1)..(572): unsure at all n locations
  Clone ID: LIB3825-014-Q1-K6-G3
gccttctgctagtgatttcanatgaactacanacaaatcatccaagttctatggaaataaatgatgagctcaaatccccagaggatggacagaaggctttagaaacactaaacagaatggttcagctaacaatttggaagtcttgaatgagcaaaatgaaagtggcttgattccttcaaatgaaaagagggtgacatatgtaaagcctaaatcaaatcaattggttgcaacttcagattctgatcatacctctatttttgatgttgataagaaccaatccctttctgcttcctctgatggctattacaagaaaagaaaaaaccagctaattaggactgcccttgagagtcatatgaagcaggcggttacctcgtctgatgacatctccaactcagtgagagaaatagctgctaaggttatttccagtagaacttttggtaagagaagatccaataaagttgtagcaaagacccataaaccttccaaattctctctggtctggactccacatagtgcaaggttatcaaataatgatgggagttcactatgttacccgaaggtccgcccgcaac

SEQ ID NO: 49675 - DNA, 227 bp, Gossypium hirsutum
  Clone ID: LIB3825-014-Q1-K6-G7
cgattcaccacccgatccgcaccaaaaacagaccattcacttcaaccgagtcagaagcagcagaatttgttgttgccatgctcaagaacgcctagcgactgataccatgaagaaatttaggtaaactaatgaaataaaatgtgttttcaatctgaaattattcttgttaagctgttcaatacagtgttaaatgtacatatttatagaagcagataaccaccttcctt

SEQ ID NO: 49676 - DNA, 558 bp, Gossypium hirsutum
  Clone ID: LIB3825-014-Q1-N6-A9
gtattattaggtctacttcattcaatatatgtatatcaaagtacagaaaaagggggccaaatgaccccaaatacaaatctgaagaaaacgatatgaatgtctgaccaaaatgaagtcatatcggatgaaaacatgagggtagcctttgtattgtaaaactcggagtctccggcggtcgtatattagtggcaagttaagcaattaattggtgggcgtccacccccaccgtgtcttaaaacattaacgagctcctgctccccgtgccatttgtcaccttctcatgcttcttatatgcttccccattgaaatcgccgccgtcctcatcctcatcctcctcttcctccacctcctcgcagttttcttcttccgacgacagtggcactagccaacaagtcccatgcaagtggccgttcacgcaaacgaaatactccaacctcccgtcacgtgacccgagtcgccgggcggcgctcttgggaacgagccgagccgccgtcatgctccaaactcgggtcccgcagtaaggacacctaacccggtcgtcgaacgctacttgccgtc

SEQ ID NO: 49677 - DNA, 480 bp, Gossypium hirsutum
  Clone ID: LIB3825-014-Q1-N6-C7
gggaaaaaaaaaaaccgggttttttttaccggggaaatttggggggggccccctcctttggcccttttgggccgaaaccaaaacaattttaagccccaagacccccagttggggggggggggaaaattttctaaaaatggcccccctaaaaactggcccaacgggaaacatttaaggccccccataacctgggggggcgggaaaaaatttgggtttccctcccatgggcccccccttccattatggggggatttttttggggggggggggggcccccctttttatgggggttttattgggggccatttgggttcccggaaccccggccaatctatacgggggtgcccctcgccaagttcaacattaattcccgggggggggcccctccaaaatccaggaggggggtggcttaatctttgggcgggaaacaaaaaacggggcccgttttggggttgcccccccttttaagggcccccattt

SEQ ID NO: 49678 - DNA, 570 bp, Gossypium hirsutum
  Clone ID: LIB3825-014-Q1-N6-C9
ggaataaaacacataaatatcaattgaaaagattagcatttttcagaggtgctgaaactagataaagaaaggggacaaatgacaaaagatgtaatagcctggataactgtaaaaataatagcacaaaaagacataaccatccctatttctttcagctcttctgaaacttttccacatatgcctgtacaagtttgctaagctttggttttgaaaatgacagatattgatcaattttttcaggtgtttgcggaatattagtcccttgaactgtagcaatcactttgtcaacaaccttcttcacaatgtttttgtaagcctctttgccaatttgaccttccttccatgtcggtttgaggagatccttgacaaactcaacgagtgcaaatttaaatgcacgaattcccttactatccttgttcttcttggcctcatcagtcttgtcatcagcatctccactctctgatgggccattctccccttcagctttcttggtttcctcaactccttcatttttcttctttgcctcggaacttgcaacaggctccagctgatttggcttatggctatcaa

SEQ ID NO: 49679 - DNA, 567 bp, Gossypium hirsutum
  unsure (1)..(567): unsure at all n locations
  Clone ID: LIB3825-014-Q1-N6-E9
atggggactgcagcagttctgttctcttatatacgctatatgtggctgcttcaagtaaccgcatttctaaagggagaatactttttttctttctttttttcttgcgatgtaggcaagggtgaatgggaactgattgcagaaagtcccggttttgattgagcaggcggtcaagccgaagcttcgaaagcgtgaagccgtggagaaaaagaaattctaggtctttgaccttctttctatcgacttggcttaaggtggtcaagatccgggcgcatagccaacttgaaagaaggtttctgaaccgtgatgaaatccgtttcgttgctcactagaactggttctattcgaatttcgttccagagcgggggaagaacagccagtggagtgggattgcagtagaggtcttttcttttcctgttcacgaatcccattcaggttctcggtaagacgagggtacgatttcatctgttggaggcgtaactgcagcagttagctctactctaaaggtggttccgttctcctcggatgagaataggtagctgntagaatagtagtagcggggtgactttc

SEQ ID NO: 49680 - DNA, 558 bp, Gossypium hirsutum
  Clone ID: LIB3825-014-Q1-N6-F8
atcatgaaactataacccatattctctctattaatttttgggtggcttttatttatacatcatttcctggtattcctgatcaaacgagaaaaaaagcctccatagcggaacagatacaaaagcagaagcaaaaccatggaaacaaaaacaccacaatagtccacccaccctatatatatatatactctcacatacaccaaaggaatgtgcagtgctttaaagatcacagattggttttgtccgatcgatcataaacaccttcatcattcacacgccccacgtcgttgaaagtttggccactcatctgatcagatgctttcagtgtagaagcaaaagctcctggtcgcgtatcttcaactttcaccaccaccctctctgaaaccccacgaccaccatcattacctttcagcttcatctcttccattttctgtctagctgactccgttgtttcgctcaacttttccttggttctatctgcagtttcggatgccgtgtgcttcgtttcttcagtttttccagtgaggaagcccatggccttcctagcagcatcagcagctg

SEQ ID NO: 49681 - DNA, 398 bp, Gossypium hirsutum
  Clone ID: LIB3825-014-Q1-N6-F9
aaaaccgggggaaaaaaagcaccccaaaggcctgggtttttaaaaaattttaaaaggtaacttaaaaccccccccccaaacaaaggaaggcccctaaaatggggaaaaaaaagcgggggtaaggggggggcccattgaaaataagggccccaaacaaaaaagcgggaccccccccattttaattaacaaatggggggggcggaaaaagccccttgcccccctggaaaaaacttaatccaaccccccaggggaacccccccggtttttttttttttttgggaaaaacctggggggggaaaaagattgctaaaaacagggggagaaactgttcctgaaggacccaaaaactttaaaagcagcggccctaaggaagttcggggggggccccttcttggggg

SEQ ID NO: 49682 - DNA, 569 bp, Gossypium hirsutum
  Clone ID: LIB3825-014-Q1-N6-H10
aaaaaaactataaaggaacttgtcattctcttcctataatccatcaatagaatagcacaaactgattccatattagagcataaactaaaccagtccatgatatctgcaaaaatctcttcgaataatcgccctctgctagtgcctaaaacaggatatcaatttcgaattgctctacttgttgactaaattattctcactaactcactataattatcttcaattttccccatgtttttcttttttttgtaaaaattgatgggattaagctatcttactatacattcaatctctcctggcttgtgaactccacttctccaactaaggccatccgatttttcgtcgtcttcgccgtccatactgtcaccgccggtactcgacattcctttagccaaagcactcacggtgaggggacattgtggagaaccagactgtgatttcatgttctcactgcactggtttcgagctgaagaaggcggaagttttcggatatggagtctatatttctgcaaatggcttttcacttcatcattggtgagatcatcaacttgcatcacttctttaatctgttt

SEQ ID NO: 49683 - DNA, 280 bp, Gossypium hirsutum
  Clone ID: LIB3825-015-Q1-N6-A10
tctatcctactactcgtgtccctaagggggacgcatgacgaccgcagtacttctattaaatatatccgactatgcgcgcagtactatttactaatactcggtgattctgactgataggctaataagcataacctactgcacggtatatttataccactgtctactaacctacacacattgagcactttagtaatttaacgtacattatatatctaaaactaacaactaatttcaaattcacatcacatacggaaaactaagcttgctgatcaatatctaa

SEQ ID NO: 49684 - DNA, 482 bp, Gossypium hirsutum
  Clone ID: LIB3825-015-Q1-N6-A11
agattcaacgtctcaacttagatgatttcatgcacaatcattttccgcctgttactgttgtcgttgctaccgggctttcccctactgcttgaactgctaccgctcttgccaccacctcgattactactttgatgtatcggcgggctttgtagttgcgatcccggttgttgcagaacatatccaacccggccatcgggtaaaagcatcggcatcattgacatgccagtaggtgttggtcctcttccatagattacaggctggggaaggcctgcaacaccgtatcctggacctagagcaccataggcacccccaacgggaccatacccgacctgagggggataactaggaagaaaaccagaattctgagaacttgaaccccctgaggtcttttgatcagtttgtggctttgcaagaaaacactctacaacttgtccatccaattcatatttttctgagctcttggatgctttcatggcacaaga

SEQ ID NO: 49685 - DNA, 195 bp, Gossypium hirsutum
  Clone ID: LIB3825-015-Q1-N6-B1
cagaaaacaaattcaaatagcaatttaactgtaaatacagcatctaaagctcacatacattaggtttcctcgagtaccaaataacccaataatcatacattagacttgcataaatcaaataggtaggttacaacttgcaacttttatgatcataactacaatgcggcaataacttcttcccctctaaaagtttag

SEQ ID NO: 49686 - DNA, 538 bp, Gossypium hirsutum
  Clone ID: LIB3825-015-Q1-N6-C12
aatcgaagacaagacaaagcggtcgctttgcttctcgtcttaaaaaagctttaatatttcaatgtaataaaatagtaaaataagtcgtacattgaagttaagccataaactattccagaatatatagtacaacttctggttgaaaatggggctataagaaaaaaaggatgacaaaatcttatcatgaagcttcaacattccgattaaatgcatcgttgggtttcgatcaaaacgatatgatctctcgtttcttatcatacccggaaatgcctcataacaagattccgataactacattaattagtttttatcggttcaacttactaattttcgttagtcgtttaaaagagttgtcaacagcaaatcttgaacgaatccggctctccccgtggcttgctgaatccttttttcgcgttcttcgtagctcaatgacggatccaaacttgatttccacatgtgtgctggtgccatattctttgtggtggtatcttcgaaactagttacaacggatttcgtaatttcttcagcttctgatgcc

SEQ ID NO: 49687 - DNA, 452 bp, Gossypium hirsutum
  unsure (1)..(452): unsure at all n locations
  Clone ID: LIB3825-015-Q1-N6-E11
ccattccccagctgtaggctagttaactaatcgtttctttcaagaggaaagttacaccaaaaacttgaatcaaatctatccccacaaaatcatggttcaattccatatttcttgacccaaaatgaaaaatatagtatgtttggaagttttaatcacatttttccttatatatagagagagaaagccattatgcacaagggcaaaaaatcatcaagacacaaaggaatcatgtcaatgaacccacccctcatcgctggcattaatccaaacaattatatacttgtttcatctctttttctctcagcaggtgtaccttgaaacctagtagaggagtgaaccatcctaggcaggtttcttcgtggcttgacctttgctttggacccccactcccttctgaccagttagcctnctactggatggtgcacgtgccactgatgaagcaactgcagctg

SEQ ID NO: 49688 - DNA, 535 bp, Gossypium hirsutum
  Clone ID: LIB3825-015-Q1-N6-E9
caatcacagtggaaatccactaggatagacaatattgatataatgtggagagtgtatcattaataaaatgtaaacagaaaaggaaagtccctgcaagtatcaccaggataactgcaacttgtttctggaattctcctcttaattacagtcagtatgtcagcctgcaatgagattgatatataatgagaaatcgacatatcatgagaacgcataaatttatagccaaaacaacaaaatggatagtatgacagacaatttgaaagaaaataaaaacattttagttttactgcattaggaatttatacagatcatagatacttcctttgttacctggacccgggtatgagtgtcggaagtatgtttaatttctttttccaagattttcatttatttggagagtgtttggaggactgtatacaccgtaaccatgtctggatatgcattgcacaggggtgttgacatgggtacttcaagaaaaatgatgagcggaaatgaaatagatggttctattaagggcaagcaactcatgctatat

SEQ ID NO: 49689 - DNA, 540 bp, Gossypium hirsutum
  Clone ID: LIB3825-015-Q1-N6-F12
agcatcaacttacgttaattaagtattatagaaatgaaaaaaataaaaccctactcaccgcctacctttcatcacctatcaatttccaacaaacaaagccttccgtaaaagccaccaccatcgatgacggtgacaccccctcccctcccctgctcatctctctctctctctctctaatctggctgtgttttttttggtgtccacaagcaaagtcataagtaactaactgtacttgcttctcgcatgtaactctgtgactaaatctcacccttatcttcttatctagtttgtttggttgtagcagctaatatatggatacacaagctggtaggccatcgcccccccccttttttttcatgcctatcctcttattgatcacacgccctcgggtccttcatctcttacttcgaatttccccaactttttttgttgaaaacatattgatattaatacaaggaaattgaatataaatatattattaacctaaacaaaaagcacggctggaactgatcaaggaattaggagtatttactaactcac

SEQ ID NO: 49690 - DNA, 349 bp, Gossypium hirsutum
  Clone ID: LIB3825-015-Q1-N6-G4
gagatcactaaacataacatatatagccataaatgcagaccgacaattgttaacattatcaaatattgaccttaggaacaatctatggtctaaaataatacctatatttttcaaaaccatacagctaaacaaaattgagcaagagtatgctcttaaaagtcataaaggatagtttactcactcgagaggaacattaacatcaccattatgaatctcctgctgcaaatatttagggaggttaccatcaaatgttcacccaacggaaacacaagagcccaaagtcttctttaccgagcttctaaagaacttaggacaggacctgggactgattacttaaccgatctctatg

SEQ ID NO: 49691 - DNA, 471 bp, Gossypium hirsutum
  Clone ID: LIB3825-015-Q1-N6-G6
gggggaacagaaaggagaaattaccacatttacaattcgatttttacaggtataaagggggcaaatttcacgaacatgacctaatttttttagctacaggggggggggaaaaaaaagcagcatccacacaaaggcccccttgggggggaggacaggcgatcgggggaaaagaaaatttgatttttgggaacgcattaggattttggacgaaaaaatctcccactttggaaaggacccagtttccaggattggttaaaggacaccgggattcgacactttgcccctttgaagttgttagctggaatcggacgggctttatttcccagccaggggggggcttcgagttacaaacaccccgacccagtctttttgaaaatttccccagggggggcctgaaaaaaagctatatgtccccacggggaaaccaaactcgacctttccatccattgggaaccaccaaattgggtgggg

SEQ ID NO: 49692 - DNA, 536 bp, Gossypium hirsutum
  Clone ID: LIB3825-016-Q1-N6-A12
atcaaacttctatttcattatggcaacacatctgtttttctctgtcacaacagacctatataaaacaatttaatatagcataaattaaaattacaaaattccaaaggcttggtaaaaagtaaatcagatttcagcattaggttattgggttttcaatccaaacaaattctcgaataattttggagccatgggaggaagcttcatgggctccggtgccatgaagttgactatcttctcgtgaacatggtaccttatctttcgactctttgaggcgcaacgatcaactatttttctcttcttggtttgcagtcttttcaaggcatagaaggccgtctcagatgatgttgggtcaacagtctcaaaaaattccttcagcaactgctggtaaaattcagaatcatccagaagttcaggatcaccttcaggatgtgcttcctctccattagcattattagcagcctcagtaacggccccaaatatgccaattgttgatcttctttgttgcatttgctttatcattctagttggatccctca

SEQ ID NO: 49693 - DNA, 349 bp, Gossypium hirsutum
  Clone ID: LIB3825-016-Q1-N6-A4
ggggaggaacatgatcttattaaaaactattaagttcaggattaaagacccccacataaacaagctaaaaaaaacagggttgaagctgtaaaaaaaaacaaagcgttcaacgaaaaaaataaccaaatcaccccgagcaaaaaccgctggttggggcacccctttgagggggattctgttaaaaaaagttttttttcactccaaaaaaacccccaaccacaagggttgggggttccaaaatttttaaaaaaagctcctcaaagcattggtccaaatttacccgggtttttgcaccgcacccaaaaaaaagggatcccttttcccgaaaaaagacaaagccctttttttt

SEQ ID NO: 49694 - DNA, 564 bp, Gossypium hirsutum
  Clone ID: LIB3825-016-Q1-N6-A7
tcgcgatctagaacagggagattatcttggaaagactgttcaggttgttcctcacattactgatgcaatacaagagtggatagaacgtggagcattgataccagtggatgggaaggaaggtcctgccgatatttgtgtcattgaattaggtggaactataggggacattgaatctatgccatttattgaggcacttgggcaattctcctaccgcgtaggccctggcaatttctgtttggttcatgtcagccttgtgcccgttctcaatgttgttggtgaacagaaaacaaagcctacccagcatagtgttcgtggacttagaggacttggcttgacaccaaatattcttgcttgtcgcagtacaatggcgcttgatgaaaatgtcaaggaaaagctctctcggttttgccatgtgccggcagaaaatattgtcacactctatgacgttccaaatatttggcacattcctttactactaagggatcaaaaggcacatgaagcactcttgaaagaactgaacctcctaaggattgcaaggaaacctgacttaacagagtggactgc

SEQ ID NO: 49695 - DNA, 431 bp, Gossypium hirsutum
  Clone ID: LIB3825-016-Q1-N6-B8
aaacacaaaagtattcattggaacaaatcctggaaacatattaccaacactgatcaataaaaaagaggtcttccatttgcttaattgagaatacattgccctaaagtcaagaatccccgattgggcttactatcttcactgtagcaatgcaccattcccaattggcccaattctgaaaccaaaacctattccgatttctatatgcatgtaccaatgctacctttccaatggggttaagtgtaaaaccaacacctatgcacggtgggagaaagaaaccagatgaataaaagtcaaagtcaaagccgcaatgcaccggcatctttaatcaccacaatgaagaatcctttaatatgactagccatgactttatacaatcccccaaacaacctgccaccaataaacacatatctgaagctgaaccattttattgt

SEQ ID NO: 49696 - DNA, 532 bp, Gossypium hirsutum
  Clone ID: LIB3825-016-Q1-N6-B9
tttttttttttttttttttttttttttttttttttttttttttttttttttttttttttttttttttttttttttttttttttttttttttttttaggaggggaaaaaaaaaatggggttaaaacgaacaagggggacccaaatccctttcatcaaaacaaaaaaaattaaccccccagggggggggggaagtccattggaaaaaccccctgaaaagggccgaaaggcccctgcatgaaaaaacagggtgggggaaggcccccaaaactcctaacaagaacattaaaagaccgccccccaaaacaaaaaattgccgcaaaaaatatagggggagaagcggggttattcccaaccttacaggtggcccccccacccaaaaagggggggaattgggtccttaaaacccttcctttaacggatctaaaaaacaggggctggtggttgggaaccaggtcccaagggatctgaggacatcatatcccagggaacaaacccccattggggaaaaccccgcccggggggtgcacccccc

SEQ ID NO: 49697 - DNA, 557 bp, Gossypium hirsutum
  Clone ID: LIB3825-016-Q1-N6-C1
atataaaattttaatttctatttgattaattcaaatttcaaaattataatattatccaaccaatccaatataagtacaaaaccgtaatacacagtcaaataaatttggattccactggtccagccagccttttaaccaatgcatccgacttaacggttattctagttaaaaggggaaaagaagtttattgtaaatttgatatatgagcaatgtggtacaaatgccattcccctacttgggagatggaggacgaagggatattcggttttgctataacattatggtgttggggggaatttacggagcaagtatgaatgcagtgtgacagtgctaataatcgtaataaatagaaactgcatgctcaacttcaccctttacaccgcatctgcgtgaaatagaaatcattcaccttcctccacctctcatgttagagttgagtgacatttcaatctcttccagagaccggcctttcgtttcaaccagaaagtaatacgcaaaaattgctgacaacaccgacacactgccgaaaccagcataaactgaagcaactccaaata

SEQ ID NO: 49698 - DNA, 555 bp, Gossypium hirsutum
  Clone ID: LIB3825-016-Q1-N6-C10
gctctaacaaatcattttcagctaaaaaaatgaaagaacaattctgaaacttgtaacagtttactatcaagtatagcttatcctttcaagttcctttaacaaaaagggaaatcttgtattaaaaaaaaaaactagaaaagggaaaaaattgattaggaaaaaggaaaagatgaatgagttagattacattccttcaacagggagaagaacaaaaagaaagagcagaatggtaccgaataaatgatgattggatgcaactctccggggactccttttttggagggattttaactgcaaaaatacctaaaacatctcttagattggttccgggggcactgcttttaaaccccgaatccattcgcagaagctcggatcatcgaaatgtataaaactgcttttcagtttcgtccgttgttcaattgtcagggttcgaagctgaggaaatcttgcctcctgctcgtaaggaggatccttgtttgctggtatgagccgagaaacaaaatatcgagcctgagagctgccctccttgaatgccaggatcccgagtgctggaaa

SEQ ID NO: 49699 - DNA, 493 bp, Gossypium hirsutum
  Clone ID: LIB3825-016-Q1-N6-C2
aaaagggaggggaccaaaactggtagtttcccattaaaaaaaaaaagccaaaatctaagtccactggggggcacagccgaaaacctgacttgttttttaaaaagaccagtttttttgccctttatttattcataaaacacactatacaattaaacagcaagaggggggattgttttttaaaagtcttgcaacccaaatatgttgcttaaatattggccaaatatactcggggaaaccatcgggtataaaagtctcgttaaaaggatttttccacccttcctcgaaaagttttggatacacatttccattatagcgaccaaaaacaaacccaagggagggggcagggtagttaaatgcatccacaagggcaataacatttggacggacctgggagaaaaaaaatctcagctgttcatttgctagggcaccttgctttggggtaatgcacccggaggcaaaaaaatcaccgaaatgtttgggaaacaaaataaaa

SEQ ID NO: 49700 - DNA, 549 bp, Gossypium hirsutum
  unsure (1)..(549): unsure at all n locations
  Clone ID: LIB3825-016-Q1-N6-C3
aaagaataaaacgcacatgngcgcaatctcaactagactattttttcgtttgggagacaaaccataacaaatttgcgtacagccccctcaactacaaagtattacaaaagtctacatcttttttattattattatttttactttcttggtttaaatatttaatatgagtttatctcgtcgactcggaaaccaatccctcggcaggaaccatgttcttctccatcgcgggttcagagtgtcggtgctcccattcgtatgttacaatcaacatagagggatcatccgagtctcgctcgacgtgtttcctggcggggcagccacggaaggcactgcatttataatatccccgtgggtatggcgagcctttgatcggcttttgcccgtatttcctccaagaatattcgtcagctggaatatcggcgatcttcgaactgatggccggaactctgattactttcttcaccctatttttccttcgctttgagcaatggcaattgccgttgccggatccggagatggtatcggagtggttatgttcgtggcacctct

SEQ ID NO: 49701 - DNA, 555 bp, Gossypium hirsutum
  Clone ID: LIB3825-016-Q1-N6-C7
ttttttttttttttttttttttttttttttttttttttttttttttttttttgaaatataaaacatggaagggaagagttcaaaaatctttccctgcctttttttaactttaaccttcaagcttttgaaagaacacataaccagggggtacactcaatttcttttggtacaagcgatgctgcataatttcttttttttttcttttaacttctgacctcccgaaagacaacaatactagaaaaaattgataaacgtcatcctcaaaaaggccaaaactgaaaccaaactccctcccacaacacatacttgagggatttttcttgtttttcttgagctcaatgatgtgaaatgggacaatgccacctccaaaatcgattccccatttaggaaatatacgggtaaactattgaaaaaagctaacgctaaaaaaacggggaatgtgcatattaagctcttttccagtttatttggaaaatatttgctgagaaaaaccccccaccgaggttgatattcaggtaaatggactgaatgccccatctattttatgtcacctac

SEQ ID NO: 49702 - DNA, 461 bp, Gossypium hirsutum
  Clone ID: LIB3825-016-Q1-N6-D5
ggaaaaaagaacaccgcccaattttttggaaaaaacaaaggtttggtccgcaggaacagacccaaaactgggctaagaggcccggggaaaccaaagcctctcaaactttaaaaaccccacataaaacggggaaaaacttcaaaccccatttaacccaagataaaaacccccaatcgggttcaccggtaaaacctttgggccccttcacttttttttagcagcaaacttggggacccgggccccggggggggcccttttttcgacccttttgaaaaccccaacagccccgggggggcccatggccctcacagaaaaacgacccagggggggggccccagagaagggccccacaacccggggcggggggggaaacattttaataatacccgcatcaccggttttaaaaaactgggggtccttttaaagccccttaccaaaacgccgggaaatttggggcaaaa

SEQ ID NO: 49703 - DNA, 555 bp, Gossypium hirsutum
  Clone ID: LIB3825-016-Q1-N6-D6
aattataatcaaatcatttattaaaatgcatcaaactccacctactacaaataaaaataacggcaggaactgaaacatgagagacttcacgtttccaaagccagttcggctttccatcttagtaatactatcacatgaatgattgcatgaaccctattaaaagacattatctaggtcctaatactaagaggtttgtcaactgcagagctcattcatgtgaaaatttcacaagatggttatgaaaggataaagacttgcgcgccaaaggctcctggacataatacttacaagggttgatggaaatgagccagggatgcgattcttcaaacctgctaaatgggccgaatccgaaaaatgctgctccacagaacaagggactggcatggatcgcgtctatcgacaagattaaaacggtgctatgaagctcgttgcccagtcgactgctcttgagctgacattgttaacctacccactcgaaatgctgcatctttgacttgtttttattaaattcctctcataatgaactacaccattgtagagtatacccctcaaaaa

SEQ ID NO: 49704 - DNA, 433 bp, Gossypium hirsutum
  Clone ID: LIB3825-016-Q1-N6-E1
aacaagaaaaccattttaaaaaaagggcccaaaagcccctttattggcttttaaaggggccccaagttaaacccttgaacaaaggggaaaaaaacagggggggggacattttttccacttgggggattaggggccccccaatccccttaaaaaaaaacaggggaatcaaaagttttaaaagggaaaagggggggggccgcctttaaaagccggaaaaacctgggaacttttaaaaaaaaacggggcttttttatggaaaaaacaaactttttttccaggggcttcccctgggatgggttccttttcaaaaaactcaaaaaactccaccattccctttttttcttgggatttttttttaagccctcccactttaacccattttttttgggttttagcccccagttttttttttaacccacccaaaagccctgaa

SEQ ID NO: 49705 - DNA, 538 bp, Gossypium hirsutum
  Clone ID: LIB3825-016-Q1-N6-E3
agtggtctaatcttcctttaaggagtcttcataaagtcttgatcttagattttaattacaatatattattttttttggtgaaaaatagaaaattactagaaataaactatgccaattggcctaactctccaaatgggggtcttctaaacattcgcaaaccttgacttcctgagtgagccatcttggcaagtctatcagcttcctggttctctgctctgggcatataataaatatttcaaaaaaagtctgccgtctctggcacgggttctgtctgccgtctctggcatgggttcttaggttttaggttttgtgtttatgtttttttggattttgaggggtcttgatctcttttattttattccctacgatttccgcgattgatctctctttaattggttggcggaagcattcctttaattccttcttttacctggaagagcatttgggctgctaaaggtctactccaaaaagggatggagagtgggcagaggagatagcatctctttcctgaggacatagttcggaaaatccttgaaat

SEQ ID NO: 49706 - DNA, 537 bp, Gossypium hirsutum
  Clone ID: LIB3825-016-Q1-N6-E6
aatatgaaacaaaataaaattaattagcaaaaaacatcttacacttagaaatcttcaatacagatcaaagctctaaacaaattacagtaattcatttacaggcaaaatgcttttaaacaaaatggtagaaaagcatcctagtagctaatatatatcatcaaacacaagttcctaatgcaagcaaacgttacattttgcggtaaggctacccaaatacactatcacaagcttctccataaggaaaaaagataataaacattcataattatctgcctttacgacgatttttcacggtcgcacaatccggacaataccatttccctttcggttgttctttcagaccgacacagccaaagtggaaccactctatcttgcaattggggttatcacatgctaccatctctccgtagctaacttggttgcacaaacagtacgttggctcgttaggatccaccggcaagtctaattccacaccggttggatttgctgctgatgctgccacttctgttgccgcagctgctgttgctagacgtgttt

SEQ ID NO: 49707 - DNA, 463 bp, Gossypium hirsutum
  Clone ID: LIB3825-016-Q1-N6-F3
ataaaaaaaaaaaaaaaaaaaaaaaaaaaaaaaaaaaaaaaaaaaaaaaaaaaaaaaaaaaaaaaaaaaaaaaaaaaaaaaaaaaaaaaaaaaaaggaaagggagcaaaaagaaaagaaagaaaggaaaaaaaaagaaaagaaaaaaaaggaaaggcaagccgggaacctgggttaaaggccttaaacgaattacgggaggagctggtggttgagaaagagggaaagaggaaaagacagcagagggtagggcaggaaaaaaggaaaaagagaataagctcaaaccaaccttataatccaaaaaaaaatggaaagaacaaaaaagaaaaaaaaaaaaaagaaaaaggacaaagggggtaagcaaattacttcaaaaaaaaaaagaaaaggcagacagaataccataaactaaagaaaagttaagtaccagggatgggctgagcgggaaaaagagaaagagagga

SEQ ID NO: 49708 - DNA, 438 bp, Gossypium hirsutum
  Clone ID: LIB3825-016-Q1-N6-F5
gcttaatacaattcactacctgaaattttaaaacaaaatttggggtgcttattacgctggcactactagcttacaaaaattgatcacttgtgctgctgctcaaacaggcagcaatcttgaacaccaaagtgggggatgccaaaacccttcatggatcgatagatgattcattcaaccacaacaccttatacaaaccaacattgagtctacagatgcggtcaccttagttattttcttttaatagccactcgagtaaacgaggtgataatattgacttcctttgccaaaagtttcattgaacatacatgcatgcacacctgcttaatgaccattacgcttacacatgtttgcgaatatttttctttagttgaggctactcccggtatctctctcgactatcttctgatttactctttcttaacacctatttatccgtag

SEQ ID NO: 49709 - DNA, 554 bp, Gossypium hirsutum
  Clone ID: LIB3825-016-Q1-N6-F7
ggaacaaatatagttctgttattattcattactatcaatttataagagtacacattgattgaacatactccataagtctagattatgccaatagaattgaggatattttaatgggaacaaattctgagataccctatcccatgtaaactttaggaatacagaccctccaaaagaatacattaaaaaaaggcctaaaacgcatgcaaattttaataaaagaattaatactataaaaaaaaaaacactgtaaaccaaagaacaatgtgtcatccaccccgccccatatctacaatcagcccaacctataatttgcctcccacaaaatttttgctttgctcatgtaagcattacctcaaccattcagcacaaataaatgccttgtgcaacaaacttcacaactcaagagccaaagctactgcttcattcaagtaatgctcctagtcatcacaattcagcccgcaaatttctaataaagggccatctttcgagacgaatgggtttattcggacccacataagtgtcaagatcgaggccagcaggattgaccaaaccac

SEQ ID NO: 49710 - DNA, 537 bp, Gossypium hirsutum
  Clone ID: LIB3825-016-Q1-N6-G3
aaaaagatccatgtcaattattaaaacaattgtgttaattatttgtgtacaagcccaatttgcgggcccaaataacccactaaacccattaaattacagcccaaataccccaagcccaaaagagccctagcccaataaaaaaatcagaaaaaagaagaaaaccctagccgttcggtcaacccccttttacccccacttgcctctgacgacgcctgtagcatcgcccttgtcaaatccaccgccactggtacttgcaaacattaataagaatagagagaaagcaagattagaggcatgtaaacggctatttaaagccgaatccaaaaccattgtaatttcggacattttttcaaatacaaaaaaagaacatagattcaagcaaaaaaacagcattattagccctcaagaaataagagaaaaggcatcaaaataaacccaaagccctcagaaacagaagccgtagtcctaaggtggttagttttatttttccttctttttcgttgttatttcatggccaatcgtcctattttataccca

SEQ ID NO: 49711 - DNA, 573 bp, Gossypium hirsutum
  unsure (1)..(573): unsure at all n locations
  Clone ID: LIB3825-016-Q1-N6-H1
acaatcaaatgcacttcatcacaataggttatatgctctcaatattcgatacaaacttatacaagtctctcaattaaatagagattttgagacttgctaacatagtgaagataaaccatgatcccttctaaatagcagctaaaatagctaaaaataatataataataactgtaatgaccaattttagcccggaccctctagaaacccaaaacaaaatataaatataaaatatatacaaaataaataaataaacaaaaagtttaaaatagtaacggtccattaaaagtccagtttacagacccaataaccaatcaaggcccaaactaatatcaaaaccttaacccaaaatacaagcccgataagcccattgcttttagaacagacaaaaccctagggttctctctctcgcgccgcagccaagcctcggccctgacctccgtaccccccagcgccatacgctccgtaccgtccagcagccacgcccgcgccagcacacgacccccatcacgtgccacgcactccgtncctgcgaatgaatacaaaaccacacaacagcatattggaaaagaagac

SEQ ID NO: 49712 - DNA, 506 bp, Gossypium hirsutum
  Clone ID: LIB3825-016-Q1-N6-H11
caggaatggatatggtaatatattttcatgaagaaatatggatgatttatgcgaacgcaacagcaaaattgtttctgagaaatggcaaaaaaacttcgtaacctaattaatcatacatgggtgggcactttcgagtagcgtaccgtgcaacttgaagacagattgcgactaatacacgtcatttccctctcatgagtaggttcaatcaggtagcttctctaccagagtaatggaatggaggcttaacttcatctccaagatacttgctccacaagaaataacattctaggagccatattatagcaaattcaccaaaaccaggtgatgagcgagcatgacaaaaatgctcaagtttcttacaacatgggtcagccgccaaagcttttcatttaaaaatgctgttcagcattgaaaaagcacttgatacccagcaacatccagcctcgtgtatcaataaacttcaagatcttgagaattcaacgaaagaatctcctccggcatcgtgc

SEQ ID NO: 49713 - DNA, 458 bp, Gossypium hirsutum
  Clone ID: LIB3825-016-Q1-N6-H9
aatcaataaatcaagtaataaaattttattaacaagtgcacgataaaacaaatacataaatacgagagtacaaagctataaacatttattagagaaaataaatcacaacgttatgaattaaacaaaattccatatcaatcttttgttgctacatatcctttttacaagactttacaacactagtattttcaaaaagaatttttatgatccacttgatagtgttgctgggcctctacaatttgaacaaaagtcttctggagcggtgttatatgtctagcaatatcttaattcaatcattcatttcaactttaataattctcatacaacactatcatgcattttgcccactaaattattttcttcttcttgacactagtttggagaagtagttaactttatcatttcacattcttttctcttaatattttatggaaaaatatctatccttttttcaattg

SEQ ID NO: 49714 - DNA, 501 bp, Gossypium hirsutum
  Clone ID: LIB3825-017-Q1-N6-A12
aaatctaaaatgatcccggatagccatagcctaccatataaggacacacgcatgtctaatgcctattatcctacctaagaaccaaacatcacacatcctactatataaaaaaaccaggattaccacctaccccatggtgctacaaataaggaccattactaatacctagcttgagccataaccaaggctctcaactagttcgaatattttacatccataaccaaatgccaaacatttcaactccaaattcaaacatgcactgtttcatcttgcaaacccgatccaaaacgccaccagcctcgagctccgtcgtgagactctagaccgtcctcagacctcatctactggttacacgaccctctccctattaatccaccaaacgcttggagacccagctgaataattccaaaaatgcttttcattgaaagcgtgttgatcccagtccaccctttttaccgtgtgaggaactaagacccactgcattaatgggccctttttgcc

SEQ ID NO: 49715 - DNA, 536 bp, Gossypium hirsutum
  Clone ID: LIB3825-017-Q1-N6-A6
ggaacatatattacagaattaaagaggagtttgtagacccttaagctaggatcctagtgcatatttaaaaggcgaaacatcccaagaaccctgcccacgatccaactttgctttgaaaagaaatggtccacaacttgaagtaccccttaagggcacaattatgacaaccaatatttcacagaactaccatggttataacaattatcttccgagaacacacattggcggatcaataaagaaacctttggcatgcgggcaacctttaacaggggaaactatttgttttgtaatttattggaacatgataagattttcttccttgtccggagcctcatactttctgatattcagaaggtccacaccaacccttactgctgtacctctgacatattcactgaattcttcaagcgactgcagaagacctcctgcgtccgaaccaggagaggccaaatcactacaatgtgcttgatgcttctacttggctataaacatgagcactgacaggtcacctgtacaacatactggatttcctgcaa

SEQ ID NO: 49716 - DNA, 534 bp, Gossypium hirsutum
  Clone ID: LIB3825-017-Q1-N6-B11
agtagaaaaggattcttggggcaacaaccccattgcctatagagttagaattcactaaaaaaatttaactgatgatatctacataccaagcaccatttcccggctggaaagtataagagaaaagaaagaacaacggctatgcctgaaaccagtgtcttcatcatatacttgctttcccactattgatgaaaatgtggcctaatttgttcatgcagcagcaccaccaccttcgtcaccttcgggatcgaggggaatttcatggcgaggcctgttgtacttctcacgaagctgcttgatagggatgaaatcaccggctgcatccatcccgtagaatagaaaaggaacatagggatggtcaaaccgtctcaaatctggttgttctggggctaaaagattctcctcaggaacatatgctactagtagattggggtcagcatatacatcaaccaagacctggcaaacaacacagaccacattagaatatatggttaaatcagcccattctatatcatgcatgctctttgtcgtagttgc

SEQ ID NO: 49717 - DNA, 455 bp, Gossypium hirsutum
  Clone ID: LIB3825-017-Q1-N6-C12
aaaaaaaacacccccaaaaaaaagaggggcccaaaacattaagcaacaccccgcccaaaacccttttaaaaggaaccaaaccccggggcaaaacatggggggatcccagcccaacgggaaaaaacagggaaaacccagtttttaattaaaacaaaaacagggtggctgggggccaaaacatttggggccaaagctaaatttccccccaacaaaattaatcgacaaattcaacggcccccaccaacgggggggggcaaaaaacaatttggggggcaaaacccggaaaaccaaaaccccaacttttttgggaaaaaccaactaggaaaatgggggccggggcggcatttttgtttcactcttccaggggggaggaaaggacgggccctcaattctttaactttttttttgggctgggaaaggggacccctttttttgggggtttttatgggcatcgg

SEQ ID NO: 49718 - DNA, 445 bp, Gossypium hirsutum
  Clone ID: LIB3825-017-Q1-N6-C6
aatagccacaaacccaaaagattttttttttatttacaatgttcctaaaaatgtttttttttaattcatttaaaacaaaattctaaaacgggaaaaccccaccaggcccgcccaaaaggggcggaggggaaggcggatattgcacaatcggggggttacctggggaaggattttggaaattgggagcattcgcacccatggtaccaaaccaccctagaaccgggggccccgggggcatcccacccatggggcgcggcggggggagggcgccacccctgggggcaggaggccgggatgcgcccatagggggaggaggggggaaacctccccccatgctgccccgggggggcaaaacgcccatacggggaggaggggggaggccccccaaactgggaggggggggggagcctcccatactgggaggaggggggaggccgcccttcct

SEQ ID NO: 49719 - DNA, 242 bp, Gossypium hirsutum
  Clone ID: LIB3825-017-Q1-N6-D12
aataaaaaattaaaacatgattcttcataagtttagaattcttgtatttctaaaaatttagtgatctgatagtaacctagatataaattctacatctaactatatacaaatataaaatttgtcccattagaaaccagtttctgccttttggtaaaagattaaatccgaaataaagagcttagagatcacagtcggactggatcaatccaagtcggtcccgttaacaatgatcattaaattct

SEQ ID NO: 49720 - DNA, 551 bp, Gossypium hirsutum
  Clone ID: LIB3825-017-Q1-N6-D6
atatgaactcttgattagagcttaaacatgccatttgcattagatgccttcatataccactaccgaagatggcttcgaatcttcagttagcagcatcaacatttcaacgaaaaaaaatagttacacatcgtattatgacatgatccttgtttagttatagtgtgtccggtgtgaaaggaagagtgaatgagcgaacttaaaactttgtttgtcatagctctatatttaacatgatgaagatcagcttcgtcctaaaatactgtgaagaaatatgaaggaaaatggccgactgccggataatacaacattctctattgatatattgaaacaaaaagatggtaggacccaaagatgagattcccctcccttaaaagttgataaagcttaaagggtgttgcagtgtcccaacaacttttgtttttggcagcccttgcttgcattccatcatgcagaaatctgggtgcattgaaggtgatcttttttttatgcaaagctgataagaaaactcccttttttctagtctatctcaggctcagcacaatggccaaatt

SEQ ID NO: 49721 - DNA, 555 bp, Gossypium hirsutum
  unsure (1)..(555): unsure at all n locations
  Clone ID: LIB3825-017-Q1-N6-E10
aaaaaactacgtatatttgtttacatttcaacttggcaccaaatgctagaaatggtcccgctaagcaatatgcattgaaaaacttctgagttttcaatatcaatggcagaaactgcgtaaatacttttacatttagcattgaggctgagactgctgttttttacacaagaatttaataatctaagatttttcacttaatccaaactcgtttccttgatacatacacaaaaattatgacatttatgaccaaaatccgataacttatgcaacattacaaatgcagaagtggaaagcatgtaaattacctcctcaagtggattcgagaatataagggatagatatgcatatccttttttatttcacttgtcctttgcttttgaactcctcaccaaactaagcccttttttctcctaaatctgtcaacacggnccgtgctcattcgagacttctcaggcttatttgacttctttgacttctcaagtcggctatctaaactatttctttgaaacttttggaaggtcaacacccaattcggatgtatccgaaagtccaccc

SEQ ID NO: 49722 - DNA, 365 bp, Gossypium hirsutum
  Clone ID: LIB3825-017-Q1-N6-E8
gggccaaagggggagccccaaggccgacccccgggagcacccaggggccaaaaaaccccgagggggggcgggctaaatcccacaaacgaggggaaaacgtttccacgggcgtataaaaggcccgggcttgggccccccccacaacccgggtgggtccaccccccaagccaatcgggggaccggtttttgccgttccaaatccaaccggggcgaattgccggccccaatccgtttccctcccaacaatttaaaacactttttgacttttttttaaaaggccttttaatttttccctcggggaacttgttcgctatcggtctctcccccgaattaaaccttggacggaattaaccccccaattaggg

SEQ ID NO: 49723 - DNA, 538 bp, Gossypium hirsutum
  Clone ID: LIB3825-017-Q1-N6-F6
aaagaaaacgaattatgtcaaattaaaatacgaaaattaaataaaattttgcaatttgaggattcaaatatgttcattaagttaattaaatcccaacaaatttaacaaagtttgtaatgaaattactttttaatatttttctatttcttcttgcttccttttcccaagctctactagtaaggtcaaaatagcctcacacatttccgtagcgtctggctcgtttggatttttcttcttcgaagagtacaccatccaagcgtggtcgagcttctgctcgggtctcactatgaccgaacccggaacttcggcatcacggcacgtcacgagtccatcacttttctccccgtatctaagcagcaagtgaagagcacataaggccatggcagcggaaaccggaattacgataggcacttggtgtccaagttgactgacatcgtctaactccgaattcctgaactttaaaaagggaagccggggaagctcaccatgagctatttgtgtcatggtagctagtacaccgggagccaattttgctttc

SEQ ID NO: 49724 - DNA, 548 bp, Gossypium hirsutum
  Clone ID: LIB3825-017-Q1-N6-G12
aaagcaaataacatttattgattttttctatccctttgcatttaacacagcatttctagtggagctggtgacaaaaagactagacgtacaactctacaagtccattacaagatgttcgttaaaaaaaattatagaaaaagagtactttgaaaacttaaacatgtaaccgcaactgcacaacatttcccaattttctttcatctcaaatacaaaacaggcctaaaagtagcctattctttttaaggatgccccccaccccaccccacctcaagttatattacatgcaatgaaacggtaatgatgcatgtaacatcacagctccattatttcaaaagaatatttaccatcattgaagtgcccttgagattctacgacaggcccattcaagcacaataaccttacaccgtcctctttggatcacgagcagctgcaagatggtccgaaatgaagtcaaatgctctggtatcctctttctttgaactgttcatcattgaactaggtgtttgacttggaaaatttgtctggaatatgtctgggagaggtgaccc

SEQ ID NO: 49725 - DNA, 521 bp, Gossypium hirsutum
  Clone ID: LIB3825-017-Q1-N6-G5
cttgttaatgattcaatatttaattaaaaaaatctgttgtttgatataatgaattcgatcaccaagaatcaaatcaatagccataaaacaattacaagatacaacactgtcctataattacaacagctagccaaaggatcaaaaccctcccgttgaaccttgccaaacctaaacagcttgctgatcctttcgggttacaaacatcttgtttccaccaaatgccaagttggttaccttcaagcctcccattgccttcactctccccatcacattcttcctaaaaaccttaccctttaatcgaccccccgaacccaccgccacctccgaccacaactcgatatcccctcctttactgcaaaacacttgattcccatggctctcgattttgcaccctaacccttctttcttcccattcactaccttccttctattctcaacacacatccatggattactattatcatttgcatcagtgttcacagcccctaaacacctcaaatccgcattcaaaacctccccag

SEQ ID NO: 49726 - DNA, 471 bp, Gossypium hirsutum
  Clone ID: LIB3825-017-Q1-N6-H9
ggggaaagggaaaaccaacaaaggccggttaaaaaaaagggccaacacaaaggccgcaactggtttgatttacaaataaaatggttttaaaaaaaaagggggcttgcccccctttttttgtaaagagggaaaaatcggattttttaaaaaagcaaatttagtggggggacccttcccgacccacataaaaaggccctacaggggcatttttaccacgggaaaaaaaaaaaaaacttgggaaagcaatttttgttgtaaattgggggcatggagttgagggggcaacactatttggttgattttttttggccatttaaacttcatacccccaggggttggggggtttcccaaccctaaaaaaaaagctttgcaattaaacccgttgtataacatgccgctcgttttcagccccgtaacttttgacaagcatgaaatatatcccccaaaatttttcctccttaaaaggggggg

SEQ ID NO: 49727 - DNA, 420 bp, Gossypium hirsutum
  Clone ID: LIB3825-018-Q1-N6-A10
caagcatcaaagcacatcaactctataaatcaagcatgtgcaatcaagtccggtatgtctcgttctatatgttttagtttcatccatgtattcagcaagatctttacatacatacatgatacatatttacatgcatacatacataaattacatatatattagtacatgcagggtgttgcaaaatggtatcgatttctcatcaaaacctacaaacatccttagacagattaaaagtttgtaaaattcatgtacctattttgctttgtctgctctctttgcagggcacagaaggcatgtcttagcgtcgattcttgcagttttttcttccttgtgtgtcactgttgacctgcatagatcagtgtatcggatgatactgagtaatacctcgtcttggtggcaacttccgtcaaatgaaaagga

SEQ ID NO: 49728 - DNA, 203 bp, Gossypium hirsutum
  Clone ID: LIB3825-018-Q1-N6-A7
gggcataaaagttcgataacttagcatcaaatataaacccaacaaagggacatacacttctaaaacgtccgtactaggactacactgggccaaagctaatttataaagtaaaagaggcgaaccaggtttatatttaaatattttttatatatatgaaaagggaaaagggggcgtgggaaattaaacgccttcggctgacgggg

SEQ ID NO: 49729 - DNA, 537 bp, Gossypium hirsutum
  Clone ID: LIB3825-018-Q1-N6-A9
gcttaaacatcagtttagccatattcctggctgttaaaattgctaaaagttgtgtttcttttaacttgttgcaacgtttaccagatatttcctactggtctgggaacatatttatatgtgcagattacgataggtgttaaaagaggggggactgttaggggaaaaacacggcttctttacaactaaaactcgaattgcagctttgattcactgcaaatcgactgaaaatgcactacttcaattacacttctttccgcgtaggtttctcccgtgagtgttgattggagcggctttagttgttgtcggttgtttggatgaaggatcggaattgatggatgaaagatttgggctgcgagcctttgggtatggatgaatggtcgcaagttcacggatacggcataccactgtctttggtaatggacgtacataatgcttcacgttagtctcaccctgcaactctttcctgttgtgtttatgagcagagctagatcttagaaggtttcgccatttgtcccttagatcaacaggtgtccggta

SEQ ID NO: 49730 - DNA, 333 bp, Gossypium hirsutum
  Clone ID: LIB3825-018-Q1-N6-B4
ggaaacccgaacggttggaactatttttaagaggggccaaaaaaaacaaggtaaagggggtacatgttaaaaaaaataagctaggggaaagggaaaaaaaaaattttttttgagaaagggggttcttttacactacaaaactggaaaaagggttaagaaaaaacctttcgggaaaaacccccgcttgaattggaaacccgcaaggcaaaaaatttaaaggggggggggggcggattaaaaggaaaacccaagcaaaacttgtccaaaacttaaatagccagccaatatttaagggctatggggccaaaaaaccggaggggggattttcaaaaa

SEQ ID NO: 49731 - DNA, 542 bp, Gossypium hirsutum
  Clone ID: LIB3825-018-Q1-N6-D2
cagaataattttagaaatgaggtaactaaaattacaaatacaatttaacaaaatatagataataaaaaaaaattgtaataagccttatgtatagtcagaaacaataagatttaataatatccaccatcttaaaaggaataatctatctcaacaccgccaggcagcttgtaaaattagcattaaacagttgacttcaaagtaaaacataccgcgagctgttgtctttcaattgtgctgcatgtaaacataatataagccctagtggtgaattatttacaagccgtcagccgtcaacaactaaattctgttgacagttaacaacaaatctccacgtccttcaaaaactaaatgcaaacctgtactaatttttaagcgattctttttcaactaggcaataaccaaacctgatactagacacagccatcctcacgctgtgagatcatgtttagtcatgcagcataacgtgtcaattaaattggatttctcatttgctaggtctattatggataaagatcatgcaaacatatcaattaacatgtaaa

SEQ ID NO: 49732 - DNA, 113 bp, Gossypium hirsutum
  Clone ID: LIB3825-018-Q1-N6-D3
cacgctcgatcaggccaaaatgctaaaatactgtgggatacgggggaatataacataatctcattagctgattttcgtatcccactatcgaaatatccagataaacgcacaaa

SEQ ID NO: 49733 - DNA, 530 bp, Gossypium hirsutum
  Clone ID: LIB3825-018-Q1-N6-D6
aaaaaataaatgattaaatgtctacaagaccaaattacataacccaaatttaaaacccaatagcccagctacaagcccatttacaaaataacctaacccaaatacccctggcccaaatggcccaaaacttaaacaaacctcagtcaactaagaaccctagcagcaaggagcgccgcagccctagcctccagcgcgcctccttacaaccccctgcacgcctcggtacgccaccctcgtgcctccacgtcgcctttcgtacctgcaagagaagacaaaaacagcagcaagagtagcagccaatgaaaatatttctgtattttctcttcttttgattattcggctataaagccatggggggaatcgattgcaagggtcttcttcctttttttttacatatacacgcacaatatacgcaaattgaatacaaaaaaaggtcatcaaaaccttgaaaggtgatttttgagtgccatatagattcttgcttttcaatctgtttttcttagtttttcttgaccttgcatgtgatttta

SEQ ID NO: 49734 - DNA, 568 bp, Gossypium hirsutum
  Clone ID: LIB3825-018-Q1-N6-E8
aatacctaataattaaactttcatgtaattactgtcatatttttattattaagtaggataaactggtgggttatacaaactaatttatattagatctaattagagaatataagcagcgatcaattgagtggaaaaaagttacacccgatcaacttgagattcgaaatttctaaatatgggaaaaacacgaagaggggctttcttgaaaacagtgagcccatagccttcatccatgtctaaattctcggcattttcaccgtcaggtaatttccaatcgaaccagtacagaagattagcaaccagatcaacaatgaaggccactgcaaacgccattccgggacaaccccttcggccgaaaccaaatgggatgtactcaaaatcttgacttttgaaatcatctgagcttttctcgaatctttctggtataaactcttctggtttctcccacacttcagggtccctatgaatcgcccaggaattaaagaaaaccatgatatttgaaggaatatcgtaacctccgatgttaatctttgacgttgttcgtcgaggaacaaggagtggaacagct

SEQ ID NO: 49735 - DNA, 479 bp, Gossypium hirsutum
  Clone ID: LIB3825-018-Q1-N6-E9
aaaaaaaaaaaaataaggcttttggggggagggggtaaaatttgggcccaaagaaaaaaaaaaaagtttttttaaagcaaaaaaataacaagggggccaaaggggggggcatttataaaaatggggaaaaaccaaaaccaaactcttggaaccgtttaacaaattaaatggaaactaaagggaaaccaaacagggggagaggtaaaaagtggacaaaaaaatcaacaaattatgaaaaaggtataatttttgggaaaaaaaaccacaattaaatcccgggaaacccaattaaaggggtgtaaacgagggggccacccaaggaaaaaaaaaaggtaaaaaaaattttaattttacaaaagcacaaagagacatcacacccggataatgacccccccagcaaaaaaaaaaaaacccacaaagggggcaggcccttcggaaacatttttaaaaaaataattttttttaaaaggaaacaaaaa

SEQ ID NO: 49736 - DNA, 440 bp, Gossypium hirsutum
  Clone ID: LIB3825-018-Q1-N6-G10
acaagaaagctattaattcataaataatagaaaccctaatcctaagaacacttcatcaatgaacacattagaagaagaacgaaagacaaaccacaagaaccaatcataatgttccaaatgattgaacccttgctaaatgctcatgcatgggaaaagagaaaaaagaacgccgccctacggcagaggcggccccggaaaaagacagaggagggcagcagctatccgaatatcccagagcaacacagaaaccacaaacaggattcccatcaacccttcttctggaggtgaccgacctagcagcggcgtcttcggaggaggagtcggacgcgggggaggtggatccatgttggatgtggagataagactccggaaagataacttatataccgcgagattgttatataagatgatgaattaccatcctacctcaaagtcatggc

SEQ ID NO: 49737 - DNA, 372 bp, Gossypium hirsutum
  Clone ID: LIB3825-018-Q1-N6-G7
acttcaagaattttttttttgtatgccatatattaatgtatggggataaaaaaaataaaaacaaaatttttacacgtttttatacatagtttcgaagagaaaaaaagaaacaaaaaatacaaattttttttatatattaaagcaaaatctgatctacttttttttttggtactttgtatcgattctgttgggacccaaaatactatgttctttcatggcatttatagccgaaatgaaaatgaaaatacaatgttctgtctcttttttccgtgttggcttggttttgcaggtgtccgacgcgtgaaggtggcgtgcgacggtggtggtgcgtatggcaatgtacgtaggtcaaaaaaggccctggaggcttta

SEQ ID NO: 49738 - DNA, 552 bp, Gossypium hirsutum
  unsure (1)..(552): unsure at all n locations
  Clone ID: LIB3825-018-Q1-N6-G8
aaagaacagttacangaaaatgcaaaattgcaatgtaagccaacagatacaatgaggaaacagtttatttatgcgttcctactctaaaaacatataaagaaactaattgaacaatcaaactacacgattctctagtgtcattcatctaaaactaaaatatcttcccaaaaaaatatcccttgcaatttaacttattaaggactcaactcagagtataacacttcattgattatgacaaatgtttaacatgtactcaagaactcgtccccaaaataatctacaagtcacggttaataagctgataatccacactagacataaatcgtagcaagtccaaaccttgtggaggttcttttcatgttgaattcactccatcaagcagcaaaatcggacagaaatactaatttatgtcaggtagctatgtagtgcgtgcagttaccttcttccggacaatcctctttctccggggcttcaaagctccagtttccccatcggcaacagattcaacgtttccttgtttgatgccaagaagtccaagaccggaaacaatgg

SEQ ID NO: 49739 - DNA, 452 bp, Gossypium hirsutum
  Clone ID: LIB3825-018-Q1-N6-H1
gggttaaaacccccaaattttttttggaacacaaacaaattggcagggaaaaaagagaaggggcaaccggttcgataggacaaaggcttcggttaaaaaagaacagataaaaactagaaatcgggaaagggtccaatcagatagacccgcaaaggtttacggggaattgccaaaattttacttttttgataacaaaaaaaaagctttttggttgggggacttcccccttaggtgcccttttgggatcgagtttttcatccccacaaaaaaaattaatgccccaaattgggcaacaccctgggggaaatccccaagcaaaacaaagttttggggttcattgggacaatagttgtaaaagaaaaaaaaaaagggggggctcaccaacaagtagacaaacaggggtaagggtccaaaaccaggggcaaaaacaaaaaaaaaaacaccttgttctt

SEQ ID NO: 49740 - DNA, 570 bp, Gossypium hirsutum
  Clone ID: LIB3825-019-Q1-N6-B2
gaaaaaccaaagctttcaatattaaactgtatcgattcagaagccatatcccaaacctggataataaccaaaccaaaaaagaggtttcattgactatagaggctgaagttcttgctccggagctgccgcaccaacaggtttatatgaattcaccgtttgttgtttacgtctccacataccccacactccataaactgataatccaatcaccactattatgataagagccataaccaccaccgtataatttcgcccccaccatgtctgttttgtagaagactcaactttccattgcaccaactgatagtttccaaaagtatcagggagcttcacgcgatgttcagcaagtcgagaaattatatttgttgcagtctcattagaaatgtaggttaatgagtctgaagggactatggccaatctaacaagagaactgtttccttcagatgtaaaattcaataaatggacctgtgaagcattaacatctaactccttagcaatgaactccgtaagtttattgatttgaggctttagatatgagtggttgacgctcaatgacatatccaatataat

SEQ ID NO: 49741 - DNA, 598 bp, Gossypium hirsutum
  Clone ID: LIB3825-019-Q1-N6-E7
tttagtgatctatacaagactatgactcccatgccgcttacgtaaccgtgagtcctataaaccgtgcggactttgtttgacacttttttttgtttctgaatttaccttacaacgcaccatcttatcaacttgaagaggcattcaataaaatttgggaccattaagtgtaatcggaataacaagttactaagtattaagcaagggtttacttttggttttgatgaatttgaaaatccaagttcacagcagtagtgcaactttgaggacttcaccagatcacactttgggtgatcgtacaacctcgctccgtgaagcaaaaaatgacaaatacccgaggagtatcgtcatcagagggagaccaatgtataattcttacagtaaaggggggctcccaagtgacagttccacggcacgtagtaactttggcggagaaccaagacgctattgcacgcatgaaatcagacacccgtgtgacttttcaggacaacctgaggggttctggaggatggaatggatataattatccgaaaggaataaacagaatggaacgggtagccatcaagggtgggcaaaaccagcttgattctacttgggaata

SEQ ID NO: 49742 - DNA, 555 bp, Gossypium hirsutum
  Clone ID: LIB3825-019-Q1-N6-G11
ggatccaatagcagtccaaattatcatattacgaacttgtctatatataagggggtaccacctcctctaccaattaccataaagtaacacgggaatctcatgtaagaagttcaagatgactaacaagttataaagataaatattactgatgcggcatgcatgcatagatgaactccatgctgatcaatattttgaacttcatagtgaagtaacaatgtcagccttcttccatcaagtaataactttcctagcgacgattcatgcgtggcttctcccaaaaagcacggccaggtccgtaaaaaggacccttgtcagcagcacccaaatgagccccatatccttcatatgaagctggaaaagcgccctctgaactgttgaatttcatcccatacggtgcacctgcagcccatggtctagcatccacactaaaaagttctgcacgtagcttttcaacttcacgtgccatggaaaccatgttcttctccattgcttgtctctgttccatcagctcaatgtttgcctttttttcataatcaatagcagtccttgcacgca

SEQ ID NO: 49743 - DNA, 538 bp, Gossypium hirsutum
  Clone ID: LIB3825-019-Q1-N6-G2
ggcaaacagggaatacatagaacctgaggaaaaactcgagtttggcatggtccaaacaccgacatcgacattcagacattgtttgtcctaaatagatttcgtcgatacaaaaggcaaacaacaacaacaacaaaaaaaaaaaaaaaaacaatgccttggtaattttaagcggaaaaaaggtgaaaaacaccaatgcagaatcaaaacaatcatgtcctactagtacaaacttatggtacatgataatcgttaaaagctcgacatacttacaattagtaaaacccgggaggaggtctgttaggtttctaatgaaattctatcgtctggaccggcaagcatgatattgcagtcaaaagcaaatttccgggcaagcatgatggctgcatttcaatctctctttgattcaaatgctaatacaaccgaaaatcctttctttgctagccaaaacaatgcctgagcgggtgcatttccgccacctcggactccacaaagctgcattgcgctggaataatattctttagcaattgcagtctttcct

SEQ ID NO: 49744 - DNA, 544 bp, Gossypium hirsutum
  Clone ID: LIB3825-019-Q1-N6-G6
aaaatcagaatttgacctcagatttttcattaatgatttgacattctccaagtgtttacaaaaatgtccatggagaaagtaactgggcttcttcacttgatgttgagcattgccccacactattgaaccatattcagacctagccgttgatccccttctcgtccttttagctacaaaaatcactgaatatctcttcttttccccaatatgcctaaagacgagcgtccggggcctaactgagatcccgacagatgacggaccatccaccgccactttgtatatcgaccgtgcggggctgacgtttgttaattcccgagtgtaccgaacaacccttttgtccccaaacaggaccgaaaatgatgggtaattgagttcaccagggtctttgaatctgttggaacatgtaatgttaggacgcttgacaatggttttaacttgatcaatggtgtagcctagtgagcataagaaggatatgtattgtttcgtagttatatcgtatattagtcccggagaaagggctttttgagggtcgacgtgacctgcc

SEQ ID NO: 49745 - DNA, 576 bp, Gossypium hirsutum
  Clone ID: LIB3825-019-Q1-N6-G8
acacaaactgaaaacaggtaatcattcagattaagtttgatattcgagttccactacgtgatgtaccctaaagttgacctaaatgacaagcaaagtggggcattttccagtataagggaggcaagagcatctttaacagtaatacagtcggagataaacataaagttcatcatcttttcttgaaagagttgataaagggatactatagtcgccctcacttcataatttacaaatgcctatcttcatgcttgagcgattttaacttcagaattaaataatcggttaagcacggcagctaggcgaatcccgccttgagcaagcctcttctccacaataggcaaccgagaaaggaaatactcatcttctaatgtgcttcccggtgtggcattcctatatgcaaacttacatgccatcctaacactttcagaagcatacaggttaggacaaacagtttgattatgtccacagttctcccatgatgatacatcattggaccaagcatcagtaatatttctctggatggcttgaatcattgttgcaagatctgagccatacaatgtcttcacagcagaatca

SEQ ID NO: 49746 - DNA, 568 bp, Gossypium hirsutum
  Clone ID: LIB3825-019-Q1-N6-H12
aaatgccacaattctaaccttcctttaaagttaatttgttagtataacagtcgtcaaacctaagctttacttgttctgatatcaatataagatcaaacacatatgatctggaatttttatcaagtcgaaaataacaaagaaagatgcatagaacgtaagaatattaagtttcttctgctccaaaaacatgtagcaagagatccgaggaatcacaccacaaagccaacagattatagtacctctcataatgtgataaagttgttccccatggatcttcacttattcattacaatactcagaggcacttaaatactcaccatgctcctcaaaatactcaaccaatcgctttaagaacccatcgctactaactgtttcagtgtcacatacaagacaacactgtcttcttgctcgtgtcacagccacattcattcgccttcggtcacttaaaaaaccaacctctttctttgagtttgaccgaaccattgaaatgataatcgcttccttctctcgaccttggaaaccatcaacagttgagatttccacattctttagcttatcttcattgctt

SEQ ID NO: 49747 - DNA, 565 bp, Gossypium hirsutum
  Clone ID: LIB3825-019-Q1-N6-H9
tttttttttttttttttttttttttttttttttttaaaaacctcccccctttccaataattttggaattaaggggcaggcaaatatacctggcaaggggaaaaaccccccttccatccggtcccctaaaaacccttttaggcggggggggagggaacaaacggcggcttggcaataccaacccaaaaagatgcctaaataaaaaggcgacgggcggaaaaaaccaacctttttgaactggcttgggaaagatccaaagggaggggggggaaaggcaaccaacccctaaaccctggtttggagggatcccatggaatcggcccagggccgtggctggcccaagaccaggcttccttcataaaggggggggaaacccccctttggaaaaggtgggcaaccccccccaggggttcaagcccgattggggccaaggccccacagggggtttgaaacagggggcccccggttttaaggcttggccggccttaaccagggggcaacccagttccccttacaaatgtggaaaaggcaagacctttggggggcccctaaaaaggggtcccaat

SEQ ID NO: 49748 - DNA, 570 bp, Gossypium hirsutum
  Clone ID: LIB3825-020-Q1-N6-B3
tcgcgatctagacctacccgtcgcttgacccgaccatggaataccggacccgtgccgcgaagcatctcagcttatcctgtgtcgagttatatcttagcgtgatgatggcatgggcatagctgtgtgctgaatggaaatgcgatcacatcaccataccacataccatacgaacccgtaaagtgaaaagccaagcctgcctagcgagaggagtaacctacattacatgaattgcgctgagtgcactgtccgcattccagaaaccaaacctgccaggcgagttaattaaatgaacaacccaccgcgagaggagaggtgggtattgtatggcacgccagggtgtcttttctttagagcaacgagacagagatgatttgattgcacttcatcgccttgacatagtagagtcaaacgaagcacgctacgctggcccagcacacgaaaatactatcctatgggggggaacggaacgatataacatgacctgagctgtgtatcgtataatcccattacactaatctgatatccaaaccaaagcccagactggactatggaatggattgcattgagccc

SEQ ID NO: 49749 - DNA, 481 bp, Gossypium hirsutum
  Clone ID: LIB3825-020-Q1-N6-C1
cagtaaacctaatcctaaaaaagttttaaaaaggggcccatctaaatcatgtcaccccaaacccccccgaacgaaattcaccaacctttacactacattttttttataacatcccaagggaatttaaaaaaaaaacgggggaaccccacattgtttttaaaacaaaattggggccctaccaaaaacaggccccttgctttaaaaattaaaaataaaaaaaatgccgggctgaggggccattttacatatgggttaaaaattaaacccatacccccctgttccaaaaaatcctttgctcccctttcccaaagcaaaaaaacagtgggaaaaaaaaaaaggggacaaaatttttttggcccatgttgccaaagttaaacaaaacaatgacaaggggggttaaccatttttcccttgaccttggcctgcccatatttttgttcccaacaaaaccttttatccctgccagctaaaaatccttttg

SEQ ID NO: 49750 - DNA, 389 bp, Gossypium hirsutum
  Clone ID: LIB3825-020-Q1-N6-D11
actaaaacaaaaatgaattaggcaaacatatacaagggcatcatgttcatgatatttagggacaatacattgggagttacacaacttagtgggggaaacaaactaccccggggcagagagggaaaaaaaaaggggcaattttgacatgctttgccccaaataaaacgaaattcaatccccatttctatagctttttcaaaactataatccagcaaggaccatgccaccttcctcctttaaatacccttaaatttggggcaaggccccgatggcaatctctgggggaggaaaaactgatacatctttataacctagttggcctgcaatttctttcaaagaaacccgggcatttgctttaaaaaaacccaagcgtccccccacccgtccgg

SEQ ID NO: 49751 - DNA, 491 bp, Gossypium hirsutum
  Clone ID: LIB3825-020-Q1-N6-D3
aaaacacaaacaaaaaggggatccaaaacccgaccaaagccaacccacccccccccacccaccagccccaaaaaaccccgacaaacccctcaaccccccaagcccaaacccggcgggcgcggggggccacccggaaatcccggaccggaaccggaaggcggcccaacttacccaaaaaggaggccgcttaaagcagggggtaaccatggccaaacccgccccccggggaaaaaggccgccccctcaaaaatccccaccaggcccaacccggaagcaaaaaaacaaaaaccgggggggcccaacgagcggcccaccacacaaaaaaggggccgggccaaccgcccgaattaaagaacgaaaacccggggggccagaggcattaaaaaaaccgccaacccggggggaaaggcggctagccaaacgggccccaagggggtttttttctccccccggcagaccgggaaaaagtgaatgccctccacccccggggc

SEQ ID NO: 49752 - DNA, 559 bp, Gossypium hirsutum
  Clone ID: LIB3825-020-Q1-N6-D8
ataattatattcatatatagaggttgaacataaatataactaacaaaagacactaaaatatttcttgtagatgtacaattttactggaaatgttcccttattgttcattgaagcgagttgcttaagcacttgccaaggttccttgatgaaattgtgtgggaattgtctcaattttgctaggcgctgcacattcatctccatcttcctcagtttcccataggaaactagcataagctgcatgcacatggctatcttgaggagagacttgaactgctcgttcgaagtagcttgaagctctttcttcatcacgatgtagctcccacactaactttgcatattgtgacagtgtttcaccgtctttggggtctactaaaatggctcgactgtaatattcttctgctccttgaaggtctctctttgactgatacaaaaactgagcatagttccccaaaaacaaagggttcccaggattttcctccaccatcctcttgtaatactcctcaacttcatggttatcgccaccatctccgtttttgcctcccgaattaaactcaccacc

SEQ ID NO: 49753 - DNA, 566 bp, Gossypium hirsutum
  Clone ID: LIB3825-020-Q1-N6-E1
gaaaaaaatttggttacaattgcatttcacaattttaaacacaaacaaattgggaaaatacacgaagttaatcctaaatcctaattatcaaaagctaaactagaaaaaaagggtaagaattcacgacagaaaacattaattttcacccaatttacaacgcccaaacgcattaaaatgtaaacgaaagtcggctcacatggccgttgatgtctccggagcagcaacgccatcatcgtcgaagctccaaagttcaccgacgacactatcctgcggagctacgccgttttgggtcggcgattccccgtccagataaggtatttgataaaatttcatgtaattctcgtaagccatgagctcctcagacagtttctccacttcattgttttcttcttgaacccccacagccgacacggccttgttcatcggctctcgccgtttctcttcttcttcaagttcctcagccttcacagggacgtaacagagattcacattttggtcgtcggaccctttattttcatctccagaataacgatcgggtcagttgcgtacccaccgatttcattcaa

SEQ ID NO: 49754 - DNA, 546 bp, Gossypium hirsutum
  Clone ID: LIB3825-020-Q1-N6-G10
ggcggaaacgctaaatcctgaatttaaacactaaatgcaaatgctactatgttccatctctacaacaaaaaacacctcctttatctcttaagttatcatacaacatggattcctcaaatatgcaagcaactcaagaattgcttgatcctcactcaatttctatggccaatgctcagcaggattgagcgatttaaattcaaattttcaacatactaatactatttaataaggccgggcaatcctcacaacccttccatttataaaaaggatagccataaaaatttggttaaaaatggcttgcaaacaagcctatttgtctacagaaagtgacatttacctccttccacgagttccaggacctgaccttgggccagggtaccgagaaaattgcagcctcaagtagttagaatctgggtcatgttcatccattttataaccttgcaaggcactcattgcagttgctgcacaggcaggacttgaaaaatcaacaaaacaaaggagaatatgatctccaccacgctgtcggggttctttgctcactaaccg

SEQ ID NO: 49755 - DNA, 494 bp, Gossypium hirsutum
  Clone ID: LIB3825-020-Q1-N6-G11
aggcaaaaaaccggccccccttggtttattaaaaaaaatcccaaaaaccaaaagggcccccgggaacaagagttcctaacggaacacaaaaaaactagtctaaatcacatgttttgccaaccagccctcaaaaacaaacattttaaaggggcaaatcaaaaaaaggggctgtaaaaccccacctaatgcattcatcaagccaaagtttttttaggctggattcaggcaatccccaaaaccccaaaaagcctttgcccccaacaagctggcataaaccccaataaaacgggggcccattgggatacattgccccggggggaacctttggcccaggggatgtcccacccccttggggaacctgactagggaaagccccccaggaaaacaagctttaatgagcagtctctggataaccaccagtgggcatcccaactgaacccggggggattttatacaaagaaaaccctccacttggagcacccaacccacccccc

SEQ ID NO: 49756 - DNA, 226 bp, Gossypium hirsutum
  Clone ID: LIB3825-020-Q1-N6-G7
gaaaatttagccagatgaccttatgagtataccaacccttcctacatgtcacattaaaagcttggccttctgaatgataaatgtgctcccttcgaattaaaggggtctttagtcacgcacgcttttaatttggctctctttgagttttttttttttggcaaatttttaactctattaactaaatttttcatttcgcctaaataactcttgtttgtactactgtgtt

SEQ ID NO: 49757 - DNA, 568 bp, Gossypium hirsutum
  Clone ID: LIB3825-020-Q1-N6-H11
gcaatctcaagcttctttttctttttcattcttggaaatgttggtagtattacactattactattatcttttaagcttcacaatgaagttgcattttacgcaatgaaaggtaagccaagaaccgatacccgaaaatcattgcaaccaatgcccccacttccttcaacccactgtctgttttaatcccatttactgttggcataatgtcttggtattgtaccttgagaagaagcttgtatgtgtgataattgaaggacatgtatctgatccatgatatgaacactggtactttcttaacaaaatatccaccagccaacatgaaggtcatcacagttactgaagctaaagtagtagctctctttaagtccattagtgtagcaccaatggctagtccaagaccctgcaaaagccacccaatgtcatcccttgaagtttaaatgatatgttatggtttcattcggttgcaaatggacgtacctgggccgcaacgatgcagaggaaaactgtaagcatactgaggaagaaatgactagcacttagtcttagttctgccatgaaataaactact

SEQ ID NO: 49758 - DNA, 512 bp, Gossypium hirsutum
  Clone ID: LIB3825-021-Q1-N6-B4
aaaacaaaaaattaatttggaaaaaatggaaaacctaaccaaattaaaggggttatcacttcacccaacttaacccaaccggtttcactggaataaaaaaaaataaccttcaattcaaagggaaaatggggggaaaaataactaagagagagaagatggataaacgtaaaccaaaaaatacaggggcctttaacctaatagccttacataatagcaggggggaaaaggaatacaggggtaaaagcatagctcacttttatcacttaacctacactaaattttttaatcgggaaaaaggtgctttggcagggaatttaaacgggcgggatcttttggggggacgaagacgtatccggaacttggggtagaaacctttcccaaaagccatggtttacactaccggggaggggataaccgggcgccactggttttggcgggttttttgggggctgatcgggctccaggggaccagcatggggggggtttaggccaattccaggggggttgggggg

SEQ ID NO: 49759 - DNA, 551 bp, Gossypium hirsutum
  Clone ID: LIB3825-021-Q1-N6-E8
gacataaagaatttcaatgcaattacactttgtcaaccaaacacgttaaagaaattacaattcattgtaattacaatctcattcaattactctattctacccaaaaataccctatatgtttatgttataagaacaatgcaaggctgcaggagagcaaccagcttttgcattgctgtactacaaaataaactttggacccgatagatctatgaaccaaccattgcaataactccacggaagagcttccagttctgaaccaataagctaatgttagtatagggatggctgctccttgcactctggccatgctcagttcaaggatatcagtacattgaatgcggatgcggctctccaatccccaacttttttcctcaactttttctcaaaacttacaaagtttcaggctcacttctctcatctttgtagcctgatgcctttccacttcttccaattaaatatggctccggtgaggagctgttggcttgtgtttcaagaccatgataagatcgtgaaacgaaaaattcagctcccgatttcgctattcctttgac

SEQ ID NO: 49760 - DNA, 564 bp, Gossypium hirsutum
  Clone ID: LIB3825-021-Q1-N6-F1
gagatgaatacctatgtgaattctcattgatttttgctaaaattttagtcccaatacaatgaaacagcaaaatggctgaccatttttataatatatataaaactatgtttaatatgtatatatacaacaaaaaatggatcaaaatagacaattgccaaaagttagatagcagccaaaaaggtgaaagaagttggactgactgtagtttttatggaacaaaacttacaacactgtttgcatcgtcttggaagatctgagatgaatgtctctgaaactagaagaggcgaaaagtagtgcaattagactcaacacttcaactcgaaataatttcgttgctgactttgcgttgacgcctagaatcggacctcttatctcttccacgtcttggtaagatgttccggaatggagcttttagaataatattttcacctgaaatttcaactgcaaatttcccaggtggtttgttggccgaacgtagcggttgaggtggagggtaaacagtcggtggagccatatgcgctagaacatccttatggtatttctgaacgacaaagttacgccttt

SEQ ID NO: 49761 - DNA, 537 bp, Gossypium hirsutum
  Clone ID: LIB3825-021-Q1-N6-F11
attgattggccagacatcacatcaaaacttaaatctctattttaattggtcaacgttgcgcgatctgcacggttaatcagtttcccacttacaatattctaatataaaaacaataaaataaaatcacaattaagtccaccaaaatctgggaaagctccataaatctcgatccatgtcgaggctgaagtattagacacttgtcgccaccacagagttaaagcctccccgtttcgcttcaaagagtaagtaacatcacaatctctctcgagtttcaacatttattttaaaatttttattttaattgaattttttgggggtttatcaaaaaaaaaaagtctctttccttgcttcattccttgctctctcactctcttttttgtctgctgttctattttattgtcattttctcttctttttttttttcttgaaatgggttaaggaatatattttgtacttggtgtttcgtttagctgattatatatctgttctataacgagaggaatttctttttaagttgatgtttacatgcttttgata

SEQ ID NO: 49762 - DNA, 502 bp, Gossypium hirsutum
  Clone ID: LIB3825-021-Q1-N6-F12
ggggggaaattttaaaggaaaaataaaaatttaaaaccaaaaccaaaataaataaaccatagggaaaaacagacgggttgggggaacccccctagggctttccccatggggggggaaaaaaaaaaacaaggcattaaatgggggaacccgcccagggcctttttaacaggggaaaaacccattaaatgggggggtaaaacagggggattccatcccaagggggaaaaaaaaattttccttttccttttccccttaaatttagagaagggaaaaaccgggggcccaaccccaggagggtaaaatttttcggtaaaaaaaacacagctttagccccacccaaagggcctttaaattctaatttaaaaatcgggttaaaaaaagggggggaattcccccccggggggggggggggccctaaaacaggggcctttaaaacgggaaaaggaaaaagcaagcccccccacttgaaaatcggaagggggggcttcccaaccactggggc

SEQ ID NO: 49763 - DNA, 547 bp, Gossypium hirsutum
  Clone ID: LIB3825-021-Q1-N6-F5
aacaaagtcgagcaaatttgtagtcatatttaattaaaccactacttaagttcacaaaccaattatttataaggttctattgaaactacaaggacaacatcattcatcaaaatatacatcaactaaagcactacccttcacgatgaagaatcagacctgggcgtcgctgatcttgaaaacgatctggatgacgggcttgcacttctacttctagagtggctgtgaggggtagttttcttacgtggtgtaatgctcccccttgacctcctctctacaggtgatgcactgcgcgagtaactccgtcttgagctgctcctttgcttggggctcaaactacgtgagaagctcctcctagaacttttccttgaccgagatggtgtagcacttccagaagcagagcggtaacgataacttctacagtcagttgaatcataggaccggtcatgtcttctatagtatcgatcatcaggtgagtaggaacagtcccgccttctgtagtatcgatcgtcaggtgagtaggaacgatcccgccttctatagtatcgtt

SEQ ID NO: 49764 - DNA, 553 bp, Gossypium hirsutum
  Clone ID: LIB3825-021-Q1-N6-G4
attcaaaatccattggacagccataattgtattatagacattgttataataataacaaaacccttcttagtagtcattctggcccataaatataagcaaactggtaatgaaaacttcaaaatttcacttggatgatgatcttcgtatattacagacaactgaggcaaataagagaacttagaatacaaaaatatgcttcttacctgaagcatgaagatcattccgggaagcactctctaaaccttaaaaataaagaatgaaagtattgcccatgttggagatcagtctatttcttccgtttcttcttttttctgttttctgttttggtctctgttcttgcttctaaacgtttcgactgctgcgaacgaatctctagcaacttcgactttgcatctcggaataaagcatctgatcttgaagccatcaattgctttagatgatccattgctgcaaggttgaaaccaagagtatctttgcattccttaactcgtgcataaataatctcctttagaacagccaacactggtctggcagatggggtactaattaactg

SEQ ID NO: 49765 - DNA, 572 bp, Gossypium hirsutum
  Clone ID: LIB3825-021-Q1-N6-H4
agatgattctgcttcattattatatatgagtaaatttttgaacaactttacaacagctcaactttgcgtttagtcacattttgaaggatcagatcaagtgatgtatggtggatgttgaaatactagagagcttatgacaactagtctaatctgtagaactgattcacactttcacttttgctgctgcttctttgatttgttcaatggtgaaaacgccgaagaagtcatcatctcttacagcattgacgactgcataagcaacgtcatctacgctaactggtggaaccaagatcagatcagatgctggaagagcatttaaaggcttggtaaagttctccacagcactaaggattctttccagtggttccccaaccagatcaagtggaagctcaaaaccatccactcgcctctttccatatataaaccctggtcttaggacaacacccgagtttggatatttggatagtacttctgattcagctttcctctttcctgtgaagtatccagatgatagtaaaaatgatggtaggttgtaatcatgcactgagattaagataaactttggaatccca

SEQ ID NO: 49766 - DNA, 525 bp, Gossypium hirsutum
  Clone ID: LIB3825-021-Q1-N6-H6
aagtacatgttcagtctaatatccttgcccatagtacctaaaaaggcaaaaaaaaaaaaactggagagaaaaggggaaacaataataatgtctaaactccatatggatttacttatgttcatccaccgtcatcatcatgctttcctgcaaatttttttttaccgtgacctaaaaaataaggcttcaatgcaagctttctttggtgttctacaaacgggacaagaatcaagaaaagttgcacaatccttacacgaacaaaggtgtcggcaaggaaggaacaacactgacgaatttcgacaataacaacatttgcaaaccattggcgttttttcttcttgttcttcttggctttgattgctgctatcaaccgctgcgaaacttccgtttccctttgtttccataatcccttcgttgttgtcttcgcattcacagcaagactctgcgtcatcgacaccattgttaaaacgacaagaagcttgttcctcccgtacttgttcaagcctgttgtttaaagacacaaccatg

SEQ ID NO: 49767 - DNA, 473 bp, Gossypium hirsutum
  Clone ID: LIB3825-022-Q1-N6-A2
aaaaacgaaaaccggcggtttttttaaccagaaaggggggtgggaattggggtttattatgggggcccaagccccaaacagggggtcatccccccccccccaaatctggggcttcattctccccctgggggccgggaaaggacaaaaaatcccctggatccccaaaatggggcgggtcccatcccgggggggcttttcccttacccaaatgggggaagaggaaaattttaaaaaccggggggggcaaacccccttttttgaggggcaacgggttttgggccccccccatcatttttaatggccataggaaaccccgtttttttaacaaaaaaacgccttaaagtccccgcaaaaattggcccgcccaaacaattggggggggggggggcattttttaaaaacccagggaaccctgggggctttttatccccggggggttttccttttaaagcctttttaggcccccacggggg

SEQ ID NO: 49768 - DNA, 527 bp, Gossypium hirsutum
  Clone ID: LIB3825-022-Q1-N6-A6
aaaaaaaaaatgcaatgtactgggacatatatgaatcaacagttcggggatgaccaaaatccaaacaaaatctgcattggaaaaccactaaccatcaacttagtttgctagtcttccactactatatacatcagtagttatgtctaattgagttccaaaaggataactgaaaaaatgggtacaatcatatagatggattgggcacgtataccacctggccaggcaaatattaaacaagggtgttactgagtttacagggaaaacattgcatattcagtaagcaaatacctcagggttctaaaattcattatccaaagctattcttccttcttttctagttccagggctatctcattacggggggtaaatggaagcataaatgggggattgtactgggaaacttccaccgaagcaccttctttaactcgaaactccctgtcatttttcaaagcatctcttaatctcaattcccttcgtttaacttcttcatcagtgacaaaacctgaaaaacaacaactgcaactact

SEQ ID NO: 49769 - DNA, 187 bp, Gossypium hirsutum
  Clone ID: LIB3825-022-Q1-N6-B10
aaatcggaattccaacaagttattctactaaaaaccttccacggagtttggttaaatagacaggggcgggattcatagtaaagatgaaatacatccattatccttaaacttttcaaaatgaaacaaaaaatgggcaaaaaaaaaagaagcacattcttctttggtctcttcatcaggaagcatcaac

SEQ ID NO: 49770 - DNA, 566 bp, Gossypium hirsutum
  Clone ID: LIB3825-022-Q1-N6-B5
gttgaatgttttggctttgcaaaaattaatttggtaatgttaataagattaaacaacaaattaaaaccaaatcaaaaagttactgtgctcgccaattcataatcagaacacacataccttccttctgaaaggcatgaaaactctctgttttgggcctaatgcacgatggcgaaactaaattccgagtacctttgcagttgattgccaaggccttgtggtaaagaccagttagttcaatcccatcatacctcctcataaatatcttcatcttgggaaggaaatgacaagctcttcacatgagttgagctcaaatgttcggttccatccgcgatcatagaccgagctatcttctcgatttcgtcacgtagaacagggttgtctctcaagtattgtaatgctctatctctgccttgccccagcctatggtcaccatagctgtaccaagagcccttctttgtgacaacatccatcatttcagcacaatctaaaatgcatcccaatttgcttactccctctccgaatatgatttcaaattctgcttgcttgtatggccttgagaccttact

SEQ ID NO: 49771 - DNA, 552 bp, Gossypium hirsutum
  Clone ID: LIB3825-022-Q1-N6-B9
ccatacaagaaatctcttcagatataaagtacatacaacaaaatataatatcctttataaccaataaaacaataccaaaacagaaaacaataaatatgagcattcataaaacatatatgattcatgtgatacggcttcaggacacaccgggaatatctcctccaaacacttcatatccacaggagactaaggggaacccataaacatctatgtaccactacataatccaaaaagtggggggtcaagaagatcccaacaactccggcttccttttccagtactgttgaagcctctgcttggcatattctttgtagtcaaagtcaatttcattgacatattccgatattattccccacaccccccaagtgaggtgactcgctagagtatatttctcaacatcttgaagcagctgctgcacttcagagtctctaggtttcttacctgaagaattcaggtatacacgcagaaatcttaggcgctcttccaaacctatgaatgccacaggactaaaaaacgtttttaccattcagggaatatagcgcattttataaa

SEQ ID NO: 49772 - DNA, 528 bp, Gossypium hirsutum
  Clone ID: LIB3825-022-Q1-N6-C2
gaaaacaacaaagactgaaatttattgaggtcgtaacatgaatattttgtttgaatcccacataactctcattaccccaagctttttttcagcatcttcaaatgaggtacctgtggattcagatgggtagggtagcttcacccatctatcagcctttaggtcgaccacatcaacaacacacgcccctgattcctccaagctctttccccaccatttgccttgcacctgatgcacttttcctttgccaatctcctgacctcttccatctacaagcactataaactgacctggcttgcactgaacaaattctgcagcaccataatcaacaaattctggagccactgagttctcactggtgttcattcttgacatgcttcgagtgcctctggtattcgatggggtagtctcttgaccaggactatcaggagctcttaatgaatgaccttgttgtggcccaccctgctttcccgcaaaagcgttgtcaggctcgggagggggacgagcatccttacttaagcgtgccagcct

SEQ ID NO: 49773 - DNA, 517 bp, Gossypium hirsutum
  Clone ID: LIB3825-022-Q1-N6-D10
cggggaaaatagctgaaagaagaaattcgtaataatggccccaaaaaaggaataattttttttttagcgcctaattaaggggcggaccattaattctgaattaattatttttggggggggaaaattcaaattcaagcccgaccaaaaagcccatccttgtaaggggggggcgtcccaacagggggggttttgaccccataaacttccattttcctccgcagggcgtaaataatgagcggcccctgcccttccctgccttaaaccaacccgttttgggctcccccccccaatttctaaagcctaatcccgttcatttgctgcattttgaacacctttaccacattcggaaacccccctataataaacattacccccccacatatccctaaccacccccatttttttcccagtaattggaaaccatgacgaataaccccagtttgctcgcggccgttgaaaatagctcccaccatgaacaatacactgccaattaaaaacgggacggggacactttgtt

SEQ ID NO: 49774 - DNA, 522 bp, Gossypium hirsutum
  Clone ID: LIB3825-022-Q1-N6-E3
aaacaggggtctctgtttcattaaacgggtataaactacttataaaaccatgactctcccatcgatacagggaacaggcttgtgacatgtccctgttttggtaaaaaaaccaacatcttacttataaaaccctcaatttgagagatatacctggacgggtgaggcatcaacctataaaaaataaccccccgactgatccttgtgctcactttatttaaaacttcttatttttggctagaatttttttgccaaaatgattgctttttttaacatcaaactaacccttcattaatctatggttttgcttacaacggctcattgcaaactaaacatccgcattgatcttttactatacctgaacgtgaagattcatcctaaaactctctctttcccaacgagctctattgtttgatctaagaacatatggctactgaacctttctttaaacatgatcctaccctcttgctcatataatgacatccaaccatcctgcccatccactcaggccagtggcctccatac

SEQ ID NO: 49775 - DNA, 542 bp, Gossypium hirsutum
  Clone ID: LIB3825-022-Q1-N6-F1
acaaagttcaacatcatctgtattaatgaaagggttctggttattacttattacaatatttttctacttttaagggtgtaaaaaggcttatataaaacaaaccctcatcttgttgagagtttgctagacatcgtaagatgtctcacctgaaagtagacaccggcagtggcggcggtgactcaccaatcaaaagcttctcaaaggaggatttcggttacggtttgagattggcaaagagaatttcccattgcaagaaaatgatctcttcatgaaaattggcctaatttgcaaagatcttcttcctatggacgaattgcacattagtctcaataaaccttgattccctgcacctctccttggcacaattctcaagcttgattctttccctttacccaattcattatctaaattgcttccattagacccttctgctagaccattattagcaagtgcttggctgatctgtgaagctgccatggaatccaaagaaactgatcttcttacaggttgaagaaccccatcttcatcctctgtatttctct

SEQ ID NO: 49776 - DNA, 564 bp, Gossypium hirsutum
  Clone ID: LIB3825-022-Q1-N6-G5
aagtccacctctaatatttctagaagaaaattgttcttttcagctttttctacaagttgcactgaacctaatattcagtccccttcatttttccttgcatatacataaaagaagagaaaagaaataagcaaaatcttatacatctttaattgcattttctatcttaagttgtctctatagttgcttcttcttctattagacacaatggttatcctttgatcctgaagcatgttcatgtcaggggcaagcaaccgtgtataacggtcaaaatacagaagttgtttcattagaagtgcaaactccctcggaaatcgcagtccatatgactcactcacccgaaccacatcaagaaaaagtgcattcatctgtctctcatcaacaattatatttgcagagacagcagttgcatttgtatttgtccctcgggcagtggcgacgactacctctgtatcaagttcctgtatagatgaaaatatcttttccaaatctcttgcaaaggccttggagtcaatattctgattggttgcacccatttcaatcaaggcagatgccattgattcatac

SEQ ID NO: 49777 - DNA, 567 bp, Gossypium hirsutum
  Clone ID: LIB3825-022-Q1-N6-G9
cacgtaaattaagtatataagttcattgaacaaaaaagaacacgataggtttacagccgttttaccaacacaatgatacagctgcttacaaacaaacagacaggcctccgccatttacaaacagaaacatcaaagaacacaaacaagacaacataaatactatcaatggagggaacagcaattttagaaacacaaaagtcggtcgccaatcctcccaatattaactcttactacgggtattctggaactgcaactttggacgactgaaaactatggaactgtctgcggtaccaatggcttgaaggagatttctgcagttgttcgagaactcagctaattcttctgcattcacaagcacgacccaccaatgtctttgaatctgtttctcccccatagctagaaaagggtttctcatcaagtcaatagatcatctggaggtttcactgtacagtagcctcttatacaccaaaagcagcgacattggtaccatatgtccaagaaattagatattacctcggtcaactgaattgtaatgcaagaaagatacctaatagaagggggtttcta

SEQ ID NO: 49778 - DNA, 554 bp, Gossypium hirsutum
  Clone ID: LIB3825-022-Q1-N6-H11
ataggcttacttctttgattactgatatttccaatgacgaaaaaacgaccataaaatggctggtttagtctttagaatcttatcatatgtaacttcaatcatacttgcccccttgactgagaggaatgcttataatgtagtctttgatggttttggataatgttctgtgaagttggcctcaggtgccgggcaacgtgctgctcgtgctagaaaggataatgaaggcacaaacaactgaaagtgagaacacagatacccaggtattttctgtgtacatttccattgcatccgtaaacgagaaccgagtgcggttttcagcccagtttcggattcggtctgcctctgccgcatataatgcccttccctgttcatcgaaccagcgaccttgtcgcaaccaggcagtgattaaagccaatagtatccgaggtggggtcaagtagttgatggccttccctgcccctttcacaacccgcattcgtggaactagacttcgagcaacagtctccggaagctcacaaatgagattaaacatttgtttatttttcaaggttgac

SEQ ID NO: 49779 - DNA, 560 bp, Gossypium hirsutum
  Clone ID: LIB3825-022-Q1-N6-H2
aacattcaaattatttatttattttaaataaaagtgaaattaacattaaaatcttactaactcattcatagagatacaagcaatccaggaatttgttcttcccttaaattaattccttggataagccatcatcaacatactgttaggaggaactaaaacaagtatcatatagctttccctgcaaggaatctgctataaaaatcgaatgcctcttgaggtttgtattctggaacagtatgtcctgctccctttatggttaaaaaggtcaggttgttcgcataaccttgtaaatacccagcaacttgtccattggacatccatggcctccattcatctactatctcgtatccaatggatctcgtccaggcttggctcccagtgaatggaacacacatatcatgatccccactgtatatgagtgctcgatacccaccagaagtaagattcttgtgatacatgatcatgcttccagcatcgtgatcatacaagatcttgtccgtgcataactcccatttgccgattgcagtctcctcttcagcatgaattgccttcctaactgc

SEQ ID NO: 49780 - DNA, 385 bp, Gossypium hirsutum
  unsure (1)..(385): unsure at all n locations
  Clone ID: LIB3825-023-Q6-K6-A4
cggtccggcctcccggtcgaccacgcgttcgcttttgcatccaacttcaccttccttcttatctttctcgaaaaagcaaattttaagattgtcttaaagaagtgtatatctatctatctatatatatatatattagaaatgggtaaacctccaggtggacaaaaatggttgaaaaggtccatggactgagaaagatcaaaattgatgttatattaaaacatggctgggagaggcgaccctcccaaaagcagggttgaagagatgggaagagtgcggcttgctggactaattacttaggcctgattaagagggggagntctcatcaagagatgagtaagtatatacatacacagggtaggaaacagtggcaccttgttctttctgc

SEQ ID NO: 49781 - DNA, 586 bp, Gossypium hirsutum
  Clone ID: LIB3825-023-Q6-K6-C6
tcgctcgaaatacggctctcgtgtcccggcttctgattcggccgtccttacccttcgctgcgaccgtctcaatcgggaatcatccgaggttacttatttaagcaccgatagcgtccgtgtcacgggagggtttgaattcgaggcttacgaggatgaaaagaagtattgttgtgtggctcgttggaaaggatggaaggagagtggagcatggattgttatctggcggcagcggctaaggaacctggaaattcagctttttttaagcccaagatgggtgtttcagcgccgagtattgaagtttatattgccgggtgttgtgctggcaggcccgtgatattgaccaagacaatacttgggagccctaggaggaaaggagcatcgaggcttaaatggatgttggatgcaattcctgaggacgaggaattcgggaaagggaatgataagggtggcaatgggtttatcagacaccggaaattgcaggttacagatgccgaagtcgaagattacgactcggatggtaaaattggacttagtcactatgctgaagaaatgtatgctggcgaagatggccaactttcatggttta

SEQ ID NO: 49782 - DNA, 542 bp, Gossypium hirsutum
  Clone ID: LIB3825-023-Q6-K6-D2
atacgacgacaggcgggcggtgaccaggatggcaggcttacgcacacgagcatcacgacctactcaatattttattgtggccgcggagttcactgaacctgaacgcagatttacatcggtgggacatgaaaaaacaatgtggtgaccaaactcatttgtgtggccatacattcacctttgagaaagagaatgaataacgagaaggcccggacggtgctccctttccctgaaacaagcaatctgcatgatttaatggaacggacgctgtacatttgcaggaaagcgcgtcatggccgttgcagtgttactgcgcaatcaacaacattacactatgcactgccgttgatccgctcattactgtatgatgcgtgcctttctggaaaccttacggaacatgtgcacgtaaagctatagatcaggtgctgcctttagggttgcgattggacggttaccggcaccatgcacacgaagaactccatcaggcagagggtaaacgtacctgggccataaaacatgatagacagcatgaagcgctgagacac

SEQ ID NO: 49783 - DNA, 614 bp, Gossypium hirsutum
  Clone ID: LIB3825-023-Q6-K6-D3
cccggttcgacccagctttcggctttagctaatttcttacccacccattctccgaattgtcattccgtggggagaccaccgaatgctaaacagcatttttgccctgaataagcctgtaacgaatagggctgtaatagcttattacagccaaccaaacaatgttttaataatgggcccactgaattgagctgtaatgcataggtattacagccaaccaaacatactgtaagtttttgctttcatatatatctgaggaagacatatgacaaccgctgctagacccacatggcagcttgccaaaggtgaaaacgaataaggtgatactcggatttttggcccatctcagaagtactcatccatggaccttgctgctcatactactctaatactctaaagcatagaaaagatgggcaggacacacaagacgagttgcagaagagaaacctccgtgctgagcttgaagagcgtgaacggagacatttctcatcaaaggacaaatccaagcatgctactaactgttcttcgtatattgcatgaatttttttctattgatatggtttccaaaggttacgggttgcgcaaaggagctcatgatttgatgattcatcttgttc

SEQ ID NO: 49784 - DNA, 483 bp, Gossypium hirsutum
  unsure (1)..(483): unsure at all n locations
  Clone ID: LIB3825-023-Q6-K6-F2
aggacaaagaaggaagcccacgcagaccaacaaagagggaggggggggggaaaacacnnngaagaggaagaacncnnngccgananaananccagaaggagncnacncnccannnggnncnccgccnncgggggggggggggggggggngnaaagacncnnaccggaaagaccancacnggggagggggaaagnnnccgaaccanngacaaggggaaggcaaaganccaagacaaggagggnanccccccagaccagcaaaggcncancnnngcnggcaagcagcncgaagaagggaggacannggccgacnacaananccaaaaggagncnacccnncannnggngnngcggcngcgnggggggangcagancnnngnnaagacncnnacnggaaagacnancacncnagagggggaaagggcagacaccanngacaancnaaaggcaaagaaacaagacaaggaagggancccaccagacc

SEQ ID NO: 49785 - DNA, 602 bp, Gossypium hirsutum
  unsure (1)..(602): unsure at all n locations
  Clone ID: LIB3825-024-Q6-K6-B4
agcacaccaacaaanaatatcttgcaaagctcaacatgcaaaccttacatgtcgttttgtactgcacctgaaatgttgtctttaatggtatccaattactaaaaaccaagaaattgagaatttatcctttgcatcactatagccactgcctgcctcaaccatacacccagataaaatattatcattttgcattttaactgtagcaacatgaatcacgttacattcctggagattgtttagttgcttaatatgtttataaacaatacataatgattaaataatcattagtttgttgcatatatttcaaaagtcttttaatttacgtgtagtttaaatggctttatgttcctaaggttaatggtgggcgagaagggcgatcaattggagcttacgagcttgcgaaagttgttgaagaactgggagctggagaaatactattgaactgcattgattgcgacggtcaaggaaaagggtttgatattgatttaataaagctgatatctgatgctgtcagcatccctgtaattgcaagtagcggtgctggtgctgttgaacacttctcagaggtattcatgaaaacaaatgcatcagctgctcttgct

SEQ ID NO: 49786 - DNA, 618 bp, Gossypium hirsutum
  unsure (1)..(618): unsure at all n locations
  Clone ID: LIB3825-024-Q6-K6-C2
cccggtttgacccagcgtttttggncgcgtgggtgactccggtcatgcgtgaatctcttcatctcccaggccccgttctggccatttcgatccaacttcgttaaagactccagcttgatgaagcaacctgaacaagtgagaaggggaaggggaaggtaaggaactcaaagtattccagcttgatgaagcaacctgaatgcggggggggagaaggggaaggggaaggggaagataaggaactcgaagaggatgatatcagccaagactccgattgtttctccagtttatccaattctaaaccggtaaaatcttggcattttgtacgcttggagaagacatgtcagcgtaatgagcaggtagctttgttgttaaaggtgcttaaatgtgataagtctgtaatcccatctatatatgaattccgtagcctcttgtcttttcatgcttacttgacgttggatgaggctgagaacttaagtgaattagaagaagtcgaggaaattggtttgccttcaatgtcggtgcttgctaggaaagcaaaacgaatcaggcagcattctctcgcagcggagacaaaacaaagagaaatggaggtacaatgaagatttgcattacccaaca

SEQ ID NO: 49787 - DNA, 605 bp, Gossypium hirsutum
  unsure (1)..(605): unsure at all n locations
  Clone ID: LIB3825-024-Q6-K6-E4
ctggnnatcagtcttacnntctggtgggtgtgaagttcattattgtnnctggtgttaccttattatanncgtttccttacagcanntgagcatnncaccttggnnacggcnnctatcaatcannaaactttnnggaagccttcctgnnatggattttctatttacttttttgggaatgtgttntgatccccggcaaatgcgtgtttctgtacagggaagtggattatatataaacagagaaaggggttatagcatcgatcctatacacatagatgatcctctttttccaacaaataatgtggggagaaattgcttccggatacatcagtgtatcaaggcattttcagaagcctattctattctggaggatgagcttagctgcctatcaaataacaccacttcatcttctaacccaccatgcagattgcttcaaaaaatcatcccaagtatcactttatcatagtggcttattttgagcatctttctcattcagaaggatgccaaactgaatattctgtgaagttagttttgagctcagctgattgtggtggtgccattggccacggttagcatctgcactatgttcattgtgtcaaatggcattg

SEQ ID NO: 49788 - DNA, 588 bp, Gossypium hirsutum
  unsure (1)..(588): unsure at all n locations
  Clone ID: LIB3825-024-Q6-K6-F3
tttggtttngactctacgagtctatgtgtggggtgggggagatccgtgtatccaataagtggtgatagagtccgctttaagtttcgtaaactcaagagccaatttatcatatactgtgactaaatgtgattgatatgtgttggaatatatgtatatatgtattcctaaacgtttgtatagatggggggtgaaaaaatacatggaatataactaaatatgtgaattatgacacttggttaatgatgctttgggaatatgttgtatgtggtttggttgatgcatgacgacttgtttgtgtagtggttgttctaggcattcactgagcttgttaagctcatccactccattttatcctttgcaaagtagttgcgttcttagtgtgagcggtgtggctgtcgagggatcgatccaaacgattctttattcattatagtaggtgttttgcttattctagttctagggaataaaaaggcaatgtggtagacatttatatcggttttgttaagacgtatttggaattatttgtatattgtgtatgtttggaagcttgtgaacttggacatggtgttgggtttattgtttagacat

SEQ ID NO: 49789 - DNA, 429 bp, Gossypium hirsutum
  Clone ID: LIB3825-024-Q6-K6-G3
gtcagcctaagaggtggctttggttcttaaagcgctatatgacaatgacatcttggtagatgagttcatcatggaatggtaatcagtagggtgttgccggaggtaataagagttctcagatatggaagaactgcaagcccttcatcaaatggctacagaatgccgagtctgagacaggaggtaggagtgactctaaagctattgctatatgcgattattgtgccttttatggcagacgtgctatttatagcgcaataattttctctaccgtggctatagttctcaccgtgagggacttggccgcgttctttaaataaaatagagagctacgcctggcgtacatgctcgctgttgtgtagcgctttctatggtttttgttgtctgtattgaggtcgggtatcggtgtaggaattattactggttgtgctt

SEQ ID NO: 49790 - DNA, 601 bp, Gossypium hirsutum
  unsure (1)..(601): unsure at all n locations
  Clone ID: LIB3825-024-Q6-K6-G4
cacgaaaggactagcanaaaaggattctatagctttagcagtgcagaactaaaaggttcgctgaaggcttggttacaggccgtgaatcttcatctcgccgcaatcctattgaaatcttgaagcggctacaaagagaatcattttcagacttgatgaaactccgagacagacaagacaaagtggaacgtttattttcattttacaaatcatccaaggggaacccattccaagaatcaagtaccgttttgagaggggaagttgattttctcggagctgtattgcttatgtccagggttgatgaggaacactggggtgggattggtcgggcaggaattagaactggggttgattccaggtttagatttgaaacagctgttggggataaaggttctgttgggattgaattcgtggctaatcagaaaagggttgcgagtaatgatggtgatgtacttgaaactccactttccctatctaagctgttttataaagcaaatgctgctaatgggttttccgccattgcaattccaattggagctcangttaaagatctagatgtcgcctcggactattcccttcangaggaaaaggcctcactgattta

SEQ ID NO: 49791 - DNA, 487 bp, Gossypium hirsutum
  unsure (1)..(487): unsure at all n locations
  Clone ID: LIB3825-025-Q6-K6-A1
cggccgcgtgggttacagttggccagcattgcagaaacacaagcaaagacggactcactatcatttgttcgaaaagaggcggaaatgtgttcttgcatggtcactccaactggctccagactgtacctgcgaaacccgagggaattttgttcaagttcgttcccattacttctcttctgactgggattccaggaagcgggtatctcagtcatgcaatcaacttgtatcttcgttacaagcctgctccggaggatttgcggtttttcttggagtttcaagttccactacagtgggcccctatgttttgtgagctgcctcttaggcatcataggaaaaaagcttcttgcccttccctgcaatttgctntcttgggtcctaagatacaagtcagctccacgcaggtttcaagtgatctaaaacccgctgttggcctccgactgtacttagaaagaaagaaatgcaacaaggctggcaatacacgtgcagc

SEQ ID NO: 49792 - DNA, 569 bp, Gossypium hirsutum
  unsure (1)..(569): unsure at all n locations
  Clone ID: LIB3825-025-Q6-K6-A4
ctctttgtattgcagtctgccaaacgnaacaatttaccactctcccaaaaaggaaattcttcttcagtccagtgatagtattatagtggagagtcgaaaagtgtttggtttggttaacatgggtccatttacactggctgttgacaccgagagctcttctctagtatcttctgatgtatcaaataggaagattaaaaacttacagctgcaaacaaagaagtgctttgcatcagtcagcatggaagaggaaaagccttttgattttcttcgtattttatttgagggaatcatagctggaggtacagctggtgttgtggttgaaactgctttatacccaattgatacaataaagacacggctgcaggcagctcgcggtggaggtaaaatagttttgaaggggctttattctggattagctggtaatcttgctggtgtcctaccggcttctgctgtatttgtaggtgtgtatgaacctactaagcagaaactattgaagcttttcccagaaaatcttagtgccgttgctcacttgactgcaggagccataggaggaattgccgcttcactta

SEQ ID NO: 49793 - DNA, 615 bp, Gossypium hirsutum
  unsure (1)..(615): unsure at all n locations
  Clone ID: LIB3825-025-Q6-K6-B1
cggnnacgcgtggggaaaaatcgggatgttcgtgaagaaacggtgctttgggttttcacttgaagataattttgttgatggtggtgctaagcaatgggccatagttaactcctgatcagtgattttttgtttgtttgttcatttatgagccaaattggatcatctctttacttgcaaatgggcaacaagcaccggagcaatggtggtttccgatatcaaacaaaattccaagtagcaattgcaataaattgtggaagcataggagggaccattggaagaatcagatgaatggagtcatgactggaatttattgaacaccaggcaatggacaaaacatgtcccccccttgacagctggtattttaaccgatgaagaagatgcactcaaaggatctaaatatagtagtgggacacaataatttccttggaataaagctaaaatatattcacaacagaaacagaataaagagttcccttcaatccaagacacaaaatgaacaagtacaatataggagagaggactgtagatattggattaaattttaaaaaaagtctccaactccagctgagctgagttttaattaattaaaagaagtaagaggttgtgatttctggt

SEQ ID NO: 49794 - DNA, 582 bp, Gossypium hirsutum
  Clone ID: LIB3825-025-Q6-K6-B5
attttgacgaaggtagccaacacagtgttcccgtaacttgtccagtggaccaaaacacttcacagcttttggctaatcagaaactgtttcttaatggttttcttggaaatgtttttatggctaaatcttacaatctctcgatggatattgattggatggaatttgtatgccctaactgtttatcgcttcttggagcttatcctttttataatggtgctgcacccattgatggtggagttcgactctttaaatgctacgtttccacttcttcatctgctggtggatcaggggacttattcagaaaatatagcttggaaagaatgttcactaatcagctagtggagaatgcaaaagatgaattatcatttcgaactttgattagagattttaaaaccaagtctccattgttgcaaattgttctgctaaatccaaactcttggtgctgttctggttattgtttggacacaactagtgcagctgaatctattctgaagttagatttactccctattatcaaggtgatcttttctgattgtggtgaaactcctgcatctcagccgagggtacatgaagattggataa

SEQ ID NO: 49795 - DNA, 603 bp, Gossypium hirsutum
  Clone ID: LIB3825-025-Q6-K6-C2
aaatatcaaaatttcttggaacatacgattttgatagcttgccttttgactggggagaagactacaagctcccaaatatccccgagagagatcttgtcgtatatgaaatgaatgttcgtgcatttacagctgacgaatctagttgcttggatcaagatatacggggcacttatgctggtctgatagagaagatcccacaccttctagaacttggaatcaatgcagtggagttgcttcctgtctttgagtttgacgagttcgagtttcaaaggcgccccaatcccagagatcacatgatcaatacatggggttactcgacgataaatttctttgctcctatgagtcgttatggtagtggtggtggaggagctgttagtgcttctcgggagttcaaagaaatggttaaagccttgcatggggctggaattgaggtgattttggatgttgtttataatcacactaatgaagctgatgataagcatccttataccacttcatttcgtggcatagataacaaggtttattacatggtggacttaaacaacgaaggtcaactgctaaacttctctggctgtgggaatacattcaactgcaatcatcctg

SEQ ID NO: 49796 - DNA, 323 bp, Gossypium hirsutum
  Clone ID: LIB3825-025-Q6-K6-D3
gatacatatcatgtttcgggggatgaagtgataactaataggaccacaccgaccgaacttaccaatattggcgctgtcagagtggaaaatgggactcacgctgaatcggcacattatactgcgcagctgagattggttacaacgcttctataacaatacacttcgccatattcctaccgcccgataatattgataacttacatgatctttatctgcacattgggcgcatatcacggtccagatgaagaaaagagtgctgcctttaatgatccaatgaattgtttttaccactctagtaccacagactgctcgaaaccggatga

SEQ ID NO: 49797 - DNA, 588 bp, Gossypium hirsutum
  Clone ID: LIB3825-025-Q6-K6-F2
tcgtttcttactaaatcgaagatttgttttttttttgagtttttatagattttgtttgatttcgagatggttaattctagaaacggggaatttgttgacgaccgcgtggatcgagacgacgacgaattaatcggttcgtcggacgcatcttcgtccatgaacggcgtcgttgataccttgagggttggatctggaacaacgtcgggacagaacggtgaggtgaggaacgaaatcggacttacggaacggttaacggacatattcgtagaggaaaacaatggagatttgttgcttcaacaaagcgatcgagaagatagggttctgcaatggttacaagctttggatatgcaagtaatcggcgcttgtcgaaccgatgaaaggttaaagcctttgttgaaagtcaatgtttcgaacggcgtagctgaggatcgattgttagctcatttgagtcagcattttgagccatcggaagttggtatgctggcgaggtgcttttgtatacctttggtttcaattcgagtggggaagattaacaaacaaggaacctgttttcagcctactgctgcaaggtaaagtgggcgtattcta

SEQ ID NO: 49798 - DNA, 573 bp, Gossypium hirsutum
  unsure (1)..(573): unsure at all n locations
  Clone ID: LIB3825-025-Q6-K6-F3
ttgtnagtttcccgtgtgccatgaactggtggggggtaggggactggttttgactgaggatttaagttaaggttttgggtgtgtgtatatgggtcctgacttgaatctgaccgataaagcccttcgatagtggtcttcgactgacaaggaaagctctgcccgaaataaagaaaacagggggaggcaaggaaacattggtttagaggttgatcttattgaatgcatgaattattttgagtctgagatggttgatgttgaatgccaggatgctactgagttttcgagttctttcaccgacacaatatctgttgatgaggatggttcgattgtaaatgatgaagtgagaatcatttctgccgaccttgaggctgtttggatcgttatctgatggttggaatggacattttcagatggggtactcttttgctttaaattcttgtttcctgtttgtattgatttttaaaaatgcactactgtgggagtgtaaacgagaaacttgtgcttgcaagtttcttaggttgtaatcactgatgagttgcttgacttgagtagcataggagctcactcaatctt

SEQ ID NO: 49799 - DNA, 584 bp, Gossypium hirsutum
  Clone ID: LIB3825-025-Q6-K6-F5
aaaagacgaatttattcacctccgagtgcaagccgtagggcaaacgagtaaaaaaaatcgaaaacaaaagaaagaaacaagaggaagatgatggcgaaatgctctgttgctccttccgttgaacctatgtttcagaccttcaatggccttcaacaccttgccgaaacgcgtcgtttcaaggcttggttcttggatcaatttggtgtccttcatgatggcaagcaaccttacccaggcgcgatttcaacattggaaaagctggcaacaactggtgccaagatggtgatcataagtaattcttcaagacgtgcatcaacaacaatagagaaattgaagaacctaggctttgatccttctctctttgtgggagccatcactagcggagaattaacacatcagtacttgcaaaggagggacaatgcttggtttgctgctctcggaaggtcttgcattcatatgacctggagtgacaggggtgctatatctcttgagggtttgggcttacaagttattgagaatgctgaagaagctgattttatcttagcccatggcaccgaagccttggggcttccttcaggtttggt

SEQ ID NO: 49800 - DNA, 589 bp, Gossypium hirsutum
  Clone ID: LIB3825-025-Q6-K6-G6
aaggatcttgcaaaaccttgcttgaggcagccttagagggcccagacgaggatgccgaccaggaccaagaggtcaaggaagaggaccagaagtctctctccgttgggataattggcgcccctaatgctggaaagtcagcccttactaattttatggttgggactaaggttgctgctgtgtcacggaagacaaacacaaccacacatgaagttttaggggtcatgactaaaggggatacccaaatttgcttttttgatacccctggactcatgttaaatagaagtggatatcttcacaaagatatgaaggttcgcgttgagagtgcctggagttcagttaatctctatgatgtgctcatggttatttttgatgtccataggcatcttacaaagcctgattcaagggtgataagattaatcaaacgtatgggagaagaaccgaatcctaaacaaatacggattttatgcatgaataaggtagatttgatagagaaaaagaaggaattgttgaaggttgctgagcagttcaaagatcttcctggctatggaaggattttcatgatctcaggattgaagggctctggagtaga

SEQ ID NO: 49801 - DNA, 545 bp, Gossypium hirsutum
  Clone ID: LIB3825-026-Q6-K6-C2
ctatttcattatgtttattctaatcatgctgagatttgattcatttttctatcgaccttcctcttcttcttttttcgtttcttagatcgtttctatggtttagggtttcttgttctttttaataatttatcgatctgtaaagttcgattttgagtttcgctatgtctttttgtggggcggggtttcagtttctaatttgaaattatttctttaaaagaatcaatttttcaatggtcattttatttctagcattcgattcgtaaaaatgattgtttgatctgtagatcgtctttagaattaaatatgttgggaataggtttcttttgttcatgtgtcggcgtcaattttgtagatttctttgcagtttcaagatctagggttaggtttttctgaaatttggggcttttggttttttcggttaattaacttacgggagggtcaatttgcctctcacatggcgatcttaatcctttgttttcttgctgctttcgacctgctttccccattgtggcccgatccgttcttttcgtggcgggccctttttt

SEQ ID NO: 49802 - DNA, 567 bp, Gossypium hirsutum
  unsure (1)..(567): unsure at all n locations
  Clone ID: LIB3825-026-Q6-K6-C6
ggttgttgtggtctngatttttaagatttgtttattcgattgctttgtctttaagatttgtatagggtggtgtttttgatgaacgatccattgttgtgttctttcagattaatggataaaaacaagctgggttctttctcatttgaagttaagttttgttttttttttatgtgtggataaaagacagtttctttagtttcttttactgctgatttttttttcttttgctgattgttttgtttttgttccattactgggtttttggtttaatttgcatattttagtgcaatactgagatttttgggtttgggagagtgtttccggtaattcaaataccaaaacagaagtgaatatatagttgaaaagcttgcccctttttcttgtttggtgggtgagaaaatcaaggaaaatgaaaggaaaatctgggattccagggaatttctatgtattgaacactggagctaaaatccctgccattgggcttggaacatggcagagtggaggagacctttgtgttgatgctgttaaaacagcattgtcggtcggttaccgacacatagattgtgc

SEQ ID NO: 49803 - DNA, 173 bp, Gossypium hirsutum
  Clone ID: LIB3825-026-Q6-K6-D2
gttaataaactgctggtgcaccgatctcgccggtgccatgcatgacactctcagtgcctgcctatggatccaacacatgtgtagaagaaaccgaattttaatgtagtgtctcgtagaatctacaatcatctttctctgagcaaatcactagctatgacaataactcaaaactc

SEQ ID NO: 49804 - DNA, 584 bp, Gossypium hirsutum
  Clone ID: LIB3825-026-Q6-K6-H5
caattttcaaccacaattaagacggttcgtagtgataatgggactgaattttttaaaaatgaatgcaatgagttttttcatatgaatggcattcttcatcaaagttcctgtgtttatactcctcaacagaatggagttgcggaacgaaaacatcgccatttgctagaagtagctcggtcattaaaattccagtctcacatgcctagtaaattttggggtgaatgcattctcactgcttgttttttaattaattgtctacctacccctgttttaaattggaaatgtccttttgaactcttgcataaagttgcccctgatttttctcggttgaaagtttttggttacttagcctatgctacaattccaaactaccatgacaaattttcccataaggttgttccatctgtttttatgggatattcacctgtacagaaaggttacttgttatttagtcttgaatcaaaaaaaaattttgttaaccgtgatgttgtttttcatgagactatatttccttttgcatttcctaatcaacaatttttaccctttcctgatactgataattcagttttccttcaccttgaacc

SEQ ID NO: 49805 - DNA, 644 bp, Gossypium hirsutum
  Clone ID: LIB3825-031-Q6-K6-A2
tggtttcgccttcagttttggtgatgtctcgtctttcacgccgaaaaatatggttcttacgatggttttaacaaagggtttcaatcatctccacaacacgtttcgatgtgtttagatggtggtgatgtcttcagctccacctttcttgggctgcaaggtactggatacggaaagggtgattcatttgggtcttatagtattggttacaatcagtccaatgatttgtcttcagtaccgagttggcatgataaccaaagaaactatcttttggagcagagaatggaacagagtaggggattggataatagggggatgttgctgcagggtgcttttaccactaggccctacattggtaacccttttgtttgttcccagcaatgtggaattgatggtaatggaggaagagctgccattgattcattgagttctcccgggttcttgcacagtaagattcctcttgaggagaatgtaatggaggatcatagtgttatcattcaaggaagaggtttgaaatatgatatcaagaacaagggctttgattcgttcaaatgttgtaagaaaaagactctcaaggagtttggattgcaaaacctgcaagagaaaactctaaacttgataaaagacatggagaaaatgtgatactg

SEQ ID NO: 49806 - DNA, 529 bp, Gossypium hirsutum
  Clone ID: LIB3825-031-Q6-K6-B2
cccctgccttccatggctcgtgggtcacggtatttcctatatacatgctggacgcttgggaaagctagtggttatgaaattactttggctattgctgctaaaggcattggcatggcctacaaggaggtaatggaccacttaaatgaagagctagtgcatcaccgctacaatacaagactgatactgccggcggtagcgtactaaccgatcatacagaagtctcctgcatattatgtggaactgtgaaacacaatcttgatctcttaaacaccatcactttatgctgaacatgcctaaactctaaagaaaacaaacctaatagatctattattgaggaaacatttatacatgtattctaaagataaattagctgttgaaaactttcaggtccgaccccagcaacaagctagagacatgttaaagcattatgataggagacaaaacaaactggatgtctcatgaaggaaatgtctactctggctgacaagaactgatagcacttattcagaaaacaatcaacttattattc

SEQ ID NO: 49807 - DNA, 651 bp, Gossypium hirsutum
  unsure (1)..(651): unsure at all n locations
  Clone ID: LIB3825-031-Q6-K6-C1
ggggnaactctctcaggtgtccatgatcttcgtgaaaaatatctggaacaatgaatgcacagccaataaatgctgatccacgaaaacaaaaagtgaaggctgcccaaccagccaggaaaagcgtagcggttgaaactcctgaactagatcccaggagggctgcaaatactccagcaagaaagaggggtaagcaaagcgctgatacatccgtggagggcttcctccagtccttgggtcttgaaaaatatgcaatcacctttcaagctgaggaagttgatatgactgcacttgtacacatgacagatggggacctaaaagctttaggcataccaatggtaactttaaactgaaccctcaaatatggatgcagtcatgcgattacattacatgccctcgttgttttatctagttttcaagtttgtgatgatccaaatgttttcctcttttgaagagccaagccataccttaactttgcaagaatgtcctttttcttctggacctagaaaatccgtttattttggtcacttttctttaatttcttctatgtgcatttgatcatttatgggtattatttgaaattaacagtttatatgccagctaatgctgatctcttcaaagaaactggaatttttggaacgtccagataattag

SEQ ID NO: 49808 - DNA, 192 bp, Gossypium hirsutum
  Clone ID: LIB3825-031-Q6-K6-F2
tgtacccgccctttaaccgcgcattatgcgctggttacgtgctggttacccgcatcattacccatacacttaccagccccttatttccctctcttttctttttttttcgtcactttctccgcattttcgccggattttctcaataagctgtatattttaggcttcctttatagtgcttatctagagctttac

SEQ ID NO: 49809 - DNA, 616 bp, Gossypium hirsutum
  Clone ID: LIB3825-032-Q6-K6-A2
gtgtcctaattctgggtttcccttgttgccatcatatcttcatgcttgtttcttcttgtaggttaagtagtggtcttctgcttgttttgatttgaaagtttttggatctgatgattttaacccacgtctgctgagccatatatatatgtgtgtgtcaaataaggttgagagattcagtgtggggggcgtaactagggtttctttttccttctttttggccattttttctaggtttaggcaaagaaggagatatttattgttggttaaaggtgagacaaaggggtggagctccttgaagtccaatagagggtcttgcagggtatatagagctgctgagctatggatccctaaagctctatcccatatatataacttctaaaagaagggatagacttttggcttgcatatctcaggagctgcattaccaaaaatgtcagatccttgtttggattgaagggagctctacacttagtcactgatctttgtttttagtagctatgatctgatttaactttatagaacccgttcatggttttgctttgaatattgcaagttgattacttgattttcttttttgaagtttatgcaggaggagggtgaagacattgaaaggggc

SEQ ID NO: 49810 - DNA, 551 bp, Gossypium hirsutum
  Clone ID: LIB3825-032-Q6-K6-F1
gatctagcacagcggacggtctatatgagaacaaccatagacttacgcacgcatgcatacgactagatattttatatatagagctaacataaaattaattgactggccgtcgacaaacaacggactgacaaaaaaatagcctgtacccaactaacttaatttgcttgacatacatctttctttagggggggggagaaataacaagacagcaccgatcgatcttcctaacaaacagtcacgcagactggataatgaaaggcaccctgtctggacccattaattaagcgcggtgtggggggtacttacacgcagaccgatccattcactagccagctacctaccgctcgtttctttttctttctttcctttctttctacgcacgtcggctttctctgccaagctatatataaatggctggctttatggatgcgatctattgattgactgaccctacctccaaaacaactaacttaagtagagggatgacgtacggagcgatccatctgcattgatagacggtcgttcttcgtcggacgagggcacccacttaa

SEQ ID NO: 49811 - DNA, 657 bp, Gossypium hirsutum
  Clone ID: LIB3825-032-Q6-K6-F2
gcgacgccagcaccaacctcaccacacctctctctgtctcgaaccctaagctctctgtttggcttccaatggattctgtccaaacaaatcttaatgatccccaatctttttctgcgcaaaccctaaattcatacaaccaaaaccctcctccgcctccatctcagacattcgactccgatcctggccttgaacacaacaacgccaacaacggtgccctgtctaatcctgatgcccattccaatactattaacaatacttattcatttaaacccgacatccacaagcctctactgtcggaaaatgggttaactaacacccatagcggtaccacagacaaggattattctggcggggaagaggagaccaccagcagaaggcgaaggaggagccgctgggacccgccctccaattccaacaaccaccagacaggtaatgatgagtctgcctctggaaccaagaagaggaagtcccggtgggcagatgatgagcccaagcccgtgattcagctccctgattttatgaaggatttcactggaggtatccaatttgatcctgagattcaagctttgaatagtaggctgctagagattagtaggatgcttcaatctggattgcctttggatgatagacctgaaggagctaggtctccttcgcctg

SEQ ID NO: 49812 - DNA, 648 bp, Gossypium hirsutum
  unsure (1)..(648): unsure at all n locations
  Clone ID: LIB3825-033-Q6-K6-C3
ctttacactcgctgtactatttgtggtangaaaaatagcagnaaaaacacaaaaacacccacaggtttatatacttctttgtctcttcatacttcatctcatagcttacagatgtattaaaccactcaaacctttgtttgttgcttcgaaagatattccaagtgttgaagagctatataattagtactgcagcaatccgtaccgggtatcaaaaggaacaagcacaaaacttgctgctttaccgagaatgacactgccgaatcttgggttagaatctgaaaacgattccaatgcaagtagccaagtcgcttccaacatatctgcacaagaggcatccactgatccctcgaaggataccacaaccactacttcatgcctctcgaatcctgtaaaggttcaaccagatccagggtctgtttcccttgacctgactctgcacttcagtgccaatgatgctgagatgaagggtgccactggtgagactatggggatcaacactttgtcaacaccgagggttttctcttgtaattactgcaggcgcaagttctatagttcacaagcactgggtggacaccagaatgctcacaagagggagagaacaatggcaaagcgtgcgatgcggatggggttattatctgataggtatac

SEQ ID NO: 49813 - DNA, 640 bp, Gossypium hirsutum
  Clone ID: LIB3825-033-Q6-K6-D3
gtatcttgaacagaattcatgaaccagcttgtaacaggttacctaccaagtgtaattctgatgttatttatgtatgctgttccaccaaccatgatgctgttttccacaattgagggaaatgtttcacatagtgaaaggaaaaaagtgctggcattaaagttttgtacttcacaatctggaatgttttcttcgttaatgttctttctggatccataattagacaattgagtgttttctcaagttttagagacatacctacacaacttgccaaagcagtgccaacccaggctaccttctttacaacttatgttttaacatcgggctgggcaagcttgtcatgtgaagtaatacaacttttccctcttctttgcaatgggttcagaagattcatactaagaaggcaggaagagccctgtagtaatcatgctctaaccttccctcaccatactgaaattcctcgacttcttctgtttgggctgcttggcttcacttgttctatcatggcaccattaatattgcccttcttgctggtttacttctttcttgctttccttgtctatcggaaccagattctcaatgtatatgtaccaaaatatgaaagcgggggacagttttggcctgttgttcacaacacaacaat

SEQ ID NO: 49814 - DNA, 594 bp, Gossypium hirsutum
  unsure (1)..(594): unsure at all n locations
  Clone ID: LIB3825-033-Q6-K6-G1
taaaanaacaacagacacagcagcgatcacaacagctaggctcaaagactggagtcgagcctgttgcatctcaagcttttgcaatgtcattttcatctgctaatggtactactgctcctggccttggtatttcttccctagcaccgaatcatgcaattcttcagagccttccagggagtgcagtcggggctatcancatattatggctgctcaacagaagaaggataattatcatgcttatgaagaagggaagcgtggaactcatgatgcatccagtgtgcaagaagaaaagaaggcaggaaaaagttcaggcaccactgggcagtccattgccttctccaggccagatatgcctgattcaagtgattccactcttgcaggcaaaaatgtcatcgatagttctatctgtacgcttggctctgctcctgctcgaacttcagggcctgttatgccagcttcaatcggtagtgttaatgttgctaatgctcagcagcaacttcagcggaatcaacagcagcagcttccaatttggggactgccttctgctcctcgggagtaagacacccaccacaagtaaatggaagtgcttaccct

SEQ ID NO: 49815 - DNA, 342 bp, Gossypium hirsutum
  Clone ID: LIB3825-034-Q6-K6-A3
tggcgggggggggtataaccaaaaaggccccacccgtccgcctttccaaccagtggcccaccctgatgggcaatgggacccccccttgtaccgggccttaaaccccgggggtggggggggttccccccaggggacccgttccattggcaaggcccttacgccccgttcttttggtttttttcctttcttttttggcaccgttggcgggttttcccggcaaggttttaaatggggggttcctttaagggttccaattaagggtttaccggaccttcacccccaaaaacttggttaagggggagggttaccgtatgggcccttcgccttgaagaacggtttttc

SEQ ID NO: 49816 - DNA, 648 bp, Gossypium hirsutum
  Clone ID: LIB3825-034-Q6-K6-B3
cccggtcgcccaccgtcggaaatcgttctaggagataatgcttcaaaggtcacttgaaccttaaagatgaagaggatgagagaaacgggggagaaggtgctgcttttgaggatagagattatgtggaagaagacgagtgtatatccgatgatgagcctggatctaaaaggaagaagctgggaaggggatcagttgatttgtttgtcgaaggaagaaccgaatcaactcccactacacgaaatcgagctcttcagtctgggaaagatctcttatctggtccgggtgcggctcttgttgagttccctgacggtttacctcctgcgccatctaaaagtaaggaattaccccacttgttctttccctttcttgagcatctttgagctttccatgctaactgctttaaattaattgttttaataatgatcggtggtcatagaacaaaaggataaactttccgaagtggagctacagttgaagaaggccgaggctgcacagaggcgtagaatgcagtccgagaaagcagccagggatgccgaggttttaccctcttttttcttttcttcttttgattgggtttacaattgctcaacaatcattcaagaaacagtattcagtagggtctttgaattgttgtaggttgaggcaatc

SEQ ID NO: 49817 - DNA, 262 bp, Gossypium hirsutum
  unsure (1)..(262): unsure at all n locations
  Clone ID: LIB3825-034-Q6-K6-D3
tttctagttcgggatgattttagctttctgaatataccttttaaagagagtgaccattcggttaaagcatagttcttatgttgtgaatctatattcctattaagctggtacatcctgcaggtctaatctgaagccttcacattactacttcttggggggggggggggtaccnaatgttctttcccgatccatccttcccaccattgggtgatctctcaagttttaaagacatacccactgaacttgccaaataagcgccaac

SEQ ID NO: 49818 - DNA, 639 bp, Gossypium hirsutum
  Clone ID: LIB3825-034-Q6-K6-G2
cagcctctggtgacacagctttggtggtttgcgcaaagtacaaacatgaagaatgtgtgagggtgttgactggggctggtgctgactttggcttagttaacatctctggtcagtctgctagctcgattgctggttcaaaccagtggtcccgcggttttcagcaagcagtgctgggcgggagcggggggggaaggattccgaagtcgagcaatgtatcggttttctctcccttgatgattgttgccgaaactggtgatgttgaggctctaaaagctgtgattggaagtggacaatttaatcttgatcatcagaatgagaatggtttctcagcagtcatggttgctgccttaaaaggtcatgttgaagctttccggctgctagtttatgcgggagctgatgttaagctgttaaataaatctggtgagacagcaattacgttgtctgaactgaaccagaaccgtgacctgtttgagaaagtgatgctcgaattggcactcgaaaaagcaaccgcaattctggaggattttatgctttgcattgcgcagcacgctatggagacctggatgctgtgacattgttgacgagaaggggctatgatgtaaacgtccccgatggggatggatacactccactcatgtt

SEQ ID NO: 49819 - DNA, 496 bp, Gossypium hirsutum
  Clone ID: LIB3825-034-Q6-K6-H1
tgatcaatctagccatttccttcttgaaggacggtcttcagcatttccaaggtaaagcttttatcacctaaaccattgatctactcgtttccaactttcctttattcctcttcttttccatccagtttcaatctgattctcgcactctatcatattctttctgactttcagctatatccagggcacactggtgagaacaggctattcctatttgggctactttgcggtaagtgagtgcctcagcaacgaaggctgaggccacttcttgatgaatcactgagcacactataagaacattcttttcgctatttctggccacaatccccgaagccgattgacaaagtcgcccatcgtatgctctatcaaaattggtctttactgactgagcagattgcctacagtgcacagcaacttagtctactttgaggaacaagtgttctgatctgaatcccaccgatacaccgtggcattcttccaacactgacagagtgttccc

SEQ ID NO: 49820 - DNA, 779 bp, Gossypium hirsutum
  unsure (1)..(779): unsure at all n locations
  Clone ID: LIB3828-003-Q1-K6-F11
cttttcttcatcttctcctcctactattcccatgtcttcaagctctagacttgttcccaaaccttgacgagccagnnnnnnnnnnnnnnnnnnnnnnnnnnnnnnnnnnnnnnnnnnnnnnnnnnnnnnnnnnnnnnnnnnnnnnnnnnnnnnnnnnnnnnnnnnnnnnnnnnnnnnnnnnnnnnnnnnnnnnnnnnnnnnnnnnnnnnnnnnnnnnnnnnnnnnnnnnnnnnnnnnnnnggnnnnnnnnnnnnnnnnnnncccaatcatatttacttatatacgtgtattaattgtggaggattatcactcctttcctttccactgaattctcaggatccacttgatcatcccaagatcatcaataccccatttttcccagaaagttctggaatgggttaatttaaagtctgcggatttattgtggagaataagtgaagtgaaagcatagaaaacaacaatagaattaagcaaagaaaacaacantccgatgtcgacgtactttcatgggaaccctgnaaatccaagcaagtactgacggccttcaaacccttgtacttatgaaccctgcctatgttcagtattccgatacccctccaccacctccggccaacaacctccttttcttcaaccctaactccctctctccgccccaaactcagcaactcgtcggcatccccctccccgctacctcagccgccaatcaaggccctacctcacacgatatctcccccttgcatggcctcgtccagcgcgtccattacaacttgtaccaaccc

SEQ ID NO: 49821 - DNA, 587 bp, Gossypium hirsutum
  unsure (1)..(587): unsure at all n locations
  Clone ID: LIB3828-003-Q1-K6-H9
ggaagctccgtgatcagaattttccttcttaatgaagctgtgtttcaaattggtgttgaataaagatgccttttgggttcgagtggttagagcgaagtatcaagtaaaggagaaaatccacagtgcattaataggaataaatgctcttttctttggaaatcattatccaaaatttgggcattatttcgtgaaaatctgtactggtccattggagatggccataaaattcagtgctggaaggacaattggattcctcatattggacctctcattcgatatattactccaaatctcaatctaaatcctaattgccttttacatgagatgacttcagaagatggttcgtggaaccttgatctcttttagacttggttatctgaagatgtgattcaggccattaagggtatcctacctcctcagcattctgaaggtcctgacagaatctcttggaggcatacttcatttggggacttctctgttaaatctgcttataaagcacttaatgagggggaactggaacccgagagatgagaaatgaaagattgtgtggaagagccttggacctcatagagttcgcgttntcattt

SEQ ID NO: 49822 - DNA, 477 bp, Gossypium hirsutum
  unsure (1)..(477): unsure at all n locations
  Clone ID: LIB3828-004-Q1-K6-C10
gccaaattgaagcatttcaaatgttctattggctggttttatatctttctactgtggacattacgtgcttcnnnnnnnnnnnnnnnnnnnnnnnnnnnnnnnnnnnnnnnnnnnnnnnnnnnnnnnnnnnnnnnnnnnnnnnnnnnnnnnnnnnnnnnnnnnnnnnnnnnnnnnnnnnnnnnnnnnnnnnnnnnnnnnnnnnnnnnnnnnnnnnnnnnnnnnnnnnnnnnnnnnnnnnnnnnnnnnnnnnnnnnnngnnnnnnnnngngnnnnnnnnnnnnnnnnccatcccgactaagttgtgtatctctaccaaaatcatnnactctttaccagnaacctagtcatggnagagaactattagtatcttgatttatagagtttggccttttactgtaaccttggtttatgattttggttccattgctaccgactcatgccacaagctgggaatgaaagcaggaagtttttttcgtc

SEQ ID NO: 49823 - DNA, 109 bp, Gossypium hirsutum
  unsure (1)..(109): unsure at all n locations
  Clone ID: LIB3828-004-Q1-K6-D10
ttttaactggtcgcctgcggtcccgtccgnattccgggtcgaccccgcgtccgggngattgtagtctgggagagtgggagggtttgcactttgcagatatttggtttcg

SEQ ID NO: 49824 - DNA, 796 bp, Gossypium hirsutum
  unsure (1)..(796): unsure at all n locations
  Clone ID: LIB3828-004-Q1-K6-E11
gttggttgaaggtggagacccgagacgcacacattccacttccagtggagagtgcactatcactttggnnnnnnnnnnnnnnnnnnnnnnnnnnnnnnnnnnnnnnnnnnnnnnnnnnnnnnnnnnnnnnnnnnnnnnnnnnnnnnnnnnnnnnnnnnnnnnnnnnnnnnnnnnnnnnnnnnnnnnnnnnnnnnnnnnnnnnnnnnnnnnnnnnnnnnnnnnnnnnnnnnnnnnnnnnnnnnnnnnnngnnnnnnnngngnnnnnnnnnnnnnnnnnnnngaagagtcaatatgcaattgggattaccggtggacgggtacccagtcaccgggtctgttcaatttggcgattggggagcggtgtgctacgagcttttaggcgctattccggagaaaattaacggaggttagatcgagatgggctggttacaagacacattcctagatccggatgatgattcaaccaaagtagaaagaatccgatatgctcgggcatacattcttcagataattggaggttatctgatgccggacttgtcacgaaaccttgtacatctaatatggctgctaaaactcgttgattttagagcagctggagaattgagttggggctctgccgtgttggcaacattatatcgggagatgtgcggggcgacgcgaccgagtaaagcgaaaatcggaagttgcctgtcactactgcagtcacgggcacgatttcgctttccatttttacgtcctcgagtgtaccacccatatacattcccactaataacgaggtgggaaccgtccggcaact

SEQ ID NO: 49825 - DNA, 596 bp, Gossypium hirsutum
  unsure (1)..(596): unsure at all n locations
  Clone ID: LIB3828-005-Q1-K6-C7
agnagagcagatcgttctgcagagctctctatcagtaatgccagtgacatggnaaactgaatgggttgagcaggatgaaccaggggtttacctcactattagagcagttccaggtggctcccgggagcttagacgtgtccggttcaggtatgtaactagttggttgctgttttcttggttccagacatgagaatggatggaataaaagccaaaatgttattatggtcttatgttttcgtgctgattattaccaaccggtcatttgatccttctttgctctggagtaagctttgtaccatttaggataggcgttattagtagtagtcttaaactctaaaatgctgaaatgcttgaaattctgattctcagactactagaggtaatgctagtgaattagttgttctatgtcatttgtgagatggtcatgggtcaaataaaaatagcactgcgcttttcaaaactaggataaacagcttgtatgtatgttaaatctaaaatgcagagtagacctagggattcagtttgctctttgtttatttgactgaagcatgagaccccaactcttccttgctttgagtgaagaaatggaacaatgc

SEQ ID NO: 49826 - DNA, 584 bp, Gossypium hirsutum
  unsure (1)..(584): unsure at all n locations
  Clone ID: LIB3828-005-Q1-K6-E8
aaaattanaaacaatgaaagagttgtcaattattggtatcgaaacattgttattattactatnaataatacattgtcaccatatttntgactggaaaaaaaaaaaaaaaaaaaaaaaaaaaaaaaaaaaaaaaaaaaaaaaaaaaagaaaaaaaaaaaaaaaaaaaaaaaaaaaaaaaaaaaaaaaaaaaaaaaaaaaaaaaaaaaaaaaaaaaaaaaaaaggggggggcccgttttaaagagaaccaaagttaacttcccggggcagggaaaggtaaaagtttttttatggggcaaccaaaataaaatcaaggggccggggtttaaaaacgggggaaggggaaaaacccgggggtaaccaaattaaatcccttggaaaaaaatccccttttcccaagtgggggaaaaaaaaaaaaggccccacccaatcgcctttccaaaaattggcccaccctaaagggaaaagggaacccccccttaaggggccaataaagcggggggggggggggggtaaccccaaggggaaccgttaaattggcaaggccctaagcccccgctcttttcgtttttttcctttctttttt

SEQ ID NO: 49827 - DNA, 494 bp, Gossypium hirsutum
  unsure (1)..(494): unsure at all n locations
  Clone ID: LIB3828-005-Q1-K6-H11
agcatttgatgaacaagacttgcagtactataccaggctgtttgtggaggacataaagcggaatccgacgaatgtagagttatttgatatcgcccaatctaacagtgagcatagcaggcattggtttttcacagggnaagattgttattgatggacagcccatggataggaccctcatgcaaattgtcaagagcactttgaaagcaaacccaaataattctgtcattggttttaaggataattcgagtgcaataaaagggtttcttgcataccgattactaccagttaagcctggaactgcctgcctactaaatgaaacaactcgtgaaattgatgtcttgtttacagctgaaacacataacttccctgtgcagtggcaccctaccctggtgcagagacaggtgcaggtggccgcattagggatacacatgccactggaagaggatcatttgttgttgcatccacagctggttacacaactgggnaatcttaat

SEQ ID NO: 49828 - DNA, 591 bp, Gossypium hirsutum
  Clone ID: LIB3828-005-Q1-K6-H9
cggccgcgtgggttctcatacaaaatttccatgtaatacactgttttttttttctgggttttttctttcaatttgggagagttttacgaaagtttcgttcttcgtttttcatttttggttctagaatgatcttttttttcccagaatttgaagcaaattttttctactttgtgtttaatttgattttcataaatgaaatctgcgtgcatttttcttgttttgttattttcttgttcatgtttctgattttcatttttgttgttaaaaagattactaatgccatctttttttcattttggtccctgagaattgagatccttgtttgaaaactcagtgcttttaggtctggttttaaattttaaaatggagggtgacagtgatacatactcagggcttggcactggtgaaatagacagcaaggtggtgcagacatttcaaaagagttttgtgcaggtgcagaacatattagaccagaacaggttgctgatcaatgagataaaccagaatcatgagtccaagatcccacacaacttgaccaggaatgttggtctaattagggagcttaataacaacataaggaaagtggttgat

SEQ ID NO: 49829 - DNA, 588 bp, Gossypium hirsutum
  Clone ID: LIB3828-006-Q1-K6-A9
cttttctcccggttagtctctcatcaaactttacatttcaacgcttgtggttttgagtttttgacccatctcccacttttcttttccaagttccaaaaacatcttttacaattccattcgatttctctggaattcaacacaacagggaattcctcttttcacctgagcttgtttcgcgatctgggtatgtttctgatcaagcaaaaagttggaatttgaagaagaattaaattcaggtgatgaaaaatgggggaaactgaaaatggatattcacccgccacccacactgcaatgaacgcagtgcaagccatagggaaaggattcgatgttaacttcgacactaggttgttgtattgtaaaggtgtaacaggttctaagatagttgaaatcgatgagggacatggtagggatatttacttatatgatcaaactgttctccccaatgtttctagagatatcaagaactctcaagagcctattggccgtctcagttctggggttttcaattttaatgagatggtggaatattttaataaaaacgctaatgtgtccggtagttttccccttggtagtttcaattctgctttt

SEQ ID NO: 49830 - DNA, 602 bp, Gossypium hirsutum
  unsure (1)..(602): unsure at all n locations
  Clone ID: LIB3828-006-Q1-K6-D9
attttgtaggaaattgcaaacagctgctngaggttccggccatagatataaagtaacaaaggatcgctgcaatttcatgtctgaactatgcaccaatcattgcagtagagctttgtcaagaacatttggttagtctcatttgaagctttttgcagtaatgttttgatattttaaatatatttcattatgtaagaatatgttgttctgaacttctcttttctgggttcgacacatgcgtccaaatttcaccaatgatggaacagcagataagattgtagccatgttttaaataagtcaaaccccataaccaaaagactcccaattattaggtgagaatgaaggggatgtgtgcatgaatgaacccccattaatggcgttgaaaattgaagtggcagtaattaaaatgggtgcaggataaatgcttttgacaattaacggaaccgacacggtgaagtgagacatctagatttcgtgatgttgatatcatcttaggaaataaaatgttgcttatatttatatatgtatatatataatatcacatcatctaagtaatttttaatttaatattataatttttgttatatataatacatatatcaaat

SEQ ID NO: 49831 - DNA, 507 bp, Gossypium hirsutum
  Clone ID: LIB3828-006-Q1-K6-E11
aaactttacatcctcacattttcggtacctaaaacctcttttagggttatatgggtgtaaattctgaatctcctatgctcaatatagccccaaaagtacttaacattaaagatcactcggtgctccagctattcttctctcattagctgcacaaggggttttccggggattgaaggatacctaaaactcccttatatgctatcatcattggagactcgatgaatgttattttggaccctatacttatgttcgtacttcgtcttggtatcaaaggtgctggcattgctcatgtagtttctcagtatttaatttttctcatactcatttggagattagccggtaaaatcgagttgtgtccgccaaactttaaaaagctacaatttagtcgattccttaaaatggactatgatatctgtgtgctgtcaccacttcaggatttcacctattggttaaggtaatatctacaacatcctgtgtgaccgtcgcagcatcattagcagctcggca

SEQ ID NO: 49832 - DNA, 427 bp, Gossypium hirsutum
  unsure (1)..(427): unsure at all n locations
  Clone ID: LIB3828-023-Q6-K6-A3
cccccgcagcccttcaacagggggggggggggggggcgcgcnncccccagctngatctctcgngcgcagttgggcgagggggcggcctgggtcagcgccactgtggtctccgcctttttctcctctctcgggcgctttttttttttttttttctcncccncgnccctgtctgtgggggggggggcancnnggccttggtccttcctctcacctactggggggggtgtctctcggtacttgcgccgtcttcttctctcttgctttctcttgctttgtggtctttgtgtgccggtcctgggccttcgttttttggtgtctttccctgctctttctttgtggggcgtcctgctttgtttgggttctcttctgtcctcgtggcctttttttttttggctgttctctcctctctttctgctggtgctgtgtt

SEQ ID NO: 49833 - DNA, 464 bp, Gossypium hirsutum
  unsure (1)..(464): unsure at all n locations
  Clone ID: LIB3828-023-Q6-K6-A6
tagcacaccctnnaagtggnatnntttccttttctcctcctttcgtgcccccgatctcttattagtccatgtatctgggatatgtaacactgcattgacagggggggggacttattctagaagggtcctgactgctaggtctgtcgctgggtttctttctgatgtctaccctgcggctgctgntgaagttgggaaaatacatctaattgcagatgagagggttcaaggagcagtttttgatctgcctgaggagattgcaagagagttgctggcttaggaaacacctccgggaaacaccatctcaaagatcactaagttgcctcctctgcgcgatgacggcccctcacgtgatttctatggcacattttctagctgggatcgcttttctagcagggatcgttttccacgaggcggttttaaggctcggggcggaggttccaggaccccctggggttgggtgtttg

SEQ ID NO: 49834 - DNA, 424 bp, Gossypium hirsutum
  unsure (1)..(424): unsure at all n locations
  Clone ID: LIB3828-023-Q6-K6-B3
tttaatcagctttccacacggggggggggggggggcngatgccaataccggagccttcctcgtcttcttcatcggtggggtgttgctggccttgtcctcttcctgtccagctttaaacatcactangtcgcttgcgcctttcttttttttcngcnctctcagcgttcttttgggggggggcgagctgcctgatgctnnttnccgtcgcctgaccatggcggtgctggccctggncagtggttcgctcctttccatcgctgcctggtcctgcgttgatctgtgggtgattctcttgcttctcgttctcctcggctttttcccttggcttttgctctctgtgctggggccgcagtgcgccctctctcccgccttgttctcttcccctggttccgttctttttccccctggttttttgccgcgtttt

SEQ ID NO: 49835 - DNA, 483 bp, Gossypium hirsutum
  unsure (1)..(483): unsure at all n locations
  Clone ID: LIB3828-023-Q6-K6-D5
gcgtttcgggntgtacgatgtttttctgagctttagaggtgaggacactcgtgatggttttgtaagtcatctttnagaatgatttggnatcgaagnaatatccatacttttaaagacaatgagaaagttggaagaggagatgagatttctggggcactattgactgccattgaaggagcgagggtttcagtgtttcttttctccaaacactatgcttcttctagatggtgcttggacgagctggtcaagattatggactgcaagaagttgaatgggcacaactttgtttttcctgtcttttacgatgtagatccctcgtattacgaaacaaccattcatgcgaactacgagctcatcaaggttgagagctcacctgggagctctttattctgcaaattaccaatttgtattgaaataataataactttttgnttnananaaannaannnnaaaanannnannannaannnnnnnnnnnnnntt

SEQ ID NO: 49836 - DNA, 310 bp, Gossypium hirsutum
  unsure (1)..(310): unsure at all n locations
  Clone ID: LIB3828-023-Q6-K6-F1
tggncgcgtgggcttaaagctcataaaccagaagcagctcaacttggtttatgagctttaaggaagagcatgtgaggtcgcgtggaacgtatttggttttgtcgtccttaaacctgatggacgtactgctttgcttttgggttgtttattttttttaagaacaagcctggccttgtgggggggggggggggagaggcacggttgcctgactgcgtacctgctttcgattttgagagatcttttagaagctattgtgctgnctggagtttaaattatgaacgatgaagctagtcctcttttttttccaggt

SEQ ID NO: 49837 - DNA, 564 bp, Gossypium hirsutum
  unsure (1)..(564): unsure at all n locations
  Clone ID: LIB3828-023-Q6-K6-F2
attcctcaaatccatgaagaactaaaagaaagcgtccctccccgttgtcgggcttcggcctgtgctgccccgtttgcttgggtctttttttggtgctctgggtctgtttggtattgctgccgcggtgggaagctgcggggcccgctgctctgggtgcgggcttgccggtgggggtggggtttgttttttctgggcttgggggttctactccctagcctgcgggctcgcntctgcctatgtggtgactgttggagggtttgggacttgcttgctggtggggtcctgtgggggtgttctttgctcccccttgggatgctacccactttttcggcgcccatgtggccagtgacttgatggtgtttggctccatttccacttgggggatgttgcagatgcgtatggggggtccttgtgttgcgctcccccctatcgnccagtgctgggggtgtgtccgcctcttggtntatgtgcggctcgcgttggctgattgcgcacttggtttcggccgtggtactacccgtggcctggtgggacccatcttcgttggccctggtcctaccccag

SEQ ID NO: 49838 - DNA, 534 bp, Gossypium hirsutum
  Clone ID: LIB3828-023-Q6-K6-F4
gcggaagctgatggatttatgatcaaaagagaggaggctagcgatttaagatgtgtccataacaatcctcaaggcggtcattttgcggtttatgcaccacatcctgctattgttctgaagatggaagatgggaccggacttcttctcccggatcattgttttggagatgcctagtgcgtagctcatggcaacattacgtaatgtccaaattgctagacctactatgtattaagtagagaagaacatgattgacaagatgggctacacggtaaagctagttcgagttactaaaatagtacacgaagcctattttgcacagctttatctgaccaaggactgagatgagacagagtctgtctgttgtgaccttacgacttctgatgccatcaacattgccgtgaggtgcaaggtacctatacaagtgaataagtacttgacatacagggactgtatgcgcgtcatcgaatcaggtaagctgtaaacacagtactcagcttcagacggcttattattcaccgaacttgatcagccaaa

SEQ ID NO: 49839 - DNA, 347 bp, Gossypium hirsutum
  unsure (1)..(347): unsure at all n locations
  Clone ID: LIB3828-023-Q6-K6-H3
acctgctcctatnctatggtgggaatgcaaattatggaatggctcatccctccactcgagcttnctggtgggtctacgtcataccctccatcttatggtggccctgtgggtggttntgctggtgngggtttgngtgatgtgaggactggtggtcgtggtggccctcctggggggtgtggttctggtggtcctcgttttctgggaggtggttatggtggtcctcctgtttgtgctccggcttggatctcgctgtgtgacggcttctgtggggtttcttgcgttcgctcctgtttgttcttttctgtttttgcctcctgctgtctctcttgccgttttgtgagaccttt

SEQ ID NO: 49840 - DNA, 557 bp, Gossypium hirsutum
  Clone ID: LIB3828-023-Q6-K6-H5
gcagtgcttcagcttgagccatcgatgggccttgtgcagaggtgaccgaaactgttcggagaaattgaaatccgatctggtttcatccgtgggtgtggtgatgtgcacagatgggttaactacaccgagcatttttggtctgtgggtcaaattttatgatgatttttaaatttcaaaacgttttaatcacgacatttactcggaaaaaaaaatgtccaataccaatgaattccagttcataagcgctcgatcttatagcacttatcagtgaggccccactgctaatacaattagatttcctcttcataggcttgggattggtttaggattacgagctccttttctctttcaaacttagaagaaaaagaaagaatcactcaattggatgacagccacaatataacctattaaacattctttttccctttctagattagtctaattttagtattttatctgtttgaaattttcttacaagttcattgtcttgattctatataaaatactttgttgtcattcttattatactacaaatgccagtttaaaaatgacctttt

SEQ ID NO: 49841 - DNA, 652 bp, Gossypium hirsutum
  unsure (1)..(652): unsure at all n locations
  Clone ID: LIB3828-024-Q6-K6-A4
cccgggntcgnacccacgcgttttgtgtttttaagtttattcaagttagcatgggtgcgcatagtgaaaaccttgctatagtgtattgtctgcccttgtttaatgtagctgttgtaaaataggggaaagatgttttcttgcattttgttgatgtgagtactatcaatatctttttgtttatgtaaattcaattgttttattggttgagaggatagataaagatagatactatgcatggatgtgccgatttgggaaagaagaataagttgggttgaggtttagggagttttggaaaaatcttattctcttatttgatgtataacgaatgtttaactttgtgatagcaggatgtcggaggcaacattcagacttagggaaaagcttatcgagtattagaaatattttctaagcatccacaaacacacttacttgaaagggatgagggatctataacatgtctcatggaattggaaaaaaggaatgagagctgtcactcatggtacattcagctattcagcgaggacttccagttgtgttagcaaaagctcaaaagcttataactctgagcaaaacaataccctcttttaatacattctttaatttagagttaagattatgctaccggaagcaattgcaattgttatggccccaa

SEQ ID NO: 49842 - DNA, 602 bp, Gossypium hirsutum
  unsure (1)..(602): unsure at all n locations
  Clone ID: LIB3828-024-Q6-K6-B4
gnaaactnnggcaggcctnnaaaatccgttgaaaacgcccacgacgagtcggtttggacggccacttgggttcccgccacgggcagccgcccgccgctccttttaacaggctccctcgacgaaaccgttaaggtgtggaggcctgacgagctcgacctcttgcgcaccaacactggccactgcctcggcgtcgtttcggtggccgctcatccttccggcgtgatcgccgcatccgccgcgctcgacagctttgttcgcgtgttcgacgttgacaccaacgctaccatcgccactctcgaatctcctccgtctgaggtctggcaaatgcaattcgatcccaagggtacaacacttgcggttgccggagggggtagtgcatcgatcaagttgtgggacactgcgacgtggaggttggttgcaactttatcaattcctcgtcctgaaggatccaagccttccgaaaaaagcggcagcaagaagttcgtcctatctgtcgcatggagtcccgatggaaggcgacttgcttgtggctcgatggacggtacaatttcggtttttgatgtagctcgtgccaaatttctacgtcaccttgaaggccatta

SEQ ID NO: 49843 - DNA, 488 bp, Gossypium hirsutum
  unsure (1)..(488): unsure at all n locations
  Clone ID: LIB3828-024-Q6-K6-B5
ccccccgcccaccaccagggggggggggcggagggggaagaatcagancagttggggatgtctcatgggactctggtttaggactcaatttgttctccctacacttggtcaactcactttgcttctcatgtttaacacataaaatttcagatattgctactctttaccttctcggggggggggcaaattttttggaataaaactcaggcctagaatacttgtgtcttcacccactgatgttgacattttgggcatgtcgcaagcctgcagattgtttgtgcagctccatttcttcattcttgtgtaagtgaggttttgataatgctggaacactagcatcattcaggaagaaaaaaggaatgaaagagaagggttattgggtgctttttagtattgctatttattgaatccttttcttctcatgttcatagtctcgttctaagtacattctgcttggaaaatctttattatcatttggctttgaatcg

SEQ ID NO: 49844 - DNA, 204 bp, Gossypium hirsutum
  unsure (1)..(204): unsure at all n locations
  Clone ID: LIB3828-024-Q6-K6-B6
aacttatctgagggggggggctcgnngatgctgcacccgnctttcttggccatgccttggcgctttcccgcggtgtttttttcttctatcaaccagctttggttttggggggggggatgaagctctatgctgcgtctttggcccggtttccgggggggtccccttttctctgtctcctctntgggcttggccactcgtctcgcg

SEQ ID NO: 49845 - DNA, 249 bp, Gossypium hirsutum
  unsure (1)..(249): unsure at all n locations
  Clone ID: LIB3828-024-Q6-K6-C6
tttcttgtntncctnaatctatactgtgtggggggggtcaaaatcaaatgtttctttccaaacttctcgaggaaccaaggggagggtgggttccanaagaagagcagcgttggttncctatntggngnacttgnccaatgntggaactttttttgctttttctgngttcaaagccgttttgttagggcgagtggaanaaatcttanaacnggcttttcccattgcactgttgaagggtagacttactat

SEQ ID NO: 49846 - DNA, 614 bp, Gossypium hirsutum
  Clone ID: LIB3828-024-Q6-K6-D4
ggtcgacccagcgttcgctccatgttccagaacagacttgggtggcgtattgttttgatggttggagcactcccagcggcgcttacctactactggaggctgaagatgccagaaaccgctcgttacaccgcccttgttgctaagaatgctaagcaagctgcatctgatatgtcaaaagttttgcagatggacattgaggcggagccacaaaagattgagcaagagaaaatccgatatggcttgttttccaaggagtttgctaaacgccatggacttcacctgcttgggacaaccaccacttggttcttgcttgacattgcattctacagccaaaacttgttccaaaaggatatctttagcgccattggctggattccatctgccaagaccatgaatgcccttgaagaagtttacaaaattgcaagggcgcaaacactgattgctctttgcagcaccgttccaggctactggttcacagtggctttcattgatattatgggaagatttgccatccaattgatgggcttcttcttcatgacggtgttcatgtttgcactggccatcccttacgaccactggattcataaggacaaccgaattggcttcgttgttat

SEQ ID NO: 49847 - DNA, 568 bp, Gossypium hirsutum
  unsure (1)..(568): unsure at all n locations
  Clone ID: LIB3828-025-Q6-K6-A6
gcgttcgtgntgctataattaaccacatatagggttaggagatccacatgttctgttagtttggaaagtgagctgtcgtaaaacgtctgatactagggtctgagaactatcccgtattaattttgattcccttttctagtttgaaaacgatgaagttaataccgcatcatatgactgcattattggcagctaattcggttctggtgctgcaggtgggaattggacaatgccatctaaaactgtttgttgtagccgtattatcatagtaagttcgttctttatgcctagttattcaatgaatttcttaagatttggatcggaaaaaaaaaaaaagaatctaaaacagtttttttctcttcacctcatctggttccttgaaaattttgtatctcaatcatgattttgcctttgtgctaccatgacttacgtattttctcgcattaggtcagtccctatcgatggttataaaatatggaaatcaatgaaagaaacttttgggaggttatggttgctactacaatatgttgctgacaatggttttacaatctttctatttctggaccttttt

SEQ ID NO: 49848 - DNA, 542 bp, Gossypium hirsutum
  Clone ID: LIB3828-025-Q6-K6-B2
ctgccagcaggggtgtgggcggaacatgcccgaacactaacatggtaacggtctttggggacatcaccacctacgcctgccgatactctgacaagagtgttgcgacctacatgccgctccatgagtttagtttctgttgatggggaacttggtgctgtcattagcatggtctcgcttatccttgcagcattgtatctcttggcttgcctgagtgggcccatggcacatcccggttcttacatgctatatgggaactacagtgcggtgccttgtcttcggtcgttgcgctgacgaatcccgtcatttcattcctattggccaggttctttcgtctaagcccctatctctaattactgaattttggatgtatggctccttgtcttaggtactgtgtgtacgttattttcgcgccccttatgggttctacgatcactttggggctttggtttctgtatttgtgaattctgttgttatctccccccaacatgatgaaactggggcagacgttttaaaggatgctgactttccgggcgcctgtaatc

SEQ ID NO: 49849 - DNA, 335 bp, Gossypium hirsutum
  unsure (1)..(335): unsure at all n locations
  Clone ID: LIB3828-025-Q6-K6-B5
ccccccccccccgccccccccggggggggcgagggggggggaagcccaagggcactcatgggaacacgatgatcaagaactcgtccacatcgcctgcccacattatgggaccacggtgtnnttnncaccactagnntcttttttttnatttagcatttagttagtagttttgtcttttnngttccatggaaattttttcagaggggggggggggganttgcngatagatttagcactccaaagtttcctgggggggggttgtggaatcattctaaaaaccaatagcattaggatctgtnttacctactaatagtggtttatatccaaaagggaaa

SEQ ID NO: 49850 - DNA, 377 bp, Gossypium hirsutum
  unsure (1)..(377): unsure at all n locations
  Clone ID: LIB3828-025-Q6-K6-B6
tcgacatggtactgggcatgggagtggtgtcttacctaaatgttcatgaagggcgcattacattagctccagtaccacagtctcgttttgtgccacttcaaggtctcatgacaggggcagaggagcctggatattatgaagatggctgctttggtttaagattggagaatgtactctttatccaggaggctgattccgaattcatcttcggtcacatgggatttttatcattggagcatatcgcatgggcacctgtgtcccatcctttgatggacttaagcatcttggcaccgggggaaatactgggggttaataggtaccattggaaatntcgggaaatttctaggcccttacttggcttcctttgtgatgtgatg

SEQ ID NO: 49851 - DNA, 587 bp, Gossypium hirsutum
  Clone ID: LIB3828-025-Q6-K6-E1
caaagcaacaaccagtcggcaacagtgattgccggcggaaacatatttgcatcaagaatcgccactgtttaaatcagcacatgaaacccatgccataaatagcacccaccgactcctccgcccatctatctccaatcaaaactccccacgcaactcatcaaatcaaaacaaaggattaaattttcagctataaaatactcccgcaaccccagccctataccgtccaattttatgccacatgcttatattctctcaccctaaatttctttatataattaagtaaatcattctagtaactgttggttttccttactttttcaactggagtgtgtactgcggataagttttttcatcttcagatcaagttcgtaggaaggtaacaatgccggaaactcaatctcaagggaccccaacgctcttctctccttacaagatgggcaagttcaacctttctcacagggtggtgctggcgccgatgactagatgcagggcgttgaatggaaacccaaggccagcgctcgctgaatattacacgcagaggtcgactcccggcggctttctaatcaccgaagggacactggtgtccg

SEQ ID NO: 49852 - DNA, 595 bp, Gossypium hirsutum
  Clone ID: LIB3828-025-Q6-K6-E4
aaaaatccgcccaagaaaaaaaaaacagctgtcattgttcaccttccctatctcttcctttccctccttttcttcaactaggcctttcaaggtaccaacttttattccccaacacatgcaataacaacaggtatctttgtattttgtgttgttgatgtggacgaagttttccgacatcgtacgagttgaaatggacagacggttcgactcatgaccatatcacggttgactcacgatttttactaattattctatggctggatcacgatcgtggataggaggggttcttaatcggttaagcaataagcgtagcgacaagtttctcgactaccctttgacacctattcaggaacaaagacttcaaaagcttcaaaaacgaatacaaataccttttgatgagactcgtcctgatcatcaggaagctctcagagaattgtggcacattgcatttcctaatgttgctctaaaaggattggtctcggaacagtggaaagaaatgggatggcaaggccctaatccgtccactgattttcgggcttgtggtttcatctcactggaaaacttgctgttttacggccgaacatatccggcatct

SEQ ID NO: 49853 - DNA, 547 bp, Gossypium hirsutum
  unsure (1)..(547): unsure at all n locations
  Clone ID: LIB3828-025-Q6-K6-G3
ccacgcgtccgcggncgcgtgggcaaaaacgggggaaagggnnacctctaagattatagctctcgccggtcctgtttgttcgtgatgccttgtccgtatatgatcccagcatggtccccaacggcgcacttttcttcttcctctncgctctttccccctagcttctcgtgcgggcctgcttctgtgtcccatctccggggctcctgtctccgccggtccttgtgaatgtgggttcttgcgagatcttgttgtctggtgcgtgttgagcgtttggctctttgttgggatcctgcnttctctgcgtggttgggttgtgctctntgtggtttcttcctgttcttcctttgcctctgttcggggtgtttgttttacgtttgtgctttctgtctttgtcttgttctatctttttttttttttttgtttttttttttgttgttttttttttgttgtttgtctttgtttttctattttttttttgctttttgttttttgccttttttttttttttttttttttctcttgtttgcttggtttcttccttcttttt

SEQ ID NO: 49854 - DNA, 578 bp, Gossypium hirsutum
  Clone ID: LIB3828-025-Q6-K6-H5
aaaaaacagcagcctttctctcctctcttgtagccttttgtttggccgaccaagggaggcaccgtcccaccgccgcaccgccactgaacacgatggccgacgacgcgcgagggcaggctttaagccgtgtttcaaggcgtccctgaaggctgagccttctcagcccaaagttgcgaaagaaaagtcttcccctccttattcgacccgatcccgacgacgaaggagaaccctccggcgacgagacgacgagcgattccggtgaagccttcttccctccttattatttttgttttatgtctacttttatttaatagatttgtattaaaatcaaaagaaatattagagaaataaaaagaaacgaaatgaaaataaagagagaagaatcagatatcaaccttttgtgttttttttttgatttccagtgttcgtaaccgattacaaatgatagattttggcttttaaaagccaatttacaaaccgttcattccatgttttttgttctttagctatttatttcttctgcatgctctctgttgttgtgttggatttgattgcaggtgtcagaggtgtgaaaagcc

SEQ ID NO: 49855 - DNA, 217 bp, Gossypium hirsutum
  Clone ID: LIB3828-026-Q6-K6-A6
gcgttcggtaaaataagacccccctattcccaagtaagcttttgttgcatatctagaattctagtttcaaaatgacaagtgccagggggaacttcatatctttcaagtagctctggataagcatatttagcctttttcggtcccttgtatatcataaaccttatgatgtttcatggccaactttgagtatgtctaaaaggtttatatttcttttatc

SEQ ID NO: 49856 - DNA, 386 bp, Gossypium hirsutum
  unsure (1)..(386): unsure at all n locations
  Clone ID: LIB3828-026-Q6-K6-C1
acttcgtggctgcagtgcgcgctcagttcttcgtgcggcttgaagatggctttctcatatctactttccctgcaccctgctatttctttcttcttgaacaaaccctccctcttcactccatgggggagttgagccctaaaccctatcctgaggaaaatttggtgggccttcgatcgcttaatattccgcttttccagttctgaatcgaggggaagactggctcttatattgtttcacttaaagatgccatttatggggctctctagatcttaactgttttgggttatcattctgctttgatcccttgcatctttgtttggcgtcgtacgtgtttcctgcgttggcgcttgatgtatttgattttttttgcttgncatcagtgtttg

SEQ ID NO: 49857 - DNA, 567 bp, Gossypium hirsutum
  unsure (1)..(567): unsure at all n locations
  Clone ID: LIB3828-026-Q6-K6-C6
ttttctctagcaatatcaagaggcggggcgagcaaggtctccgattttaccgatctcttttcgcagtagccatgggnaaaatcaagggggaaaatcgacccccaaagttgaagcagcacctgctgtagcttctcccaagtccgggtaaaaaggtaagagagaagctcaagaaactcttgaggggggggggactgtgaaaaagcagaagaaaaacgatggggtggcacaggctgttgtaaagaagaaggttgaagcaaagacccaaaagaagaagaaagacgaaaccagtagttcttcagacgattcttctgactccgaggatgaaccggtgcctctgaaaaaacaggcagctactaccaagagtggctctgtacctgcaaagaaagcaaagcaagctagcagtttgaagtcttccgagtctagtagcgaggacgattcatcttcagacgaagaagctcctcagaataaaaaacctgtagtttctaaaaatggccctgttccagctgccaagacagtgaaagctgatagtagttctgagtctagcagtgaggaagattcatcctctga

SEQ ID NO: 49858 - DNA, 332 bp, Gossypium hirsutum
  unsure (1)..(332): unsure at all n locations
  Clone ID: LIB3828-026-Q6-K6-D1
ggnaactggctggaaagacctgtttcatttattccggagagcgtaacactattttggctcagatgcacaagaagtgcagtgttgaaagcgaattccttgggaaggacaagtttatggtgacgatatatccgaatgtggattatgctttcgtggtggctctcatagccatccttgatgggattaacaacgacgacgattttgagtgatcactcgtcaaaattaaatgatgctattagaactacaagtaactgtgtcttatgtgatcagttaacataaaggaggaagaccttttgcctgcttgatgcttaatctattgaaatctactttttact

SEQ ID NO: 49859 - DNA, 471 bp, Gossypium hirsutum
  unsure (1)..(471): unsure at all n locations
  Clone ID: LIB3828-026-Q6-K6-D3
tttctctgtcgatatccgggggggggagggggggcgcattcaacgacctgggttctgctgctggcttgaagaagctgggtgagtntctccttactcgcgagctcctctctgggtcccangcttcanaggatgatnttaccgttttctgctgctctntctggtgccccttcgtgggggggggtcgatgtttctcgntggtccatacacattgttgccctttggggaatctcacgtgtttctggggagggctgtggtgtgactgttgagggatttgctcccgctgtggctgttgcctctcctcccgttgctgtttcccgggctgccgctgctgtggttgtcgtcgactttgttgttgttctgttcggcggcgcgactgctgcggttctgatggccgctgctgaacgtgctgctgctgttgtggcctgtggctcgtggcttgtatctggctagtcctctgtgttgttgggtttt

SEQ ID NO: 49860 - DNA, 660 bp, Gossypium hirsutum
  unsure (1)..(660): unsure at all n locations
  Clone ID: LIB3828-026-Q6-K6-D4
ccgggtcgnacccacgccgttctggtaaccaaaattcacttattcgggtgccattattagtgtccattctggcaatngtggatcagnatgcttaagggatcanncgatcgccaaatccaagnaagcnntgttcggcgagcacccgactcgnannaaagcaaagnaaaagnaaaagnnttcagttagnaagccgaaccattatgtcaacnncacttcattatttgtgtgctggtgcgttngaactttaaactttgtaaacagcanaatcattagttgagcattgntcaagatgatcacttgcaaataatttggcttgctgattctcttgtcaaatatccactcaagtagtccagtggatactttttttgtataggatggtgctttgttactcggactcaggcattagtggcagatacaggtatgaatatgattctcgcacgagtatgttcaagttttttaagttgtgtcatgtatttgaaaggcatttccaagttatttaggagtaagatatggtgagagggtcggtgtttttaggaagctggcttagtagtgggcatatatctagctaagcttgtagcttgttaagaaaaccttttgtccgtgatttatcatttgtacatttctttccactcagcaactgcaattctgcatagatatggt

SEQ ID NO: 49861 - DNA, 424 bp, Gossypium hirsutum
  unsure (1)..(424): unsure at all n locations
  Clone ID: LIB3828-026-Q6-K6-D6
ttttctccgtttcgcatttcgtctttcggtgggggggggtgggtttgctggttcatccatctccatgcaacctcgcccctttggtgggggcagtgtttctgggttgnnattgggttcctttctgancccgggtagtagcaccctctcattttctatgcgtccaatgcctgctcgcttggggggggggggtgctgccnnnccagagaccgtggttttggtttgtgggggggtggggtgactcttngcttttgacactggctnacctctcaccggtgaatcttcttttcttgatcttggcgctgcttctcttgctccggttgtgattgtcgatgggccttgtggccgacttcggtctctcggtggtcgaggtctttgctcttttcctctcttctgtttttgttgcctgcttttcttcttgccatgc

SEQ ID NO: 49862 - DNA, 607 bp, Gossypium hirsutum
  Clone ID: LIB3828-026-Q6-K6-E1
aactttttgggttacattgatgaaacaaagcggtccattgatattgtttgtgaaagacatagagaagtctgtggcctaggaaatacagatgtgtatgcttccttgaagagtaaggttgagaatttgcctgcgaatgttgtagtaattggttctcacacccagatggatagtcgtaaggaaaaatctcatcctggtggccttttgttcacaaagtttggagtcaaccagactgctttacttgatcttgcatttccggataattttggtaaacttcatgagaggagcaaagaaacacctaaaaccatgaaacaagttactcggctttttcctaacaaagtgacaatccagttgcctcaggatgaagttttacttttagactggaagcagcaactggagcgtgacgctgaaactcttaaagctcagtcaaacactgttagcattcgctcaattctccatcaaaatggtttggattgccctgatcttgaaacactttgcattaaggatcaaactcttacaaatgagagtgtggggaaagttgttggctgggccctcagccatcagtttatgtattcttctggagtattgctgaaagatgctaaacttgtag

SEQ ID NO: 49863 - DNA, 605 bp, Gossypium hirsutum
  Clone ID: LIB3828-026-Q6-K6-E4
ccccgcgtccggcagcactaaggttttggttgagaaaaggaacttcctgaaaagtcgcttcctcttcagctcctggggatcctcgacgctgttgtcaagtgtggaacaaaatggtgcaaaggattgctacactcgagtttgaccgtgatcggaagtccatgggagttattatcaattccagctcaggaaacaagtcattgctagtaaagggtgctgtagagaatctattggagagaagctcttttatccagttacttgatggctctaccgtagaactagataaatattcgaaggatcttattttacaggttcttcgtgaaatgtccaccgatgcattacgttgccttggtttcgcatataaggaggagcttccggaatttgcaacatacaacagtgatgaagatcatccagctcatcagcttttgctaaacccctccaattattcttctattgagagtaaccttatttttgttggtttagttgggttaagggatcctcctcggaaagaggttcgtcaagcaattgaagactgcaaagcagctgggattcgtgttatggtcattacaggagacaataagaacacagcggaagctatttgtcgcgaa

SEQ ID NO: 49864 - DNA, 478 bp, Gossypium hirsutum
  unsure (1)..(478): unsure at all n locations
  Clone ID: LIB3828-026-Q6-K6-E6
tcgcggncgcgtggggngaagctaagcgaggggacagggcagcaaagatcaacattggccttatatccgcaatggcttgttccatagtagcatctttcatcgagaaaaacgtcggaccgcagcattgaaacacggctcattcaaatcccctatgagtatcttaatgttgttgccacaggggggtgtatcaggactagtcgaagcatttgcagccgtggcaattatggagtacctaacaactcaattgccagagtccatgagaaccgttgccggtgctattttcttcatcagcttatccatggcaagctacttgaactcgatgctcgtcaatatcgtccacaaaacgaccaagaaaggtgggaaaacatcatggctaggcggtcataatcttaacatcggtnagctcgaaaacttctattatctcgcggcntttatagaagcactcaatttcctttacttcaatctntttgcgagacga

SEQ ID NO: 49865 - DNA, 436 bp, Gossypium hirsutum
  unsure (1)..(436): unsure at all n locations
  Clone ID: LIB3828-026-Q6-K6-F3
cccgggttcgnacccacgcgttcctgtgttaatattaaattttttntttgtaaaaacagcanccaataagggtgagtatgtnccccaaaattgcangaatggttttgatagggccttctgttctaaaccttgngatcccgcanatgggctcactttaaattggcgcctctttgtgcgtgcagtacctaaagttttgaatttgtcatgcccaagtaatgagcagttgggggccctaaattaactgtgattaaaacagaccctaactgaaattgcgtttccctaaccctaaatcctcgtttttccttcctcctttttccctcattctttatatttgactgattattttaccttctcctgcctttttttgagattttcgcgtttcatatgtatttagttccggggttcttttttgacactgttggcttttccggctcct

SEQ ID NO: 49866 - DNA, 481 bp, Gossypium hirsutum
  Clone ID: LIB3828-026-Q6-K6-G1
tttttgtcattctggctttgtgatgatccactccagcccgccaacgtagagtgtgtgcgctttttcttaataaaatgaatgctgcagaacctgttagtcagtatcagctggcagttagtcgtggcctcgctcagggcttttgcatttcaaccattgctattccaaatggtcttattgcatattctgccttctgtttaccagtggcaagcacttacacgcgaagccagacccacagtaattttgcatctcagtgttgagcttcatggatctaaaatcactgcataccccttacttgaccaattcacctgagactataccctctatgatgtggaatacatgaggtgctttactgcacctctcaactcctatatgagaatgaaataatgggtcaaatctaaccatacaatcagtctcctggtcattatgataaccggacattccagtccactacatcgctcttgattgtctttactgtagctgc

SEQ ID NO: 49867 - DNA, 528 bp, Gossypium hirsutum
  unsure (1)..(528): unsure at all n locations
  Clone ID: LIB3828-026-Q6-K6-G2
gcgttcggatggcgaggctagcctttcttgtgcggttctggtggcaaataatgcatacagagcggaggacgtgatgactagaaaaaaaccatgnaatgtttatttaaactacttgcttgccaacagtaatgctattggcgtgaataacggtcgacagaagaagatgctatgcggaaacacagggcctatagtgcagaaatgactgggtctaaattagattttatatcttcctagtgtcttggcgggattatttatnccctcatcctacggagggtcacatctgcgagagtatgtatgactattagaagggaaagggacttccacgctaaagaatgcctggacatgctccaacgctaacccatagaaccgacccatcttttaaaccaccatgctggcacatcctatatggggttacacacctgtttcttgaggtggatttggcactatcgaagagtaggttcttgccatgcagccatcgctaacccataatggtcgagatatgaccgaaactttgaattgaacacgcta

SEQ ID NO: 49868 - DNA, 420 bp, Gossypium hirsutum
  unsure (1)..(420): unsure at all n locations
  Clone ID: LIB3828-026-Q6-K6-G3
gctgactctgctttcagaaagttcaggttcaggggggagacactgcatttgatgcatatgtggttggcanagaagagcacccgggattgttgttcttcaggagtggtggggtgtggattttgngatttaaaacctgccttgntgatctctcaactgggcccaggattcaaagctcttgttccagatttgtctcgnggaaaggttggtcttgntgttgctgaggctcatcacctaatggatggtcttgnctggcacggtgctgttnaggatatctgtgcttcggttgtttggcttaaagctaatggttcataataggttggagtgaccggcttttgcctggggggtgctctctctattgctngttctgtcttagttcctcatgttgctgctgttgctgccttttttggggttccttctcct

SEQ ID NO: 49869 - DNA, 568 bp, Gossypium hirsutum
  Clone ID: LIB3828-026-Q6-K6-G6
gtgattctgttattattattattattatttttaactctattccatactaaaaagaaaacatttgtgaagaatccatgagccttttaatcagttattcccattaattgatgggcatgcactttttttttaaaatatgacttttccactttgcaagcaattgtctccaactgtttgggcctcaatatttaagtaggtattatgtcattttcttttctggtgttggtaagtgcaactttgacaagcttgctgcaacccactcaaggatttcttccgtctagcattgaatccggttaagaacagagtatgtatgtatgcttgtatgtatgcatgtaggtatgcatgtatgtatgtacatgattccttaaactttggattttattcaatgctattcattctccctatgcttgatttcaaagtgtggggtttgggtggaacaagatgatacccaacagatttttgctcaaataaatagcattgatcgtgaattcagacttttccaggtcagcttctttcgcaaagtttggtatcttttgcataggaccaggaccaagcttctaacgaattaagt

SEQ ID NO: 49870 - DNA, 564 bp, Gossypium hirsutum
  unsure (1)..(564): unsure at all n locations
  Clone ID: LIB3828-026-Q6-K6-H1
ttcggncgcgtgggcggccgcgtgggctttggaggtcatgaaatgaatgaaagtgtgtcttggaatgcatcaggttctcttcttgcaacatgtgggcgagataaaactgtttggatttgggaagtgatgccagggaatgaatttgagtgtattcaagttttgcaaggtcatactcaagatgttaaaatggttgagtggcatccgactatggatattttgttttcctgtagttacgataacactgtgaaggtatggtggtcagatgatgctgatggtgattggagctgtgtacaaactttaggtgaatctagcaatggtcattcttccaccgtctggtcgcttgcttttaatgctaagggagacaaattggtgacttgtagtgatgatcttaccatgaagatatgggaagcagacatcataaggatgcagtctggtgatggttatgcaccctggaatcatctgtgcacactctcaggttatcatgatcgaaccatcttttcagttcactggtcaagagagggaattattgccagtggagctgctgatgatgctgtaaggttgttt

SEQ ID NO: 49871 - DNA, 578 bp, Gossypium hirsutum
  unsure (1)..(578): unsure at all n locations
  Clone ID: LIB3828-026-Q6-K6-H6
gttgttcaagcatattaaaaaagcgaaccaacagtggnaagacaaatcttatatatgcggctcaatcaaagaaataaaggtgagagcccgacgatttcaatatagtagtttcggattcatgcctggaaccgcaaatagcgcaaaccatgttctagcagaggaagggaggcgctatgtctcctttgagtacgggatagaagaggagccggtgagggtggatgaagaggcatgccaagattgaagcgggttgcagagaaaggaataaagggtggattttttagccggaggataagccatttagggactccggcgaccacagtattaaatgggcagtctcgcacctacacagaccatatacctatcaccggatgatggaggaaaggaaccagttttgctgcagttttacttttcgttttgcttagaaggataaggcaccgtttaaggagccaataggggtgcagcagccgaatagtattgcacttatgatttcctttgattaattaagggtgagtttggataggcggtatatttacttacggttagtataaaaatagtaataacggtgagattaaatattg

SEQ ID NO: 49872 - DNA, 561 bp, Gossypium hirsutum
  unsure (1)..(561): unsure at all n locations
  Clone ID: LIB3828-031-Q6-K6-C3
tgggggcggacatctcccgggtcgatttatgcgttcgccgaaactgaanaactgactgagtgaagagcaataatgaagagttttaagaaacttttcacgagtaaaccaaaaacacataaccctgaatctagttttaagattggaggaatggcttcacttaaagtacttgatgtcattccttctcctgaagatgactctcacaaactcaagaaagcttttcaagggttcggaacagatgaggatgtgataattgagatattgggacacagggatgcaaatcaaaggaagaagattagagaaacttatcaccagctttacaatgaaactctcattgatgctcttaagtctgaactttctggtgattttggaaaagcagtcattctttggacatatgatccatccgagagagatgctagactggcaaatgaagcattgaagtcaaagaagaagggtatcaagcatctcgagatcattgttgagatgtcatgtgcgtcgtctcctcagcatgttgtggcagtaaggcaggcttattgcactctcttcgatcattcaattgaagaa

SEQ ID NO: 49873 - DNA, 531 bp, Gossypium hirsutum
  Clone ID: LIB3828-031-Q6-K6-H1
cccacgcgtccggaaatcaccatcttcttgtttttcctccataagctccatgaagatgaaagctctaattcaaaccctaatctacactcaggctagtcgtctcattcgagcattttccaaagcaaaatccattgtcattcaaatttacaaacaaaacaatcctatccaatatctcatttccatctccaagaccgcagagaagaagtacaagcacaacaagctattctttggttcattcaggctgcactataattggtgctcttctcacgtcacaccagttccagctccagttcttgaagggtgtaccactactcatttctactatgattcaacctggaattcggccatttcaactcatgatcagcaaaaggaggatggtttggagtcggagctttcaggttaccttcaatggcttgaagaaaacaaggttaacagggaagctaataaagcagagacagaggtggatgatattgatcggttagcagaaatgttcatcgcaagttgtcatgaaaagtttatgttggagaagca

SEQ ID NO: 49874 - DNA, 527 bp, Gossypium hirsutum
  Clone ID: LIB3828-032-Q6-K6-F2
gcccctttttctggagtccgaattcatgctatggccccaaaaagggaaatcttcttcagacttgcctgccggtaaaagggttctggaagtgacgtcaaagatggttcaaattcctgcaggaccagcaccacggcaggttgagcctggaagtcagactgagcaagcacctccatctgctgtagttgatttggctcctgaggaaatgcatggcttcagattcctgactatctcagttgcacctcgtccgtgactttgtggtgctcagactatttcaggcaggcctccaccagccacttccatggcagttgggcagttctttaatccagatgaaggggaaatagactttactcctgtatcgatgcttctatcaatacactcccataaggatatcttcttgaaggaggaccacccccttgctttcaatctgtcatttgcaattagtttaggccttttgcctgttactttttctttgaaaactgcaggctgtggaataaaagattctggacttcttgatgaagctggtgata

SEQ ID NO: 49875 - DNA, 332 bp, Gossypium hirsutum
  unsure (1)..(332): unsure at all n locations
  Clone ID: LIB3828-032-Q6-K6-G2
ccgggtcgacctagcgnccgatatttttttatctttatgccccatgggcttagatagtgttatcttctctatcattctctcaaaattctcatgtggtgcttggggcggggtttgattgttaggtgatactgaacctttactacggtgcaagcttttcaattttcatgaagtgatttttttattctattttctgtataggggggattgtcaggggtttgatcttcgataattatatttatatatttggattcagattccaaattactttgtatatcaggttaggggctggaaaataaataacatacatgctaatatcaagatatttttaagag

SEQ ID NO: 49876 - DNA, 429 bp, Gossypium hirsutum
  Clone ID: LIB3828-032-Q6-K6-H1
gaaggcaagcacgttggcatactatagagcgagccagaatccacaagcaaggcgcgataatgagtgatgcagtcgaaacgctggaacctttacaatgcaatggagggagcgcacatgaaggcttcccgagtgtgaactcacaagtaacaggaggtagtgctggtccgtctgcagtggggggagcagcacattatcgactgcgacacagattttcgaaacactgttaggtccaggtgccgtatgtagagacggctaatacaaattgaaccccatgtggccctgcagaacgcatagttcgatgaagatgccacctactagaatacttggctggtgtgggttgagtagcatgacccaccgtcaaaagtgacaaatgcgctggataaaacaagggtggctcaactaaatagtacctcaggtgtaagctgaacg

SEQ ID NO: 49877 - DNA, 550 bp, Gossypium hirsutum
  Clone ID: LIB3828-033-Q6-K6-A1
cgggtcgacccttgcgtccgaaaaaagtttctttgctcattttgcggggttgcccaccttgctttgattgcctaccgatcaagtttcagcttgagtcctcttttgggggttttttgtcaacgataaaagcttgattgaagtgaaggttgcctctattcggttcaattcgggttttacgattactgttctttaggcctttggggtacatattatacgaaagctttggctcttgattgctggtaatcctccttcacttgtcaaagtttttttttgaacaaaatacatatatctcgaaaaaggggcggaaaattagaaaaagcaaattcaataaaggattgtatatcggacaaaagaataggatcatatttcatcccaccgtgtatgtaaacaaaaggcaaaccatctatgatagaatatatacagggtatttgcggtccctctcctctctaagaatgaatcagggttagcatgttaggctaggccctaatccaaaagttgatcaaatatagccaaaactctcacaaactgccgttctaagctccaaataaag

SEQ ID NO: 49878 - DNA, 426 bp, Gossypium hirsutum
  unsure (1)..(426): unsure at all n locations
  Clone ID: LIB3828-033-Q6-K6-D2
ccgggtcgaccttgcgtccggaaatttttggattcttgtgtaaaggggacacgcgcacacaaaaaaaggagttgatgcataaatagatgggagttttgaacgaggggggaattgcttatatagcaaagaaagcaggaaaatctttgttttattcaaggagtagcattaaattgtaactattattgtcataaatatatgggggggaaatcttttatttctctcaaaaaaaaaaaaaaaaaaaaaaaaaaaaaaaaaaaaaaaaaaaaaaaaaaaaaaaaaaaaaaaaaaaaaaaaaaaaaaaaaaaaaaaaaaaaaaaaaaaaaaaaaaaaaaaaaaaaaaaaaaaaaaaaaaaaaaaaaaaanncacccctttttaaaaaataaaaattaccaccactttcctttcaaacaacattttctttccta

SEQ ID NO: 49879 - DNA, 302 bp, Gossypium hirsutum
  unsure (1)..(302): unsure at all n locations
  Clone ID: LIB3828-033-Q6-K6-E2
ccgggtcgacctcgcgtccgattttatctatttgtgtcacataggatggcttttgtaccccttcaatgctgaaactcgtcttttgctcctcttatcgtggacactggctcaacacagtagctcctagactccgagtcaaatccgattcaaattgcgtcntnctntncgatgcagtgggtcgacttaccggattgtctcggaggaggggtgggaattctctatccagggctttcttctgttctgattccaatgatgggtnccggaatcgggttcaggggtncccaaaaaccccttgggttttt

SEQ ID NO: 49880 - DNA, 547 bp, Gossypium hirsutum
  unsure (1)..(547): unsure at all n locations
  Clone ID: LIB3828-034-Q6-K6-G3
ccgggtcgacctcgcgttcggagaattttaangaancaanggatgggggtggacacttccctgaatctggtagaggaaggcgctggaaaaatccccttgaacaggggaggcactggcaacataataggaggaaattggcattctcaacagttggaacgccagattatattgcccctgaagtattgttcaataaaggatggggggtggagtgtgactggtggtcacttggtgctatcatgtatgaaatgcttgttggttatcctccattctactctgatgatccagtgactacatgcagaaagattgtgcactggagaaatcatttgaaatttccagaagaagcaaggttgacaccagaagcaaaggatttgatttgtaaattgctttgtgatgttgaccataggcttggtacacaaggagcggaccaaattaaagcccatccttggttcaaagatactcgttgggacaaactctatgaaatggaagcagcatttaaaccgcacgttgagggagagtttgatactcaaaattttatgaaatttgatga

SEQ ID NO: 49881 - DNA, 471 bp, Gossypium hirsutum
  Clone ID: LIB3829-003-Q6-K6-B3
cagacgcgtggagccgggttacggtgccccaactttgccgctgaacctaacaacccacaaaaggtgttagcctgactaagccagacagacggtggttattggaagtccgaaacccgctaaggagtgcgtgacacctgatctggcaacttaactaacccccaaatggttggtgcttaagctcgcaacctataccctgacgtcagagcaagggcctggcccaaatgagtaagatggcgctgcggacgccaagaaaactcccaggcgcatagcccggcctgtgcgtccttaagtgcacatcttgttggttgtctcatatattcactatgagcaactttgcaagccgaagatgggaaaggttccatgtgatcaggacttgcacatactttagtcgatcctaacaactggggatagcccagtactcagctcttccagtgctagcttaaccaggcactactactaaaattactaaac

SEQ ID NO: 49882 - DNA, 468 bp, Gossypium hirsutum
  Clone ID: LIB3829-003-Q6-K6-B6
gttcaccaagagttttcaacaacatattaccatgtgagccattacataagtataataaaactagtctctcacagcgagcctaccttagaagaattttggttgcagttccacaaggcccagcatgtaccatcagcaatgtggtgaccgggaccctcatattgggtggaacctccaatcttctgatgctatcaccataccaatgttgctcatcgtaaggttcgtatacaatcgaacatcggaccaacacagaaaatctacactactattgcactgtcatcaaccaaccttacactatagaggatatggggctaggataacaataccttgcttagactatacctgtataccacctgctaaatgaactatacccaataatgaaccgatgaacattatagaaaccagcttataactactgctacaccaaaatctacatctacacaagctgataagaaacatatgcataatcct

SEQ ID NO: 49883 - DNA, 534 bp, Gossypium hirsutum
  Clone ID: LIB3829-003-Q6-K6-B9
cttgggtttatctttgggaatcttcaaagatcctttacgcctaaacaaaacctccccagaaaatggtggaagatcccaagctgcaattataggctcagcaagtgctcgtcgacgtattgaagctgggatctgacgacagagtactctgggaaggtgaacgctgagggtcctaaccccaacaatggtgacggaaccggtgaagctcaaaatattaagactagacaacaccgtatatgcttcaaacaaagactcaaagccggaattagaattattctaagcatgcaacgtaatattgcgaggtttttgcatggaaaaagctgagctgaaacccatgccaaacttgcactgaagatgatactgatttcccaggatctatcttacttaaattaatatgcctaatgggttctgaatatttaaatctatgtcgtctcttactattaatgatctatatgtaactctgctgatcatggcttaataattaatgaaatgttgatagatgctgtctgcagctggaatcaacatggatgtgggcgg

SEQ ID NO: 49884 - DNA, 367 bp, Gossypium hirsutum
  Clone ID: LIB3829-003-Q6-K6-D1
accaagctcagggtctcttatgacgacaatgacggtgacaccgccgacaggcggcaagaagcagcatgctcttccagcgacaccataccactgggacaaccacgggcgcaaccacagtgtctgcaaaggggttgggtggaggtaccaacatcctaaggtccgactaaaacagccaccggtttctatgagccaaggctgctgagcttctcttaacaagcactgataactaacagtatggttagccttactgggacactaagggttttgacatactatcggactagaaaaggcactaacatttatgcgctggtacagtcatgcatgcatgtgactatgcatgtatagatgctactatcattttagtagc

SEQ ID NO: 49885 - DNA, 456 bp, Gossypium hirsutum
  Clone ID: LIB3829-003-Q6-K6-D11
gtgactccttggtatcaaaaaaaaaaaaaaaaaaaaaaaaaaaaaaaaaaaaaaaccaaaaaaaaaaaaaaaataaataaataaacaaaaaaagaatacagaaaaataagaatgtgggccctctgttttaaggggcccaagctggcctccccgttgttatgagatatttgcttgtttacactgccccctcgttgccatcaactggctcgagattgccccctttgatcgctgggaagtccctggccttgccctatttagggttctttgttccttgccccttttggcccatggggttaaacggcgttgcgtccactctgctggccctatccaaaagtttttctgtccaaagggcaactttgtcgacgctgttgtctcggacattcagtcccgctgtgttgaatgctccacccgtagaatccgtttaactgacaactttcctccattgcgataaatgcg

SEQ ID NO: 49886 - DNA, 413 bp, Gossypium hirsutum
  unsure (1)..(413): unsure at all n locations
  Clone ID: LIB3829-003-Q6-K6-D4
gttcagatcactccggccattaacctactgagaatgaatgcctgtccaatgaagcagtgaaacagttgtcagttgttaggttgcatttctgttattcaatagtgtgaattggccaactagaaaaaaaatgttgaaatcattctgagactgaanatataatgtttagtttattgccccagnatggtacccatttctaacttagttgtatgaatccatgtnttgccttaatcttttttcttcaccagnaattcttgaaattggtaagccaaaaacacaattttgggtggttttccgaaatttacctttttcccgggggatatggaagccttttaaaaaaaaattttttttttttttttttttaaaaaaaaattgagcgcccccccattttttggggggggggggggggggttttt

SEQ ID NO: 49887 - DNA, 573 bp, Gossypium hirsutum
  Clone ID: LIB3829-003-Q6-K6-D8
cccttccttttcacacttcttcaaaattcaaaccctaatctataaaaaaaacatgaaattaagttcatcaatcttcacttttcgcttcctaaacttcaattccttattcattaaatctcatccttccttcaaaatttctgccgctaccaaaagaaccatgactcaattccctaatttttccaccaaaatttcaaattcttgtcccgccaatacggcggaggattcccaggtgtcgccgcccgagcccaggccgcagtctccgcctcgcaagccgtggctcatcgtcggtctcggtaatcccggcaagaaattcaatggcacccgccacaacgtgggtttcatgatggtagacgctatagctgaggctgaagggatttctattaacactgttaactttaaagctcagattggaaaaggatttataggaaatgttcccgtcatgcttgccaaacagcaaacgtttatgaactcaagtggtgagtctgttggggccattgtatcatattacaagattccattgaagcaagtacttgtgatttttgatgacttagatttgccttttgccaaattgag

SEQ ID NO: 49888 - DNA, 635 bp, Gossypium hirsutum
  unsure (1)..(635): unsure at all n locations
  Clone ID: LIB3829-003-Q6-K6-E2
gcaaaatctgtggatagtaattatgaacacgtttcctcccaaactgacatgctaaccgatcaaaatctgtcagagtctagagctctggttccagttccagcgatgaatgtcgaggcactagctgttgtccctgtcaaccagaaaattcggaaatctgagcttgcacagcgtagaaccaggaggccattttccgtgtcagaagtagaagcattggtacaggccgttgaggagctcggtaccggaaggtggcgggatgttaaattgcgagcttttgagaatgctgaccatcgaacttacgtggatctgaaggataaatggaaaacattggttcacacagcaaaaatttcgccgcagcaaagacgaggggaaccggtaccccaagaactattggatcgggtcatggctgctcatgcttactggtctcagcatcaaactaaacaacaaggaaagcatcatcccggaactttgagaattactgactcccaagctgacagaatcggatttgcggtcgccattccgaccattacaatgtaaaacaagaagaaaagggtaaaataacaaatgacaaagaacaggggggggaaaaagaaagaacatgtacaaattgattcangttttatgtaatattttcacac

SEQ ID NO: 49889 - DNA, 584 bp, Gossypium hirsutum
  unsure (1)..(584): unsure at all n locations
  Clone ID: LIB3829-003-Q6-K6-F7
tggttttcaagggactttcagttagcacattatgattaagcaaggttaggattgaagtcctttcactatcatctcttctaatggtgcagatatgacagatttacattacntcaacactgcctcatgngaaattttattctattgtaacgtttaatcattggtcaaccagatgaaacctgtgagagagagcatgacagaagcattgcaattatggaagaagattgcaggaaaaggggaagatggagctgcagatgacctgaaagccttgtctcatgatggtgacaatattcagtcagctgaatcatcagaaaagaatggctccaaagatccaagtgcgggtgataaaaaaaaacacatacttcagattctgtttctgaaggcaaaggtggaagcattattgacaaagcagttgtaattttaaagaagaaatcacctgcattaacagacagagagttgaatcctgaattctttcagaaactcgaaacaaggggttctgatgatttgccagttgaagtagttgttcctcgaagatatcttaattcttcaaacttgaagagtgaagaagtgtctgatccaaatggttc

SEQ ID NO: 49890 - DNA, 356 bp, Gossypium hirsutum
  unsure (1)..(356): unsure at all n locations
  Clone ID: LIB3829-003-Q6-K6-G7
taaaaaaaanagccaaaggcagagcagagcaaaagcggggacggaggtagcaaatgttgtcgccaaaagccaagtgcaagggaagaaggaacctgcaacaccgtacaatgatgtgatcgaggagacagccagtaagctagtagctgaaaagaggaggaacaaggtgagagcactagttggtgcatttgagaatgtcatagataaagaaactactaacgccaaatgaagtcattttcgtccaaaaatcggtagtcatataaattatcttaacgattccctgagtttcactcacatgcgtgaacactttgtataccatagcttatacatttctcatcatcatcatcatctacatctaa

SEQ ID NO: 49891 - DNA, 595 bp, Gossypium hirsutum
  unsure (1)..(595): unsure at all n locations
  Clone ID: LIB3829-003-Q6-K6-H1
aaaaaaaagacaattggttgaagcatggaatagactgtagagcaagaaaaatggtggttcaaggtattaaaagaacagaaaaaaacagcatgaaatcatagctcccctatttcttcaacctctctattaattcatctctttctttttcttcaattattccttcctttttgttgtctttatttaatcctttttggggttgtcattatcagtccaaaatccaaaaccccaccctgaaattatcaaattcccactcccaatttgcttatagtttttctttttcaaagtaaaggaaataaaagagatatagaacaaaaaaggaagcaaaagtttccatggattctcaggttttggtggcgcttgctctctctctcgtcggtggattgagtacttctctaggtgctcttttcgtaattcttaatcaagctcccaatttgaaaatgctcgggcttttacagggttttgctgcaggtctaatgttgagcatatcattccttgatttagctcataacgctatgaactcaattgggttcttgaaaggcaacctctggtttttttctggtgttatcttctttgctgtggttgccaattntatacc

SEQ ID NO: 49892 - DNA, 623 bp, Gossypium hirsutum
  Clone ID: LIB3829-003-Q6-K6-H4
gccatatggtgtttgcttgattattacttccgcagagaactgtcttgttcttgttctaacaaggattctcatgaacccaagaggtgaaaaatcaatcatgtctgctactgattacacagatgcagttcacaattttatattatcacagaagctgacaacattattgggaaattttcctgaggttctgcaaataagcgacttacttgagcataatggcgcagtcagtgatcagagtgtagtaattttgctcgttttcctgttgtcccagcttattgtcaagaaaaatgtggatcagttgaatttccataaactactgggttgcggttgccaaagcctagagaggaggcattcattaactcaaagacagtcagcaagttcagataccgttgtgcacaataaggaaagagacatagataccactaaagatgctgctaaaaagtttaaggccattcaggcttggtggcgaaatatgacagaacaaaactacaggagttctgtaagatccgccacttctatttcgaattgttccacagctcagaagacaagctttgacattttaagagaaaatgctgcaacaatcatacagtctcactatagacgactgaaagagcgtcgtaattttc

SEQ ID NO: 49893 - DNA, 597 bp, Gossypium hirsutum
  unsure (1)..(597): unsure at all n locations
  Clone ID: LIB3829-003-Q6-K6-H9
ggagctttaggctcaacagaaaggcaatgcaaacggcggnncgttgaaacaacggcaacagttacgagcttcgatgatgaaacataaagaggaagagctcgcattgtttctcgagatgcggaaacgtgagaaggaacaaagtagttttcttaatcactgctcagaagacttcgatgctcctttaggatctatacctggaacttctccgatatttagtctctcggcatcggcaactgctccggcgagaaagatgggaggtgctgctgacgattttcttaattctgaatgtgataaaaatgattatgaatggcttttaacacctcctggtactccactttttccttccttggaatcacaaaagactgtaatgagtcagattggcgctcctaaggctagcccgactgtgctgaaatctaagctagcaaatccacaggctgagtctgctgccaggagcaacttatcaccaaagcaacctgctttgtcccctgggttgaattctacagggattcgcaggccttcatcatcagggggtccaggttcaagacctgcaacacccactgggcgccctacattgactggagcttctaaacctacaaa

SEQ ID NO: 49894 - DNA, 540 bp, Gossypium hirsutum
  unsure (1)..(540): unsure at all n locations
  Clone ID: LIB3829-003-Q6-N6-A10
gggttgttttttttataaaaattttttggctagttataacaaaattatacaagttggaggatatacattaaggttgggggtttgaagancataataccataaagttcatatacctgtaattggtttttgctttttgagggatatgatatgaaaaagtgtgtttgtttacagtgttgagttaatacaatataatgaggttgnatcaagtaaaactaaaaaaaaaattaccaggtaccgggaatgtttcagttatgaagaccacctataaagcccaaaaatctggccatactaaaaacagattatnaccattcacctatggtttaagtgttaagcctactnctgggaggagcagnagaggttgcttntttcttttcttattattattgttgttcaggcttttttacactggttgattgattgtttgatgtctaagaaacctncggtttgttatttacttttgggtgctttttggcaccgaaaagaaggttgaagagaactgtgaccataattaccaaaatggagaccatgaccccccccccc

SEQ ID NO: 49895 - DNA, 417 bp, Gossypium hirsutum
  Clone ID: LIB3829-003-Q6-N6-B11
gtgttttttttttgttttttgtttttcttggtcattgtgtttttttcaaatagcgtacagggtaggcgaaacgtaccttttcgcagttaagtcgactgacgataatcttagaaagttggccttcaattatccaatcgttctagaatccaggggcgttgttaacaccattcaacatccgcatgaccagaaactttaaccatccctttctttgcaaaaagactaatttaggatttctgcgctaaagaggcggcgactggaaaaagtgatccatgggccacctttcattctatgggcgcaattgaggctctaccataaacttcctggggggcactgatatagcaacaattggcagttacctttatccatacttcctgagcataaagaaccggaacagatagtacgtttcttttcgggccc

SEQ ID NO: 49896 - DNA, 545 bp, Gossypium hirsutum
  Clone ID: LIB3829-003-Q6-N6-B6
gaaaacctgattgctcaagaataatcatattttatcagcggtgaaacactacatgagagaaagtccaacttcctggattcgctgaaaactttatataggtcctgtaaaactaacacccacgtgctacatatattctattcaagctagctaaaacggtaacccacaaagcttgctcttacaaaagtttgccttgccactacttggagggttctacgcattggctgcattggtactgtctaactcgctctaatactagccgtgtataagtgactggtgggtcagaagttcctcggcttgcttgaacatgactccttgctctataggctaacaattgctctaccccatgacccagcttgcacacccccaaaacatcctattatcagaaaacgatttgaagacagtgatcccatatgagaatccactgctcgagggaccagtgtcatgaatgcaaacttctcctgagacaggagacttgctaaaactccccatgagggagacaaagactgttatcgggcgcccgacctacataatggcttgtaagggaa

SEQ ID NO: 49897 - DNA, 416 bp, Gossypium hirsutum
  Clone ID: LIB3829-003-Q6-N6-B8
caaaaagatcgacttatcaaccccataaaattgtgattcattcattatcttgttatattcacgtaattgggtatgagcggagcataaagtaacatgtggcgcaaacgacgccgttgcgtttctcataagaaatccaaggcgggtgattgctcttcgctctttggaaggaaatacgacgccgttgattgccgtcttaacccagcaatctccggcggcgtaaccgaaccttatgagcgcgaaattcagtgctttaaaaaaaggatgcgttttgactttggcagcaccccgtttggatcccaaccaagctttgggttccttgttcaacaagccggaaatgaggtcacccacttgttgctcaactaaggacgaaggcgactggtattgtcgaaagcttgaggtttttttactatgttccg

SEQ ID NO: 49898 - DNA, 506 bp, Gossypium hirsutum
  Clone ID: LIB3829-003-Q6-N6-B9
accaactatcatcatttaattaattttaaaaacatgatttgcagggttacagatgaacgattaatactaagcgacgacttcaattgaaagatgagaacacattaaacatattagtttaattagggaaaatgtggggatttttttgctttttctttttttttgttgcatgggtttcaacccgaattttcccatgccaaaaccttacaatttgacgaggcttgctgacaataattccttattccactttcaaactttgtttgaagcttatggggcggttgatagtgttggtattttgagctttaccggctccggcaccattgttggggtttggacccaacgatttcacttacagagacaccgtcccaggtcccagtttgacaacgtctacaactacttgctgagccgataaaagaaggctgggatcttccaccatatttttggggacgctactgtatatggtgttaagtaaaatcggaaggaatgccaaggaaaaacccaaacggacc

SEQ ID NO: 49899 - DNA, 327 bp, Gossypium hirsutum
  Clone ID: LIB3829-003-Q6-N6-C11
aagaagtaaaaaaggtcaattcgcctgccttaatcataacttttgtcgggcctcaattacattcatattaggaaaaaaccattgatttgtgaaccaccactagtacaatataggggcccatgctttgtcccttaaccgacccttaattccattatattaaaaataaacatcaaactcactccttggaagagaaacgataatggagaccacttgatcatggacgggcccttatcaagcacctgtgccctccctcactcccttactcggacttaaaagggatgggccttatcactatggcctggggcaaagctgatgaggccggctccc

SEQ ID NO: 49900 - DNA, 467 bp, Gossypium hirsutum
  Clone ID: LIB3829-003-Q6-N6-C8
caactcaaaattataattttttgtttaaacaaagcacgaatttgggtcttagcaaaaaaaaaaaaaaaaaaaagggggaaatcggggtagtattcgggaaacaacaataataattaacattctaaagaaccaacttaagctttaaacaagggctggggttgattttccaccaagccaacagccacgtggcacaaaggttaaactggccccttgtttgcatgcatgcaagcagcccggtctgactgatacaatcgttagcaacattcctacagcccacagattaatgggttttaatcgttaaatcttgcttgaaacagggtttttttgaccctgaaaagaggttcatcaaaggccaaaaaatatccagtttgggaaagccactaaaagtctccacaatgaaaggagcccatgttttgtttaaacagttttccgaaacacccttcaaaattgtaaagtaaaagctttta

SEQ ID NO: 49901 - DNA, 346 bp, Gossypium hirsutum
  Clone ID: LIB3829-003-Q6-N6-D4
aaaactccaacccaaactagcatcaattttaaaaaaaaaaaagggctaaggctctttcctcggaagaggaattcgaaacacaaatgggggtggctacaatttcagaattcgggggaagaaaaaagataggcaaacaggggtcatacaactaagttagaaagggcccatcgggggcataaactaaacattttttttcaggctcagaagggtttcaacatttttttttctagggggccaattcacacttttgaataacagaaaggcaacctaacaacgggcaactggttcactggttcattgggcaggcattcattctcaggggggtaagggccggggggatctgaac

SEQ ID NO: 49902 - DNA, 531 bp, Gossypium hirsutum
  Clone ID: LIB3829-003-Q6-N6-D8
cacaggttaaagtctctaatccatatattcatcaatgcacacaaataaatccccatttaaacaatgaatacaacaaaaccagagatataacatttccatgaataaaatcaaagaaatacctctatctatctctctacaccatcagtgcaagcttcattttttgattaaaaaaaacaattcttctaaatttctaatgcattgaagcagttatatatcagttaataaaaaataacatctaaaatcactaatgagtaattagaaggaaaattcaatgatatcagtttctccactagcaaattacccaacttttctgcttgcctggagcaataattttacccaagctgttccattgctttggtgctgttgacatatgttgcacttttatcgaaaccctcgagtaagagaatccggacagcctccattccattgtgaaacgtaaactccagctcttcacgttctttcttgttgaaagcacgaagaacaaaattaatagtatccatcctcccttgaggtcgtccaatgccaattctt

SEQ ID NO: 49903 - DNA, 518 bp, Gossypium hirsutum
  Clone ID: LIB3829-003-Q6-N6-E10
caacttaatactactattttctaatgaagttctattttccaaaaacaagtaccttttcataattcaactgagttataaacctacaggaatcacaaaggattcattattactgtgcgaactagcaaaggggcaccgaaggttcattaaacaaaatgtaatcttcaatgcaatcggggaaaaaggctgttctgaggtaacactaacctttcacgatgactaaaaccatctccgaatgatttcaggtactacgaatacaaaaactgtttgctggtcgccccgatccccagaaccctctttatcattgcataggatcatatgcccaatcgacatttgaaatttctcgggcctactgggcccggttttaatagggcatgcttcccaatctttaaccagatcggtgccgtttgcacctccctttttttatgctgaacaagctctgataatatgacgtgcactggtgctaaaatgaccggcacacaaagcccaaaaaaccctgcggcggacttcttagagtgaaa

SEQ ID NO: 49904 - DNA, 320 bp, Gossypium hirsutum
  Clone ID: LIB3829-003-Q6-N6-E2
aaaaatactgtaatattctatcttttatttctatttctattttctcagttcgatgatttgaattacaaactgacaatgaaatgaattacggaccatgtgtcatccaatcattgacctaaatgccaatggctccatgatttgtaagctcgcaaagaatcaccgttgagtgcgaaaacttacataaaacctgagtcaattagaacatgttctttctttttccccccctgtgcttcgtcattcgctattttcccctttccttcttcttttacatagtaatggtcggactggcgaccgcaaatccgattctgccagcttgggag

SEQ ID NO: 49905 - DNA, 432 bp, Gossypium hirsutum
  Clone ID: LIB3829-003-Q6-N6-E5
ggaaccacaattcccaagttttcaatgttgcaaagccaaggttggattccatcccaaccaacttttggcacaaaattttagtctatcaccaaatccctacctatgccggaaaactaatggggaacagaaattgaattcatgaaacccgggtctcccattttctaaaattaaaaaaaattccgcccaggtaaatctcctgggcgggcctttcaaccaaaaacaggggaaacaggggctgttttcgagggggaacttcgggccagctaaatctacttgggtggcctttcaacccaaaacaggaaaaacaggggctgctttcgaggggcaaccacgggagggaaattcccttccatttacaaaaacggctttcgagggcaggcctaaaaaaaagctaaaaagaattttttaaagagggtaaagcccacccctccc

SEQ ID NO: 49906 - DNA, 509 bp, Gossypium hirsutum
  Clone ID: LIB3829-003-Q6-N6-F10
agataaaccaaagcctattgtcaatgttcgccactataataagattatatgtgctcacatatatatatggttctataatttagataaaccattagatagagaatgattaatgagttccctcctcaagatcttccctgccggagttttcggtattgaatttataaaagcaactcgtcggatcttcttgtacggtgcaacttgttttgcaatgaaatccatgacttgtgcctgtgtaatgttacttccagggttcctgactacatatgccatgggaatctgccctgcttcttcatccgggtacggaatcaccgcagcatcaacaatttctggatgggaatgaagtaaatgttccaattcagctggagggacctgataggctttgtatttgatcaattctttcaacctatcaacaacgtagagaaacccttcagaatcaaaataacaaatgtcaccagtttttaaccacccttctgagtccaaggtttctgctgttgccttctcatcaccta

SEQ ID NO: 49907 - DNA, 476 bp, Gossypium hirsutum
  Clone ID: LIB3829-003-Q6-N6-F5
aaaaaggaataacggtcgaacatgtctaaaagtctacaactatctttgcaaagggattaaaaacggagtataaaaggggaacagtcaacaatgggaccaacctcctttaaaacgcacactcatgcctggaaagggaaattaccttcaaccctaacccaaggaaaacatatcctgggggaattaagagtgatgttacctaaactcaaaatgtccctaagttggggcatgggaatagagcatcacttctcctagctgcactttaggttgaacagccttgatgtcaaaaggcgctggtcaagaataaaagtattcttggccctggttcagttccaggattgggcaaaatcaggatgagtactcgaatcggtgaagggggtgaggttcataataaacggccatggctgatgaactctgttggcctgaaactgttggagacccacctgccagggatgccctggatgtgggtgcatctttta

SEQ ID NO: 49908 - DNA, 528 bp, Gossypium hirsutum
  Clone ID: LIB3829-003-Q6-N6-F7
gaaataatagctgttaaagcttttctgtgatttccggcattgtcaagtacacgtacatttacatttatatcagaggccactatcttacatgatatacaaaatgtataagtagcctcaaccattgatgctagttttctttcacttcaaatttacatcatgtaatatatatgcgccgaaccagagtaacataatcatgaagtttgcaagaacaacacaggattccaaaaccaaaaccagcagatttacttatcaaactgttgcagctcaattttccaggcagatgccaattgtaatagaagttgatcaggtactgcgccttcccaattctctggtggatccatcgtggaagctgcctcatgtaaattcaacagaagctctttcttcaactccatcggtatacccaatgcatcaggtccgttttctatcaccactttgaccagctgttgaatccaggatagacaaatatcaaacaaatcttgctccataagaaattgcacaatagagtgcaaggcttcatttgctatctct

SEQ ID NO: 49909 - DNA, 522 bp, Gossypium hirsutum
  unsure (1)..(522): unsure at all n locations
  Clone ID: LIB3829-003-Q6-N6-F8
gngaatgtcataatatgcataactcaaacaatgtagaactacatatagtccaaaatttagaagtcgagtgaatcatctcccttctctctatgatttacatgcaacacatttttaatcagttcttgaataagggggaaaatgatatttatggaaacataatctggaagtgaaaggtaatatatctgcataattttctagatcctcctttcaaaatcacctatttgttttagtatacctatcaaacagtgacgcttgaaaccaattcgctcctctcaagactattttcggcaggcaaaggagtacgaggagctctatctgcagccatatttaatcgtagaggtcgaccttcaacctccactccattcatggcagttagagcagactcaacggtctctgctgactcgaaggaaatgaatccaaaaccacgagaccttcccgtgtccttttcatagatgactttagcactcaacaagcctggctggctagcaaatgcgtctctgagaccttctgaagtgacacgcc

SEQ ID NO: 49910 - DNA, 574 bp, Gossypium hirsutum
  unsure (1)..(574): unsure at all n locations
  Clone ID: LIB3829-003-Q6-N6-G1
catcccgtactttctggaactgtaaacacttataatgctttaacatttaaccagttccataaacagctaacaagtactgatagtctaaggatctaacgatctaccggaaaaaaaggtttccttttacataaactgaaaaaggttaaaaccctattatgagtctgataagtcatatttacaatctgtggctattcataacaagattcataatatactgtctccagccatcccagtaacctcttcatggattagacaaaaaggcacaagaacaagatacatttgttaccctttcatgtatacaagctcaatctacaactgcaaaaaaagtgtttagcagtcactcttatccccaccctccagaagcactggttttagcagcactcccatctaaccctttaaaggaggctcggggactctgtagctatcaggcgttatggaagataaccacaatccaggaaacacgcaatcaagttgttttctgaacatttttggctcgcttttttggccttttagaaacctttgaaccggtcatagcaaagatatcctnatcaattttttccctagtaagccaaat

SEQ ID NO: 49911 - DNA, 336 bp, Gossypium hirsutum
  Clone ID: LIB3829-003-Q6-N6-G7
aacttaatatgttctcatgtaaaaacagaaaagagagaagttttttacatttaaatagaacttggctaaaagaacccaacccaacccagcggaggtgacacaaatagaagagtgatgtggtggctgcgttaatttttctagagcctttgaggagccacccaccgacccaacaaacactaatgccttctttaattgcagctggaatatgctgtcctctattgggtgcttaataacaaacctcacaagccttattggctaacataaccctattcgggggatactatcttgggcttggcgctccacaactgggttgcaccaagggtccagcaagaaaac

SEQ ID NO: 49912 - DNA, 562 bp, Gossypium hirsutum
  Clone ID: LIB3829-003-Q6-N6-H1
atattaaaatacagtatccataaatttatttgtaatcccctcttttttttcccccttttcaatgctcatgttgttacaaggaaacaaattatgtacattgcaaactgggcctgttcatcctttttgcttttaagatatctcatagtttggctaaaattatcagagaaatcaactaaataaaacatcttggttcaggaatttacaacatttttttgttcatatggaaagaggttacaagctcatgtccttcggtaagcttagttcgagaaagtataggcttgcagacatgaaagccatcccgaagaacacagccttgacagcttgcttctgcccggcatagtcaaatgccaatggcagcatttcatgtaatgttaggaaggccatcaccccaccaactgatcctaacaagccctcgagaatttcgggacttaagctgctcgggaacagataagcaacaattacaacgccgagaggctctgcaaaaccagaaagagttgccaacttgaatgcctgccacttgctctgtgtagcaaaataaacaggcagtgcaacagcaacaccc

SEQ ID NO: 49913 - DNA, 562 bp, Gossypium hirsutum
  Clone ID: LIB3829-003-Q6-N6-H4
gtgaaaaaaccatgtttactgttccaatagcagtgtcagtgtgcatctaacaattcaaatcatattcatttgcaaagaatagaatctgaatcagtcacacatacaacaacaaacacaacctttgcattgaggatgcaaatcagtcacatatcaacatttgctaacagatacgataattactggattcgataaccatttgttatcagtctaagaagttggactgccttcttcaatcttctatctgtgttctcttttaggacaacagtacgaggattccttttttcagtgttcaatttccttgtaagctcttcaacaagagtgtgtagtctcttcaaaagagcaggaaacttgtgtacagctttcacacctttcggatttgaacatatcttcttcaagatctcggaagcaataaagtaaccttcttccttgttcctgagcatctcccataagattatctcaactgatggaggagtgtcgattaacacttcggccaaatggggatatcgggctaagtttctgagggttgagagtgcatgctttagaacctgctgatcagggatgc

SEQ ID NO: 49914 - DNA, 371 bp, Gossypium hirsutum
  Clone ID: LIB3829-003-Q6-N6-H6
acataaaatcaaactcgctgagaacatcccaaattcatgttgtggagtcgatataaagggttttttgcatattaaatccccggccaaataaaactttgaatggtcccctatcggcacaactctgttgggagaaatggtagtgaaatatgcttaaaattgcttatgaatttggaacttaaggtacttgaccaacccatttggaacctggccccctttatttttccattgaaggccagggccaacacattattttgcttcacaaaccataggtcctttccctttgcctaaaatccccggattccattgtttagttaaaagactagcttatggaaaagtttgattgggtttgaagtactttcagtgttcataaa

SEQ ID NO: 49915 - DNA, 506 bp, Gossypium hirsutum
  Clone ID: LIB3829-003-Q6-N6-H7
gaaaactgaatttatcaaaatttataaaaatatataatcttttaaacactattagtgtaaatgtccaaattcatggcatgttttatctggtaaaaaaggaatgaaaataagaacacccacaagcaaattatatttaatttaagctaactaagaagctaaaccatcaagcttgtcctaataaaagctaggcttaagactttgtagagcctttcaggcaatggcaccatttgaaatttcttattcaaactaagatgtgccatgagaagtgcaacgtgggtctgcaattcctcgccttgcttgagttgcctcgcatgctctttccacgaacaatattgagccggcataacccagcatgtccagccacagtttccctattatcaatttttatttatcttcgtgatcccatatgaaatccgatgccaaagtcaattgctcagggatttggcacccttcaaagaatgtcgacttcctcaaacttcccatgtcgataaagaatgatcgggatc

SEQ ID NO: 49916 - DNA, 360 bp, Gossypium hirsutum
  Clone ID: LIB3829-003-Q6-N6-H9
aattaaaaaaaactcaccctgttaaaaaaggaatagaaaaaaaaatttttttcatttaccttggtaaaaatacagggggggggaattacaaaacaagaagcaaatttaactagctttaccttgattttaaaataatgattcctttcggggtttttcctgggaattggttttcttccaaatgtaaaatattctaaaattaaaaacaattaatgggttgccataccctatgggctttacaccctgaccattatcgggcattcattcttgcagggaaaccaccacctattttccttcccaattaattttttatttaactaccatataaacaaatgcccttgttttttgaacctaaactcaaaa

SEQ ID NO: 49917 - DNA, 586 bp, Gossypium hirsutum
  unsure (1)..(586): unsure at all n locations
  Clone ID: LIB3829-004-Q6-K6-A5
agnattaagaggtggaagtgaccaaggtggaaacgcaacctagtccaaccatcatctccattcttttccttcaaactcaaccaaaatcatttttcattttctctcttttaagccctgctacctcctaccttctcctgtttctcaactaaagaaatagtgtaaatgatgtgatctgggagaggttggtgagtgagatattgcagagaacggtatgagttgcggttgttttggtggatcagttgttaagcggagacagagcaccgctcgggccaccggcggtatagacgagcaattaattcggacggtcaaccatttctcatacgatcaattaaaattagccacagatgattttcattcaagcaataaaataggtcgtggaggttttggaaccgtttacaagggaattctaaaagatggaactgaagttgctgtgaagacacttgcagcacaatcgaagcagggagctcgtgaatttttgacggagatcaacactatatcaaatgtcaagcatccgaaccttgttgagctgatcgggtgttgcattcaaggagcgaatcgtatattggtctatgaatacgttgaaaat

SEQ ID NO: 49918 - DNA, 576 bp, Gossypium hirsutum
  unsure (1)..(576): unsure at all n locations
  Clone ID: LIB3829-004-Q6-K6-B2
gnaaacanaaaaaaaaagagattgagattagctttgttttttatgatattataatgaaaggagagtatttaagttcttcttctttngaaaacccatggctcagcagattcaaatctcatcaccattgatactccaaaagctgtattgtgaaaaagaagaagaaagctttgaagacgacaatggaagtgaaatttgtgttgaaacagtgaaaaaagagacatttttaccttcattcttcattgaaaatgattgtttctttgaacaagacgatgagttgtttgttttaatgtctaaagagaaacagacccaccatgggtacattgatgttaacttaaacaagccactggttttagctagaaagcaagctttggggttgtttttcaaggtcaaagaacactatgggttcaatgctttaaccatggttcttgctgtgaattacttcgataggttcatttcaagcttgaaacttcaacaagacaacccatggatgagtcaattagctgctgttgcttgtttatctttagctgctaaagttgaagaagctcaagtaccactccttttagaccttcaagtgga

SEQ ID NO: 49919 - DNA, 580 bp, Gossypium hirsutum
  unsure (1)..(580): unsure at all n locations
  Clone ID: LIB3829-004-Q6-K6-C5
naaaaaaatggnatttttagactttcctcattgttttggcccttatcttcctccgtctttggtggcgctactggtcaaccaccggtggtggacctaagaacctccctccagggccacctggttggccacttgtcggaaacctaattcaaatcatcctccaacgtcaacacttcatatttatagtacgtggtttacgtaaaaggtatggtcccattttcagcatgcaaatggggcaacgcactatggtgattgtgaccgactcaaggcttatccatgaagccctagttcaaagaggacccacttttgcttcccgaccgccggattcgccgatccggcttgtgtttagtgtcggaaaacgggctatcaactcggctgagtacggacctttatggagaaccctaaggaagaacttcgtcaccgaggtaataacccctacgagagtgaaacaatgcggttggatccgtaaatgggcgattgaaaaccacatgaagcgaattgaaagcgatgcaatggagactggtgtcgttgaggtaatgagcaactgccgacttactatatgcagtatattaatctgtttatg

SEQ ID NO: 49920 - DNA, 474 bp, Gossypium hirsutum
  Clone ID: LIB3829-004-Q6-K6-D4
ctgacgccagggcgcgtgcgcgtgccaaccaatggctccactataccacataacgatttaaatagtcttttatcttcccatatataactgaccgagagctcgcagcacctggtgaatgggaaggtgcgcaagcaattatatgagaaatcctgagtccatcaaaaagctagagggcgctctctttaacagagccaagcttacatgcgcgatcgtgccacgacctacttttaatataacgggacctagcatcaatgcactggccagcggaccacaacggctggacggtgaaaaccatctcaatacccagacttaactctctgactgcacatgacccttctgacagaaggggaaggctcaagaaggcccgagcccctagccctaacactcacaaggtcaatgctgaatcagcgactggtacacgccctggctcgaggcatgaatcactgcggctgcagtgcatacactcaaaaagac

SEQ ID NO: 49921 - DNA, 545 bp, Gossypium hirsutum
  Clone ID: LIB3829-004-Q6-K6-D5
gaactaaaccgctacccggtccctctcaatctaggctaactgacaccatcagacctgatgccttgccgagcaacaataatcgttgcattacatcaagaccgatgtctgcaaatgttcctcatggcagactgtaggaacgaacactagccgggtgggagtgattaagaacagggagaagcacaaaggatagctatgagacaatccactttcaggatgctgctgggacatgagtatacacactcgccttggccatgtgttcacacattggaaaatgacacgaatccatcgatatcccttcccaatggcaaagggcttaagtaggccatcatcgatgaaactctgactaggcttgctgcccaaaatgctactccaaccttaacacatgatatctatatactgccttgctgctgtattttattctaccactactagatttcttgctttcggttatgaacaaaatccgaatatgttaatgaacttacaacgctatattctaaatcaatgcttgcaacttgtaagctttcgtgaataccaaaagctactac

SEQ ID NO: 49922 - DNA, 485 bp, Gossypium hirsutum
  Clone ID: LIB3829-004-Q6-K6-E12
acagttagaaccgaaccgtccagttgcaacacacactgttagatctgcaaaagcggttgcaaacgggggctctttccttgctacccctactggtgctaagggcttccacgaagcaatggcaagccaaagccctgggccatatatgatatagggaaccgaaccgctacccacatggtcagggatgagcccttctcgcgctagactgctctatgggaggggtggtataccggcttgggtccctggcgcggaaacaattgtgttaaagggagcttggggcgtctactctatgagaaaactctctgaaatcaaccaataagcactaggcgctgatggcaatccttgggaggctgaaaggattgtacaggctgaccctacaccatctataactttacacactctgctggatcgaactaggaatccaaaaccaatgcactagactcgcagaatattagtaaaacaccaaacacaatctaggaggcctgaaa

SEQ ID NO: 49923 - DNA, 563 bp, Gossypium hirsutum
  Clone ID: LIB3829-004-Q6-K6-F12
gaaaatttcttatgtgccttaattattaggtttgcaaagcgaaatgaagataaccggtggctacttgagcacaaggatgtcactgattttgaatccagaaggcatttggccatgatgatgtttcctgaggtaaaagaagattacgaggaattacatgagatgctcattgacaggtctcagttattgtcagaatcatttgagtacattgctcatgctgaccctgaatcactgcatgctggtctattcatggaatttaaaaatgaagaagctactggccctggtgtattgagggagtggtttttcttggtatgccaagctatattcaatccagagaatgcccttttcgtgccttgctcaaatgatcgtagaagattttttcctaatcctgcatctagagtggatcctttgcaccttgaatatttcagatttgctggccgtgtgattgcattagcattgatgcataaagtgcaagtgggtgttgtgtttgatcgtgtttttttccaacaattggcgggaatgcatatctctttggaagatatacgagagacagatccatgcttgta

SEQ ID NO: 49924 - DNA, 568 bp, Gossypium hirsutum
  unsure (1)..(568): unsure at all n locations
  Clone ID: LIB3829-004-Q6-K6-F9
gccacctgntggacccgaggatggccaaanaataacagcaagcgacagtggttggtcttttacagggttaatcaaatgtctcttcaagtggtggtgccattgacggtagaggtcaaaatggtgggatctcccttgcaagccccacaagggaataaatgcaacaactttgcccggaccatgtgatagccccgtcgctataaggtttttcatgagctccaatttgacagtccaaggacttaaagttaaggatagtccccaattccatttcagattcgatggttgccaaaatgtgcatgttgaatcacttcatattacagctccagcccttagtcccaacactgatggcatccacattgccaacacaaatggtgttcaaatatataattcagttatctctaatggcgatgattgtgtatcgattggatcgggatgttacgatgtcgatattcggaaccttacttgtggaccaggtcatggaatcagtatcggaagtttaggtaaccacaactctaaagcttgtgtacacaatgtcacggttcgagactcggtgattaaagtatcggataat

SEQ ID NO: 49925 - DNA, 563 bp, Gossypium hirsutum
  Clone ID: LIB3829-004-Q6-K6-G12
cggccgcgtgggcggccgcgtgggcggacgcgtgggggcggcttagaaacttctgttattgttccatggctaagggagaattatggttgtgaggttgtttgcttcactgccgatgttggccaaggcataaaagaattggatggtttggaagcaaaggccaaggcaagcggggcttgccagttagtagttaaggacttaaaggaggaatttgtgaaagactatatatttccatgcttgcgagctggtgccatttacgagaggaaatacttgttgggaacctcaatggccaggcctgttattgcaaaggccatggtggatattgctagagaggttggggctgatgccgtttctcatggatgcacagggaaaggaaatgatcaggttcggtttgagctcaccttctttgctctaaatccggaattaaacgttgtggctccttggagagaatgggatattacagggagagaagatgctattgaatatgctaagaagcataatgtgcctgttccagtgacaaagaaatcaatatacagcagagacaggaacttatggcacttgagcca

SEQ ID NO: 49926 - DNA, 601 bp, Gossypium hirsutum
  unsure (1)..(601): unsure at all n locations
  Clone ID: LIB3829-004-Q6-K6-H10
gnatgcacttggnaatctagccttcgcattcagaggccataatttagttttagagatccaggcaacaatgccatcaacattcaaaaatccagctcatgtgcccatgtggagaggagccaaggttgcttatttcttcattgccatgtgccttttccctgttgccattggaggcttttgggcttacggaaaccttatgccttcaggagggattctgaatgcactttatgcatttcacagtcacagcattccaaggggactccttgccctcacttttcttcttgtggtattcaactgtctcagcagtttccaaatatattcaatgccggctttcgacagctttgaggctggatatactagccgtacgaatcgcccttgctcgatctgggttcgttctggttttcgtgttttctacggatttgtgtccttcttcataggggtggcactcccattcctttcaagccttgctggactgttaggaggactcacccttccagttacatttgcttatccttgtttcatgtgggttctaataaaaaagcctncgaaatacagcttcaactggtacttcaattggatcctgggttgggttgggtgttgcctt

SEQ ID NO: 49927 - DNA, 624 bp, Gossypium hirsutum
  Clone ID: LIB3829-004-Q6-K6-H3
ctttaatggaaaaaaaaggtcaagtgaattgtaattctaaaagcagtgatcagtctccttgttcaaactatgatgtttgttcaggagatgatacttttagaaacgtcacaccgttggaaggaaccgacttcactgcaaaagaaagttctccttatactggtatagatgattctaatattgggggtcaaatagagagttctcagaatttagtcctagattcttgccaaagtaataactttcctgaaaaggtagacaatgatagaacttgcaacttagcagtaaagaactctgatgctatgcttgttggtgagtcttctgttatgactcaaggtgctaatgtttcccctagaaatgaaggagctgaggctaatgattcatcagttatggttacatctgaaaagtactatccagaacaaaatgcagaaccagataaggtttgtgataaaaaaaattgtttttctaatcgagactctacatgtgttgcctcttgcttggaagctgatgtaaatgttgatggcacaaacaagatgcactccagagaagacaaaacttgttccaacagcgaggaaggagtgattgctgaagtccaggctgtacaaaacaataaggtcttatcctgtccca

SEQ ID NO: 49928 - DNA, 375 bp, Gossypium hirsutum
  Clone ID: LIB3829-004-Q6-K6-H5
gacttaatcatcataataacaaacatgttgtggccctaggagacatgaaccttgtaccttatcattagcactcctttttgaaccaagctcctatgtaccagacagctttggagatgtcggtgagaggtggtcgcatggggagtcgctctagagaggctcgacctttgaacaagtgcggggggagccggtgctcaccgcgaagacggatgccacgggattccagtacattctagggaggcctctaggggggggaccggccctaatgggaaacagaggtggttctacttattaaggcgttggtcgagggtgacctattggaggaaggtttatcttgggcgggtcccataggagtataggagggaggaatacgagctg

SEQ ID NO: 49929 - DNA, 540 bp, Gossypium hirsutum
  unsure (1)..(540): unsure at all n locations
  Clone ID: LIB3829-004-Q6-K6-H7
cctttactggnatcctcatctcttttatgtccaagnaagacatgatcaacttgagaacatttcaccgcctcatgtttttgttggcaggtcttgaagcataaaaaatcctttgaggaagttaatggagttggcaaccccaacaataatcaaagcgcatacctggaggaatcatcactgctttcctatcaacctgcattagtttcagaaatactggccatgctttctattattcccgagctgccgcctgaattgcaacagcagcttcttcgcttaccagctgatctggctagaaggctgatttcccgtgcttctgctcggactatccagagaatctttttatgattcttagttgcagcttttcatgattgtcttaactggatggaaacttcaagcaaccgcataagggagggttttgatcgaagcaacattgacttgcaaattaagatgtcaacaaaaaagttgttcaagacgagagctttcagttggaatgacatgtatgtgtcttgtaatttagtttcttttcccaatcatctctaaata

SEQ ID NO: 49930 - DNA, 448 bp, Gossypium hirsutum
  unsure (1)..(448): unsure at all n locations
  Clone ID: LIB3829-004-Q6-N6-A11
ggggggtgggttttttttttttttttttttttaaataaaagttcattatttgattttttaaaaccaaaccaaaaatccgagatggggaaattaaaatttcacatcccaaatgtaaaaatggtttagggggtaacttncccccctaaatgtggggggggggaggggtttttttttggcgaaataaatttttaaatgggtggagctttttattggcatttttagaacctaaaacataacaaaagaggggggatagtaccaccctatatttaaggaccagcgggatccggacttttttgcgaaaacaatgaggtggaatttggggtatccagggaggataccagtaccgggaatgggacgaagggatgttaggttcaggacctttgaatagaggattgccaccttggtttttgaagatttgagagaagggattaagggaggttttgtgttt

SEQ ID NO: 49931 - DNA, 570 bp, Gossypium hirsutum
  unsure (1)..(570): unsure at all n locations
  Clone ID: LIB3829-004-Q6-N6-A4
tcgcgtaaagaattgttgctgagtaagaattcaactattttcagagatgccatccaaacacacctgatcttaatggtgatattnaaaaacacaccaggcagggcattctatgggaagaaatcagctgtggacaaacgaaggaaaaaagcatctttcaacacaactttcgttattaatatcagtaacaaagattcaccagaagttggggaaggtttagcctttgtgctaagtgcagattctaatgttccacaggagagcttcggccaatggctcggcatagtcaatgcaaccaccaatggaacctctcgagctaggatcgtcggcgtggagttcgacactaggaagagttatgaagaagaacctgacggtaaccatgttggcttggatattaatagctgttattcaattgaacagcaatcattgagtggctatggggttaacctttccatgggggtcgatgtacgggctgttgttcaatacgatggcaaaaacatgactgttttcgtttctaatggaagcgagacccaaagtagtaatccagtattatcagtgccagtggatctctcctcg

SEQ ID NO: 49932 - DNA, 456 bp, Gossypium hirsutum
  Clone ID: LIB3829-004-Q6-N6-B12
gggggggttttttttttttttttttttttttttttttttttttttttttttttttttttttttttttttttttttttttttttttttttttttttttttttttttttttttttttttttcggccccgggggcccccccaaaaatttgggggggggggggggggccttcccccctttccctatagggggtcgtttaaaagcttggcgaaaaaaggggaaaagcttttccctggggaaaaattttttcccttcaaaatcccacaaaaaaaacgagccggaaccaaaaaaggaaaacccggggggccctaagggggggcctaaccaaaaaaaattggggtgcccaaaccccccgttttcaaaggggaaaacctttcggcccccctcattaaaaaaaaccgccaaccgccggggaaggagggggttttttttttgcccccccggggtttttttttttttt

SEQ ID NO: 49933 - DNA, 568 bp, Gossypium hirsutum
  Clone ID: LIB3829-004-Q6-N6-B2
gcagagaatgtcattgatgcatgttttgttcaacaatcatacattggaggaatcataaaagacatgcatttcgttccatcggaaaacagagaaacctactacgacggtccaacgaacgatatcgatcaatttccggcccatgttatagccaatttttggaaaggcaataaataactaaacacatacagatcatacattaagaacaataaccaacaatataagcaaaaggaatcctacaaatgacatgtctaatagtactacttattactattaacggggactactaaccggatcgacaaacatacggtttactgacggcagccgcatttgctggtccggtgctctactccttttgaattgtggatacgacgatgacgaaaccgaagacgttgtcacagcccacgaatcaaccaagttatcactgctgaaagatgcatcaatgacaccattaggactactcgggctcggaaccaatctacgcttacgtttgtggcctcggctttccagtaactccgagatgagctcgtagcacgaatttacttcatcctcacatatcttgagtacacca

SEQ ID NO: 49934 - DNA, 553 bp, Gossypium hirsutum
  unsure (1)..(553): unsure at all n locations
  Clone ID: LIB3829-004-Q6-N6-B5
aatgaagagtgcttggatattttattgccacaagctcattcaaatgaacaagaattcaactaaaactaactaggattcgatacacaacaatacaataacataagaacttttcaactaaattacctacctatgaattttccttttttcacctgagatcctaagagtacgaccctcctttcatgtttacagatcctgtcaggatgttcaaactcaaaagttatccaatatcttcactatattcctatgtaaaacttgtcccgaggatacaaagagcattgcagcagttataaaagccgaagtgcaaacttgcgaaatcaatatggacaacacaaaagacagaaagaaaataaagaaaacacttacatgagcagtatacattgtacttgaaaacgatcgagcatgaaaaaggtaccaatttcctcaacgagtatggaactaggattattgatccctccatcttggacttgggaaaggaaaaaaaccagaaggtgacaatggngaaaaaaccaggagatggtggaggttgaggccctggacctaaaacccctggttg

SEQ ID NO: 49935 - DNA, 578 bp, Gossypium hirsutum
  Clone ID: LIB3829-004-Q6-N6-B6
tcgcctcgtattgagaaaaaattttatataatctctcttcaaattagcatttatgcgttgtgtgctcaaaagcatggatcttttatcttatctggctgttacttagtgagataaactacgtatgcttctactcttcagcttctagtatgtctccgcatgttaatgcgtaaatgtgtttgtgagaacatcagcaaagatgatattcaaaagctgtttcctagtgaggttcttcctgaattagtaagactgttgacacttttgctgcaaaagtttcaaagagaatggcgtgcagatgtacacatggataaggtttctttgccacgcttaaagacaatggcttggaatttgccatggatgcctttatgttacagattggagattttcacatgtatggaattggctccaaaatgatatgcagtgtccacaagagtcggatttgtcattccaattagccaaagaaacactggatacaatgctgaagtctgtgtacattataagagatcagttgtcgaatatgggtgagacataaaatggacttttctgcctggaaatcaatgcaatgtaatttaccgtttgta

SEQ ID NO: 49936 - DNA, 559 bp, Gossypium hirsutum
  Clone ID: LIB3829-004-Q6-N6-C5
ataagtaatcatgggcaacatttgattaagggcttaattaagagatgttgcactttttagcatgacatacatgattaagcatccaagacagaaagtcttactaatgaacctaactatatgtaaactaaagcttcaagcatttttatttctctttcccctttgaatttcttaccgaggcaagatgacagccttgagagggttcttcatcacaacagtgaaagcataagtctccgtcatgtcgggcggagaatccggcaccggctgccatttaaaagcttgtaccatctttgcaagcgacaactttatgtgcaaaacacctaggttccaagcggggcaaattcgtcgcccggccccaaacggcaacatcttcaccgaacgagtccccgtcacatcgacaccaaccccgtcacctcgcaaaaacctatcgggccgaaactcccccggatctgaccatatatccggatcctcggtaatccatgcagtgtagaactcaacatgaaccccttccggaattgtatagccaccaagctcagtgtcctttatagctgcatgagataaa

SEQ ID NO: 49937 - DNA, 152 bp, Gossypium hirsutum
  Clone ID: LIB3829-004-Q6-N6-D4
aatcatactctacataattgatcccgaacttcaaactaaactgcaaattcctgctcgacaatccttatttagaacaaatataaaagaaaaccaaacttggatgaggacaagtggaccatatgggcccaaacgtccgcccacccctacgaagg

SEQ ID NO: 49938 - DNA, 482 bp, Gossypium hirsutum
  Clone ID: LIB3829-004-Q6-N6-D5
atccactaaagctcccattccataccttcatataaaacattgtcttgttagttcattaacatagtcaaaatttgctggatccccgactgcattacatgtagaaccttcataataaactacagcatcctgaattggttagactgttgggttaatgttcaacctacttgttgggctgtaagccttttcctagctttctcactgagggtcaactggctacccttgcccttgggaagggatacctatggcttcggtccttttccaattgggaacacatctaccaagacgggtggcgaactcatgcccagaagcttcctgaacgtgggttgtttaaatgctgcccttgggcttttacctgttgttaatcactcccgcacggcctatgaggcttcctccagtacccatgacaacattgccgccatcaaacttgatgaaacaagacaatactgtgtgctctaaaggtccagcttgatggatgcattatc

SEQ ID NO: 49939 - DNA, 530 bp, Gossypium hirsutum
  Clone ID: LIB3829-004-Q6-N6-D9
atgaaatgagatccttagtaccttccatataattacaatacaataagcatacaattaaagccactacaaccgtgcggggataaaacgatcttacttcactcagaagccttaactttatcatccccgacaactgagagtataggcaaactactgaaaaattcatctagaccctcgaaaaaaccgttcccttcattgttatcctcttcctcgtttccggcatcattccccttactcctccctgccactggctcttctgcctcgttccgaaactctacgttcaaatccaacttccccaaaaccttcgttcctcgtttcatctgcttccttctgcttgattcagcagtcgacacactgtccggcaccatggatgcaccactcgaatttccaccatgatccgcattaacttggtcatcacccccctgcttcattctctcactctgtggtttctttgcatatctccccctagatcctttccctttagaattgttcacctttttctccctcttttcatttcgccaatcatcgtcatc

SEQ ID NO: 49940 - DNA, 467 bp, Gossypium hirsutum
  Clone ID: LIB3829-004-Q6-N6-E10
ggggaataaaatttgccaaacaataatacccattttaagctcaatcctacaccatcccaaggcgtaccccaaactaaatgctaacagggggaatataatccatatggctttgcttaccaacctttaaaaagggcaattttacccggaaagaagggggcacaacccttgaaaagagggctttctatgcccccatcacggggaaccaaaacccgacatcctttccagcaagcttccggtaaactgcaaaaaacggctaaagcgtggcctctggggaatttcctcccttgggggccaaaaaccccttcattatctttgagccatcaattctatatctagggggcttcccaacaattttaggggggaagacaacattttttaacattgcctcatgtacaggaggcaatgggcgggtggggggcccttgaactgcaaaacctttttttgggggccttaatatcccccggggg

SEQ ID NO: 49941 - DNA, 404 bp, Gossypium hirsutum
  Clone ID: LIB3829-004-Q6-N6-E12
gaacaaaaaatgcttgtccgtactttactagagatcgagattgtatagatactacaatacagcatatctgggaaaaaagaccttgaatttaaaagccctggaacttacaccctgggggagtctaaacaagctgaacgaggcgagcaaaaggagggggaatgaagctccttaaccttgaaccagacacctgatccgcttacgctgctcctgcgtatcttacactggagagggggggaacagagctgaccaaccaccggcgggcgggctgcccagaagaagatgccctgcctgagacaaggacgacttaccggtcaactccctcccaacgggtcagagattcaccagagtactgcttggtgctcggcgaacctgcttatgcataagaggactgccaaaaaatacct

SEQ ID NO: 49942 - DNA, 497 bp, Gossypium hirsutum
  Clone ID: LIB3829-004-Q6-N6-E7
gaagcaaaaaaaatcttgttggcttatgaagcacagacagaaacacgccccacggggataaaatcatttatgaaaaataagacaaatccaataagtcactatccgccaagggtgagtttgcagtgaactcatcaccagcagagcagaaccgctctagctacaaatcggggggtaaaatgctccacaccagcaagttaaccctcaaggaaaattaaaatctaaagagcccgttaaaattctgaacattatatcaatgggaaaaccacattgaaaagctgaatcttatttggcaatgggatttgctattatcttacttcgcttgaaaccttctagcagcaatcttttggactgctcactaaagagttcctgtttctgtttagcccttctatttctatactctacaatttaaccactggattatgtcatccattatggtttctcgttccagttcaaagaggagatcatgtaacaggccttcaaacaatttgatcgttttg

SEQ ID NO: 49943 - DNA, 502 bp, Gossypium hirsutum
  Clone ID: LIB3829-004-Q6-N6-F3
ggaaaaaaaactaaaaaagggggcttaaaaaaaacaggggggggggctaaaaccccgggtttacagaaaagggggggttcgggtctaatcccttttacccgacaggggggaaaacacctggggggccggccaacaatcactggttacaaggggggggaattaaccggaaaagaagaaccttaaaaggggggcaaaattaaaaataacttgaccttcaagggcggggaaaaccctgccataaagcaaatagtaaaaaactgcctcagggggagaaataggaccactggtcgtcctcactagccccaaaatcgacaggggcattggaatcttccccattggaatagtagaagccattgtttttcaggggagtcaacgaacaaggggatgcccctccaaaaaaagggatgttggggaaaaaaccaacaatggggctaaccaaagcagcaggggggccttcattgcccagggcccggccacaaaaatttccccacggggcttgggg

SEQ ID NO: 49944 - DNA, 522 bp, Gossypium hirsutum
  Clone ID: LIB3829-004-Q6-N6-F7
aatgtatacataaatcctcctttaattcatctgttacacaacagtttcctgctgagtcttgaccaatcaaggagacaagacaagaagagaatgtttactcttccaaaattaattacatgctcttccactttgcaccacaattgactagtttcatatatgcattcttaaaatcttcaaagaacatattctgatcgtctgcgtattttgtgatccaccttaagcatttgtcatcctctacaatggcacggtctgaaggaagtccgatcatgctcgtcataccagcagaagaattccatggcttctccagaagaattttgaagtacgagttatcgaaagcaaccggacttccgaaacctttactgccaagagtatgcgccccagacagagcaactagttcttgtgttgagaagccctttcgtcgaaaacactgcttcaagccagaagcatccagagactcttcaggcatcttaccttcagggtctggctccccagaatctagtcggcctaatgtaactgggattt

SEQ ID NO: 49945 - DNA, 530 bp, Gossypium hirsutum
  Clone ID: LIB3829-004-Q6-N6-F9
gaccgataatccatatagtaatatcatataattattaattagaaacacaatccatgacatctcttataattatattaacatatatataatatatgtatgtaatgaagctaatatacattaaaatgaagggtttctaaatcatcagcaatgatccatatccttattatccaatatagatcgaggaacaccctctcgcaagcaatatacaggtggtatcgttagtgtttccaactccccataagcattccaacaaaatgggtccaatactatatctccttgagccggaagtagctcgatatccgacaacgtaatgttcgtacaaggaaccgaatcactgcacccaaaatgcatcggtgggcttcgggtatcgtacgtccctttgatcccttcatagagtatgtccgacacataaacggcagatgtctggttcaagcaatctttagtaaggcaatagaattgatcgattataatcggattcctaacacttatcatatgaatgttgccaaacattatacccgaaaccgccccgg

SEQ ID NO: 49946 - DNA, 571 bp, Gossypium hirsutum
  unsure (1)..(571): unsure at all n locations
  Clone ID: LIB3829-004-Q6-N6-G1
aacaggnaaataatgatataataaaaaagcttccatgaaataagtatgacaaggttaaaggggtttacttatcagaatcagaaagagcaaactccttgtaaacatcaagcaaaggaaaagttttggtcaaacgtttgaatgaatcttcagaaatagctttcattctgaagagagcattggccaactccatagcttgagaacgccatccggcaaaaccaatcccttcggtcaacaatacgtaagttgtttcgtttggctgacatcccttctctaccattgccgccaacacttcaatggcatcgtcgattcgatgtactttgcataaaccgagaagaacgatattgtaactgataaccgttggttgaatcttacttcttcccatgtctatcagcaattcaatagcttcatctacgatcccatctctgcacaaacatgagatgagtgaattgtaagtaatctcatcaggacctattcttttatttagcatctccaatatcatttccaaggccttgaatttatcccctgtgctccacagtgcagtgaacattgtgttgtaagaactcacatttgg

SEQ ID NO: 49947 - DNA, 439 bp, Gossypium hirsutum
  Clone ID: LIB3829-004-Q6-N6-H1
aaaagtcctttagggggtttactaaatgtttcccaggagggcaatttggttttctccccagggttttgcaaaattaaggggggaaaaggggtttccgactttacaaaaacccccccggggttttaaatcccacttttccaactttgcccataagatttttaattttggggggccatggtggcgcccccgggcctcgacatatttttaggggaacccctaccaagggggggaccttggggggaaccaaacggggacagggttggtttaattttcacattgccctggttttgggctgaacacagtttattcccttgccccgaaaaaaaaactggaaatttccgggtataaaatctgtatttctgaaaaggggttttcacttaataatgggggggaaccaaaactggacaaagatctttaatcgggttaggaggggcccctt

SEQ ID NO: 49948 - DNA, 364 bp, Gossypium hirsutum
  unsure (1)..(364): unsure at all n locations
  Clone ID: LIB3829-004-Q6-N6-H10
gggggggggggtaaaaaaaagaataggggggagaatatatatnattngatttgaactttgnattacaatagtacatatatagattttatatatataaggagagtgtgtttttttttttttttttaattggnggttgaaaaaattgagagggggggggggggggaactatnctncaaatgccactaatagagaaggggaggttgaagggaatatttaatcaacccaggatccaattgaagtactagttggaaggtgtgattttggaggggtttttattagaatttatatgaaacaaggataaggaaatgtaagtggaagggtgaggtgttttaacagtacagaaagggttgaaaggaatgggagt

SEQ ID NO: 49949 - DNA, 543 bp, Gossypium hirsutum
  Clone ID: LIB3829-004-Q6-N6-H3
aaaactcattcattcaatttcagctgtctcggcaataatttggctgcaaactggagtactatttcacaaagcccaccaatggatacaacaatatatttctatgtttcacatggtagaaaccaagatatgtgtgctttccttattcgcatacagaatgagcgagttcaatcttccatctctttcatgatgcataccacgataatgcttgtaggtacaaatactactttagcttcattctcgagtgattttagttcttttggccgtaggggacatgaaaagctttctaactgaggcaatgggatcatcaaccttaatcatggagacggttgaagtagaatacacaggtgaagaatgaggaaaatctttcccataaagcaaagcagataatgtttgttgccatccaggtgccccaccactcattggtgcaatccatggacaaaaatgcctgtgctgcctgatcggatcaaactctgatattttatccatatgtagtcgctttagatcctttcctttgggacaggataagaccttattgttttgtac

SEQ ID NO: 49950 - DNA, 415 bp, Gossypium hirsutum
  Clone ID: LIB3829-004-Q6-N6-H5
cgcaaggcatcatcgttgaaatgcggaaacacgatctcaacattttttgccgaataaagtacgaatccaacataccaaatgcatttttccaaacataccacaaagaggcgagggaatctttacattattggatgtagagcaggggccaaattaaccatttgagagattattatgatggttaagtccttaataacaaacatggtggggcatgaagggcttgacgttcttcctgtctgtgagctcttattactaccacctatccctttgtggtgccactccttgatgaactgtggttgcgtatggtatcatgatacaatactttgataactagaagccgcctcctttgctgccttaggtgtggccttgccgcaaaataactccctagaagggtagaagcattatttgggcatccctg

SEQ ID NO: 49951 - DNA, 458 bp, Gossypium hirsutum
  Clone ID: LIB3829-004-Q6-N6-H6
ggggggtatgaatggcaaatcaatttcggataaaatctaatatgggtatatatgagggctcattctcacccacccacaaggctttttagcatagggtttacatcccgggtatgggtttttttttacaagaatcccgagaaaaacccaaaatcccataaggcccaaaagggaaccaccaaattggaaaatggggattctttttagggacctggcagcctgcatttcatgccttctcaacctggggctactacttcccgtcagggaataccagtttgggtaagtgtataaactttctgaattcccgaatacccttgcatataccatttccccaaacaaccccactaccggatgatggaatcccgtcaccccggggccccccaggttaaacaatggggggacccatgaaccctcttccttgtaagcatggcggttgtagctttccttctgggaaggatttc

SEQ ID NO: 49952 - DNA, 324 bp, Gossypium hirsutum
  Clone ID: LIB3829-004-Q6-N6-H7
gttggatgcactttatattgaaggcatacaaaaataaaatgaaaataatacttaaaggctacaaccttaagaactgctaccccatttaaaataatgaataggaggggaagtaggagaggagaacaagttcatcttcaaccttatactattaaaaatactcgagaaactaagtaaaaaaaccaacatcagagctctgagaggcaaagaaagagcaaaaattgggaagaccttaaaacctcttatcagtcgactattggaaacaacatagagtcactgctacatgaactgggcctaaaactggagctgaaatgatagcctcctcaa

SEQ ID NO: 49953 - DNA, 470 bp, Gossypium hirsutum
  unsure (1)..(470): unsure at all n locations
  Clone ID: LIB3829-005-Q6-K6-A1
ccgtccgctaaaagtccaaatctggcaagatttctgttgtttgtccattgctgtatgctttgattcctaaaacttgcttttatataaaatcaaaacaattatggactaagtgatttttctccattcaccgttctttccttgttatgggttggcgggaaagaaaatggtnnattgaagttagttctatcttatctataaatttgcatcattgatgatgtgacttatataactttccaggttttccatggccaacctatgcaagcaactgtttctgcagcaccacatccaccgacaatgcgtccaagggtgcgcgctagacgaggacaggccacggatcctcacagcattgctgaacgggtatccttaatttattataaataaccatgccaaacatgggaataagtttaatttattgaatgtcagtaatccagatttgtgtttctggtctagagtcaaaatgcatgagtaag

SEQ ID NO: 49954 - DNA, 571 bp, Gossypium hirsutum
  unsure (1)..(571): unsure at all n locations
  Clone ID: LIB3829-005-Q6-K6-A4
tcgnaaatccaagtcctccctcttctttaaaagaacatatatccttccatgcacactagtgaatgcccttcttgcccctgtgttttgccaccaaaattttggtattaatccttccgattcgatacatagggattttggaagtaaaaagcaagtcattgaataagttggaatggattgcaaaatggctttaataaaaacctctttcctccttaagaaatatattttatgctccaattctctattcgtactcgtactcgtactctatctttcaaattatggaaagactatttctttctccttcccaccaaattaggcaagcctaaatatcgttctggatctgttgaactccgaactccaatcattttggtgatcattcttttttccctctcttgcgtgttagcgctaaagaaatggtagacttcgagtaattcacactttgccccgaacagatttcatattgaagaatctgcttaactgaacttgcacccctttctgtagcctttacaaacagaatacaatcatccacgaataataaatgaaagacctgtggaccactcctacttttcttaac

SEQ ID NO: 49955 - DNA, 567 bp, Gossypium hirsutum
  unsure (1)..(567): unsure at all n locations
  Clone ID: LIB3829-005-Q6-K6-B6
ggacgtaattataaatatatatataatggcagtcatagctgtttttcattttttgttgcattgaacaaggttgttaaccatggggtttcagagaagtattgaatgacacaatgaatgtggtggaggagttctttaagatgccaatggaggaaaaggcaagcctctactcggaggatccaaataaagtctgcaggctttacacaagcaatattaactatggtactngaaaagtatcacttttggcgtgacattctgaagcaccattgtcatcctttagacgactgcattaaactttggcctcaaaagccaactcgatacagggatgttataaggacattctcagttgaaggaaaaaaactgggtttaacaatcctggagttgcttactgagggcttagggcttgaatctgggtacttcaagaaggatctaagtgaagctatgctattggtggctaaccattacccaccatgtccagatccaagcttgaccttgnggttacctaagcattgtgaccctaatctcattaccatcctacttcaaggacatacctttggacttcaagtcttc

SEQ ID NO: 49956 - DNA, 566 bp, Gossypium hirsutum
  unsure (1)..(566): unsure at all n locations
  Clone ID: LIB3829-005-Q6-K6-C12
ctttgttgtttctcagttgaacgctgtcaaaagatgacttggcatccagattgactttgacagtagatactgcaacagttgaacctcttctactttcggattcatttattactatnatggatacaaacgactactctgtaattcctcaacaactcaaagatcagctgagtgagaggtatccaggtgcaaggcgagcttatcntgaaaacaggaggtgatttcccatttctttcccgtccagatgaagtcaacctacatcttcagctacacctgagacaagttggagttgaagctcggccagatttggttcagagcatcccaaaaggtggcaccggtgggagccctagcaaagaaagtgagaaaaagaaggatccagatgaccaaccaaaagataatggaggcaaccctgaaagtacatctgaagaaagccagttacctcctagttcagaaattcacagccttgatgatcagctccttagcgatgcaagaatatgttccatgggtcatgaagatgcaattattttgatgcagtctcaatacactgtagtcaatagaatccttcaata

SEQ ID NO: 49957 - DNA, 596 bp, Gossypium hirsutum
  unsure (1)..(596): unsure at all n locations
  Clone ID: LIB3829-005-Q6-K6-C2
anatactggcttctagnaactggnaaagtgctctgagatcaaanaatgcaacatattccaattatgatgagaatttgaaatcgggttactgcaataggagcacttataaacgcctaaggtctggaaggaacttccccttcaaaaaaagaaagtttttgcactatacctcagagtcaaactcagatggaggaaccatcggtgagggcatttctgatttacctgagaagaacatcaatggaaaagcttccattctatattcaaagatgcatggagtcactggagaatcatcttcactagcagaccaacgcaaatcattcaactctagggatcctcatgtgaagctcaggatcaaatctttcagggtacctgaattatttattgaaattccagaatctgcaactgttggttctttgaagaggactgttaaggaggcagtaacagcgatacttggaggtggattgtgtgttggtgtactgcttcaaggaaagaaggttagggacgataataaaactctgctgcagacgggaatttctcgtgataaccagatggattctctgggttttagcctggagcctaacccatcacatacttcccct

SEQ ID NO: 49958 - DNA, 363 bp, Gossypium hirsutum
  unsure (1)..(363): unsure at all n locations
  Clone ID: LIB3829-005-Q6-K6-C4
tgaaaaccttatttgtcttcctaacggcttttataaatcgaaatctctttggggacttgatatttgtggtcgttcaaatcttgttgtaaaaaacttgttttctgccattggaggcagaccagtgaagctgaaagatctccacgggttatcctcnattgtnaccaaattagatttatctgaaaccaatcttgagagcttacctacaaccatcaaacaatttccttggctgcaagagttaatcttgtggaattgcaagagattgaaatcattaccaagagcttcccccccaagccctaggacatttggatgcagatagctgcacttcactagagggaagtgtccagcctttaaaaaagctttttt

SEQ ID NO: 49959 - DNA, 564 bp, Gossypium hirsutum
  Clone ID: LIB3829-005-Q6-K6-C5
ctcgactgcccacctagacctgattcactgtcaatgtctgggagacctgattccggttaccttaaatatcgatggcagcctctcaattgtcagctcccaaggttcgatgggcttgtttttttgtcgaaaatgagagggaaaacagtgatgttcgttggtgattcactgggaaggaatcaatttgagtctttgatttgtatgattttagctgccaacccccaaacccagactcagatgaacagagcaatgcctctctctactttcaagttcctggaatatggtgtatccatatcatattttcgagctccatttttggtggacgtagatgtgatgcaagggaagaggattgtaaagttagacgacatagctggaaatggaaacgcctggcgaatggccgacgtgctggtgtttaacacaggccattggtggggtcatgaaggatctcttcgagggtgggatttgattcaatcaggaggtaaatattaccaggacatggatcgtatggttgctatggagaaagggctaagaacatgggccaattgggttgactccaatgtcgacata

SEQ ID NO: 49960 - DNA, 563 bp, Gossypium hirsutum
  unsure (1)..(563): unsure at all n locations
  Clone ID: LIB3829-005-Q6-K6-C9
gcanaccaaggtgataggagagtagaccccaccaaacatttcaagaagcagccaggcagaccttccttggagcatgctgcttcagaatttgcctcagatgccacccctgctactggtcaagagaataccctatggtccaatcatgatatgaggagaggacctcttgcttctgacaagtctaattttgcagattcttctggaaaattttatagttctcacaatgatgtttattcaggctcattcactgaaaacaaatctgacagaaatgatgaaggttctgttttagtaggttatatgatgaagcatggaaaaaagcattttgtgctggatgagaatagacgtaacacttataatccatcatctgctgcacgagaggcatccgttctgaatacttttaatggagagaggaagcagctactgactgtgggggtatactacgagcatggttacacacgaagtctagctcgatttgctgcaaaccttggtccagttgcctggaaaattgcttctaaaagatagaaaagtgtttgccagctggagtaaattttggtcctggatgggtt

SEQ ID NO: 49961 - DNA, 584 bp, Gossypium hirsutum
  unsure (1)..(584): unsure at all n locations
  Clone ID: LIB3829-005-Q6-K6-D10
gatagcttgcaccacttctgaagcctcttaattttctttctgaatttcttttgccttccttttcaaatatactgcttaattattcctttggtgaaaatcttttaacctagcaactacctttgagacacggattcaattgagatacattatctgaaactccttgtagctatcattttcctcccctcagtatatgtatacttctttccttaaattcttctagcctctgtgctttcttcagagttgccttgcaagcctgtttaaatagattcatatgatgccaaagcctaaggcacttaccgctgctcagccaatggaatctaaaggaccaagtgagcccgaacagcttgttgagtctgatgagagggttgatcttgatgaagacagcgatcctgaggagaccatggaagaagaggtggagtatgaagaagtggaggtagaagaagaaggagaggaagaaatagaagaagaagaggaagaagaagaagacctggatgtcgaaaacgccanatggggctgatgtttttgagactaaagttggagatggagatganaaagagaagcatgctgagcttcttgctcgtcct

SEQ ID NO: 49962 - DNA, 128 bp, Gossypium hirsutum
  unsure (1)..(128): unsure at all n locations
  Clone ID: LIB3829-005-Q6-K6-D12
ctcggcatcggttgcacactcatanctcaacactactaagatcacacttcgaagctttgctgaacttgaagtcatcgtgctgtaacacttatctgaatggaagaactgaaaacatttccatgggcttg

SEQ ID NO: 49963 - DNA, 563 bp, Gossypium hirsutum
  unsure (1)..(563): unsure at all n locations
  Clone ID: LIB3829-005-Q6-K6-D7
cgtcgcctatcgatgttgggaaagtgggaaatagagatgctatgtccttgtctatgaagtaccgaaaatgacatctgtcccctggaatgccgtaatatcttgtcacggaattcatgggcatgctgagaaagctctaaaactatttagagaaatgcgagaagagagagtgaagccggaccatgtaacttttgtgtcactgctctcagcttgtagccattcgggtttagttgaagcgggtcagtggtgctttaatgtgatgcgggaagaatacgggattgagcctattttgaagcattatggttgcatggtagatatgttcggtcgagctgggcatctagagaaggcatataattttataaaagacatgcctgtaaaacccgatgcatctgtttggggtgcccttcttggtgcttgtagaatacatggaaacattgatttgggcgcttttgcatctgaacgtttgtttgaagtggattccgagaatgtcgggtactatgttctgatgtctaacatttatgcgaatattgngnaatgggaaggagtagataaagtaagaacactag

SEQ ID NO: 49964 - DNA, 603 bp, Gossypium hirsutum
  Clone ID: LIB3829-005-Q6-K6-F3
ccccgcgtccggctctggggtttttccccagttgcaacaggtaaaatacgattgcaacaagtgtggatcaattttgggaccgttcttccaaaattcatattcagaggtcaaggttggttcctgccctgaatgccaatcaaaaggccatttactgtcaatgttgaacagacagtatacaggaactaccagaagctcacactccaagaaagcccaggaactgtgcctgcaggaaggcttccaagatacaaggaagttatattgctcaatgatctgatcgattgtgctcgtcctggtgaagaaattgaggtcactggcatttatacaaataattttgatatgtcattgaacacaaagaatggatttcctgtctttgccactgtggtcgaggcaaactatgttactaagaagcaggatctcttttctgcctacaaactcactcaggaagataaagaagagattgagaagttggccaaggatacacaaataggagaacggattatcaagtccattgccccgtcaatttatggtcatgaagacataaaaactgcaatagctcttgctatgtttggaggccaagagaaaaagtagaagggaaacatcgtc

SEQ ID NO: 49965 - DNA, 395 bp, Gossypium hirsutum
  Clone ID: LIB3829-005-Q6-K6-G10
ttaaaaaaaaaaaaaaaaaaaaaaaaaaaaaaaaaaaaaaaaaaaaaaaaaaaaaaaaaacaaaaaaaaaaaaaaagggggggccggctttatttggaagcgatccattacttaccgtccgccttgcttgcaaacgttctttttcttcttttttggcggccaccttaaattcaattcgcctggccgtttgttttccagcgggcggggggtggaaccactccctgtcgctcccctaattagtcttgcttgcagtacctccttttttcgcctgctggcttaataaaaaggcaggcccgcaccggtcgttcttccaaacagttgcgcctcctggatggatggatgggccccttccttgtggcgctttctttaaccgcggtggttgtggttgcttcccc

SEQ ID NO: 49966 - DNA, 565 bp, Gossypium hirsutum
  Clone ID: LIB3829-005-Q6-N6-A1
ctagcatctagccgaaaaacatatttgacagaaaaataattgaaaccagcattgagcaacctctgctgtgaagtgtccacattattatttgtcatgtttgacacagatcctatactgtgttgaggattgtgtcatgccgacacagatactcctccacttttgaagggtccaagtatcagagaggtggcaaccaagtgcagctttatgagctgctagatcccctcctaaaagatgattacatggggtctatatgttttcgtatttctatatattcttgccttttctagatatgcacaagaggcagtatagtactttttaacttattatagtccatagctctttttgaaagaaaaaaaaaaattcttctcaattagatgacgatctacattgcacgaaccagtcacaatcaattcaatttatcagatttctatcttttcaaatttttccttgctaagaaacttactcatgcattttgactctagaccagaaacacaaatctggattactgacattcaataaattaaacttattcccatgtttggcatggttatttataataaattaa

SEQ ID NO: 49967 - DNA, 528 bp, Gossypium hirsutum
  Clone ID: LIB3829-005-Q6-N6-A7
aattcaatgagttttgagagagataatggcattaactatataagttccaaacataacatgtcccaaggcaaaaacagaaaagagagaagtattttacatttcactagaacttggcttcaacaacccaacccaacccagctcagctcacacaaatagaaatctcatgtctgcctccgtcaattttcctagagcctctgtggagccacccaccgtcccttcaaacactaattccttcttttcttgcagctttaatatcctctcctctattgtgttctcaataacaaacctcacaatccttattggtttacattgccctattcggtgtatcctatcttgtgcttggcgctccacagctgggttccaccaagggtccatcaagaaaacatgtgatgcaactgtgagattaagggcaacacctccagctttcaaactcatgagaaatatcttgcaatctggatcctcagtaaaactcttaattgcagcatctctcgcagccaaggacatgctccctactagttgaacacatta

SEQ ID NO: 49968 - DNA, 426 bp, Gossypium hirsutum
  Clone ID: LIB3829-005-Q6-N6-A9
gggggaaaaaaaaggggggtttaaggggaaaaactttataaatttccaaaaaacccaaaaatttttatttaaaacccattggggcatttttaaacaagaagagcccaaatcccccattattttcccacccccggggcctttcccattacccaaacccaaaaaaaactttaaaaataaaaaaaaaacccaccccttatgaaatttcaggaaaaaaagaaacaaacaacccccccggggggtttttttttttggaaaaaaaacaaaaaaattttttttaaaaaccttaaaagaggggggtttaaagggcctttaaaagggccactaagggaaacaggttggtctttaaggggcttaagggggttaactcccaactttccgaggggaaaggcaaaaaattttttggggagggggtttggaaaaacaaaa

SEQ ID NO: 49969 - DNA, 571 bp, Gossypium hirsutum
  Clone ID: LIB3829-005-Q6-N6-B4
atataattactctatctatacatcaatgatcaaataatttttggagggtgaattcatatgtcaattccatttgagtaatttctaggagtctttctttttcaacttgaaaaatgaggtgattacggtaaataactagctagatcgcttgttagtaatatatacaatgatcactataacaaatcaaactagtaaaagcctagttatatagagcaaccacaggtaattaatttgtccctaccaaactttagccatacatatatgccaactctatataaacccccaaaccccctcaccttctcaacctcaaagccaaaagcattgtgcaccattttcactaagccttcaattttttattttcctataacctatttctagctgcaacatcaaattctcattggctaaagagagaaattaaggaaaggataagacaaggggagagaaatagagagggggggagagactacattatttcttcttttttttttgcaatggaaactattgtttttattatactatacgtgattctctttctctcaactcttctttcatatccatttcttaggaagcaaaa

SEQ ID NO: 49970 - DNA, 543 bp, Gossypium hirsutum
  Clone ID: LIB3829-005-Q6-N6-B6
gggaacaattgctaagtttagaagttaacatagataaaaaaaatattacaacccaatgtgagaactattgttaagtttagacccaaattaaccctattttttattttaattattcagtcatagcttacatattgcatacttaatcatgcactaaattctccggctatgctttggaattgattgttagcttacctcatccatgaaatcagagagctatagtccttttcataccattaatattccctatgtctggcaaactcgcataccatatattatcacatttatagtattacaaattatatttcaaaccatgatcacgactgatacttgacagctgaatcagtttaaatcatgaaagatacatataagaataataggtaatttgtatgtttaatcatatcaatctacgaaatcacactttgattaaatggcaacttaaaaggctgaagagctaactcagtgtctcccatcatggagaagtagtaacttaggaactctttgtatcgaaaagctctgtataatggaggctgtgctgcattggtc

SEQ ID NO: 49971 - DNA, 282 bp, Gossypium hirsutum
  Clone ID: LIB3829-005-Q6-N6-C12
gcgggggggggtgtgtaattaaataacaataactttaataacaaaacaggtacaacactgtcaatgggaaaactcgagcggctcatcaacagtttgcttgtatgaacaacaatgggagaagaaagtgctactatgttctatgctacttacatcaggggggggggggttccaaacattatttggaggaacgtacgatgactcaacataaatgggaagcaaagagaaaatgataactcacaagctgatggagggagtgcattgactacagggtgtctgagactg

SEQ ID NO: 49972 - DNA, 552 bp, Gossypium hirsutum
  unsure (1)..(552): unsure at all n locations
  Clone ID: LIB3829-005-Q6-N6-C5
aatcgttaatgagaatcttcacttcaaaatgataatgtattgcttaataatgaaggctacactaacctatcatcaaaatcaatagtaaccatattactatnaaatgaagtgaaccagatcgaaactagtagaataatacagtataaaatagttcattccaagtatcaggtaatccgggaaggcaccaatggctacaatcagctgacttttgcgggttagccctctgagaagggctgaaatcaccacggtaaattgatgggtgcccgtctttcctaagctcagagagcattgttatgtccatcaaatatgtaggaacatgcatctccctgatgacttcattcactacacccatctgatctgcatatgcactggtgtacgtagtccctttcattggttccgtctctccataacagttttttgcagtcatcgcagttgctgcagcactccattcatttggattgtaatggtcgggggaagcagactggaaaaagactctggttctagttatgtcgacattggagtcaacccaattggcccatgttcttagccctt

SEQ ID NO: 49973 - DNA, 436 bp, Gossypium hirsutum
  Clone ID: LIB3829-005-Q6-N6-C6
cggccacgggggcaaagtggggggaaaaaaaaaacccgggggcggggaaaaaattgggcccaacccccaaaatagggggacacctggaaggacgggttttggggtaaaacgggaaattaagtttaaagtttgggggaaggctaacaggggcatgcttgcaaaaattgaaaaaaaaaagttggaaaaaaaaaggaaattcccaaccaaatatgggctaccagggactaactaaaacccgaaaaaaccccctgagaaaaaccttttttaaaaaggaaaggggccccaaggccgggatcctaaaaaacccaggggggccccccctttgaaaaaaaaaccacccggttaaagtgaagccttttggccgggaaaaaaaaaaggttaaaaaaggggcccttttgggcctccaacaatttaaaaggcccggccccgggggccc

SEQ ID NO: 49974 - DNA, 515 bp, Gossypium hirsutum
  Clone ID: LIB3829-005-Q6-N6-C9
caaaatctataaaatataaattattaacatatcataaatcatcttaaacatcattatcacacgatacaatacacattggtgagtctaatatattgctctatgctgtccatggcattcatgttcattggcaaatacagcctgttcattttcatctaggaatgaattaaagactacaatcatggcttccaatgaaaccacttttgcttatgcgcctaggaattagaatacactgatctgtacaagaataatctataagcttcagcagctcccattcaactggacctgcattgcacctcaccattctaaggttatcttaattgaaagagaaaaaatagttaatgatatcgattatgctcagagctgcaaagctaaatctgggtgagctgtatcggctcgacttgaacttggtgacccaggtgactgaaatctgatattaagatctgggggaactgaatctggtttctgttttggtgacaagcttgagtctggtttttgttgtggtgataacatggact

SEQ ID NO: 49975 - DNA, 528 bp, Gossypium hirsutum
  Clone ID: LIB3829-005-Q6-N6-D10
gcacaaaaaaaacataattactatattggaataaaatttaagcctcagagctaaatgttcttgcttgactcattcataaagataccaaatatgacagaatcatcaaatgaagtatatttttttcattgacaatcatagtttggtttataacagtcactgatcactgccggggaatgcttaaatacaccctccatctaccacagaagcaacctaatataataaacactcaataggggcgataccaccggccatcgttgctgtgtttccccctgtttgaactcccactatctttactatttctctgatgtggaggtgggcttcaaagttgagcttctggttgttgcagaacatatgcaatgcggccatcaggtaaaagcattggcatcattgacatgccaggtggacttggtccacttgcatagattaatggctgtgcaaggcctgcaataccatatggctggacctagagaaccatgagcacccccggacagaccatacccaacgtgaggggggtaattcaggaagaaa

SEQ ID NO: 49976 - DNA, 432 bp, Gossypium hirsutum
  Clone ID: LIB3829-005-Q6-N6-D12
gggggtgggttttttttttttttttttttttttttttttttttttttttttttttttttttttttttttttttttaacaaacaaacacaggggattttttagggggtcaaaatatttttttgtccaacattttaaaattaaaaagggctttttgttgttgggggggttttttaatactaaattcattcataccctggaacatgggaggggaagggtaatagttaatgggggggggtcacagccccctttttgcccttttttgggaaattagggaaaatagggaacctgattctgggagcccaagtttttaccatgacttggaaagaaattgtaggtggcaaaaccaaaaacaggggggccgggggtttaaaaagggccggaaaaaaaaaagggggtgaaataaacctactggggggccctattaaggggttt

SEQ ID NO: 49977 - DNA, 384 bp, Gossypium hirsutum
  Clone ID: LIB3829-005-Q6-N6-D7
ggcaaaaagatgagcttttctattaagtcatatcggtttgcagatttgaatgggtacatcatgctgaaagttggttcaccggtaatcaatccaagctccggttcaactggctgggcatataaaggagccaaccccattttcatgatgacgaaaaaggttcgaatcaggcttgatgggctttctcggtaaagcagatttgaataagtacatcttgttgtctgatacagtgcaactcgtgccggaagaatggtttaatgataatcaatccaagttccggctcaactgcttaagctttatagagggtactttcttgaactcatgtttaccaatagtcacgggaagagcaaaccccgtttttgaaatgatgaaaacggttgggaatcc

SEQ ID NO: 49978 - DNA, 373 bp, Gossypium hirsutum
  Clone ID: LIB3829-005-Q6-N6-F10
atatggaaaaaattggatattatgtagttacgaaggagctttatagtccatcggaaatgtcccacaaactcaatgtcaacatgtgtcaacgaaaataaaactgcggaatacccagtattcagtgaagcaagcaactgcccataaaactacgtggagagatgacaataacccaatacattacatttgtgtggtaggcgaaatgtgtgtatgggcttcatgtctattgccgcatgccatacagcgttatggcatcaggcaaatgcctagcgtcaggagagcgttcaggtggagtcttcaggtgtcagtcacgcaaagcaaggcaaggctgcatcggcgagcatgatttttgcaacccaatggaacgggaaaacag

SEQ ID NO: 49979 - DNA, 521 bp, Gossypium hirsutum
  Clone ID: LIB3829-005-Q6-N6-F11
ataatgagaagattttttaaaacttgaattccactttgttgatctgaaagaacatacagaaaaatttaacattttatgagaatcatcacactcattctcaaaacattacgaaagctcaagattaaaaaaggaagtaaattacctcaaacaggatacatctgcatgctttttttatttttaacatgttctttgtgtaagtaatcaccaaactaagcccttttttcgtctaaacctatcaacacggtctgtgctcattcgagacttctcaggcttatttgacttcttagacttctccagtcgactatctaagctgtttctagaaacttctggaaggtcagcatccagtttaaaagtatccgaagttccaccatcaggtggttttgtctgattgtcagagttcaccgctattttttcagaaccatttgtggctgcttttgatttatgtagagacagtacaaatttcttcaaatgtctaatgaattctgggtagagctccagattgcaatgtcctcctccgttta

SEQ ID NO: 49980 - DNA, 446 bp, Gossypium hirsutum
  Clone ID: LIB3829-005-Q6-N6-G8
aaacaaacaagggggctaaaaccccctgggggggcccccccccccaaaccggttttcctaaatggggggccccttttcaggtttgggtttgccatttccccccatcccgaatggggtttgtccaaacccaaatttgcccgggccccaagctttaaacaggccccatcccggggaaaaaaaaacaaaagggaaaaaaccctttttttaagggggaggcccccagcaacagcccccaacgcctttagaaagggtccaagccccccccgtttggggctgatctttcccccacgcccgcgttttttttcacgaacccccataccccgaacccgccggggcatggccctctcccccgcaattggagccttggcccaaaggggagcgggggtcctcaagggggtgggggaaccctaaaacccacccttccccggacccgggggtcccccccg

SEQ ID NO: 49981 - DNA, 506 bp, Gossypium hirsutum
  Clone ID: LIB3829-005-Q6-N6-H9
tttttttttttttttttttttttttttttttttttttttttttttttttttttttttttttttttttttttttttttttttttttttttttttttaaaaaaaacgggccatttttaaaaaaaaccccgcccttttgggggggttttaaaaagctttttggacctttcctgagaaaaaaaagagatcccaattttgccaaaaaacaaagggggggggggaaacaggggcccaaagccctaattttcccaaacccggagacccccggagtacagaaattaaagcttgcccttaaagggggggggaaaaacatccttaaaaaaaacctaagggggggggctttaaaacattcctttgggaaacattttggaaaaggggaccttttaaaccccgaaagagattttttgacccccaacaaagaaaccttgcccctaaatgaaaaggctaatggccttgccctcgcctggaaaaccaaatggggggaatctttgcttgtttatggggacccc

SEQ ID NO: 49982 - DNA, 260 bp, Gossypium hirsutum
  Clone ID: LIB3829-006-Q6-K6-A11
gttcgccattagacttattatcctcctatttcttaaaagctactgcctatctaatattctaactagactagctctgcgttaatatgggtactggcgggaggtaggtaccaaatcaaactgggatgcatgagggagaaacctgaacaaccggtgcaggtgtgatgaataggtaacagtacaggtggcgactgttgcttctgcaacatacactggggcttaagaaccaaatgaagcaaagtcttgagcagtatctgaacaac

SEQ ID NO: 49983 - DNA, 187 bp, Gossypium hirsutum
  Clone ID: LIB3829-006-Q6-K6-A4
gtgttagtctcggctttggtgggtgccgctgtcggtccttggcttgccgtcttaattgtcgtttcttttagagcggtttttgcttgtctgttcacgccgtttcctttggcgcgtgtcgcgttgcgcttgttgtcttccaagtgtgggggggtgcgccttctggttttttttctgttttttgcgcctt

SEQ ID NO: 49984 - DNA, 457 bp, Gossypium hirsutum
  unsure (1)..(457): unsure at all n locations
  Clone ID: LIB3829-006-Q6-K6-A8
agaaaaactattagttgctaggatagcacttctttgcactgccaagctccccaaanacagaccatccatgagggatgtaattacaatgcttgtggaggcaaagccccgaagaaaaagcagtagcaacaatggcggaaatgcatctaacaaagaaatccccgtgtttagcacatcacctgtaaatggccacgtttagcacccacccttttggttttttgggccaaaactaaactatattcttctctgtatgtagcattgttttttgttaatgcatgtagtcactggttcatattgttgttcaggaaattaacagataaatcaagcttgggatttctcccgtgtcaggcaagaagattaaacccatagtacctgaaattgttgactctcattgtcaaatgtatttgtagtagtaaacatctatagattaattcttggaatatccagcttttttttcana

SEQ ID NO: 49985 - DNA, 590 bp, Gossypium hirsutum
  Clone ID: LIB3829-006-Q6-K6-A9
cttaatgcaatttctttgggtaagtaaatctcatgtttttcagctggaagaatatcctctctacggaaaccgatcagacgaggtatcttgtgtggaacatctctgtgaacaattatgttatcaccttgatattgcctcttttgttgcttgtgtcaattccggtcaaccatggagttcaaaattctcattactattgtctggacatgaaaacatagtatctggaagtgaagatgctaagttagacacatttgttgaaaattttgtgttggaaaggctttctgttcaatctccccttcgggtactgtttgatgctgttccaagcataaagtttcaagatgctattgaattgattagcatgcagccagttgcttctactcttgagggctggaaaagggtggaagatattgaacttatgcacatgcgttatgctttggaatccaccgtccttgcactaggagcaatggaaagtagcatgactggtgagaaagagactcatcaagtggcactatgtcatttgcaagacctaaagaaccatttggcgggcataaaaaatattccacgccggatactgatggtgaatgtgataattt

SEQ ID NO: 49986 - DNA, 631 bp, Gossypium hirsutum
  Clone ID: LIB3829-006-Q6-K6-C2
ggaaaagactccctctgcaaaagagttagcttggtaagtgaaacctggtcaactttaaagaatagtttccctgcaattgatgaagctatcactaagatgcaatcaaagctaagagacaaacttgatcatcaacacaacagagatgtctctaactcagggactgctttttctcatgaaatttccccaattgaaaccactcgtttcgatggaaagaattaccattgcagggcagaacacatggaacttttcttaaagcaattgctgattgcgtatgtgcttactgatccatgccctagtctcaatattagttctgaagcaaccagtgaagaactggctcaagccaaagttgctgaaaaaaagtggatgaatgatgactacctgtgtcaccactgcattttgagcgctttgtctaataacctgtattatcaattcccaaagaaagctaagactgctaaagagctgtgggaagagctaaaattagtctatctttacgaggaatttggaacaaagagagctcaagttagaaagtacattgaatttcaaattgttgatgaaagaccaattgttgagcaaatgcaagaactcaacatcatagctgattctattgtcgcaactggaataatgggtgatg

SEQ ID NO: 49987 - DNA, 404 bp, Gossypium hirsutum
  unsure (1)..(404): unsure at all n locations
  Clone ID: LIB3829-006-Q6-K6-C5
tngcgaattaccctcggagcctgcaaaatcctcgcaaanaagatgccaagcctgaatctggagatcataaacgaaagtgaacagctggaatttagccttgatgataggcttctggtagacaagatgtatttgtatcggacattggtggggcataggaaagataagccggagtatgtgttgcttttgtaggtgcattattttggctcagccgttttcatttctgctttattaaaactagagtactactttgttagggacaattttattttcatggatccttcttagctggtcggtgatctagagatgtatgctacctttgtttaatttacaagagatttggtatttgtaatccttgttatttaaagttggcatcctatcgagcaatgcaatgaagtttttggatt

SEQ ID NO: 49988 - DNA, 606 bp, Gossypium hirsutum
  unsure (1)..(606): unsure at all n locations
  Clone ID: LIB3829-006-Q6-K6-D1
ctttctttctctctctcatagcttcctcccagcctctgctccccctataagcttcgttaatggcgtttcagatctcaaaaaacaaactctaaaccttaagtaaacgcaaatcctacccaaacccaagaccaaaatcgagataaaaaaatcatcctttcctatcaaaagccttcattcatttttttttgtgtgtgtggttttttttttccttttattcgaggtttaattaatgcataagaaaatggcgttttcgttcccagacgaggtgctagagcatgtgttctcgttcatacaatcagataaagaccggaacgcggtgtcgatggtgtgtaaatcgtggtacgagatcgagcgttggtgtcggaggaaagtgtttgtggggaactgttacgctgtgagcccaaggatggtgatcagacgtttccccgagtttagatccattgagttgaaagggaaaccgcactttgcggatttcaatctggtgccggacggatggggaggttacgtgtttccttggatcgcggagatggctggagcttatccttggctcgaagagattcgacttanaagatggtcgttaccgacgaaagcttggagcttattgct

SEQ ID NO: 49989 - DNA, 575 bp, Gossypium hirsutum
  unsure (1)..(575): unsure at all n locations
  Clone ID: LIB3829-006-Q6-K6-D8
cgaaaggagctggattcgatgtctctttcggagctccgcctgctctccgcttttctcgccatggnaaaccaccgattctctgctctgtgtagccagggaatgtggtggaggaaagttaactgcgaaagttcaaagctttatttgggatcattgcttaaccaaagctgtagggaaaggctatgaatcttattcgaagaagtttgtaaagaagcttattacagagattgaatcaaaccatggtaatgtgttggatgaattgtatgaacaatatgcttcctacatgatttctttcaaggacgataatccagtcaaagaaaatgagagagtctgcaaatgcatttcttttcttttccctgattgttttaaactatctatttgtccaaaatcacggaaactggttgtcccgctacagtgttcactcaacatgcttgagggagatacagggtgttcagtttggccctccagtcttttcctctctgagttgatactttcttatccacatattttctcggggaaatcatgttttgaggtcggatccggtgttggtttggttggaatttgtctagctcatgtaa

SEQ ID NO: 49990 - DNA, 548 bp, Gossypium hirsutum
  unsure (1)..(548): unsure at all n locations
  Clone ID: LIB3829-006-Q6-K6-E3
cactttcactttgaaagaaatagaattcctacaactttcaagnaaaanagtgggaaaaaacagaagttcaaattccaattaaattttaactcaatataaatttgaagtttatttttgaacaaatataattttgaagatcttcctgtttaggtgcttagatcctctaatctttactgtttatgttcccagcttcctttggatttattttactaatttctcgcattgatcttcttctcggcttcatggagttctgatttatcgcacgttttacgagtgtgatggattcagaaaatattttgtcttcggttgggcttaaagttgcccatcagaatggtgtttatccacaacttcgggtgtgtggggatgatagtagttcagataatgcgaatgggagtgttgaggaaaccatcgaaacttatttgcagaatggaatgaatgacaatgtaggaactggggaagctggagaagactccgatgatttcgttgaaagtaatgcattgattgattctgaggaaggggaaatagaggataatatgaagcaatccaaa

SEQ ID NO: 49991 - DNA, 626 bp, Gossypium hirsutum
  Clone ID: LIB3829-006-Q6-K6-H1
attttcgtcatttgcttaagcctgttacgtagattgggttctttatattacagccatcaagttaattttagttttgttttttgccccttgttttttttgagagaatttggaagtaaactactagttctgctgctacaacattcaacttctggtgattgttctggttagatgagagaaggctgtggattttcgtttccagagcagcgattcgattggcgatcgcatgacttgagttctttggctgctcctcatcctttggttcagcaaaatactaatcctcaacttgttaactctggcatcgatatggtctcggtcccgaggactctgccagattatgcaaatcctggaatagtacctcaattgcaggttggccaagttaacgaaccttgtggctggttttactgttcaccccactattggcagggcttggtgcctgcttcaaccaacccttatgagtatcacaatgaaaagattgtttcgaaggctggttcggggtgtgctcagaagagattccttgtttttgatcaatctggtgatcaaactactatgatatttagctcttctttcggactcctatcaaatgcgccactttgggttcaaaaactcctgctgcttgtaactttaat

SEQ ID NO: 49992 - DNA, 583 bp, Gossypium hirsutum
  unsure (1)..(583): unsure at all n locations
  Clone ID: LIB3829-006-Q6-K6-H6
gnaaacaagatcaaactgatggagatcgaggaagtgaacaactacgaatcattgccgcttctctcgttgaaccacgtctcattattgtgtcgatcggtctgggattcaatgcgattctacaagaaagtttaggtttcgttccgatcaaacgcccctcttctttcaagttcaatttcaatggtgcttggttgtacaattacggtatcggtatacacttaatcgagaatccattgatagacgatttcgatactatcattgagccgaggccgattaatcccaaagacaatcacatatcttttcaatgtagagatgttgagattgtgaaagggagacttgaagatatggggatgaaatatgtaacggcagtagttgaagatgaaggtaacacagttgatcaagtgttctttcatgaccccgacgggtacatgatcgaactttgtaactgtgagaacattccgatacttccgttgtcggcttgcttgttcaaaccgaggatgagtagtttcagcagggcggttttcgggccagcaaaatgcgggcttgtagaaaatgcgatgatggagagcttgagcatgnatatgtt

SEQ ID NO: 49993 - DNA, 465 bp, Gossypium hirsutum
  Clone ID: LIB3829-006-Q6-N6-A8
gaaaaaaagctgggttttccaagaattaatctatagggggttactactacaaatccctttgacaatggggggcaacaatttcgggggcttgggggttaatcttcttgcctggcccgggagaaatcccaagcttggtttatctggtaatttcctgaacaacaatttgaaccaggggctccctgccttaacaaaaaacaatgctccctcccgggaagaattttgtttagttttggcccaaaaaaccaaaagggggggggctaaacggggccctttacaggggatgggctaaacacggggatttctttgttagatgcatttcccccattggggctactggtttttcttcggggctttgcccccacaagcattggaattacctccctcatgggtgggctgtctttggggagcttggcagtgcaaaaaatgctatcctagcaactaatagggtctttcggacccgtgggt

SEQ ID NO: 49994 - DNA, 527 bp, Gossypium hirsutum
  Clone ID: LIB3829-006-Q6-N6-A9
cccccagcaaccaactatagtgattaccaattccaacagatactttgccatatggaataaacaaacatatttgacaggttcatatcacatgacctgttatgttaatgagatgcatttcctgcacaactttttgctttttcttggttgaaattaacaaatttgactagaatgtattatcatcaagcttacagactaagtagcttagacggggctgctcgtaatatagtcaatgcctccttccaactccatggcctttcagataacgggagaaggcgctgcaaaattgataatcgccattcccaatcttcaatgaaacgtttacccattgaaattctccactccaaagcctgcctcccagacatgcttaaaccatcagtggatgcatgctcctcctcagctgtgcttgatggaagactatgacgtacaatatcaagtagcaaccctgtgaaagatatagccattttgtttccaacttcatatatggttaaatcaatatgttcggaaccacattcaacagactgtttaaa

SEQ ID NO: 49995 - DNA, 520 bp, Gossypium hirsutum
  Clone ID: LIB3829-006-Q6-N6-C10
attcaatatgcttcgttccatttgctcgaaaaataatacaagtggtagtaaaaccagctacaagagtcgtcgtctctaatcccctactgtccatttaattcatagaattttacaaaaaaccagaccatgtcatatgcatcaaatcatttgctaaggtgtgtggtctgaacctaagaaagtgaatgtttcctacttacggaaggagtggacttcgtttcttcggggctctccgacgtatcgctgctgctgatttcaccgtttctttccttactcgacttgagtttcgagaatatttttgacatggccaaacctttcattctactcgccgccaccctttcgatgtcggttttggccatgccatttctgtttgtttcgccgcttaatcttagagttgtaagctcccctttcaaagccttgatgtcctcggctgttggcactgaatcccaatcctcttcagtgttggttgtcgtggaccttgagctaccatgagaccctccggggagaagggctctaacggacc

SEQ ID NO: 49996 - DNA, 394 bp, Gossypium hirsutum
  Clone ID: LIB3829-006-Q6-N6-C2
gacagagaacaaggatctgcaatatgttaaccaagcttaaaccatttacaaaatgttccacctgcatagaatgggcatgtagaataaaattaaagcgatttagtgtttattacctaatacaacggaatagaagaactgagctaccaaaacagcatccattccaattaactatacattactatcaatcatgtttacctttgcaacagcaggtattggataattctaaccattttgattcccattcacaggtttttcgatttttttattacgggagaacttggaaatatgcccctttttcccacaatagttacattggatgggcttaccatgcatttgtgattttggttttttagaggggacacctgttttgtttatatcccttattcttgggcca

SEQ ID NO: 49997 - DNA, 414 bp, Gossypium hirsutum
  Clone ID: LIB3829-006-Q6-N6-C5
aaaaccaaaaacttcattggtttgcccgggggggggccccctttaaataacgggggttccaaatcccaaatctttgggaaaaaaaacaagagggggcatacatttttagaccccccccccgctaaaaggggcccctgaaaaaaaaatgggccctaacaaaggggccccctggttttaaaaaagccaaaatgaaaacggggggcccaaaataaggcccctacaaaagcaacccataccccgggttatttttcctatgcccccccaagggccgaaacaaaaacattttggttaccaaaagcctttcataaggggtaaatccccgggggccactttcggtaaagaaccccaaaaaagggtggggattttttttgggaggatcttgcaggccccggggggaacttcccccggccccgg

SEQ ID NO: 49998 - DNA, 571 bp, Gossypium hirsutum
  unsure (1)..(571): unsure at all n locations
  Clone ID: LIB3829-006-Q6-N6-D1
acgtggtgtaccccgaagctcaggcaagggcgacacgtatggcaatctagctctcaaagccttgaacagcctccatattatgttcccactccaatcatgtctgcgccattatattaggctgcataaaactgaaccgggaacaatgagtaacgcaatgaacatgtacctgagacattcattcttgagatcaatcgagctgaatccaaggaaatttctcatgaaagcctcaatccagaatcttcatccattgtccaaacaaaaggaggcatgtcgaaccttggccctgcaatggacctatatatgtagagcttatcaactgggcagttctctggtcttgaatcaggaggtcccctctcatctataacttcaacattcaaccttggcatcttctgacctagcagcttacatgctgcgaagctcacagcgcaagaagacatccaaagggatcgnattgnntncagntttgcagcattggccaaaagagccttgtcaccaaaggggcaatctntgatctccagtttccgaaagctttnacacccggaaagcacatgatgtagtcccaaatcactat

SEQ ID NO: 49999 - DNA, 529 bp, Gossypium hirsutum
  Clone ID: LIB3829-006-Q6-N6-D8
gaaaaatgtaaaatattcacattcagtatcatgtttaagattcaccaataaacccaagatacaaatcaagttacagtaaacaatcttatgctagaacgatcataagacttcatgtacggaagcaaatcaaagggcctcagtgtagatgttaggtctttaattctaagatcagcctgatctgctaatgcaagaaatcgatcgaaagtatcggcattccgaataacagaagcaatataagcaacagggtctgcccttgatacgagatcaacagcattgttgacttcactcgtattgattcgttgagcatgaaaactagatgcatctaaatcatgggcatcatttaccttaccatcaccgggaaaagagtttggaatacttccttcccgattctcgatatatgacttctttttgttcgaaagaatggctagtactttaacaagatgtggaagacaagatggatcataaataacatctgcacctaaaataatttctggcatgaagttttgcagttccttttctgatgctgatt

SEQ ID NO: 50000 - DNA, 541 bp, Gossypium hirsutum
  Clone ID: LIB3829-006-Q6-N6-E3
gcaaaataatgtaagcatatttacaactttaaaatggacataattcacaaaacaaagtttccattcggtttggacaaaccccgatcgatcatggatcctcaaacagcaacagactccaaaatttccgaaaattaggaggacaacttggtgaaggaggattgacatacagtggttcaaacaggaaagcaggaatcctaactacaagcccagcaacctttgcaagtgacacacgaaacaaccaaagctgctgaatatagaaggcaacgttaacccatgatgtaaaatttttcgtgcttgattcattgatgatttcagtctttagacatctttatttacgcaaaatgaggtcaagagctttgtatatgaacatccgcttcaaaccattgccttgcctggtgcttcgtgtaatcggctattgtaccaagtccacataaccttgctctccaaccattggccctcgatctgtgtcagcctgactttcacctgaatcagctctagaaactgtctcctgctgttgggatggagataattccccatttgt

SEQ ID NO: 50001 - DNA, 538 bp, Gossypium hirsutum
  Clone ID: LIB3829-006-Q6-N6-F1
ttttttttttttttttttttttttttttttttttttttttttttttttttttttttttttttttttttttttttttttttttttttttttttcccggggaaaaaacacaaggtaaaaatgggaaaggggcaaaaccaatttttcccccaaaaaaaaaaggggggttttccggggacccaccttttcccctaaaaattggccctaaccacccgggtgggggggaaaaatttaggggggggggggaaaataaaactttcccgggaaaaaaaaggttaaaaaaggggggggcccaagggaaccagggaaaggccggaggggaaaaaccccccctagaaaaggaaactcaaacggcccaggggcccccttttttaattgggccttgggataaaaacaaaaaaaaaccattttgggcccccaaaaaagtattgatttcgccaatccccttttcaatcccctaaaccccgaaaagggaaacaagggggttttttttttaaaaaaaatccaaagtttttaaaaaatgggggccaatggggttgag

SEQ ID NO: 50002 - DNA, 517 bp, Gossypium hirsutum
  Clone ID: LIB3829-006-Q6-N6-F10
gaaagctctcacatgtgataggtgtattgatcagagtttgtacccgatgcacatccataaacgatatgttcactaaagaagatcattagcaacaaaataaaaccaaaaacagcattcatttcatttacacgaagcccttgcatattcatatttaactatgaacatgtgcatatgtcagtgcttctttaggaatccaaaatgttcttaatggtctgccttaatacagcctaccagtgcactttgaagagccacaacagcaaactttctttcttatgtcaccactctcatcgtgaacttgatctatcatataattgtaatggtaagtcaactcttgcaagggaggaatattctcggcagcaaagagcattatgtgcgggattctcttgtcgtcatgatcataaaggacattttgtgcatacaaattaggtgaacaactatggtttatgaatctgcccatattaccaaaccgtgccgcatcaatggtgaaaccatattctggtacaacttggcggaaact

SEQ ID NO: 50003 - DNA, 561 bp, Gossypium hirsutum
  Clone ID: LIB3829-006-Q6-N6-F6
gtgtaaagatttatggctaaatttattattatacaaacaccaaatcaaaatgtagagccattttgctcaaatagtggctaatttacccatttgttgaataaaagggactaaaatacaatccaaattttgtgacacaaaaaaatcacctctccgtccggttgggttcctagctatagcccatccagataactatcgcttgccatcagggaaccagccacatccatctagttctagttctgaatgttcttcattttctgtctctgcaattcctcaacgagattcccaatactctgttgcagctgaagcacctgagattgcagctctttttcccttgcaaaagaaggcggtatctgcaaaaggtcattggtgcccacctctgacaagtccccgagcttaccagatgattgctccaaatatttgatcagtctgatgatctcttccctttgcatggtgttctgttgcaaaatgcattgtagagatgggagaactgcacttgctctaaggtttagcgacgttggactggttgaacctccatggccaggttaaacgtgcagttggtag

SEQ ID NO: 50004 - DNA, 523 bp, Gossypium hirsutum
  Clone ID: LIB3829-006-Q6-N6-F8
gatacaaaggtttagaagtcgttcaaataagaggtacatacagtttcaattttcacatccctaccttgagcattttcaaaagctccaataaatcagttattagtaacaaagaaataaagcaacagagattaggaactagtgaaaaccaacagatgacgataagaatggttatttttgtaaaacagcctcttacaatattagtaaccccttgctgattctcaagaatgctagcatagaaaaaattatcaaaaaggaatatggaatcgggttatcacaattagcagataaaaggctccctccccgactgaaaacagaaaggagaggcccttagagcagagaaaaggtataccgtctcagtagttcacgactgatccatttatagtgcaacatttacatcacgattgctgtgggaaacaacttgcaagtttactctcatcaaccaaatccaggaggcacatcagggtcatcatcactgacatcacacggatgcttctgatcaatatctacagaaaagccaggtggc

SEQ ID NO: 50005 - DNA, 573 bp, Gossypium hirsutum
  Clone ID: LIB3829-006-Q6-N6-G3
acattccaatgggcaccaaaacattgactaaaaatccaaatgtacaacagtttccatgattcaaactctgaaactatgatatcatgtaagttatatgatcaattatcccaaaaacatagtcgggtgatcaactatatttaagctccaacatgatatatcaaggtttttttactagcctaatatcagccttttttctcaacaattgcacatccgcaccacggattgccaaaagccagcaaatatttagcaagctttgtcataccatgaacttgtctacaacaaactttctagtttacctatactaggtatgcttggatttccttttccttttggaaggctgttcggcagcaggggcagaaatatattcttcagcattgatattttgcaaagatttttgctttccgaattccttggccttttgcttcgaggacttagcaagggcagcaacatcttcctccttgttctctgacttgttagaatcttgcttcacgggttccttgggaggaacaaatgctgcttctctttttcttttgttttcagctgttttctgtgcctgcttctcttgcttctctt

SEQ ID NO: 50006 - DNA, 519 bp, Gossypium hirsutum
  Clone ID: LIB3829-006-Q6-N6-G7
gaaaaaggaagcctgcattcaatttttccaagatttccttggcagagtccttatgatcatatcccctgtacacatggccaaatatacttcaacatgagtacttcaagattgaacacaccagtttttgcagaaaaaaaaaaaagaatcccagcaaagtgtaaatttatgagggaattcccaaaagacagtatgatagctgcttcagctgggtagtttatacaaagcaacaaccttaggtggataatcagccatatacaacccggggatgaagcataagttcgacacgtactacactaggctgattctccgataaccataggtagacaatcagccatatacaacccgatcatataggctaggccgattctccgacgtttatttgtgcaagcagtaaatctaataaggcgggctcatggtacagagcgcttaacgcaattgtccaaatcgcaaatccgatgctgttgtggatgaaatccaaagaggtggtggccagaatagctccgaaaattgagaaacttt

SEQ ID NO: 50007 - DNA, 581 bp, Gossypium hirsutum
  Clone ID: LIB3829-006-Q6-N6-H4
aaaatggtaaaattaaatttataaatgtaatgacatctcaaggttcaaatatttcatcatacacatgtatttttctttatataaaaattataaaaagaaacaatactacttcagctaggctgaaatgagaagaattgtcattctacctgcaactgtaagtgatggaaccgattgcaatagctatcaatccgcaatatgatcgccattgacagaaaacattacggcatgctcacatgcgctgtgcccgcttacaaggaatgtcgagtccacaaacattcctactctccatgtagaaccattgcatgtatacatagtgttatgtacaatgtccgggatcgtggactaagtggagataagatagttaagttgaattagcctaccgatctgtcttctagacattgtagaataatagtttccgactttaagttctatctcaaagtccaggcatgcatgctgcccgtcaaagacacctatcaactggcagtatcttcattaacttagcaaggtcgtacgacttgaagtccttcccataacacaagcttaaatccaaggcagttttcccatccttgttttttcgggtc

SEQ ID NO: 50008 - DNA, 301 bp, Gossypium hirsutum
  Clone ID: LIB3829-006-Q6-N6-H6
cacaaataacaatggcactcactttctctacagatcatttctttcattcttttgatccatttataagaggccatatttccaatttttaatacattcacaagcctcatctatatatatatatatgtatacatacatatatatatatgttacattgggttcacaaccttattgaaaaaaccataaccaatacaatttttttcatcaaaaccaaacagaacagagtgattcttgtgtaatttttgggcaatttcaaaatgaaaagtccaacatatccatgctcaagctttccatcatcgcattt

SEQ ID NO: 50009 - DNA, 582 bp, Gossypium hirsutum
  unsure (1)..(582): unsure at all n locations
  Clone ID: LIB3829-007-Q6-K6-A10
gccattttcctctccctttcttcaaaaaaaggnanaatctatggcgagcggcaacgggtcaggacccgaatcccgatgattataaaggcgtcgagttctggaccaacccggaacgagccggttggttgaccaaacaaggtgattacatcaagacttggcgacgccgttggttcatcttgaaacaaggcaaactgttatggttcaaggatccggcttcagtcagccgccgatcttctcctcgcggtgttgtttcagtaggatcttgccttaccgtcaaaggagctgaggatatcgtcaataaggcattcgcttttgagctctctactcgagattccaccatgtatttcatcgctgatacggagaaagagaaagaggattggatcaattcgatcggtcgatctattgttcaacattcgagatccgttactgattctgagatcgttgattacgatagcaaaagcaggtgatttttctgaattttttgctctcttttttaattttaatttttcgtctttttttttaatatgtgctgtaaattttggcttgtagaaataaagactaaaaatacttgtgcctgcttta

SEQ ID NO: 50010 - DNA, 564 bp, Gossypium hirsutum
  unsure (1)..(564): unsure at all n locations
  Clone ID: LIB3829-007-Q6-K6-A2
tttgcccaaacctgcagcagcgatctacaaagcaatttttttcccagtaaaatgggattattgagagctgctggtgtggtttacaagccagtagagcaacttgatcttggtcctgacagtaacgagatatatgtcgaagccgatatcaaagctcctcgcatgggaggattgctggcaaaaatatttgcgtggattctggagtcaaggatatttggagcattggcgttctacatattgaagaggctgaatcgagttcacaagtttatctcgaatgcaacggtggaggaaccacccatgtttgttccattgcatccttatgttgaccttgatgagcaagaagtcatagagattgattctgatgcatctccagcagaaagagttcaacaggctatgaattgccttcctttaacctcagagaattcactagatgctttcaaattcagctgtttccggcgttggacaatagcggattattcaagagcctatagaaatggggaaataactccattgaaggttgcagaagcggtttatatantgctgttcatgaatcttccagtcgtcctt

SEQ ID NO: 50011 - DNA, 567 bp, Gossypium hirsutum
  unsure (1)..(567): unsure at all n locations
  Clone ID: LIB3829-007-Q6-K6-A3
ggnagtgatgtcttgtctttcactgttgcaggtgtatagtaaaatgatggggtgatggagtactttgatgaagtgaaagtttcagttgatgatgaacttgctttcttggaggtgttggagggatttagttgcatgaataagatttgtatcaccatattttgtcacccctctgttngaaaagatattcagctcatactccaaacgatcatgcattagaaaattaaaacttatcgattgcacgggattgacttcactacgtgttgtccatgcgttaccaaatttagggaaacttgagatatttcgttgttgttcacttcgagaaatcagattttcatatcgggatgagtttcacaaccttcgtcaggttcacgtaggtgtttgcccactgttgccaaacctgaattgccttgcttatgctagaaatcttgagatcctcacaattctcgactgtcagtctatgaaacaagttataagtgaggaggagatagcaggagatggacaagatacaagtgaggggagggtactattcaaagtcttcccaaagttaaagatgctttctctgacttg

SEQ ID NO: 50012 - DNA, 267 bp, Gossypium hirsutum
  Clone ID: LIB3829-007-Q6-K6-B10
caaacaccttctttccgataaaaaaaaactcaagagagaagaccatggccgatcaacttacggacgatcagatctctgtgttcatggaggcttttagcctctttgacctgggtggccatggttgcattactctcttcggttcgtcgctttccgtgttgccctctctcttctggttgtgtgctgggccccgtggcgctccgttctctcctgctttctcgtcctggtcctgggtccgccgctgctgtgtctcctcctgttgtgctggtg

SEQ ID NO: 50013 - DNA, 591 bp, Gossypium hirsutum
  Clone ID: LIB3829-007-Q6-K6-C7
ctccgaaaacccaaaacaatgatttacccatgatttccactaaaaacccatattctttaacagttcaaagatcccaagaaaccaggagagatgctcaaagttatcaagctttcagtcaagatcaatattcaggtctttccaccatcaaaatcctggtataaaacccaagacccaatttttaaaccctgttataggaaccaaccttggtgaggtttctgtcaggaagggcaagaaaaagaaggaaagtttatggcaacaaggctgtcaagaaatgttgggtttgtgtgggttgggatattgggttcagggttttaggtgtttcccatggttggctttgaatttccacatggcttataaccttaacttgaacccttcaacattgcagcttgtgcagaactctggcaacctacccatggtagctaagcctctgtttggaattctctcagatgctctctatattgggggtgctcataggataccttatatttgcattggaggtcctgtcttggggtcaattggctttgtttccagttgcaggtcaagcgcttcctgccctcatggcttgtgttcttctcagtaatacaggggcag

SEQ ID NO: 50014 - DNA, 583 bp, Gossypium hirsutum
  Clone ID: LIB3829-007-Q6-K6-D7
caaagtctgtactcagattggcttatgtgttttaaatgggactcgctatatgaggtttctctttctcctccttactttatatgtttctaaagaagataatttcgatttatatatcatagctagacgagttaaaatgtgacacaaaagaaggcacttttatgatattggtgtcaaaaatagttcatttctaatcttatatggtaatagataattaaacataattttacgatattgattagttttattagtgattcgctgcaccttgagaagcttgccttgtgtttgactgatgtttggttcaccttgtgagcagcagtggaattaaaatagtggttgagaaggaaaacatggaggagttgtcagctcgggaccgactgttgtgcaccacctgtcagatgactgttttttggattcagagtcagcttaaacaaaagggcacgaaagacacagttctcaactacgtgaatgagctatgccagagcctaccaagtccaatgggagaatcagtaattgactgtgctaggatttcattgatgccagatattacattcataataggagacaaaccttttaagctcactcc

SEQ ID NO: 50015 - DNA, 582 bp, Gossypium hirsutum
  unsure (1)..(582): unsure at all n locations
  Clone ID: LIB3829-007-Q6-K6-D9
catcttcataatcttgcttgcttactgcatttaaagaaacanaggaactcaatgacccaacccacgctttttcctttattttcttcctaacaaacnnatgcttgtctctggnaaaacacataccaactactttacaaggtccatttcatcctataactatccatttcgatccgtctttacgtcgaggcagcgatgacatacccatggatgatccaaggctgaagaagaatgtgacctctatgttccctgaacaaattgctcttgctttatccactccaacttcaatgtgggtgtcctgggttactggggatgcacagattggtcccaatgtgactgcacttgatcctacatcagttgccagtgaggtttggtatggcaaagaaagtggcaagtatagtagcaaaaagagaggaaatgcaactgtttatagccaattgtacccctttgaggggctcttcaattatacctctgccatcattcaccatgtcagaattgatggcctggaaccagagacaaaatattactacaggtgtggagatagctcacttccagctatgagtgaagagcatgtgtttgaaactt

SEQ ID NO: 50016 - DNA, 461 bp, Gossypium hirsutum
  Clone ID: LIB3829-007-Q6-K6-E1
gtttttatactaagagtaagatagtgtttatctccctctactaagaaggcaaattggtcatatatctacagatcagaatagcaaaatggtcattctctttcaagaactaatccatttctactggcattaggtacacgtggcacatcagcacacatgacattgtttggttattccctaaatcacgctagaccttaacactacaaatagctgaaatttttaacaaacaagattaatttgctctttcatgctatcatataaattgacctatccatttgactaatatgagcaaaatatatttcaactcctaatataagggtcttcatgagattttcataatatcgccgtaagtagcttgcgatagcattacaccccgaatgttaccgtgaaaaagtgctacttcaacacatgtattctttagaaaggctgttacgcaaaatcggctactaaattttcttgaataa

SEQ ID NO: 50017 - DNA, 503 bp, Gossypium hirsutum
  unsure (1)..(503): unsure at all n locations
  Clone ID: LIB3829-007-Q6-K6-G12
attttatggttgtaatgcaagaatagggtgactctcaacttgcatgatatacacaaatttaaaaattagagacttttatggttgtaatccaagatacgttgacgtagtctaacaaggtgataattttatttgatatagactattcaatattnaaaaaaaattgaaatcatattgaaggcggaatttgaggtttagatgtaatgggttaaaaggataggcatagtcattacttttgatgtttgatcataacaaactttggataactaaaatccttacttatccaaaaaataatatgcaaccaaaaagaaatgaaaatgtattgaaagggtagattttttgtttaattttttgaaccgtaaattattaaacttttgatgtttagaatgatttttctcttagcaatttagttattattattttttaaagtaatcgcaacttcattttttattttaatttttatataataaatgattaaataacagaagctatgggatttctaaggg

SEQ ID NO: 50018 - DNA, 563 bp, Gossypium hirsutum
  unsure (1)..(563): unsure at all n locations
  Clone ID: LIB3829-007-Q6-K6-G8
tccgcggccgcgtgggctttggtataactgtacgagcttgacttatatgcctttgttactctcactcttcatttcttgaagtacctatgtccggcacttatgtttgacccatatctaggtatgggtatggggatatagctctccaactacttngaaaaaanacatgaaaaaggttcaatatatttgttccagacacatactcattttcgacatttacatccgagtccaagtaatataattatatgttgtcgattgttctgcaattatatgtttcctttatatgtgattagcacaactacattgtggttgaaatgacaaaatgtaaatataagaaaaatgtgagaagaaatagatgaaaagaagatatgcaagtatagaaatgttgtgaagtacaattggctgtgattgtagaaaatttaaatttaattaatgtacaatatttaaattgtcatattacatttttatatttctactatgatataatttgggttgtgtcatttcctcaagtgagttggcatctcttgattcagtgacactatacttggtacaaatccagttgagca

SEQ ID NO: 50019 - DNA, 559 bp, Gossypium hirsutum
  unsure (1)..(559): unsure at all n locations
  Clone ID: LIB3829-007-Q6-K6-H12
ggnatatcaaagacctgctcctattcaaagcttttacgacgaaccatggtgtctctgtgcccaaactgtctggtccttcgtcaccaacatcttgacagaatccggaacttcatcaatccaaaacccagaatgacgtcttctcctacattccatcgctagtgtttgggccacactattgaccaaacgaggaacaaaaagtttcttaataaccgtcaaggagtcaccttccaccaccagatgtcggaagcccatgttaattgcgaaaagcaacgccctttcatacaccctcgcttcagccacgaacgcatcaaccatatcgctaaaaagataagtttctgctcctacaaaatcccctttgtagtttctggcaattaccgcagatgtagaagacctagaatcacactgaaaatttgcgttaaaatttattttgataacacccaaatctggaggattccaacatgtttctggtagcaatctgctagaaactctcatcttttcatgacacagacttaaatcctgactgtatcctcgaataaagccttaaagatcttccaaagaa

SEQ ID NO: 50020 - DNA, 569 bp, Gossypium hirsutum
  Clone ID: LIB3829-007-Q6-K6-H9
ggttatctgttcacaaatgctgacaggtccatgcagttaaagctctagctaacactcggcctaggaatactgctccaagggctaatcggttatgagtacactcacacctacccataagagtacaggctctgatggtgaatatgacattgagtgattgggatcatgcgttgctacacctgatgtgcccgagcagccctgaaattcccgacataatgggccattttgctgatctaaagccaggaccaagcgccacattatttcccaagtacacccatcgtgtgcacgccacaatattccgccatagagctctgctctcaagatcgccaaaatcaaccctcaaagaactttgttcttcgatgatagcgtccgcaacatccaaacatgaaaatgcggcgatctttacactgcgctgagacctaatggagcacattatgcattagaaagcattcacaacataaagcatgcattaccacagctctgggaaacagacatgaaatctaaaggcagatactctggccaggttacagtggatgacaccatagacagcttatattccatgttatttatta

SEQ ID NO: 50021 - DNA, 521 bp, Gossypium hirsutum
  Clone ID: LIB3829-007-Q6-N6-A2
gaatgaaataagaaaaactaatttaatttaaacctgtttccagttttgacaaatgcagatatctataagtctgtttattgatataaatgagatggtacaagcagcagactatatgatatgataccatagcaacaatggcaacttgtaaataatcaagcaatactgtgtattgctgtataccatggtaagttggttttacagtgttattccatcaagagaaatagaaggtatatgttgaaggccaaaaatattggtgtctcgtgaattctgctctgctctcttcactttttacctagtatgtcgtagaaaacctttggttttctgtaatctgtgatgcacaatgcctgcattgcaaatgcaaggtgcattaaagtgggttctgaccatggcttccctataaattgaaggccaattggcaaaccagctttgtcataaccaacagggacagtaatagcaggtagtcccaaaaagtttcctgctatctgatatcgaataatggtacctccatttacgtagtcaag

SEQ ID NO: 50022 - DNA, 380 bp, Gossypium hirsutum
  Clone ID: LIB3829-007-Q6-N6-A3
gccaaaaacgaacacatgcgtaaatcaaactaaagtgtgatccaacacactcctgtggatgacatcccggttattcaaaccaaatgatcaatcaatgggtctcctggggaggcaatgggcgtaaccgatgcgcaaccccattaaccaacctatagggataatgaagaatcccgtaaacgaaggcaaaaccaaacgtcaaagtatgaagtttattaacaacagaaaagcgaatgggactcatggtcatgtggtgggatccatgctccctacccatcctaggacctccaacaataaggccttacctgaatgagcattatgaaagctcatcgagcacgtttgcgcaccagggcgtcctttgaaaatctaggggttcatcaaca

SEQ ID NO: 50023 - DNA, 477 bp, Gossypium hirsutum
  Clone ID: LIB3829-007-Q6-N6-C10
attaaaggggtccttttaaacaagagtcaaaataatatgggggcgtactccacacattccaaaaaccaacgagagagtgttatgtgtatgcgaccgatgagtaaagtgctgagattatcatcagtatgagagggagaacgagcgcatccatgagtccaaacgaggccatgcgaggggggctgcggcttcatcctcatcagcgcattcccatgcgcttcctccgctttataccatcggggggagcctggcatgaggggcgtgtgcgttgcctgggtaaatatgcacctcatatggggtgtttgagtctttcaggttttcctccaaaggcttcgcgggcggcacatctgagaacccaacaaaggtatcaaggtctccaaaatgagcttgaacaggggctttggcgctggcgggggctcccagttcaggggagggggccccataaaaggcgagcaacagcatcaacttgagggagactaa

SEQ ID NO: 50024 - DNA, 465 bp, Gossypium hirsutum
  Clone ID: LIB3829-007-Q6-N6-D10
aaaaaaaaaacaggggctctatggcgtccccccataaaaatccaaaaaaccagaaccaaaaataaggcgtcccaatacatcacccaaggggtgggggggcgacccaggcccaaaaatcccgaattatccccggggaaaatggggaaaaaaggttttagaggggcaaaatagataatcaaaggctaaaaagggagtaataatttttttaactaactctcttttgggggcggggaaaaaaaacatccctttacggggattaaaaatggggccggggggccccaacaggggaaagggtaaaagggggctaacatccagggggggcaaaaatggggggaattatattcctaaaggggttcaaagagggggcacatagatccctaaaacccaaaggggggtgccggccccagggaaaggttagggaaccaacggggaaaaaaccctaaccataaaaacccccctggaaag

SEQ ID NO: 50025 - DNA, 524 bp, Gossypium hirsutum
  Clone ID: LIB3829-007-Q6-N6-D11
attcaaaggggtgtgtaacccatatattaaagcgaattacagtgtatgtgcaatacaactaacctgcctaattacaataagtggtgcgaggggcgttcactcacacatatgagattaatacccggaaaaagggggggctacctcactaatcactacttactaaaagtgtggcctatttgaggtgggtgcgaaataactacattcatcatccatagcaaaatactcaagggggtgcaagatatttccggtatcacatgggcctttttttcttccgagaagatgcttgcgactgagaatatgaggcaagagttcaacaagaaataagttcctttccaagggggagcacaagattgtgtgttcatattttatggctatcaccattatctagaggggggcgatggtgcacttgacggataaactggcctttcactcgggggggctgctctgccaggcggttccgggtctgagatcgaacctttttctcaaaggatcgagctttccggttaagggggaacttcatcaaa

SEQ ID NO: 50026 - DNA, 530 bp, Gossypium hirsutum
  Clone ID: LIB3829-007-Q6-N6-D9
aagagtaatagtacacataagcatttagcagatacggctgctccttttacttgttccgactcattgtttccctgtcatgaccaaaaagacaaaaaagaacttggggtttgggttcagaattttataccataacattattatatatgcatactagtgggagtagatgttgaagtgggaaatcacttttaaggatgttgatggagagcatatgtcaggctgtcgcactatatagatttgatcgccaggactatcctccttgtatgtatcctgatttctgtgccaactccacaatgcgtatgtcgaattcaaaacctcaaggattccatgcccgaagctgctttctctatatgcactccactctggttgtctgtcccaacaaaagttgcctttagccggaccagatgagaaattcaagtggcacacacctccaatctctggcatattgtctccttgtgaagggcattttcctggttcatctgcatgatcaacatctactttctcgatgttcccgccatctccgactgttatgt

SEQ ID NO: 50027 - DNA, 470 bp, Gossypium hirsutum
  Clone ID: LIB3829-007-Q6-N6-E1
ctattcaaaccttttttttttttttttgtttttaacggaatctgtgtttgaatacgctcttttatctctacttacccttcgggggggaacgcaaccacaagcatctcacggggtaagcatgaaatattattgagacccttaagtgaggggtggaaaagccttttgcccctcctaacaaagggataactcaagttatgtgccaggctcccagaagccaacacctcctttttgttaaaaaacggtgcaattctgactggactaaaactgcctgaattgacggaataacccaacaatgccataacagttggtgtcccacgttttccctagaaccccgcaaagggtataatttccaacaaattgcccataaccccctttgatttaacatgcataccccctttgcctgcttctgtaaagggaaaaaaagccaactgccttttagtataaaaacctccgtcaggcttataccgcta

SEQ ID NO: 50028 - DNA, 507 bp, Gossypium hirsutum
  Clone ID: LIB3829-007-Q6-N6-E6
aagagagtaataactcctcccttacaatggggaattctaaaatagttaaaagttccatattaagtgggcaatctaaccacatgtaaatcacaacataaaatccttccgtaaaaccaacgagttccaacttacaagcatctaaactgcacacattcgctacttttacctggaggatgggtctgccttgccactttaacggaccagtctgattcagaattccaacattcaccagccaaccaaatgtatataacttcttcatacccttcaagaaccggatcttcagacaagagaaggggagtatccaaatcaacaaatttgaaacatccaaggccagcagcaagatgaccagcaaagcccatggccaacctggtttccaccataccaccaatcatgagatccagtcccgatgccctagccaaatcaataatttcaagagcaccaaggactccaactttagcaagcttaatgttaacaacatccgcaagttctcccttcactattttctta

SEQ ID NO: 50029 - DNA, 519 bp, Gossypium hirsutum
  Clone ID: LIB3829-007-Q6-N6-E8
aatataagataactcgggacctttaaacaggggtgacatgaagggggcttgagtatgaaagttttacagtgacaagtgaataaaggggcaaacaattcaatgagattacatcatcactcacgatattacctctttcaaacactgggaacaaacaggcatcctccaaacatgcacggaaaatatgggaaaacaatttatatccttggcaataggcgcgataactaggtttcatttacctgagtgggattatataatacaagtgaaagggtgttcacaatatggaaggtactccaactgagttatctgccgatccggacaagaaaataggcaagcttgggtgccaatccacggttgtgatggctgcactatggggaagagttttgaacccatttgagagggcttgtacctgatatatgggggctcttacggaaccagatgttgctaacagctgcctaccgctggcatccaatgcgcatttcgtgtctacaatattttgacgactggggttcacaaaaccag

SEQ ID NO: 50030 - DNA, 430 bp, Gossypium hirsutum
  Clone ID: LIB3829-007-Q6-N6-F10
aaaataaaaatagggagcgacttcattcatgcggggggcacagagataaccagggggctaaatgggcaaacaaatcttaatcctatggggcgaccaaacataaaacagcgatttaaacaaccaaggggggggggggggttgcgcacaaggagcggaagaagctcacaatgagaaaaaacccttcctcaacatgagattttatcaggaaccagggtgtctgcggggcaaaggcttccaaaactcatcttctcggggtatggtccttgctttcttcttcgactccatcgggctttagggctttcaattttctgtgacccttgggaggaccgagtatccaggccatggaaacaaatgtggatgagtaggtgccagattttgtgtaaagcaaacgaggaggagaggcatgaaaatcagcacccccatataaagg

SEQ ID NO: 50031 - DNA, 440 bp, Gossypium hirsutum
  Clone ID: LIB3829-007-Q6-N6-G6
accaaaaagggccttttccatggcgggatcaaagggcaaacaaccctccccactatttccctaacacaggccccggactaacatccaggggttcacaaagggggggggggggggaccaaaaaaacccaaaggggccgcctacccagtcgttctaagcagccgccttctgggccctttaagccgcgggggacttgagggatttaggctgcttcgggttcgggggaggtgatttcttctgggccccgactctttttgggggggtcttgggggccccaactttcttcgggtcaaaagcggggttagccctcgggcccatcttagcttgcggaacagggggcctctcttttaggccgggttccgaaagcttgtaacaggccctgatctttatcaacgggcctcaggcaacagagttttaaagctgaaaaccaaaaatttcccgg

SEQ ID NO: 50032 - DNA, 511 bp, Gossypium hirsutum
  Clone ID: LIB3829-007-Q6-N6-G9
atgctaagcaatatatatatatcgcccaagcctaaagggaaattgtgctaacaaacgcctccaaaaaaaaaaacattttgttaatgagggggggaattgggaagaaaatttcgagacagtggggggcctattttctacgtatcctcatcgaatgggacagggggaatatagcttaaaacccaagccgccaaaaaaaagggatgttctaatcctagccaagaattgacttgattttcgccttctgatcctccccaagggagggggggaacaaaacctcataggggacaaagaggtctcctttcttgtggctaaaatgcaatggcattccttctcctttgaactttctcacctccttcggcttgggaatacccttagagccaatctccactaaatggtcatcaaggggtttaatgggcttatcaaaaccaacaagagcttgaacaagtgttatggtgacggtggtgtgcaagtcattgccttccctcctgaatcgggcatggggtgctgtatg

SEQ ID NO: 50033 - DNA, 534 bp, Gossypium hirsutum
  Clone ID: LIB3829-007-Q6-N6-H9
aagccctccccaccggggggagcccttttcattctatacattaatattatttaatataatgaggatgagagcctcgactaataggatacatcctcaacaagggagagggagtggggagcctcttattaggggggttcactcttgtgagggttaaaacaagtgaataaacaacatggggtctaaccgtggcctggggtgtccactgggaactctgggcgaggaactgagtgcaccatttcatggtgtgtcccaaaggtatggggatgcctgcgttatggggtgaatgcgttctaatgcgtaatctgctcctttcagggtcagcacagtgagagaaacaacccattttcctacttcggtgtggcggacactatcatcaaaaaacaaaggtctctgaggggtgattccagcaatcttaagagcctggtctatgggggattcttaaggggttccaaacaatgggtgtgcagagtcataatgagcgctcttggccctggctttagcgtggctaaatgggcaattatgtgaaaaatttca

SEQ ID NO: 50034 - DNA, 592 bp, Gossypium hirsutum
  Clone ID: LIB3829-008-Q6-K6-A11
gtcgacccagcgttttgtttactgcagactgttcttgcctttggagtgtaagattaggtctagcatcaaagcaaagactggcttcccggaatcggcggtgcctaattatccgaagtgcagcaacaaagcctgcaaaatcaccagctgaagaagactggaaggtcaagagggaacttctcttggaaaaagggtgggagggggggatgcaaaggaagcttttcgccttcaaaaagagaataactttgtgattctcgatgtacgtcctgaagcagaatttaaagaggctcatccagcaggggctgttaatattcagatatataggcttataaaggagtggacggcatgggatatcgccaggcgtgcagcatttgcattttttggcatattttccggcacagaagagaaccctgagtttatgcaaagtagaacaacgtgtagaatcaaattttggcaaggacgcaaagataatagtggcatgcacaactgggggtacaatgaagccatcccaaaatctacctgaaggtcaacaatccagatcactcatagcggctttcttgcttgtgctcaatgggtacaaaaatgttttccattt

SEQ ID NO: 50035 - DNA, 575 bp, Gossypium hirsutum
  unsure (1)..(575): unsure at all n locations
  Clone ID: LIB3829-008-Q6-K6-A3
gngtctttngatctatctctagctttaccacgagtctctctctctctaactgcatcgaatgctttgcaaaatggtgatccttcgcaacatcggtctaggcctagtaggagtgtacagtccttggcaccatcaaccaataacacgcaaaccacttgctctaatgatttcactgctgcttcattgtcatactcttattctgtgccgtattcacacaatcctagctgctccttaacacggaattctactgagaattatgagttttctgtggggaaagatgatcaaatttggtgtggtggtgaaggtactaatggatccgtgcatagtcgttttaggccaattggtgatggagttgctttggccggtgccggtgctggtgctgggttttccatgatgcaggttaaccgtcatgtgaataaagattcatgcactagtcttcataggacttctagttcagataatcattcatttttcccatcagaattgcttgccaagcctcgcatagataatcattcaggggattcaaggagaaaggattcagagaattggagagttttggagagtatggatggagggag

SEQ ID NO: 50036 - DNA, 596 bp, Gossypium hirsutum
  Clone ID: LIB3829-008-Q6-K6-B10
cggtcgcgtgggcggccgcgtgggcggtcgcgtgggcggacgcgtgggggcggagatggatggtgacgaccgttctccttctgtagttacttacaatattttgattggttctcttgccctccatggcaggacttaccatgctatggatgttttagatgaaatgattagaggacgttttaaagtcagtgctacaagttataacccaataatcgctcaactttgccaagaggagaaggtggatcttgtggttaagtgtctagaccagatgatctatagacgctgtaaacctaatgaaggaacatataatgctattgctgtgctgtgtgagcagggaatggtgcaagaggcattctccatatttcaaagccttgcgagcaaacaaagttcctctcctaatgatttctacaagagtgtaatttctagtttatgcagaaaagggaacacatatccagcatttcagcttttatatgaaatgaccaagtctggcttcactccggactcgtacacttattcctcactaatcagaggattgtgcttggagggaatgctgcaagcagcaatgcagattttcatagtaatggaagaaagtaacttta

SEQ ID NO: 50037 - DNA, 593 bp, Gossypium hirsutum
  Clone ID: LIB3829-008-Q6-K6-B3
atataacaaaaataaatactcacagtgcactgctggctcatgttataagttgcaaagctgcggtgtgatggggagtcggggaatccactatagttggaagagaggaagtggcaccaccccgaaaggctgaatgcacgccttaaggattgtctagactgatgattgatacactgttgtatgctacggggagtgtaaaggttacactcactcagatacctctgctactaggtgatcaaaccgaaatgatactggatagtgtgggaaacggtgccaacgatatggaaacctggcagatcatgtggctatactatcttaaccggaaatggcaaatgatgtcgccactggcgtgaaagtaaaaaagcaataacatgtgcgatcagcttaggatcaactgcaacacgagtgttactgctcgctgattagaaaaccattatctacatccatgggaatcctatgtaccagttatgcgtgaacctaaacctttagccaatatactgtcacacatgttggccagaacaacacaagatcatcttcaaccaacacttttgataaactctgtcccataaggctgtgggatatgtacaggttttggg

SEQ ID NO: 50038 - DNA, 111 bp, Gossypium hirsutum
  Clone ID: LIB3829-008-Q6-K6-B5
ctcctgaccacttttagtacctgggatagggatctgctttatctacttgctggatagagagcacagcggaccgcatttccgtattccccgttctctgaaagaaataaagag

SEQ ID NO: 50039 - DNA, 604 bp, Gossypium hirsutum
  Clone ID: LIB3829-008-Q6-K6-C1
gcccgtcaaaagtcgtaaggagttcgatgcttccctcgctattgaagaagaagaggaggaggaagaagaagaagaagatgaagaacatcacgagggacacgaagtgcgtgccggtaataataagggaagatttgagaaaagattcacgagggtcccatagggaggagataactccaccaaggactcctgagaacaacaatgtggaccaccagacgcctccgatgcccgaagctaaaaacgtggcttgggattacttcttcatggtcgacgataacatgccgggtccgagcttggatttgcacgacgacaatgacgaagaatctactaatccgaatgtcgatgctttagagaacaatgtcagtggtgtaggccacgtcgaagttgatagtgagattgagccaaagacgccggagaggccggataaggttgcgatggcagctgaggctgatgataagcaagaggtacatatcgagcactcgaaaacggctccggcagatttcagaagaatggtgaaggctgtttccggtgtgaatttaatgcaggttttgaatgagattgatgaccatttcttgaaaggctcagagagtgctcaagaggtttctaa

SEQ ID NO: 50040 - DNA, 562 bp, Gossypium hirsutum
  unsure (1)..(562): unsure at all n locations
  Clone ID: LIB3829-008-Q6-K6-C2
gcttcccaagcaaatagaagacagaagctgcagnaaggaaattaagctagcttttaaatcaagaaaatggacaagtttttagcatggaacgagggactggagaggaaagctatgccactaactcaaaattacagtctacttgtctatccctgtcaatgccggtgttaaagcaagcagtgttgagtttctgctgcaccgacttaccggaaaccatcaccatcgcggacctcggatgtgcgtcgggaccgaacactttcattgcagtttccgagatcataagcatcatgtataaaaactgctgtgaactcggtcgatcaccactagaatttcgagtgttttttaatgaccttcccggaaatgatttcaacactattttccagtctttgccagcttttcaggagaaattacagcaagagaatggaccaaagttcgggccgtttttcacagcgggtgtccctggctcattttacgggaggcttttcccatccaaaaccttgcatatcgtgcactcatcttcttccattcattggctttctcaggtgcccccggaattggtcgacaa

SEQ ID NO: 50041 - DNA, 572 bp, Gossypium hirsutum
  Clone ID: LIB3829-008-Q6-K6-C6
gctgctctgggaccgggttagccggtgtcgttaatgcgaccatccgatgaacgacctacggctctcttttctgccgtattcactcggtaagtgaggacactccgcttttcggggctagtgcgtgccctgcccttagcttgcaagatcaacatgtagtgctaatacgatgtccacgaaccgggcgtgggctcatgctatagacctttcaccgcacctctgctgctgatgccatcggagtcgttggctcagactatgattcctcttcctacaccgattcccgctgttctaatggatgtatagggctgaaacagctatagagcttgggacgaaaatggctcgcagattatgcttggaacataaggaagcattttacaatcacacctctaaagagcctatttgttacaagatgatcggggctcagctcaactatacactggcaaacagatgctccacattctgtaccatactcctgtttgcaaagaactacatacttgtgcaaggcctgaaattgacgcacccatgcgactctatgtgaaacatcgatgataccgggatcatgatcacatctgtgg

SEQ ID NO: 50042 - DNA, 562 bp, Gossypium hirsutum
  Clone ID: LIB3829-008-Q6-K6-D11
gtcagtacagcgacatgtaacactcaggatacatgcctctgaagaacagctctcctagaccttcttagttttatgtatagcaacaccttatcaacgaccacgcctactgccttgttagatgtgttgatggctgctgacaaattcgaggttgcatcttgcatgagatattgtagccgattgttacggaacctgcctatgacctgtgaatctgctttactatatttggaccttccgtctagtgttttaatggctgatgctgttcagccactgacagatgctgcaaagcagtttcttgctgtgagatacaaggatataaccaagttccaggaggaggtactcaacttgcctcttactggtatagaggcagtattttctagtgacgatctccaggtagcttcagaggatgctgtttatgactttgtgctgaaatgggctcgtacacattacccaaaactggaggagcgacgtggaatttttgcaacacgacttagtcgcgtaatgcgttttccatatatgacttgcagaaagctgaaaaaggttttaacctgcattgactttgatc

SEQ ID NO: 50043 - DNA, 568 bp, Gossypium hirsutum
  unsure (1)..(568): unsure at all n locations
  Clone ID: LIB3829-008-Q6-K6-E3
cggccgcgtgggngaaaatggccatcaaatttcacatattatcctggtctaaagtctcgaaacctgtaaattcaaatgaatcttcaactggttgtggttgccatggtggatgtctagctggaaactccagctgcccttgcattcaaagaatggtggtaatcttccatatactacaaatggggttcttgtcagccaaaaaccgttgatacatgagtgtggttcttcatgcatatgccctcctaattgcaagaatagggtatgtcagagtggtctgaaaattcgtttagaagtgtttaaaactaaagataaaggttggggtctaaggtcatgggatcctatccgctccggggcttttatttgtgaatatggaggggaggtaactgatattactagtgcagaggagctcagatgcgtaaacgatgatgattatattttttatgcaacccgtactaatcagtcgggggaaggtttcttgaatgcatctaatgagactctgaagatcccgtttcctctaattataaatgcaaaacatgccggtaatgtagctcggtttatgaaccacagctgc

SEQ ID NO: 50044 - DNA, 471 bp, Gossypium hirsutum
  Clone ID: LIB3829-008-Q6-K6-E4
cgcgtctattcctgcctcttgggcatataattcatagcagtagatatctcttgctgcatgaggaaacctttggctgcaggctagaggctgaacgtcaagcaggcgagactgcaaactttgaggctggggcgatcatgagtcggggagcaaatggattcggactgctgactctagcaggctagtccgcccctgcgatcaggcacggagatgattgatgcgcattgcgttgaagccacacacccttgccttttctgtctatatgatatcgggcgtgtgcacccacgcaagcaacaaatttccagagtccttgggggtcagtgtgcacatactgattcacgagtggtcaaaaacccatgcacctgacactcgtatgagataataacaacttgtatcaacaaagagtgtatatgtcggaaacttattctaatggatgataaaggcgatctaaaaaaaaaaaaatcaggcggacaa

SEQ ID NO: 50045 - DNA, 563 bp, Gossypium hirsutum
  Clone ID: LIB3829-008-Q6-K6-E5
gtttacatatgagccccgcgacggccaaacccaaatcattagtttctgcaataattcctcttcagagggatgctgaggttccttctcatgtattaatgggcatacgtgctggtgctgatgctgtgccgctatcaccgcttggggaatcctgtgtaaggatggatttgactgccattcatgaggtcttagaaaaccttggatataaagatgatgagggtactgctactgagctttcattccaaatgtggacaaaccagatgcaagaaacattgacatcgaagaaaaaggtgatgttgcttttaggcataaagattttactgctgccattgaatgctattcccagttcattgatgttggaaccatggtttccccaaccgtttatgctcgacgtagtttgtcgtacctcatgagtgacatgccccaagaagccctgaatgatgccatgcaagcacaaatagtatccccagtttggcatattgcatcctacttgcaagctgctgctctatttgccctaggaaagaatgacgaggcacagacatctctcagggagggtactgagcttg

SEQ ID NO: 50046 - DNA, 275 bp, Gossypium hirsutum
  Clone ID: LIB3829-008-Q6-K6-F12
gcgttcgcggtcgcgtgggcggacgcgtgggcggacgcgtgggcttcaccttaggaaaagacacttacactgttattttcctaaggttatttattatcatatccttgcttccatattaacaaagcaatttagagtgaaacctggttctttagttcctacttattttgagaacagcttggtgttatgctaataatctctgcaaattggttctcttgtttagagattttgtttgatcaataaaacgaccaattcgtaattttcatattttaattttt

SEQ ID NO: 50047 - DNA, 584 bp, Gossypium hirsutum
  unsure (1)..(584): unsure at all n locations
  Clone ID: LIB3829-008-Q6-K6-F6
gtgatcattgactctcatatttctcgatcagccttggcatttggaggacttgcagggnaatcaccatattcaaacaaaggggtatattaaaatatatgaaacttgataaagtttagaggttttcatgtgtaaacttgcattagcatgaggtacaaggttatccactattatgtttctcgtttttggtaaaataatgatttgttctgagaaaaaaaaaaaaaaaaaaaaaaaaaaaaaaaaaaaaaaaaaaaaaaaaaaaaaaaaaaaaaaaaaaaaaaaaaaaaaaaaaaaaaaaaaaaaaaaaaaaaaaaaaaaaaaaaaaaaaggggggccctttttaaagaaccaaattttactacccggggatggaaaagaaaaattttttttttggggcccccaaattaaatttactggcccggtttttaaaaacgggggaagggaaaaaccctggggttccccaaattaattcccttggaaaaaattccctttttcccaaggggggttataaaaaaaaagccccaaccaattcccctttccaaaatttgccccaccctattgggaaatgggaccccccctttaagggg

SEQ ID NO: 50048 - DNA, 578 bp, Gossypium hirsutum
  unsure (1)..(578): unsure at all n locations
  Clone ID: LIB3829-008-Q6-K6-G2
cggtcgcgtgggttccagacanagntgaaatatggagctgttgtggcaaaacggacaagttgttatgcagagccaaaatcaacgatctatgaagaaattgccgtcgttcaaacttctcgacgccgatcattcggctcccagggagatccggtcatcatcaccatctcacaagcatcgtcgtcatcatcatcaagagcaacagcaattggttaccgatcatctcttcatgcaagaagatgaaatggcttcgtggcttcactatcctatcagcgacgcaaatttcgaccacgatttctgcactgatctcctctatcctccctcctcctcccccaccgctgccgtcgcaccttgcgtgagctccattgtggcaacttccactcctcctatacttaaaagagtttctcaagtttcggtttctgcttcagctaaggaatcagttcctaggcccccggtaccgccggctaggaggaatgagttggagccggcaaggatccacaacttctctcacttctcgaggcatataacggcgaggacggagcaatctgaactctcgaattcgaagaatgtaatgggggaat

SEQ ID NO: 50049 - DNA, 591 bp, Gossypium hirsutum
  unsure (1)..(591): unsure at all n locations
  Clone ID: LIB3829-008-Q6-K6-G6
cccagcgtccggcgaccaatatgagattcgccagttatgtatgaataacaagtcattccaatagccgattcatcaaataaatagcttcaaagtcgggaaactattgcaatggcagctagtatgatttctttgtgattgttgcttttcatagttagctatgaagcaacgttgctcctgctgtgagtgttagatataggtattttcatgcattcgagtacacacatggctttgaagtcatcctgtgattgaaccaagcatccaatttgaatgagaggaaaaatgaagcaaagaaaagaaaacttgtgcatatcagttatgattgaatgattgttatggaattggttttcacttgtatttctaaagttctgtatatacttattattatgtaaaagaatgtgggtcttctttgcttgcatatcanaaaaaaaaaaaaaaaaaaaaaaaaaaaaaaaaaaaaaaaaaaaaaaaaaaaaaaaaaaaaaaaaaaaaaaaaaaaaaaaaaaaaaaaaaaaaaaaaaaaaaaaaaaaaaaaaaaaaaaaaaaaaaaaaaaaaaaaagggggggccccttttaaagaaaccaaattttccg

SEQ ID NO: 50050 - DNA, 561 bp, Gossypium hirsutum
  Clone ID: LIB3829-008-Q6-K6-H2
cggccgcgtgggaatttctttctttatcaacctccccattcatctgtagctataacaccaaaaagcctgcaaaccctatctctatttgtagatctgagcccagctatttagcctttgcattgtacgaggagaaataaagacagtgggtcgtatagagagagttgttagtcttggttttttatgtgagggtgcattgttctctgatgattgtatgacagtcaagggtatatggttttgagaaggaccctggattttgatacttcagagcgaaaaagtaaagagggatgcaatatttgtggatacttgattttgattacatatgttacgtcgtattgcgtggttaattggtttcaataataaagtcgaacaagcgaagaagttatccaatgcaaaaccgcaaccggctaaagtacagccggctgtcatgttggatactatccaagagattgcaatttacatccataggtttcataaccttgatcttttccagcaaggatggtatcgacttaagattactatgagatgggaaaatgatcagcaaacttctataggagcgccttc

SEQ ID NO: 50051 - DNA, 583 bp, Gossypium hirsutum
  unsure (1)..(583): unsure at all n locations
  Clone ID: LIB3829-008-Q6-K6-H7
gggattgttgttcggctacctgtttgaggaaccggnatgttgaggcgcttgctactgctgctcttgttcaggccattagggaagctcaagagcctcgaaccctccaggaaatctctattgctgccaatgtaccacagnaaagagattggcaagtacatcaagatcctgggagaagctttacaattaagtcaacctatcaatagtaattctatatcagttcatatgccgagattttgcactctccttcagctcaataaatctgcacaggagctggcaactcatatcggagaagttgtgatcaacaaatgcttttgcactcgccgaaatccgattagtatatctgcagctgctatatatctggcatgccaattagaagacaaacggaagacgcaggctgagatatgtaaggtgacaggtctcacagaagtcaccctccgaaaagtctacaaggaactattagagaattgggatgatctacttccgtctaattatactccagctgtccctcccgagaaagcatttcctacaactacaattgccacgggccgatcttcagtgcctagagttgattcaattgatctga

SEQ ID NO: 50052 - DNA, 492 bp, Gossypium hirsutum
  Clone ID: LIB3829-008-Q6-N6-A2
ggcgtatatcaacagacaatggcatattcattattcactggccacatcaatagttcaacacgacatcgggggcccaaagcaacatattccattaaagccactgcctgcctgcctgccttgtcatgttggggaaaccaacaggataccaagttaggtactagcaaccaaattttcaagcatttccactttcggtaactcgaaattactgtctgcctgaacgattttgatctcccggagcatttactcattgacttacccaatttatcttaaaagatgacatccaacagatttaaacttcgaagtttatatatatacaaagcaaaaatggggataatatatatgtatgtagatatgcccatccaaggggttttttagcattcttcatgtggaactaatggaaaacttattctacaacatataatctgaccttggtaaattataatgccttctaaaaaaaccaattatttccctcttgatttcgcggcatcaact

SEQ ID NO: 50053 - DNA, 520 bp, Gossypium hirsutum
  Clone ID: LIB3829-008-Q6-N6-B10
caaaatgagtcctttgttccatgcttgtggaagaggggggtaataaataatgtgatatcagccattaatacataattaaaagtgtgctacatgtgataaagggagttacaacaaaaacaataaccagcttattcaaataaaagtgccacaaatttgagtccttgtgcttgagactaaattcatcttcattccaccttccaaataattgggccactgccaaatgagctcaaagccatttcttcataacaaaatttatatttatcaggcagatcagaatcaaaatcacagatcgagaatctttcgatttcttccattttcctacgtgttttgcactcccaaaatcaaaagttatcaatgggaaaaagggggtactgcattataagcctttctacatgtggactaacaacttctctcatatgcagctccttcaatacttgtgctgccagctccatttgtgcttcatgagcaatcccttccacaagtatgggatacgtggtctccttaggggtatagcctttct

SEQ ID NO: 50054 - DNA, 446 bp, Gossypium hirsutum
  Clone ID: LIB3829-008-Q6-N6-B2
aaaaaaacgaaaaggggggaatccacttattggcttaaacatcatccccattccataggggccaaaaccaccccccaaaacaaataaaacccccgccaggggccaaccgaaaaaaaattcaaggccaagccaaaccctttccaacatagggcaaacccttgtaaaaaaaaaaagtttttaaaacatccaaaaacccaagggtgagttccccacttcgttgccccccctttttacaggccaactgaaccacagttttgaagcccattgcccatgccgcccaccccaggaaagaggcccatgaacccatgttccccaacctgaaaacccccattgttggtggccccccttgaaatgcccgaacagcttgaacttaaactggtgcacccccccacaagcaaagggctctaaagttctgaccccctgttctttcggccaaaacagcgggc

SEQ ID NO: 50055 - DNA, 421 bp, Gossypium hirsutum
  Clone ID: LIB3829-008-Q6-N6-B3
aagggaaaaaaatttcattaacaaggatgcttttacaagataagaaaatgtgtcagcagataatagacaactccgtataacgaactgtttcgtatctttgtgtcttgcgtgagagagagagttgtatctaggggctattgataaccgggtaagggacctaaagtaggctcttacatttgcacatcgtaggacaaaataccacagctctgaaccttggatgggcaactagacagcaaaagcatttgcttaagcctacaaacgaattatgctgccttatagctaaaccctggtagacatggggacggaatgcctagaaaatatagggccaatggcacacagggcgggaggaactagctctttttgaataccagctaattgtttaaagaaccggcgataaccatgggaatataagagcgtggtt

SEQ ID NO: 50056 - DNA, 450 bp, Gossypium hirsutum
  Clone ID: LIB3829-008-Q6-N6-B4
aaaaaaggaacaggccgcttcttcggggggttgggccccccataaggcccaagaaccccgggggggaataaacccttaaacaacaagataacccgggccgccccggggggaaaagacaatccccgggaagggcccgccctgaggggggatgaggaaatgcccaagcatttggggaaaccttgggggggccattactaaaagggggatttgaggaagcataccggggggacatcatcattaacgccttcctggggcccctggttcagcaaaaaaaaaaacttcccccgggagagaacgggatcatgagccggggcataagggggatctttggagggggtttccagaattgcgggaaccgggttattggggctatcaactaaaaaccttatcaggggtgcaacatattggcggggcaaaataatggcaatatccccccttgggggggagccc

SEQ ID NO: 50057 - DNA, 527 bp, Gossypium hirsutum
  Clone ID: LIB3829-008-Q6-N6-C2
ggaatggaagttgaagatccacatcttatattctccagaaatcagagtacaagaacctactcatgagaacttcaatatcatattaatcaagcatttctgattaaagaaacaaccaagctaacatgctccacttccatggtatctgcagccatgatttccataaacctatgaaacaaacggtccatgatatctgctccaaagtgactcccaatcatagactcattgactgctctcatagccttcgccatttctttagctgtcaatgctctgtcatagttgatccctccattgacataatcccatggtaatgctaccacctcgagacgatcaacagcgaaagacccctctttctctacctcggcttgaatctcttccgggcaaggttcgtaatacggggtgtagtagccatctaacatttcctcttcaaccaccccctttgcaaccaaatcctgaaatgcttgacctaggtagtcccaaagtaaacagctttggtctgaggtgggatctggtgttgttctgccccttaa

SEQ ID NO: 50058 - DNA, 534 bp, Gossypium hirsutum
  Clone ID: LIB3829-008-Q6-N6-C4
gttttatttaattacaaatgagcggatgtgactctgttcaataaaaagtatatgagaattcccaaaacgaatacatttattacccattgtcactttgactggtggctagcttataaagcgcgaaacaccaccgctctttttttactgattttgctcggtatgatgctgctcctatcattttttaaaagctgctagccggtatatggagtcagtgagtttcggactaagccgtttgaggcgcttcatggtatggaggacatcagtgatctgtcgaggtgcgctctgtgggcgctcaaggggcaatctgcaagagcagaggggtagggaaccgctagattttggaaaaccttaagctgtttggggtaaaaaaaccctaaggtattgggttttaggtctgttgggagaatgaataacggactctatataaattggtttcgggtatttaaacccaggccaaagttgacctgttacaaaccttatattgactgaatttatgagattatatcgattcagattcttcaaggaatgtggcga

SEQ ID NO: 50059 - DNA, 538 bp, Gossypium hirsutum
  Clone ID: LIB3829-008-Q6-N6-C6
attattaaaattctatttttcaactgacgtacctgaggtagtcctctggattatcatcgcacaaaccacaagggttccatactacccacttgaacgagatcacgtgtgaaggcatagctcttactctcaggatccgggaaaattgaaaagagattgattattccacattaattgccaatttcaacagggcaaaaacctttctaagtggaagcctttgacaagaacccaaaaccgggtgggtattcctgatgatccgttgcctcttaatatccagatgctctcccttggttttaatgtacggaaccaggaaccctaacttccttaaaaaggagcttactgccgcaaaatgacaggaaacgaattctcgatcaaaaaccaggtgacaaactgcaacgagttcgttgtatcaaatttattgggtggcagaataattagacccctgctaaaggccaggaatgtcgaataccgacatgtgcccgtgccatgtaacatctatagtgccgatgttcactggctagactacccaatcacgtacaac

SEQ ID NO: 50060 - DNA, 521 bp, Gossypium hirsutum
  unsure (1)..(521): unsure at all n locations
  Clone ID: LIB3829-008-Q6-N6-D11
gagtgccaaatagattttatatacatacataatatttttatgcgtaagatataattattcaaaattttacaagggattcanaaggagtttgcggggggggataaagcaaagggaggggtaaaatactagcttctcacaaattcattgtgtaatagtgagttcagccctgagatggggggaggccgtgtataaaggaaatgctatcatctgacatgaatgccgtccagggggtaccaaacagggtacgataaccgacagccttgcctccagtgagaaggtaattccctttatacttgcttacataatcctcggttgggtttgaccttgccgcaaactcatagtcaacagcaaatgtgacagatcccctctcttgcattcccaaaaacagcccaaaacaatggaatgagctttgctgatccatgttgcagtgagcggacaaaaaaaacccttgtcctccaagatgaaatgcctgggaataaacccttcctgctggaaacagatgtgtacactcctcacgtttc

SEQ ID NO: 50061 - DNA, 498 bp, Gossypium hirsutum
  Clone ID: LIB3829-008-Q6-N6-D5
aaataaaaccttgattttgttatacaactcgttatggtattcatgagggaaaaggcatctaaaccgaaatgatcaaaagatcgccatcgccattcactaccattacacacaggaggccatgaaggagaaaccaattaaaaggcaataagctcaggaatgggtagcaactagcaagtgcccatataaaagcaacttcagcaatcaaatgaacaaaataggtttctatgcatgtaacctaagacatctaatgctaaaatctgcttatcatcacataaaaaggttctcgtaagaagacaccagcaggctctaattttactagccatcttaagttatgttgctttagcagtttcgcaaactcgagaaaactttgccagaagaccgcacaactgaagatatgaaccaactccatcacagatcctcatatgagcaaacccagtttccttcatgaattccagttttaagtactcggccatatcataattttttattattctgaaa

SEQ ID NO: 50062 - DNA, 479 bp, Gossypium hirsutum
  Clone ID: LIB3829-008-Q6-N6-D6
ggagagcagggctaaaacccatttaaagaaaacaaaggggaacagcaaccattctaagcaggccccaaagataaggccccgataaaaagaggggtaaatatcccagaaacagaacagcaattatcattaaaaactttctccataatcactaacaaaaccccccaaaagaggcccgttcccggcgatttcaccgaaaacgcgggctacgattccactgggcctagggggattattattgggaagttacggggggggcaaaaactggggctgggggcaattgctaggaaagggatagggaaagaccaccccaaaggggcacctgctgcgacggggacttttatgtatgaacctgggattcatatcaatgaaaatttgagggaaagcttgacccttgaaaaaaagctaagctttgttgagagcagcccaactaaaggctttgacattgacccaaatacccaacagggtggggggggggaccc

SEQ ID NO: 50063 - DNA, 517 bp, Gossypium hirsutum
  Clone ID: LIB3829-008-Q6-N6-E10
gaaacccaaaatttaatgggtttttctttttcttggtttattaaaaataaaattcctaaagattaaactaaacagaaacgccaaaaacggacgtttgatggggaaagtgaaacacactgagtcaaaggggggggggcgggagcacccctattcgacgtgattaccctcacttttacacctcagcacacctgttgtcggggctgctgacgacacacttgctcttgctgccgtgtcgtcgactgctcctccttctgccgccgcagctccaacaccttccggtgggagttcgagtgttgagtcagcacaaatgtgggactcgctgcgggtctgtattcgggcactagccgacccgatttataccggaccccacacgcgttgcacaatgtgttcggtcctaatggccccgtccgccactgtggggtcttctccgacgcgcagtgtgagcatcgcctcatcccttctaccggtgccggggatgcttgacgttggatttccctttttgtctttgtttttcccg

SEQ ID NO: 50064 - DNA, 498 bp, Gossypium hirsutum
  Clone ID: LIB3829-008-Q6-N6-E4
aaagcaaatataaaatccattaaactaagtttgcaacataaacacactttgaaaatacaggttgttattatgtcatacgagagggaggggcatgggtttttgacagcttgagaatcagtgtggacatacaaacccaaaggactatgggaactgggtgctgacgtggatgcacacggacggtatgatatctacagaaaagccaagggtttgtggctaaaacacaatgggcatcaacatcggcggccaaatgttaagggccgactttactgatacagtaattaaccctaatccattaactaccctactacataatcaaccatcctcaaattatgaagtaatacttgcgtttactttaagattctagcctgcaaccaaaacttgatcatgcaaaaagatatctggtgctcgaattatatgccccaaggaggaaaacgcgcaccattataacccttttccacataagaagaaaaagcagaagatctttggacgcgagggaaa

SEQ ID NO: 50065 - DNA, 535 bp, Gossypium hirsutum
  unsure (1)..(535): unsure at all n locations
  Clone ID: LIB3829-008-Q6-N6-F8
atctgcaagctatactttattttatgcttttggagggcaattgatgagtcaatgaatgaagtcctacatttatgttagaggtgatgatccacagcgaggcaaagatggcaaagcgacatggaacacagcaacgggtagtgtgagaatgcaaatgtggtgacagaacaggaaaagaagggagtctcgacacttgctggacgcagagcagaacagtcaaggcgcttgtttgcttagtaactctttgattcttgaggttgattgcctggtttatgctaaagctctaagtcttcattttcatcaaagaaaatctcaggatggacggcagctgtgctaacattgagagccctctgcaacttccgatggtccaagacttcaacttcgagtaaaaacattgaactgacaggtcgatgatcggagagtcttatttctgctcgttgataacaaagttgttttatgcctttaccataccagagtatacgatcacaccatgccggnagatctcttcttctccccttctttagggttctcgccaaca

SEQ ID NO: 50066 - DNA, 526 bp, Gossypium hirsutum
  Clone ID: LIB3829-008-Q6-N6-H3
ccgaagcaatctaatatcatacatttagcatggaactgagaataatgtgaacactttattttctagttctgatggtattttccaaataaataaaaatgatcacatatcaagcggtccaaacacatttggatcatcggactgtgcatccccctaaaaacgagtctatgttccgtctcgtttgttctctcgcgatagggaagttccaaaatgaatccgatttctcgaagaatatgtaaaacacaactgccgatgccaaaaatagtcctaaaagcagcaaatagatctgccactctttccagtcggcagggacgtttagttttgttaccattgctccccactgactagaagttgtaagtacaaccctttgactagggcagaactctagtgatgcaatggatgtacccaagtgtagcctcttgttccaatggctgatctccatcttctttacttcaaccacacagatgtctccatctttgcttccgagagcaagatattttccatccaggctaacagacataacagaagc

SEQ ID NO: 50067 - DNA, 565 bp, Gossypium hirsutum
  Clone ID: LIB3829-009-Q6-K6-A3
gacaataactcctttggaaggtgggctccgtcggtaaatcgtgaacggtcaatgcaggtaacacatttatccttacgccgtggaccaagctttaccacatgccgtcgactggtacacgaacgcagaagacactggtgcgactggaccaaatgctgttacggagtggataatcgaactgctcagaagccacatgtgtacatcactatgcgtgccaattgactccgaacgacagtgtactgaatcaaaaagcatgtcccaaacctataccgactggacagccgtcaaaaccttgagcatgtattacgcccttaaaggccttaagttggccgacattaaaccctgggcctatgaataaccattactggtggacgaagaaatattagtgagggagctccgaaaggttgagagtactatgaggtgtgaaggattatcgatacaacacacttgttttctctgctccaacatgacacaaaaactatgttcatgctttggggaattgactcaacatctgatagtataccccatcaattctgataaagtgaacatggaagcaggtgcttaaaaa

SEQ ID NO: 50068 - DNA, 561 bp, Gossypium hirsutum
  Clone ID: LIB3829-009-Q6-K6-C10
cacaaattcttttttggttctccatcatactctgcgacccataaccatctaacatgggggcctcaaaacctgtcttgttgtagatgtagctcttctttaaaccttggccgcagatgctgatcataaccatgctgtggcgccctatacttcttcccccgcagtacctagctactctttatattatccaacaagctcgcaatcagttcgctccttctgtcattgattcggctagctacaacgtccacaaactgaaggaacctgtcgatctgtctagaaaactgcctacactagctgtgaccccattgcttgtgtgaggctcacaatagcaaagctattctgcgtgaccatctgaatggaaccaagaactgactgagcctgctccttgcactgtctatcatacttactgcactgactgtgcattgtctctcaatactactcgtgcaccattgttagcacctggagcaatataaggtgcgcctgcagcattctcaagatgagcaaactatgcatgccgactccatctcaccacaagctgaagctatctaatggtcgtctgcttca

SEQ ID NO: 50069 - DNA, 480 bp, Gossypium hirsutum
  unsure (1)..(480): unsure at all n locations
  Clone ID: LIB3829-009-Q6-K6-C11
atcgcatatagttctaccatcttgatggaatgaatatttttttaatgcaattatgacagcaaggtctatcaatgttgngaaaaattattctcatggagatccatnngattgagctaaaaaaaagataagaagtatccactttccatcattgattacttcactttgcttaagggcccaagttaaatcaaaagcaaacctgaagggccaatatgttcaaggttgcatcacagcccatgatcttgaaaggttagtggagaatgtccatgagttgaacccagttgaaccgaatgaaccaaccgaaccagaaactgacgaaattgattatgtaattatcctagcctattcacgttattgattgttgaagttgtatttctgctgctaaattcattcatttattcattttagttaattatcatactttgtatttagattaatttgcattagggatcaattttgcatctagttaatttaacttttttt

SEQ ID NO: 50070 - DNA, 602 bp, Gossypium hirsutum
  unsure (1)..(602): unsure at all n locations
  Clone ID: LIB3829-009-Q6-K6-D1
cggccgcgtgggttcgccacagnaatatcgcgcgcttgctgggattctgttccaataagaagacaattcactaatatgacgagtatcatgccgtaatggnaagacttaggtagatggttattctcatgtgcaataggcgtgagctggcataaccttcaggttgaggnattacttagaggcgtcaaaagatagcgcatgagtaacgctgaccataaggacctcgtgcgtaccatgcatccatgaatatgtatcctcctcctcatgactccatctgacatgtacaagtacaacaacattttactcaactccgattttgaggctcatgtggcaaattttggccttgccaatttcttgcaagacactggaacttcagagcgcatgtcggcgatcgctgattcatatggttatattgctccagagtacacatatacactgaaaagtagacgagaagagtgatgtatatatgttcccgagtggtacttttggagctaataacatggaggaggccagttggacatttcggacaaaaaggctagacattgctcagtggagcaagagagaaccaagttgaacaaagaagggtggtgaagatattggaccac

SEQ ID NO: 50071 - DNA, 581 bp, Gossypium hirsutum
  Clone ID: LIB3829-009-Q6-K6-D12
cgacgccattcgaatctcttatttctcttttttcttaagctcctgcttctctaattattcaattcgaaatatcctcttttatcatctatgcggtatttgccttgagttcgtagcttgaatcggtgttgcaaattcggaataaattctcttttgggtatttgtgtgaccatgggttccgcttgttgtgttgctgcaagggacagaaccattgcaaacagaacaggaggtgagacttcgcatagaaatttgaggtgttcaccatcatggagcttctgccgagataatcgaaggcgtgtagctggtgaaattgatgagccttcttatcaggtatctaatggaactagccgaaatgttagcatggagataaaagggacattaggctctgatagaggtaatttttctgatcaaggaagtcctcttgagattgagacctatggaacacccacctctcaaaaatcaccagtccatgaagaaatgggtgggaatatgatgacccctccttcagacatatcaagaggaagcaattattcggttgatataaagaatttggtagaattgcccgatatcattgattcatctac

SEQ ID NO: 50072 - DNA, 581 bp, Gossypium hirsutum
  Clone ID: LIB3829-009-Q6-K6-D9
cgaaattgtggtgtctttagaccgagggtgtgataggaatgatctgtcattcccacaacatataatcaatgcattttattcatatataagcctgttggaatcacttgatgcagccgttaacgtaaattccgacgccataaacaagatcgagaggttccttattgtgcctaaaattgaaaccacagttttgggtcgtttgcattcactcgagaaaatgccaccatggaagtctctgtttgcttcagctggtttcacccctttaacgttcagtaacttcaccgaaacacaagcggaatgcgtcgtgaaaagggctcaggttcgaggttttcatatccaaaaatgccatgcttcactagttctttgttggcaacaaaaggaacttatctcagcttcagcttggaggtgttgaggaacaacagcatcgaaaccagcaggggaggttcgtttttttttaatttagcaactcacaatctttatatcgtctctagctcgtagtgcgaatttaactcgaatatcatttactaaactatgctatgcttttttttatgacttgatcaatacaatgtgatttgcctttgctt

SEQ ID NO: 50073 - DNA, 397 bp, Gossypium hirsutum
  unsure (1)..(397): unsure at all n locations
  Clone ID: LIB3829-009-Q6-K6-E4
gcagtttagaagttggtaacgcatcagctgtttcatacagctctcatcgcaattttttctgttttcccgcaaaacgactactttccttgcaatgaatccacaacaccattctcaatcggagccggaccttccggttccacccctcgcttctctccggatccaacccacgtcgccacgtgtcccgttgaccgttactcctaccactggtgcccaacgtcgcatcgccatcgccgtcgacttgagcgatgagagcgcttacgccgtccgatggtctgttcagaactaccttcgtcccggagacgacgtgatactcctccatgtccgtccgacgtccgtcctttacggagccgactggggttccgtccaagtccaaaccatccctaactccnacaactaa

SEQ ID NO: 50074 - DNA, 595 bp, Gossypium hirsutum
  unsure (1)..(595): unsure at all n locations
  Clone ID: LIB3829-009-Q6-K6-E7
gtccacttgcagnatttattgtcctgttcttgattatgatgtaacagggtcaggtgaaattctgcgtattctggccaccatgaaactgagtacgcactgttgggacaatttcctgcttcaaacatgttgcaaaatgacagcttggaagaaacgaagaggtagtttcacccctggttgacctattacgttgtatcattgggtctgagtgagtagacccacactgcaatgtgaattcatgctggatttgttgttatggtcatctttgtcactaaacttattgactctcaattgttttactaactttaccaaaggtgggtctgtagtttctctctttgttaaacagggtattcttgcattcaaactgtggagaatcagtcatatagatagtgtcaaacaagcagagcttgtggtgaatcagcaccgtttgcttgggtgtcagtaatgttgatatgttgattctgcacaatgattgatcctcgactaatcgaaatgtgttatgcccttgtgatcctttggttcttctgtggatcacagaagctggtgaattgctgccacacacttgcatgttcaggccatgtggattgcacaaatgagc

SEQ ID NO: 50075 - DNA, 423 bp, Gossypium hirsutum
  Clone ID: LIB3829-009-Q6-K6-F12
caagacccctttttttaaccctttctgctagggtttcatccccaaaaacatgcagccgccgaaccaccaccgcacggtggcagatggtgcaccgatgatggctaattttgccaacggaagagagccccaactatgccgtcggaggtttggtatgacggacgtggctcggacgtggtacgggtttgggtagtgaacggtggagtggcgcatgacatgggcggcggttgaagcactcagagggctagggttttcccttcttgcttattttctgatttgttgtgggctaaattttggacctgtttaatttggatttgtttagtgtaattagtttgtattttgggctgggcaaaatttgagccctacaatagtcttgcttgaacaaagggataaattgtttatgagtggtttatgagttggggtcaa

SEQ ID NO: 50076 - DNA, 557 bp, Gossypium hirsutum
  unsure (1)..(557): unsure at all n locations
  Clone ID: LIB3829-009-Q6-K6-H10
tttggtcacacacctgtcttgaatcttttccaaagaatccaaactgtctctcaagtttaaattgaagaaacctgatcttgataatcagaattctaaggttcatcctgtggaagaaaaaattctataaagggccaaaggtcaaaaaggcagagaccatcaacctttgtgngaaaaatcgttgtttaatgtagatgaagatcttgatgtcacacacacgcatcaaaacagcataatggatggcatgatggatgctaattggatattaaagaagttgggtaaagatgcaattggaaagaaagttgagattcatcacgcctctgacaattcatggcataaaggagctgttcatgacatcattgaaggcacatccacagtatctgtgatgctagatgatggtagagtaaaaagcttggaacttgggaagcaaggcattcgttttgttcttcaaaaacaaaagagaagcaaattttgaaactgaacggtctaatctaattctttgtgagtggattgtggagatttttccatttctggatgtggcggtgctcaggcagttgctg

SEQ ID NO: 50077 - DNA, 559 bp, Gossypium hirsutum
  Clone ID: LIB3829-009-Q6-K6-H7
gtttacatttcaaattttgtttagattgagctgccctttgtcaaattacttctcgcattactccgttaagaatattatcttttcgctcgttcgtaactgcgacaactaatcgctgaatccttctcttatacgttggaaagttaatatggaaaaccaacacccttgcggtacccgaacagaaactaaaggaatagaccaaaggttggagaggttagagcagatgcaaatacagatgctagagcaattgaccaaatttcaacaagatatgaaggatcagatgctaaaagtccaaagaaatctgatgagccagttaacccagttattggataaagggttagaaaaaggaaaaaaccaaacggtctactttagagatgataatgaagaccctgctcattttccaaactttaccccaacaaacatccaagcacaaccgaatacatatccacaaagggtaactgttaacattcgaccacaataccagactagtacctcgacatcggtgaatttcgcgacaggctcaggttccaaccttaagggcaatttaactaatcccgttgtc

SEQ ID NO: 50078 - DNA, 469 bp, Gossypium hirsutum
  Clone ID: LIB3829-009-Q6-K6-H8
ggcttaaagcaacagcattaggtttctgtttgtttgggccttgtttgggtttatttttgggcctgtgttttagatgtaaatgggtcttgggtttgggagctttgggcccaggcataaatttggtcctacagcccttttttgtaagagtttgaattcagcacactaacttcattcttgaaaaaaaaaaaaaaaaaaaaaaaaaaaaaaaaaaaaaaaaaaaaaaaaaaaaaaaaaaaaaaaaaaaaaaaaaaaaaaaaaaaaaaaaaaaaaaaaaaaaaaatataaaaaaaaacaaaattaaattaaatagcccattgaattaacaaagccaatgattgaaaaaaacgctggggttaccaaacttaattgcctggcaaaaacatttggctttcccaagttggtttactagcaaagaggcccgctttgatcgcccttccaaacagttgacctgcctgaatggagaatggta

SEQ ID NO: 50079 - DNA, 447 bp, Gossypium hirsutum
  Clone ID: LIB3829-009-Q6-N6-A6
caacaaaaaaaaaggctttcctttgttcatccgctaataccatattaagaaagctttagtgtacgatcttttgccttgaaccttcaatatctttttcctatctcaggaaactgctagggctgggacttttttttataaacaaaaaggtggcggagcgaagagagggctaaccaagacgcccatagtactgcgcacgatatttggcaaggcttcaaatgctcatttagtgagcattcttatctcttagataatatgtcctgaggttgcgtgtctggccatcaaaaatcttgcccttcactattagctggcttaactggaggctcccaatagggactaaaccgggacatcctttgatagctgcaatctatttatgctctgtctccagaaacccttcctttgaaatactcttatgttacccccaaaccaactgagctcattaattggaat

SEQ ID NO: 50080 - DNA, 499 bp, Gossypium hirsutum
  Clone ID: LIB3829-009-Q6-N6-A8
ggggtctgagctgggtggactattttgcgttcattttagcaaccaaacacctttagaaatagctttaacctctagggggtgtcccacttcatgggtgagaattaacaaacgagaaatgaggcaggccaacggggaataatgaagctccaatgggggaatgagaaggtgaggggcagtacatcaactgtgaactaaaagagacccagacaacaaccctttaaaaggacaaaggggagataaggtaaaagagagctcaaacagaggaggtgttatttttcctttgggggggggttctttgcgggctcagcccgttccttctctgcgtcaatctcagcggcgatggggtcaatttcagcttcttcaagcggcgcgggaccatgcgtccttctcatcacagcaacttcaatattctttcccccactctcaacaacctcaagcaaagccccaattgcgagcttaatgggttcttgggcagaggggtccttatagggcttctcta

SEQ ID NO: 50081 - DNA, 443 bp, Gossypium hirsutum
  unsure (1)..(443): unsure at all n locations
  Clone ID: LIB3829-009-Q6-N6-B10
ttaaatcaaaaacatgcaaaaaccataaataatttatgtgtttagcggagtactggagaaataagagacaaaagcgataataaaaggggtaaattcttcagcaaccactttttttttctttgcgtcaaacctcagcactgggggggggtcaatgcgtacccaaaggacaaaaatgtgggggcaacaggaccatccttgtggtaaggaaataccaaacatccatcatggggcgtgcgctctccgatgaaaaattgagggggcttcaattttgaaaggaaaaacttggttgcgccctcaatgtgtttgttgagggagtcttgcgtttccggatccagtgtcggggtgaaggtcttgaggaacttcttcatgagacacgagaaactggtttttgtggaaagggggtgggtnctgaaggctgagagtgtgaacaatgtgaacaacct

SEQ ID NO: 50082 - DNA, 518 bp, Gossypium hirsutum
  Clone ID: LIB3829-009-Q6-N6-B3
cagttaaaaatttacttatgatgatgaacacgaagtataatttacacgtctcagctatcaaatactctagataataatacccgcaaggtgcagatatggaaaccattgtattgaaaccacgaaagcctgggatcgaggaacatacactacgttaatggtaaatctaattgcaattgtacaaaacgaaccgccccagaataaactcaatggcagcacacatttcccattagctgatcctctacaaggtcataaatggctcggtctccttttacctgcatctgttctcaactttttcacaggattggcccaactaacactcgcaccgttcggcagatgagcaggctggtgccaactttgctgatgggcagtctgctgggtcaatctagcagcatccttagaaaatgatcctgttgttggactcttgatgctgcgtgctatacttgggggtgaaacagggccagccaatcctgtcctgggcttcaccatagacttttccctgtctttcctcttcttcttgc

SEQ ID NO: 50083 - DNA, 510 bp, Gossypium hirsutum
  Clone ID: LIB3829-009-Q6-N6-B4
aaataacccaccttggaaagtcaaattttatgaaaaaaaaaaaggaaaaataagcctatacaagcaggacatatacccttagcctttatgtgctgaggctgattgattcttacataatatgcctccactgcttctataaattgattcccttttctcaatatctatttttttaaaaataaaatcatgcggggggaacaaacattacctagacttcacccctattaggggaagctccaaggcttttgtttgaagcaaattcactatttcttctgagggagtagctagggctatttgatccatcatcagtacttcgattagaggttctctccatttgccttcttttggaccgacttttaacctccttttccttttcatcaacaaaggaaaggaatgtctgaatgcgtgcaaatcgagagctttggcctgaaagatcggattcctcaaagtagtgacggttgaactgccttaccattttcaagaaatacagaaagagagctatcaagcaagcta

SEQ ID NO: 50084 - DNA, 306 bp, Gossypium hirsutum
  unsure (1)..(306): unsure at all n locations
  Clone ID: LIB3829-009-Q6-N6-C11
aaaaaaatgaaattaactagaggcgaaattgagccctaatgcgaattaatctaaatacaaagtgtgagaattaactaaaatgagataaatgagatgagtttagcagcggaaatacaacttcaacaatcaataacgtgagataggcgagggagaattacataatcaatttcctgagtttctggggcggggggggcattcggggcaactgggggcaactcatgggcattctccactaacctttcaagatcatggggtgtgatgcaaccttnagcatattggggccttcagggtgcttttgagttaact

SEQ ID NO: 50085 - DNA, 536 bp, Gossypium hirsutum
  Clone ID: LIB3829-009-Q6-N6-C3
ataatgactattcaaattcttatataattacaaataatacaacattatttatagcaactcgacaattacggataagtacaattatttaacattgcaagagatgattaaatgagccttttcttcacccattccacttgtatctaatacatcaccacatacgttgggcgggaatcagcaaccatatttctcaatagcttgattttaacccccttaaaatatcgtaggtatatccaacactgcaaattacaaacacgtttctcaatgtcatgtgttgattttggcaataacaaaaatctaggaatcaaatttattttaatcttgaactcttgaacactctgttaggaaaaaggaagttgaagaccagctactggattgatacaatgataggtgaaatggagactgtactttacgggttaagttcatagcaaaaagaaaagaaaaagagagaagaaattccaattaaccaagtgtacaattctgtttgatggaagcgaagactacttgctgtgctatagaacagcgaacaaacgattcat

SEQ ID NO: 50086 - DNA, 407 bp, Gossypium hirsutum
  Clone ID: LIB3829-009-Q6-N6-C4
aaaaaggaacccaaaactttattaaaaattggaatccaaaaaaaaaaacaaaaatgggaaacaaaaggatacaagcccccaagggaaattttaaaaaggcaaaaaaaaaaaagccctaaaggtgaaactaccctaaaaaatttttgaccggaaaaattaaaaaccccccaccaaaaatggcggcggcgccattggagccaaattaaaaaatcctgaaaaggaaaaaccaatttaacccccgaaaccggaaaaaagcctaccctgccttttggggggaaaaaaaaaatccatggggggaaccgtttttttcctggggggccaaagggagggaacggggtccgggatcaagttttcaaaaaaaaattaaaacccccacgggcttccccgaaaaaaaaagcactgaaacc

SEQ ID NO: 50087 - DNA, 523 bp, Gossypium hirsutum
  Clone ID: LIB3829-009-Q6-N6-D1
gaaatagtacgtaatgactatatttatatatatatgcctcaattggcatgcgtttcaaagccttccaaatacaaactcatttggagactaaggtatcaaaaaaggaaaaaagagaattgtgagcccgcagctgcaaccatgcaaacgataagaacataataatattaatagagggtagagaagttgaaaagtgacaaagtcattgcatgtgaaatgtgttaggttgcttggcctgagcaagcatttgaacaacttctctcattgtaggtcgctccacgctgtgctcctcaacgcacaacattgccacaaagaaaacctgcatgacttcctccttaggaattgtattgcttactcggtggtccaatatcttcaccaccccttctttcttcaacttggtctctctcttgctccactgaacaatgtctagcccttcttctccgaaatctccaactggcctcctccctgttattagctccaaaagtaccactccgaaactatatacatcactcttctcgtctacttt

SEQ ID NO: 50088 - DNA, 484 bp, Gossypium hirsutum
  Clone ID: LIB3829-009-Q6-N6-E10
cagcgttaaatttctaatttatttatttatatttgggtttggggggggtaaaacggggaattaagggggggctaggggtcattttatcactgggaacgtgtgagataacaaacttctcctacaacaggggggggccttgccttgggggggactttctataggagggtcactaaacgtgggatctgtgcggggaggaagtccattacgggcccctaaagccctacagccagttgcagccacttgagctgcaaatgggaacatcttctttggggggatacctgcccacagagcatataatactgctccaataaatgcatctcctgcgccagtggggtcaacaaggtctgagggggggatcttctcaggtgttcccacaaataacgggccagttattggccctatcccatctgcgctcaacttggtttccacctataaagaccccaaacacaattttcaaattaaaagaaaaatgctcccaccatct

SEQ ID NO: 50089 - DNA, 477 bp, Gossypium hirsutum
  Clone ID: LIB3829-009-Q6-N6-E4
gggcgcaaacattatgattgaaaatgatcacaaaagggggggcggccctaattgcaaactaataccaagagttggttatccacaaaaaggctaataacgaggggacacgggaaccagaaaccggacccaagaaaagagaagacaaagggggggggccccccaaaaaagaggaaaaaccactggaaagggaaaagagagaacaaaaacggacaggcctaggccaattgcggtccggccggccaaaaaaaggaaaacccccctccacacaaacacgagagaataaaaggttcttccctaccccattcccaatccgttatacaaagcattaacctcggaggccacccaaacgctccttctccaaaccttaatagccaccaccctttaccggtaccgggagcagcccccccccttggccggaaatcttgtgtttcccggccccctcaaaatacgggaaccccactaccggcaccggacaaa

SEQ ID NO: 50090 - DNA, 511 bp, Gossypium hirsutum
  Clone ID: LIB3829-009-Q6-N6-E7
gacagtaaaacgaacgtagccatacaaataatgacaaatgagatattgttgaactgaaaggagttgccttgtccaacgtacaaggtcatgttccggtcccaattattttcttattctaacaaagaatacaaatggcaaaagttaaaacatgttatggatcactgctcactggatcgtctccttcctatttgttctgctttcacctcacccaccaccaatctcatcacttgggaaccacacccattatccgacctttcacacacatatatgtaaaacatactgaaactgatgactgaccctttcaaaacttttatcatccaaccatcagatagggagaggaatctctgggaaaaagcttgaccttttacttcatatttgctttcaactcatattatctctcccattgctctagaaaccagcggagtcccacaaggtgactgtaattgttgatcctccatagccatggcacatccattttttccacatcccagcgtgtaaaaaatatgcgcca

SEQ ID NO: 50091 - DNA, 499 bp, Gossypium hirsutum
  unsure (1)..(499): unsure at all n locations
  Clone ID: LIB3829-009-Q6-N6-F10
acacaaaatttaatttaatatacaaaatagcttacagctttgagaatttatcccttaaatattgagattcaataaattgagaaatacagtgaaactatagtgcaagctagcttacttgcgacaaatgcgtagctaaggtgggagcaggacatccattattgaggcgtcatcaatgcgtgggtgtgcacaaaattggggtctaagatccaacaacacggggattcagaccttccaaaccaaaatccagggcgaaccaattcatacatattcactcctgcggaacaaggctaaaggggagattaattcgaggcggctctgcctttgcgcgcttaggggcagagtgtgaccaggcacgctgagggtgccctttcattaccaacagagatccgggcttgagcatgagcgagtgtggagcatnttgggtgcgcttcctagacctcttcaatgggagggtggcatcagatcttgtgtcttggggagagttgccacttttcttctt

SEQ ID NO: 50092 - DNA, 392 bp, Gossypium hirsutum
  Clone ID: LIB3829-009-Q6-N6-F11
gagaggggaaatgcgctcaactttcattttttcaggggtatgcgaatttgagacaaacagagtttgtgctttttctcaaacaaattatgaggagcatgagcttattgagtcaaaaaacttctggggaaggcgttccttcaagggagatgagttaaataacatgagtgagctttcacgctgtgagaaaggagcttcatgagaagcgacctcttattgtggcaaatgacaggatattaccatgaacttgagtccatccaccaacctgtgtcccttcaaaccaaactctgtaaggcgcccgtgtttcaagtgtctaactcctttgccaggcagcttaccaggggagcaggttcccggcaatggtgtaacagaatcttgatctcccctgtaaacca

SEQ ID NO: 50093 - DNA, 525 bp, Gossypium hirsutum
  Clone ID: LIB3829-009-Q6-N6-H7
aacaaaagtgttttgaacattactctaaataagctttaaatgatacagagatttcttctacagtccgatttatttagaagactcccaagtttataaaggggggtatctaacaagggctcttcttcagttgtttctttgggtacgacgttgatgtgaacatttcccaacatttcttcattcatcgcattcaccctgattatcaatatgagtgggcaacaaattttctgtgtcgaacttaacaatgcccatactgaggagcctttcaaccaccttttaaaggtggggaaattttctatagaatgccccgtaattcccgcatgggagtcacattgcacatttttgtcgtaccatttggggtacggaggttgtaaaggcttcacgtagaaaggagaaataacgtgtgcatcaaataaactctgatacagctcccgatatgacattgggattggtgtaaattgggacttctcaatattttgctttgtgccggattcttgtctctgggggatctaatggctagaagcaacc

SEQ ID NO: 50094 - DNA, 580 bp, Gossypium hirsutum
  unsure (1)..(580): unsure at all n locations
  Clone ID: LIB3829-010-Q6-K6-A10
gnaagactctattcactcaggtattaggggtacatggnataattgcctttcattgcctcgtatgcttgtttcttagatgaaaactatatatatatgtgtgtgtgtatggagtcaaattaatggtgatagctaagtcacaaagtttgcttttttgcttgattctcaagcaacttaatgacacatgaagttggatgagggaatataattcaaaagttgcaaaaaagttatgttgtagatcataccacatatagaaagggacaaagcaatggcacaaccagcaatgacaagagtccatccatttatcacagtgaaacaatggaaccttgctatctcagctcatctatctactatggaggccaagaatattattctccaaagcagcaaaccactgatgctcccctatatttcaggaaggaaggggaagaaggtgatcccattggaatcaattctaatggtgcttcaaggggcaattggtggcagggctcactgtattactaacgtctccatccaaaataatgcaaatgtgtcaactcaaggaatggtagagcttgatcaaccttattattatggacaataagct

SEQ ID NO: 50095 - DNA, 576 bp, Gossypium hirsutum
  Clone ID: LIB3829-010-Q6-K6-A11
cccggtcgacccagctttttcgcttcatttgacaccaattaaggactacttaaacctgtgtcttgttcaaaaaaaggagctttccaagatggtatttaataaaccatgcagggttttgatcggttctggttttgagacctatgaaaagggcaaaacagcattgcagaattggaagcattgtggattagattgggcatttgttgatcccaaaactccaattcaaaatggggttaaattctgtgtttgtctcaaggaatttttaccatgggtcattatgcctctccaagtggtgtatgtgaacgaaaacactagggctaaaactaagaagagtttagcctcttttggttttggcagtggcacattacaaggtcacctactggctggggaagaacggtttacgatcgagctggacgagaacgatcaagtgtggtatgaagtactttccttctcgaagcctgctcactttctgtcgtttatcggttatccttatgttcaacttaggcaaaaatattttgctcatcagtctgccaatgctgttctgaaacatgtgtagcaactctatgtatatggattcat

SEQ ID NO: 50096 - DNA, 574 bp, Gossypium hirsutum
  unsure (1)..(574): unsure at all n locations
  Clone ID: LIB3829-010-Q6-K6-A12
ggacaggnaattagaggagaatagctaaacaatatcatcatgaagactttctgaagattttctggaattatcatatgcttcttctgtagtgaattttgaaactccaatcctggatgtaaagtttgcctctgaagacaactccattaacaagtcgcctcttgaagcccttttgtctgacatgcaagtaacaggtactgctgcttcctgctctaagaaaagtgatgatggttcccttgaagcccttttgtcagacatgcaagtcacagatactgcttcttcctgctctaaaagtgatgatagttctcaacctggtgaagattgcaagttgatttcagttgacgaagcggatgtggatggtatgccttggaacttggaggtcgaaaacctggaggattatcctgcatgtaacaaccatgaagttgcggaaacaaaccttatatgaaagagaagtactagctagcttcatgatgttgtaaataatctgttttcagagtaatgttctagaaacttgatcttgactgttaaagtagaagctagctttgtgtccgaatatgttgtaaataatttgtttttt

SEQ ID NO: 50097 - DNA, 357 bp, Gossypium hirsutum
  Clone ID: LIB3829-010-Q6-K6-A3
gttgattataactattcttatactgcattggtatttaatacattgtgcagatagggaaccctatacagttagaatatgattgctatctgtgctggcggattctcttaactgaacaaagacgttaagtaatccgtctatgccttaatgtgaatttctttagtgcaagtctgtgtgcggcatggatcatatttcaaatgtgacttaccaatctcctaatgctgagacgccctgtgcataggaacgaaatataacggttcatggattcagagttaccaactactaaatacaacaaccctgatactatagtgttaatgaacttatactggacttaatacacattagactggcttatacaag

SEQ ID NO: 50098 - DNA, 555 bp, Gossypium hirsutum
  Clone ID: LIB3829-010-Q6-K6-A4
ttttggagtaatcctaggtgaaaaacctacctgttttcttcaaacactttttgggctgtttatttttcttacaatatcatggtgtttttcagacaagtttgagatttcacaaactactgttcatcttcatgtttctcctttggtttctcttgatctgtttgtgatcatttaaggaatcatcatcttatttgcatttttgtctttttctcgatatggactctcttcagggtttcgaaaccactggaaacccttccgttgctttaacaccgattttccctctttcgatgaccaccgtgagcgcagcgtccgccgccatgaccaccaccaacggaaaccctttatcagtctcctccctttcttcctcttccagctcctccacttccccgaccacaactctcagccgttacgagaaccaaaagcgccgtgactggaacaccttcggtcaatacctctgcaaccaccgccctcctctctccctttcccgttgcagcggcgcccacgtccttgaattcctccggtacctagaccagttcgggaaaaccaaagtccataccc

SEQ ID NO: 50099 - DNA, 579 bp, Gossypium hirsutum
  Clone ID: LIB3829-010-Q6-K6-A9
gcttttgtcaattgagaataacactgaaggtaaatgatgggtagaaatcttagcccgattttgcggcgagagctggcaaatcttgacaaagatgccgatagtcgaaaatcagcaatggaaagcactggaaatcatatgtaagagacttggattcaaaggcaataccggtcttccttgctcaagtttccgagaccaaagaaactgggtgtgtgtctggtgaatacactatttcactctatgaagttcttgctcgtgttcatggtgtgaagattgttccacagattgatagtataatgtctactattatcaagacattagcttcaagtgcaggttctttccctctacaacaggcatgttcgaaagtggtgcctgcaattgcgagatatgggattgatccaaccactccagaagataagaagaggtacatcattcactcactttgtaagcctctttctgaatctcttttgggttcccaagaaagcttgagttcgggagctgccctttgcttgaaggcgcttgtagaatctgataactggcggtttgcttcggatgagatggtcaacaatgtttgtcaaaatg

SEQ ID NO: 50100 - DNA, 585 bp, Gossypium hirsutum
  Clone ID: LIB3829-010-Q6-K6-C10
ctcgacaccccaaaatcaaaaccctaataaaaagtcttcgattgttcttccatcgcgaataagttcacataaatgcagttcaaagatcattaatcgaagggtatttagttcaggagtggatacttcatcttcaattccgtctaaagaaacggtcattgcttcacaatccattctttccgatcaatcgccggtgcctcatcctccgccggccccggaaactttccctccagcttcgggagggaaactttggagctttctcaagtacggactcgtcggagctgtcactggaactgttggctatgctggttatctctcttacaagtgttcgtacgaggaagtagatcagaaggcaaaggcattgcgggctgcagcaagttatgctcctagtgaagatgcatctgctattgataaatatcgaggcttgctttactctgctgctatgacagttccagctaaagcacttgaatcctatctggatctcaggaggttggtggaagaaaacgtattggaatttactgaaccaacctcagataagcttcttcctgatttgcaccctcaagaacaacatgtttttacgcttgtcct

SEQ ID NO: 50101 - DNA, 585 bp, Gossypium hirsutum
  Clone ID: LIB3829-010-Q6-K6-C8
gggattcgcaactcggtaagcacttgaacaggtcttggcctagggacatggatggttcaactctcacaaacaaagatagatgggaaattgatgcggctaaactcgatataagggatgtaatagctcatgggacttatggcaccgtttaccgcggcgtaaatagatacccaacatgttgcagtgaaagtattggactgtagggaggatgggatggccacacttgctgaagctgttgctctctgggcgttattcccacaagaagctgctgtatggcataagcttgacaacaccgaatgttacaaattttatcgaagctctaatgataacttccaaccttaaaatcccgtacaaaagattgaataagcgaaaataataattcccttcctgacatagcatgtagcagcggtgatcagtatcttcctggtggaacgttaaaaaattttttgatcatgaacagaaggaataaactcgcacttaatgttgccattcaaattgctcaggatactctctagacgtttgagctatcttcactccaaaaagattgtacaccgtgatgttaagaccgaaaatatgttgctagatgct

SEQ ID NO: 50102 - DNA, 426 bp, Gossypium hirsutum
  unsure (1)..(426): unsure at all n locations
  Clone ID: LIB3829-010-Q6-K6-D1
gnaaattgatatgtcagcgaatcagnaactatattctcatctggaacattggctgaagttcttcttgaggcgtctagtggtgctataaatgctaaagttgagcgaggagaagagcacaaagtcttctgaatgagtactggagtagaagggatgcaattcttgattccctttatcaacaagttaaaggttttgtagaagctggtcgtcaggacttaactgacagcacaggagagaataaagaagaaatccttaaaaatctgtcttcaagcttgctgtcaatagcaaaacgacatgaaggctatcagaccatgtggaacatatgttgtgatctcaatgattcagggttgctcaaaaatcttatgcatgagagcatgggacctagatgtggattcagttactttgtgtnnttaaacagncnntgtatgg

SEQ ID NO: 50103 - DNA, 583 bp, Gossypium hirsutum
  unsure (1)..(583): unsure at all n locations
  Clone ID: LIB3829-010-Q6-K6-F10
ggntgcgaaaggaaggtcacgtctttgtcgtcgattttgccggcgcagggagagcagaagtggcgaagcgagtgtaggagctttcagagaagcatagttgaaatgaaccaattgatagaactgattaccgatataccgcccttatcaacctcgttcaaaaactccccgacgaacttcaccacgatacaatggttctactgggagaaagctactatgtagaaagaacagctaaacaaactagtgaaattctaaagagaaggggaaagtcatcggaacctgaagtggattgagtcttccttttttttttttaattccacagcttctgaagcagcattaagtttcccaatcgccttattttttgtttgttaattcgttgagtaagcattactctgatttcttttgtacctagtatttactgattactttcattttattgtttcaggaaggcctggtggagctcagagaagaggatgaagaggaaaataccaccgaactggtgtctcaattaggcagaggtcatttggagcaaggatgtcctactttttctgaagaaaacaaattaatgggtgcacctgaggatgat

SEQ ID NO: 50104 - DNA, 575 bp, Gossypium hirsutum
  Clone ID: LIB3829-010-Q6-K6-F12
gtcctcctatcctggtttgcaggtaaagaacacttgagcttgaaacacttagcgatgaagagattataaatggagtttcagcaacagtatctggtttattaccagtatcaaaacaccacaaggaagacaagtataattcccctgaattctgcaatgggaatgtggagagctgtgatgacaatggagtgagatttggtaaggttttgaagagcaaatggggcagtgatccattattcttgggatcttacagctacgtggctgttggatcaagcggtgctgatttagacacaatggctgaacccttaccaaagcttgggagcactgactcagaccaccatccacttcaaatattgtttgctggggaggctacacacagaacccactattctacaacccatggagcttatttcagtggtcttagggaagccaataggcttctcaaacattatcgttgtgttggggtttagacttagcaatttaatttatttttgaaatactctattttcctaaatccttctcatattctatctatataaaaccatctttgttttctctttcttttaagtaaagcgaac

SEQ ID NO: 50105 - DNA, 574 bp, Gossypium hirsutum
  Clone ID: LIB3829-010-Q6-K6-F3
ctccattctcatttaactataaaacccataatcaatcaatatccttcaagcagtcctggtagctttactgcaattgaaaaagataatgaggctattcatgtttatcttggtgttgggtggtgcaagttttgcagtaacctcaaacaggcttagccaatatgaggtgattgaaaaagactatatgaactgggttaaacaaaagtcttcgttcaagcactctctcttcggaaaacccaagaacaaattaaagccctgcttaaccataagagtaaacaaaaaaccaagtcttgcggagtttgccacagtgaaaaaggctattagttcgattccagtcgttaatcactgtcgggttgtaatcttcattggagcaggaatttacaggcaaatgcagagagaagattgaaatccctgcaaccatggcttacattacaatagtaggtgctggtgcagacaaaaccgtgattgagtgggatgacacagctgacaaaatggggcagtcaggccattcactgggcacctatggttctgcaacattcgccattaattctccatatttcattgcaaagaacataac

SEQ ID NO: 50106 - DNA, 534 bp, Gossypium hirsutum
  Clone ID: LIB3829-010-Q6-K6-F6
gttctagatcgctagcgcccaccctttcttcctctctttcttttcagccaaacagggtccatactgccctttatctatctatggttgctcatcatgacaaagggatataaacagggataatatcttgattatctccatccaaaagtgctaatttgtggtcaattgcatatcaaactgagcgccggcgagatattattttggcagtaacacacccaccaaacgtcctaggctccaaggattaacgcataaccctctttacagtatgctgggaacaggaacctgtcctgccattttaccagaccaggagtcttgcccttgctcaagctctaaatctcattgaacttggacgccattttaagacctaccaacatactaccagaagctttatacaggatcccatcttcatacacaccaaaccaacccttcacttctgtgcacttggcgcatgcttctttcttaaaagccatccttgattaccattgctcaattgttgctttgtttgatgactctgctttagatactcactatcacttt

SEQ ID NO: 50107 - DNA, 573 bp, Gossypium hirsutum
  unsure (1)..(573): unsure at all n locations
  Clone ID: LIB3829-010-Q6-K6-F9
cggatctgcaaaagtttcacggctaattattatttgngagaaaagagaaatttcaaagttgatcctaatgaggggtgcntgaaagatgcagaaatggagaatcagctccgttggtggcacaaaatgacaagggatttgatgggcttattcctcaattatttacctcattaccagctctaaatgaagctgtttcgtgtcttgctcaaacaactacttactttactggttgtttttctgattatgctgtggaaccttccaccagagattcaggggattccgttgtacatgcacaagaattagaaacgttttcttctgtacagactgaggatactgtgattagtgatcatcctttttctagtgaaagcacctccacgttggctgaatcatctagtcttgtaaatgctacctctgctaaccatgttggaatagcaagggccactgctggagatccatctgaaaatactggtgtgattgtacattcaaatcataatgggcaaaatgggatttccatgtttcaagggcttattgaaagggcacagaggaccgttcgtggatctgctgatgatataggat

SEQ ID NO: 50108 - DNA, 580 bp, Gossypium hirsutum
  unsure (1)..(580): unsure at all n locations
  Clone ID: LIB3829-010-Q6-K6-H10
cgaaagctaaggctgacaacatnagnaatagggaagctttgagcactgcttcatgcccaaattgtggaggtccaactgctgttggacaaatgtcatttgatgaacatcatctcagacttgagaattctcgattaagggaagagattgatcgtatatcagcaatagctgcaaagtatgtgggcaagccagtggtgaactttcctctactttcatctcctgcgcctcctcgaccatttgatttcggttcacaacctgtcactgaggagatgtatggtgttggggatcttctcaggtctattagtgcaccttctgaggccgataagccaatgattattgagcttgcggtggcagctatggaggaactggttagaatggctcagatgggggaacctttatggatgaccagtcttgatggtaccacctgtatgctgaatgaagaagaatatattaggacttttcctagcggaattgggccaaaacctactggctttaaatgcgaagcttcaaaagaaactactgttgttatcatgaaccacattaaccttgttgagattctcatggatgtgaaccagtggtcaac

SEQ ID NO: 50109 - DNA, 556 bp, Gossypium hirsutum
  Clone ID: LIB3829-010-Q6-K6-H5
gacgtgttacataggctgtggagactgatcctatagttacggcttactcgctgtcagttcaagctttgtagcgttttacccttcacctctcctgattaagggccgtgctctgtggggatacctctatttggcctcacactgaggttctattgaaggatgtggtttgttgtttctttggacgagaaaaagggaatatataattttttgatcttaaggcaatgccagggactgatctgtgagcgcctgttaaatgaggactcttatttggggagcaagggtctatatcacatcagaggtagctagttgtactatgaaaatatcttgaaaccattgagattagatatgtggaatgatgatcaagctgatggtcacctggggaaagggtgctgaatatctgagttggagagagggtcagatcgagtaagctacactaacgtgtgaaagagaaatcgttgaatcaagcttggagcagcaaagtcatatgatggatgagattgtaagattgacgtatgtagatataggtggaaatgggggggctgattttaatgagtggcat

SEQ ID NO: 50110 - DNA, 449 bp, Gossypium hirsutum
  Clone ID: LIB3829-010-Q6-N6-A11
atctgtgaatagcaatattttactaagagatgaggcgcttaaggggcaaaggggtcaatttctccagtcaaccaaacattctaagtggctatatgagatccatatacatagagttgctacacatgtgtcaaaacagcattggcagactgaggagcaaaatatttttgcctaaggtgagcataaggggaacccataaaccaccgaaagtgagccggcttccagaaggagagtgcttcataccccacttgagtcggctcctccagctccagcgtgaaccggtcttccccagcgcaggggggaccttgtgatgtgcccctgcccaaaccaaaagaggctaaactcttcttagttttacccctagggtgttccttcacatacaccactgggaggagggtaatgacccctgggtaaaaattccttgagaccaacccccaatttaaccccctttt

SEQ ID NO: 50111 - DNA, 446 bp, Gossypium hirsutum
  Clone ID: LIB3829-010-Q6-N6-A12
aaataaaaggggtagcccataacagggaggtgccaaatctgtctcttgagtcccaaatatcaatccataagcaactaccaatcaatttcttacttctattactaacccaattccatcaatcgtgaaagctattaactatctactcatttaaggttctaaaaaacaaattatttacaacatattcggacacaaaggtaggttctactttaacaggcaagatcaaggttctaggacattactctgagaacaggttatttacaacatcatgagaggtaggtaggacttctctttcatataaggggtggttcccgaacttcatgggggtgacatgcgggagaatcctcccagggttccagctccaaggtccaagggataccatccacatccccttcgtcaactgagatcaacttgcaatcttcaccagggtgagaactatcatcactttt

SEQ ID NO: 50112 - DNA, 457 bp, Gossypium hirsutum
  unsure (1)..(457): unsure at all n locations
  Clone ID: LIB3829-010-Q6-N6-B11
ggggaaaatggggggactccggtttcatcaccccagcgcatatttacagcgtaagaaaaaacaaagaacaccgagaaaagtgtccccgtgcgagcgagtgtctcttagtgacactaagaggaggtgcattgcgaaacaaagtgagcgaaatattanagtgaccaacacaaagagagagcggtgcgcctttcgtgttttcccttccctagcgaagccaacacccagtgcgtttgagctgaaacaggagccagaccctgcgtcaacctacagatttccaccggatcggccaggggggacttagccttacttggggttttacccacaggacaagcaaacacttgtgctctgggagcgatcaacggccccaatactgaacttatgagaacctcgaacatgtgttcatcagagctggccgctcctatgcggagaacaaaggcaggcgacatacccctctctt

SEQ ID NO: 50113 - DNA, 394 bp, Gossypium hirsutum
  unsure (1)..(394): unsure at all n locations
  Clone ID: LIB3829-010-Q6-N6-B12
gcgtagaactatatatggggggttatttcctttctcttgagtagtgttccaattccatgcgctgtgtttatcaataattttaaaaaaaaagggagagagtacaaatttctctttatattattaattttttgggttgagtgtgcaggaaaaatcttcttcattgagggagttacagtggttcacatgcggagagagggcccgaagctttcctgcgagagacatcattaaatgtggtgttgtgagagggtcaagatccaaccaaacccttcanccgagcataggacatcaggagtgtgaacagaggtcgcaaaatatcccagagacaatgagcacccatttaaacatgtgtccatggggaggatcccaccgatatggaatgtgcatcccaaatatt

SEQ ID NO: 50114 - DNA, 492 bp, Gossypium hirsutum
  Clone ID: LIB3829-010-Q6-N6-B6
aaaggaaatccccatttttgttctcttcaactttattgcataccaaaaaaacttacaacaagggcaactgccccagttacctacactccacccatgggggggggggccacccctaaccccaagaagaagaccaaccccaatgggaattacataacaggcttgaattcttttgggggggtgaaagctcataacaaagggggctcactaggccaacgtgtatgcaccgagcaatcatttgcaaacattgttagctcactcaaagctcccacaaagggcaagacaggtaaaagcggggggggggcactgttttcaacctgcaatgctattggggagatattcaggattgcagcaattatgaatggccttgttcttggtggggttgctggcggatttgggctggttcgaatcaaagcttttttggaagaggctgagtaaaagaattttaagacaaaacttgttttcattgccccaaaatttggacttttactttag

SEQ ID NO: 50115 - DNA, 498 bp, Gossypium hirsutum
  Clone ID: LIB3829-010-Q6-N6-C1
aaaaaaaaaaaattaaatatacccgtatccatcatatctgagtccatgtaccaaagttcaagtctaccgaactaccaacattatgatatcgcaaatctaactatgatcgacaaagtaggatcaagagctgttattgtgtttcaaagcatgcatcgagtaaatcctccaattagctgggtcacttttgtttttctatttcaatcaaattaccaaagtgactgtacatctggttgtgaaataaaccgccaacatggggccttgaaatagaagacttcccaactggttgttctgaatcttgcataacccattcctttttgggccaacattttgcagcaaaaggctcgaatggatgggtgcctgcagatccattgagacttccataactcatttcgtccagagacttgttaggaaaatggttattactgccacataatgatggaaaggaagtatcctgtaaccatggatcatgatcactcaggccggttacaggactgaatg

SEQ ID NO: 50116 - DNA, 525 bp, Gossypium hirsutum
  Clone ID: LIB3829-010-Q6-N6-C10
aaagggacgaaggggggtgatttaccctatatataatataagctatgctcaaaattttgagttcatcaaacaatttaaagagattagagagcttgcctacatctaggggaaaaataataaagtgattttgtgaaacatttaaatggggcggtgaaaaaaggggattcatcaaagtgtgagttatcaaaaaaaaaggttttttttactgggcgaaattgggagcttgagaaaacttgggacaataccggctttcacattcttttgcgtccattaaactatacataactctctcctcatcgccaccagaatcggccttgctgcggcctttgtgcttgcgttcccctctgagattctttagaacgcgcaagaaactctttcgcgagagcttttctttcataagagttggatacttgtgtgagatcaggtggactattgcgcgctacctattcaagagaaggggtaagatccaaaagtgcggtatcatctccctccagcttaaacgggttaataggagcacaattttca

SEQ ID NO: 50117 - DNA, 520 bp, Gossypium hirsutum
  unsure (1)..(520): unsure at all n locations
  Clone ID: LIB3829-010-Q6-N6-C4
aacccccgcaatcagaattagctgtgataatcccattgacaattgaacccaaggggtcggccacgcggacgcccacgcgtccgggggcgcggggggtgacccggggaattcggaccgggacctggaggggggccggggtttccgagaggggggggtattggaggttggcgtaagtaagggaacaggcggtgcctggggggaaatgtggtgcggttaaaattnaaaaaaagagaggggccggggggataaaggggaaagggtgggggggctaagggggggggtaaattaaattaattggggtggggttaatgggcggttttnaggaggggaaaatggggggggaggtggattaatgaaaggggaaaaggggggggggaggggggttggggattgggggggagggggggtttttttttgaanaggggggagggggaaaagnggatgggattttaggggttggggttgggggagggggagaagggggggatagggggggttgggccaagcggccccccccccc

SEQ ID NO: 50118 - DNA, 535 bp, Gossypium hirsutum
  Clone ID: LIB3829-010-Q6-N6-C8
atatgaaaatatagagatcacacgcttaggctgtgacactacatggtccttgatataggttatattcattagctatatcgaaatcaatggttattggagcctaacaatgaagggctacacacacacacacatacacactctgggtctcctatctaaggtaaaagcattacggaccacgggcagcagaaacagagacatccactagcctggtcatcaccgtatcatgccacctaccttacttgaatccactgtttataacaatattaccacctgcttcatgtacgtacgcccttcagggtgtgcatcccaacattttcaagagatgcttggcgaagaactagggcaacatatagggatatatggacgcaaattctgggatactactgtcgatgaaactctagggaaactaagagcgggataaagcatgtgacagaaaaatattttccataagcatataccgtaaactgtattacgtgacatgtaccgattatagaggcttcccatcaagggacctactggagccatgtacacccac

SEQ ID NO: 50119 - DNA, 363 bp, Gossypium hirsutum
  unsure (1)..(363): unsure at all n locations
  Clone ID: LIB3829-010-Q6-N6-D12
gggggggaatttaatggggtcaattccttcaaacgggggattaaatttacatctcatcaaaacaaattcataataaaaatcaagcccctgtgagagtgtgtgattctttgtggggaccggggggtnctaatttttccctttccatttggggagacaggggtccatcataaacacctctaatggggtccttcttcaataatcctcccttgggtttgcgcaaatggggtagaggtatccactccggccaggtagcaacccatcccctggaatccttgggttccctgtgagccttaagcgttggcttcagttcatggggggggaagggggtccgaatgagggcgagcgaatttcgcgaagatttct

SEQ ID NO: 50120 - DNA, 325 bp, Gossypium hirsutum
  Clone ID: LIB3829-010-Q6-N6-D3
aagccatccgcaacagggaggaacccttttcattttatacattaatattatttaatataatgaagatgagagccagacatgtggatcatctcaacaaggagaggaatggggaccatctaatgatggcttttcatcttcataaatcttaaaattataaataacatggcaagctaagctggcactggtgtctccactgaaacctggccagagtaattgacttcagatttcatgtctgtttcccaaagctctggtaatgcctgctttatgttgcgaatgctttataatgcataatctggtcctttagggctctgggatgtgcccacca

SEQ ID NO: 50121 - DNA, 436 bp, Gossypium hirsutum
  Clone ID: LIB3829-010-Q6-N6-D5
agccgaaccacccggcaaatctatgggggcccatataggcttgaacaaagcttaaaaaagtcgaagttcacccaatggaataagcaaaaacccccgataaaggggaacaaatcatgggggagcaaaaggcaagccctccactcaaacattacttatttaggactcattttcaccttcctaaaaaccctcgccgggctcaacaccgacttcttaaaaaaccttctcaagggcagaaggggccccacgagcttccgagaatttttcttttttcataccctcacccacgtaccagggaacaaagggccccttggcaaacaagaaaacaaacttgggggcaaggggggagaacaccccaacaaccctgggggggtgggaaataatgcaaacgggtttttgggccttagcaagaacacccccccgaaaccaccggtcgggg

SEQ ID NO: 50122 - DNA, 356 bp, Gossypium hirsutum
  Clone ID: LIB3829-010-Q6-N6-E1
aattaaaagggggggggcaaaaaaccttattaacgggggaaaaattattcaaaatcccctaaatcccggggggaccccccaaaataccccccccctaaaaaaaaaatgggtggcccccaaaccactaggacccaaaagcccttttcccggccaacaaaaaaaacccctggaattatgggtaaaaaaaccaaaaggggggggagggttcccagggccaaatcggggggaaagccaaggcttctggttaaacagggggcccaaaaaggccagggttgcttgcagcccctggctggccccccgctttttcataaacggaaattttcggacccgggggcggcccccggggtcccccccga

SEQ ID NO: 50123 - DNA, 512 bp, Gossypium hirsutum
  Clone ID: LIB3829-010-Q6-N6-E4
gtagaaactaatttatttatgaagggcaacatgtacagttctttttctgtataaacccagttgtgaatgtaaacattcaactacaactacaggtaatcaaaaccgataaattacagtaaagggggaataatcagaataaccccattcgatatttgttccttctaaaactaaacgttcggtcttgggactcctcctataccctaggatctgatcacctcgaccatcagaaatataatgtgcacattatgctccggaaatagtaacttcgatgaacaaccgaaatcaaggtggccctgtcactccggggaagagttccgatattttgttgaatacatccataacctccttgtcattttggtattttgcaatgctcagtgggttttgtgaacaatccatgatagctgcttgaactctaggattttgaaatgccatagcaacttcaggattggccatgattttggatattacttcttcaggtgtaaggccaatctggtcgaattgctgcttcacct

SEQ ID NO: 50124 - DNA, 509 bp, Gossypium hirsutum
  Clone ID: LIB3829-010-Q6-N6-E7
aattgtaaaccttggtttttcactttaccagattaatttcctaatgatttaaagagcattaatatgtgcaggtcagtgttaaagggactattacaagctaaacttgaattaacacaaaatgctttcttcaaactacgcttacttcctacgtaagtttcgtgcacggtagtaaaccggagtgcctttagttgtcggttgttcggacgaaggaacataatcgacagatgaaaccttcgggtatggatgaatggttgccagttcacggatgcgacgtaccacgggctttggtaagggacgtacggcatgcttcggatgattctcaacctctctccggttgttttcctgcacagaactggatcgtagtagatttcgccacttgtccctgagatcaacaggtgtccgataagtggatgatgcaaacagaagcttttttatattggtccatcttccgacaccgtacttggcaattccatcaacaagcttaatcacctccacaagggtccacatct

SEQ ID NO: 50125 - DNA, 530 bp, Gossypium hirsutum
  Clone ID: LIB3829-010-Q6-N6-F10
accaacaattcctcttattactcttcactaacatatgcaaaacataccaaacttaagggtttggtaacatttacaaaacataccaaatatcacttaacaacttagatactttcaaaataaccaaaagacatcctaggggcggggccattttctaaaaagatagaaacttcaccaatttgagtttggggatcggtttgtatgctgagtccttatactttcgtacctagccactatttatcgaatttaatcgatatcttcgttcactttctcttttcccttctttgatgacgtatccggtgctacgtttgcttgcatttcctgggattcaagctgtagtgagagcaactgtccctgaaaactcatctcttgatgaatgttcagcttcaaatttcaccttttcaaaaggaacagatgcatttatggaaggatataacatccttatctcggtggcttgaggcatacattgactacgagacatttcactttctcttctttagtttacaagcataatgccatacaccacaaatacc

SEQ ID NO: 50126 - DNA, 330 bp, Gossypium hirsutum
  Clone ID: LIB3829-010-Q6-N6-F11
ctaaccccaaccccttgggaatcagcggagacaaatttccagaggagccatatgcggagaataatagcgagtaagcgtgagtaaaaccctaaatatatataaggacctaattcttgggcttaatttcgggacatcttaaaaccccgggtgggaaaggagggaggcaaacttttcaacatcaggcttcaggttttcgagctccttggggggccccaaacctttggggagggccttcaaaaagtttcccggcgggttttgggggggcaagggcatgggcaccgggtcgggggggagctcacctatctgtgcgagggctttctaaaccaaacc

SEQ ID NO: 50127 - DNA, 307 bp, Gossypium hirsutum
  Clone ID: LIB3829-010-Q6-N6-F12
ggggggggggggggggtaaaagaaacctatagaaaatgaaaagaacttctttaattcatgccgatacatctaaaaagtccccatctatatcttcccattaacccccctcccttttttttttttctcttttactctcattcactcttggggggggggggggaaatataaaacaaacagggtttatatagatagaatatgagaaggatttaggaaaatagagtatttgaaaaataaattaaattgctaaggctaaaccccaacacaacgatgatgttcgcagaagcctattcggttccctaacaccact

SEQ ID NO: 50128 - DNA, 528 bp, Gossypium hirsutum
  unsure (1)..(528): unsure at all n locations
  Clone ID: LIB3829-010-Q6-N6-H3
agcaacaagttaaaacataataagaacattaanagagaaaacagtaactaatcgaaacatattcaaattttagcaacaagttaaacataataaaagcagtaaagagaagagcagcgacagttgtatgcagcaacttgtattcgtaaaattcaataagaacaaacctcaaaactaaccccaatttgcatcaaaagtaaaaatccaaagtacccttatatgagttctcttttcagcggccggaggggttttctcaaagctcgaattcttcatctctgagagcgatttcagcagcctcttcatcttcctcgtcaagaataaagtactcatttttctccaccggcctaaacatgtaaaacataaccaaataaaacgccaaactcgcggtctcctcggcggcattactaacccattgatacttgtaagctgcaatcgtccttaaagcaaaaaccacaattcttgtgaaatacaaatacccaatcaccacaatgtaaaactgcctaaacagggtcaacttcgccaaattctttg

SEQ ID NO: 50129 - DNA, 434 bp, Gossypium hirsutum
  Clone ID: LIB3829-010-Q6-N6-H5
aacaataaaagcgatgttcccttaaatagaaacttactaaacccacaaattaaaggtgcatagagtatctataaaattaaaccacactttagtggggactcatgaaaaatatgcaccccacttccagcaaaatctaaaacctgagtgcatactgagacatatcacataagccttttgatacctcacagggaatgagcatttttctcgagcctttgggagacatgcatcccgaacattgctcacaatccaacatttctaacggtggatgggggaaagcatgatgctcaactatatcccattcatcaataaggcttaccttcttcaaatcttcatagatcaacatgccaaacacaaaactgatctatgaacttgagaagcattgaaccattaacatttgacataaactccccaagggagccctaattaaaccctga

SEQ ID NO: 50130 - DNA, 480 bp, Gossypium hirsutum
  Clone ID: LIB3829-010-Q6-N6-H9
atgcgaaagccctacttggttcaattcaatcccggggtcatgggggcaaatgggaacccgaaacaatatacccgaaaggggggagggccttcctaacgggggtgtgggcccaaacccaaattaacattagccggagggaaggggaccaacaagattggaatccactagcatcaaaccccgtttaatgcagaggcctttctccctcccctcccctcccctccccatacaatcacaagggataccagaaagcaaagtctaagatatacatggggaacgaacttgatctacttacgttttcttgggggggggaattaaaccaacaggtaggacgattctactcattccccaaattcagagaaccatccttcatcagctttatgcttaaactggtgaatccccctttcgagtaatggcgagaagcctttctccaatccggaccaggtttcatcaggggtgcaaattcatcatagctgaggcgcc

SEQ ID NO: 50131 - DNA, 592 bp, Gossypium hirsutum
  Clone ID: LIB3829-011-Q6-K6-C11
ttcgatgcatcttaggacttattacttttggcattgctgttccttctggtctcttcctccctatcattctgatgggctcaggttatggtcgacttctcagtatggccatgggatcatatacaaacttagacgagggtctttttgctgttcttggtgcagcctcccttatggctggctcaatgaggatgactgtgtcactttgtgtcatattccttgaactcacaaacaaccttcttttgctgccaataactatgatagtccttttgattgccaaaactgttggagactgcttcaaccccagtatctatgagattatactggaacttaaaggccttcctttcctggatgcaaatcctgaaccctggatgagaaatctcacagttggcgagcttgctgatgtcaagccaccggtagtcactctttgtggggtggaaaaggtttcacggatcgtggacgtattgaggaacactacacataatgcattccccatcgtagaccagggtgtgccggtgccaggcatggtagccaccggtgcaaccgaactgcatggactgatcctcagagctcaccttgttcaagccttgaagaaaaa

SEQ ID NO: 50132 - DNA, 572 bp, Gossypium hirsutum
  unsure (1)..(572): unsure at all n locations
  Clone ID: LIB3829-011-Q6-K6-D12
natcactccccttctctaattcatacaccgcgtttcccattttctccgttgcactcactgagtcaccatcctgtcttttgtcatcttccaaatgcaaaactcctataaccatcggaggggacgccaagccccaccgccgaagatcgttcccttgccgggccaggtgtcatttcgtgtaatatgccacgcatcatccatcggcggattcatcgggagctccggcgccgttgtttctcaacttcgccgcgagacttcctctagaatccactgcgaagaatctgtcggcgggtcggatcaccgagttatattggtagtggggtcgggatcggtcgaaagacagtttagtttgggtgagggagaagtatgttacgtttcgtgtgctcaggaagcaatgattagggtcttccagcgcgtgtgggaagtggaagcggagagagagtggggaaacgcgtgcgatggtgaggatgaagaagcttactgtggtgtgctggctgagacggcacaaattggtttcgttgtggggaaaggagggaagaatattgtgagaatgaggacagagagtggagcgaaaa

SEQ ID NO: 50133 - DNA, 280 bp, Gossypium hirsutum
  Clone ID: LIB3829-011-Q6-K6-F10
gtttgaacgcgtagtcaagtctttaatggttgatattgaaaggtattttacagggattgatcatgaagtatgcataactggggattggcatgcgtttaaaggatggccggaacaaacttgcacttgcggaagaactgtggacagatttaaattatgtatgcggactcgatgagtgaaatgaatcctgtgtgggcataatatgtgccttacctgatgaactatatcgagctacagtttgaggttgattagtaagagacgtgagcgaagatataatcttgat

SEQ ID NO: 50134 - DNA, 581 bp, Gossypium hirsutum
  unsure (1)..(581): unsure at all n locations
  Clone ID: LIB3829-011-Q6-K6-H9
gctttcggggnaaacgggttgtaacatgttcaagtataaattagtaaggcttcccgggcaaacgggtgcatttntcgacatgggaaatccattcggaaatggaaagaagatccgtcttcaagagatggacttattcttccagacctcacttcaggtgctngaaagcatacctgtttcacttgtaaatgaggtcgatgatgaaaagggacctgcttatttcacatatgtctcgactgttaaatatccaaaatcgttcaaattagtacaaccttcatacggatgcaattgccgtgatgcatgtcaagcaggaaattcaaactgttcctgtattcaaaaaaacggaggcgatttcccttacattaccactgggattctagcttgtcgaatgcctatgatatttgaatgtggttcctcatgcccttgttttcgtaactgcaaaaaccgggttttacaaactggttttaaagttcactttgaagtttttaagacacgagacaagggttggggtctacggtcatgggaccctattcgtgcaggtacgtttatttgtgaatacgcaggtgaagttattgaaaaaatta

SEQ ID NO: 50135 - DNA, 132 bp, Gossypium hirsutum
  Clone ID: LIB3829-011-Q6-N6-B11
ggaataattaattcggaaaactaattcaacccacgattaatcaggggttacatagaggggccccgaacatagggatataactgggtaatgggccggaaaatcgaaaataacccaaggggaattagtttttct

SEQ ID NO: 50136 - DNA, 516 bp, Gossypium hirsutum
  Clone ID: LIB3829-011-Q6-N6-B9
gcaattgatgagttacatgcttcaatttcacttctaattagttcaatgaccacattttagtataaaaatcactcaatctaaaacttccacaatcaatcaaaatgcataataaagttacaatatcattttgttatgagaaaagccaaatatttcccaattctattataaacaaacctatatattttaagataccgatctcgatacgtgtatacgaacataaacatcggaccggtgttcttgctacctcgacagctttacatttttctgtcggaaatttggactttgagcatggatgtatgccactgcaatggaaaatgactgcagggctgaaagtgttgtttggaaatgaagaaaatacaggccatcatgaacatttgctatcctcaatgtcggggtaccgtgcttcgagccctgaacgaaaaaatcgaataacttgcatgcctcagaggtatctgttgaaggcaaacctcgctgcttacttgctctggctctaagtacggtcagcggacagcccaa

SEQ ID NO: 50137 - DNA, 419 bp, Gossypium hirsutum
  Clone ID: LIB3829-011-Q6-N6-D10
gctgagaaaagtacaaaaccaaactaggtcaatgatcttatactgaacatctttagtctccacctgaagacaacttggggtgacaaacccaggagatcacgctgtgatgcttaccataacacacactgcttagcaaaacattcttagctgagattcatttaccaatcacatgaccgcatcggtacttcttgttgagatcctaaatggggcagctatccgtgctgcaaacagaccgtgaatgactttacgcgtcaagcgaacccgatccttgcataaaaaaatgagaattttcatgggggtcataagaagcctgcaatgcaacccatgaaccgaagattgtcttcctttctcttgggaatataattccaaaacgtatctccacttgcgctctcataatgcgtcatccccggccacgcttg

SEQ ID NO: 50138 - DNA, 521 bp, Gossypium hirsutum
  Clone ID: LIB3829-011-Q6-N6-D12
caaaatgaaaatgttaattatactaaatgagaagcaatgggaactcagttaatccttcctacatttcaacaaacataaacacttgctaaagaaacaacatttgcacctgtactacattctccggagaatggcccagtgatagctcctcaatcaagacttgtatgtcagcgccagtgagttctgcaatctcaaaaagtaccctaccttctttgtccttcaagcagtggacaatgttggaagcaactagaagcctaagagtcacaggagtgcccttaatcaggactgactgaaatcctctctcaatgtcagcttcaacggatcttgcaaatacaagaacaacagcattttgtgcaggagaatactgtgattcaaggttctccaaggcagaaatggtgacaacacgatcacgatgatcggtttccagggactcaaacattatagaagcaccagtttgattttgcaaagctttgacaatggcacccttcttgccaatgatggccccagcagcaccattggaacaa

SEQ ID NO: 50139 - DNA, 547 bp, Gossypium hirsutum
  Clone ID: LIB3829-011-Q6-N6-E9
ggaaaatcaatgttggctacattcttatatgatcatggatcatttacatgtgcttgtaagtttgtagagagcatattacaataaaccagagggacagcagagcagcctatcaaattccacggcatcttttgtaacatcgaatggcatgtaatgatcaaaccacttgaaagaattaacgaatcggtatcggttacaaaatcatgcgggtctctctctcatcgcagcaagaatggctcatcctagctattgatgcaacattatgaacacaaaaactgcaaggaagattgagagtattgtagtgaagccctctctgttactgttgtttgttggaaatactgaaggtagagcgcattcctcgccgttgaagaacactttagagggaaatccttcacctgcagctatgttaatgccgggggtatttttcttggtaaacgagatcacagtttgttgttttccaggcacccttggatctttctttgggttggctccatcagtttctcctacaatgtagtttaatccaggaagaccttgcatgattatagtattg

SEQ ID NO: 50140 - DNA, 456 bp, Gossypium hirsutum
  Clone ID: LIB3829-011-Q6-N6-H10
aaattgaaaataaaattttttttattttaattgttgggccgggccgggttgtatttcaggtctggaaaggaaaaccaggcagggaggggttggtgggccgggcctctaagacaaggggaggggccagccccgatccagggcaaaacagaaaccaaaccgaaacaaaagaacaaaaaaaaaaaaggaggggagcaaaattcaaaaaaaaaacacggaaatgaaaaagcgagggggaggggatggcaaacttaagggaactcagagccggaaccggagagactcgacaaagaaaaggggggcacggggccgaggataagacaaaacatatcttagggggaaaagccctgcgctaggaaaaaaagaaaggaacgggagaacaagggtaactggaaagcactggggaaaagcgaggcgggctgggtagaaatcaaccccttccggaaaggaaggaaagga

SEQ ID NO: 50141 - DNA, 531 bp, Gossypium hirsutum
  Clone ID: LIB3829-011-Q6-N6-H12
aaattcaattcaacctattcatattgatttatgatctaactgatttaaagtcattcttcgaacgatatctcgatcagttttcaatctaacctatctaatcaagttaaaatatcattgcatatggtccatcgtttaggtaagcaaaaacagcattagcactttaccaataatctctgcaagaacaaaggccatccttgaactgatgaaacctattagcatctctcaccacgaaaacaaccttcacaatcttcgacaagcattttatgaaatcatgacaatccccacaaattctcaagttcttgaacacccttatcactcttgcttcatcccaccctccatggcaaagtgccaatccgattgccagcttctcactgtgaaccctcaagctctccaccttcgactcttcgtctatatcccgcaatgcaaatttcaccccatgaacataccccatttcttctttcatccttctctccatctccttcaacacttgatgaatcttgtctatcattgggtgagtatcgtctccgccgt

SEQ ID NO: 50142 - DNA, 537 bp, Gossypium hirsutum
  Clone ID: LIB3829-011-Q6-N6-H9
gaaaaagcatatagaattacatgattagatattcaaaaacccaaaaagtctttgcttgtctacataatacagcttttttgtaacctcaataaaagtaacctctgcatttcggcgatccacataagcacttcttttttccgtgctccatgttgttactttcggtctcatccgaccgtggaataccgtaatcgtatgtcaactcggtcattggaggaatgtgtttcttagcaaagaaagcaatatggagaaaagcttcattgttatgttcatacatgatcggttgccaaaaaacattcggggagcaactatgattcataaatcgagctatgtttccactgttcttcgaacttatgattagaggagacggaatatcgaacttttcactagtgtcagatctttcctctgctgactcagtttcatgattccatttgaaggattcatacactcgattcgtatcgaaaacgtaatcattgttttcaccatcgtccccgtctgctttttccttaattttttcaataacttcacctgcgtattcac

SEQ ID NO: 50143 - DNA, 185 bp, Gossypium hirsutum
  unsure (1)..(185): unsure at all n locations
  Clone ID: LIB3829-012-Q6-K6-C12
gcgttcgcttttactttctgctacttttcaaaaagaccgtttcattcttttattctaatgtcttaagcttttttctcctgtctttcagtttgaaactaanacgtttcttctcctttttttcatgctgagaaactaagacgcttcttcttcttttcttttatgctaaaaaatcgaagcgcttcttc

SEQ ID NO: 50144 - DNA, 588 bp, Gossypium hirsutum
  Clone ID: LIB3829-012-Q6-K6-C7
gcgttcgcccacgctccggttttacagactaaaactctgacttgaaatgaagatctcaaatgtcgatttttgcgggcaattttagcttcaaaatctcatccacacttcagtttcgagttttctcatttccctgggtgaatggcaacaaggcaatcttttgtttgaaagagaaggaatatagttcatcagttccagtaaggtatataccaaagaaatctttggaaactgaagagcccgaaacttcttcacattcaaagggtttgagtaagaatgaatctcgtaaaagcactgcttggaatgtatttggtagaaagtttacaaacaatgaaggcagtgttattgataaaaagtcacaaacacaaagcggaatgttcaagaaaattgcattacatgatgatgttcaacaaggtgatgaaataatggtgaaacctgtagaggtggttgaggaggtgcctcaaggacaaaacatgaacagaaagaattcgttacaagtttgcaagagaatgtcagatgccgagaagttggcaattgaattacttgcagcaagagcatttaccgcagttgaactgagaaagaaactgcttggca

SEQ ID NO: 50145 - DNA, 547 bp, Gossypium hirsutum
  Clone ID: LIB3829-012-Q6-K6-D12
tcgcggtcgcgtggggacgatggcgatgcatgcaggggttcagacctccaaattctaattctgatgggcgctggtttaactggttcaattgttccgaggagtgggcgttatctgaactaattccccagcttcaggaattactgaaaggcgtcgatgatgtccaattctcgccttataagtgtgatcacacccttcttgctgctcagattaaacaattggcgcaagagctcaaggatttgacaacttccaatccggttaccattcttaatgggaactcacgctccggcgggggcattgcttcttatcttgtgccatctgccccacttgcagcattaagatattgacatatgtggtggaagggcttgtcaatctttgatgtgatgtcaagtcacaaagcaaaatatgatggatgctggaacaactgtgccaaaacactaagataatgtatctgaaacattaaatacaacaataacgacatttatccataagattggaaggcttagactgcgaaagttgaggatcataaagaaacataccttatcatcgc

SEQ ID NO: 50146 - DNA, 314 bp, Gossypium hirsutum
  Clone ID: LIB3829-012-Q6-K6-E12
gcgttcggaaaaatcatgcccttatttcatgagggccgcatcatgtcacttaggagtagcatgccatgtccatcatccccagcctgccaaagctgggactggcttacctgggaatggacctgtgggatcattagttgtcccaccaacaggcgtgccatatgctggcgggttaccctactggccattacctagggcaccgtatgaatatggcccgcatttacaaactccaaagatcatgccagttgaaagttctccttctgaaaacatattatcaagaaatggctggtagcacatacatgggtcctgcactcttg

SEQ ID NO: 50147 - DNA, 556 bp, Gossypium hirsutum
  unsure (1)..(556): unsure at all n locations
  Clone ID: LIB3829-012-Q6-K6-E9
caattttgggatgtgacacaactttaaaaggtttaattgttatataacctttgcttaattgccacttaaggcacctaacaatttagaaatcaatttcctttcatttaggtcactaatcaatttaattcctgtattattttattgatcaatttaatttaacaacacttaattattcgagctctcagatccatacttgactcataaattattctattttaattatttaatatctctacacaattaattctattcgaaactaaattttatgatactattaaaaacctagtcgttacagttgataagctccaattatccaatcaccagaatggttatttatgaaagctctaatctccactcttatgggttttctattgaagaactataagtttgaaccagtcaattggaggtggtttccaagaccaaagagcaaaacatggcaaatctttcctattcactactagagaaagagcagagaactctaccactgcagtatagactttatcaaggaattgttttatatggcgatcattttcaaanactagtatgttgtgagtaa

SEQ ID NO: 50148 - DNA, 309 bp, Gossypium hirsutum
  Clone ID: LIB3829-012-Q6-N6-C12
aaatccaaaacttcaattagttttggcttttaaagggggcccaaacggggcataaccaggtgatagggcgggggctagcctacccaaggggtccttaacaggccgctcatgggttaaaggacaaaatgggttcaaaaaactaaggccccctaggggccaaaagaaaaagccttgggtatattaccccgcaggagggaccactagctttccttgaaagacggcctacttcgatcccaatatgcataaaaggataaggccctaagagggggaattaaaaaccccaaaggggcttacccaaaaacaatctca

SEQ ID NO: 50149 - DNA, 541 bp, Gossypium hirsutum
  Clone ID: LIB3829-012-Q6-N6-C7
acaagaatgggtgtcagacacgagtactcggagcaatataggtaatcacatccggattagagtctatggggcactatggtaaggtttatgttaggagttaagatgagctgtttatcagggttggcatttcaaagaagtgatcctatctatattttccctgagatacatttcaaaattcaaacaacgggtatcaaaatctaaagtcaaaacctgggtgctgaaccataactgagtagcttttggtgcctttaggaaggatactgagattccaacttctttaaaacagaaccaataacaccccagttgaaaccgcgatactgaagccaccgaacaatccttgacttccgtgtctctttgggaacatctcgacctcgaagccattgcttcgaggcctgaattaataggtgatccattgaaagctttgaaaagccaagtcgggattcctgatcatcatttgagtcactatcccgaccctcgaaaactagttttaacgcattttctgcatcagcttcacttatacccttcttgaacaatgcttgct

SEQ ID NO: 50150 - DNA, 531 bp, Gossypium hirsutum
  Clone ID: LIB3829-012-Q6-N6-D12
acataaaattctgatagaatggccataaactccttgggaggaaaaaaaatgttggaaaactattggcaacatggtgagagaaggggcatgagctgtagtaatttaacagcattgaatctaggctgatataatcccttatacacagtgagatagtacgttcttaaaggcatcaggcttgctattgatatactacacccatcatttcctgatggacaggagttcaaaacttcgaagagggtgatcatcacggcttcctctaacagtggtggcacgactagatgttttggcctccaaggcatgttggattctttgtgtggtagacatgcgaccaccggttgatgatagtcggttttggggaatgtcattgggttcaccggatgaactgggcctgcttgttactaccgctcttcttgaagtgctaccatatcgagaagaactgcgtcttttacctgaatcaggatgcgcatgctttgacaaagttgcatcctcaacagccttgtttttagaatgatcatgacgagggctagtact

SEQ ID NO: 50151 - DNA, 462 bp, Gossypium hirsutum
  Clone ID: LIB3829-012-Q6-N6-E10
gggaaaacaaaacacaatcttttggtggaatccaagggcgtagtcccccccccatggtctaacaaggccgggaaaaataaaccccccaaaaaggggaagggggtcccaaaggggctttttcttggccggccctaaatttgaaaccccccaaagagaattattattattattattattattattattatgaaaaacccaaaaaaatccccccgggaaaaccccccccttcctttggtttaccccccccctgccaaaggaacccattcaccccgcttgggggccttaaaagcggaaaacatttccagggaacgggggttttcgcgacgggcaagggtggaaacctgcttccaaaaaccataccccccccccaatgttaaaagcccctcccaatatatctgccctggggatttctcccggacccccgacccgtgggccgacccacccctccccggacccctgggt

SEQ ID NO: 50152 - DNA, 527 bp, Gossypium hirsutum
  Clone ID: LIB3829-012-Q6-N6-E9
gggtataaaaagatataatattcttttgtggttgtaagcgtgttaaaagaagcaatgcggaaagttgaaacagtttaaaataaaacttaaaagaatgaactgaattggatgcaaaataaatcttaaatttatctataatttataatctataatatctattatattaagatgattgtaaaattaatatttaacctgattggtttaaaaaaataaataaatatcaaatttatatatgaattttggttaaatatacattttgatacattgatttgatgcaattatgctcataaaatttgaattttgattcataagtatacaaaaaacttcgattttgattcaactgtccacattttaataaataaatatataaatttattttcatattgaattaatataattatttatatatgcaatatatcaaagtaaaatgatgctaatttgataatgttgtcaataatttgtaaaaattaaatcaaattaaaattcatgtgtaaaattacacaaaatcaaagtttacctataacatt

SEQ ID NO: 50153 - DNA, 470 bp, Gossypium hirsutum
  Clone ID: LIB3829-012-Q6-N6-H12
cactcaattaggatctcatttctttcctaattagtatgtgttgggcccaattttagctaggggcccaataaacaaattaaacaaaaacaccgaaacagtccaatgtccatttacaaacctataccactacccataccagcccaaacattaaacgggcccaatctaaaattacaacccacaccaaagaccctagcccaaattttcagcccaaaagcttaaacaatttcagctaaagaaaccctaagcagacccttgtgtcgtagccaacagcgagcttcccccgcacgtcgcgtgctttctctgtgtcgtacgctactctactacgctacatcagtgatacacccacgcacgtacctgggtccactccgcggatcggcgtcggaggtggaggcgcaaaagtgccgatgaccctcgtgcacagcctctcaggacagggtcaaaacccttgaaacgaattgggatttgttttg

SEQ ID NO: 50154 - DNA, 470 bp, Gossypium hirsutum
  unsure (1)..(470): unsure at all n locations
  Clone ID: LIB3829-013-Q6-K6-A10
gagatttaaaggcctgggaaggtgggttagatgatttgttccaaagtaatggttgcaagctactatttaatgaatttattgtttctttgagttatattgaatatttttttttttttttcatnncttctcaattatgtgggggggggggtttttttttttttttgagnnacctttggatgtgacaattgtggttggcaacagatncgacccccctcaacataatgctaatgcgctcaacaaaatatttcaaatcctttggacattcaagagttgaaatttaccggagattataaagcgatctgaagttggcaaagactcgtgaaacattggaggatcaagctgagataaagagattgggagaaactatttttagaagtcaatctgaagttgggcaggttttgtgaagtgtaagcaactaaaggaattggtgtttgtcggttttttggttcaagtaataggcatggtaagaa

SEQ ID NO: 50155 - DNA, 577 bp, Gossypium hirsutum
  Clone ID: LIB3829-013-Q6-K6-B11
tcaagtttgggttttctttctttctcttttgtatgcttttttgattgttcaaagaagggtatggtgcgctccaaagcctctctacttgatcttgatcatgatgatcatcatcaattgatggacggtcctgatggggatgttggtgctgttcccccatcttcttctgatgtctcttgctcgatttgccttgatttggtctccgatactggaggtagatccagggctaagcttctatgtggtcatcaattccatctagattgcattggttcggcctttaatatgaagggggcgatgcaatgcccgaattgccgaaaggtagaaaaaggtcagtggttgtatgcgaatggatccaaccgatcgcttcctgagctaaccatggaggactggaatcttgatgatgattattatgagccagtttattctgaaatgcaatttagagctcagtggtgtccatatggcgaattcacaagaatcggttcatcatctgaggaagttgaatctccttcgactacatctgcagctctgagatcctctaatggtgaacctgatgcatcaactgtacccagattgtttggac

SEQ ID NO: 50156 - DNA, 605 bp, Gossypium hirsutum
  Clone ID: LIB3829-013-Q6-K6-C7
ctgctttccttcccttttcattcctctccttagtcttcccctggccgacccttggctttccaccgcccctcgtaccccctctgtatccggtgactgacgaagcgcaaagatggggtttgtcgatcactttttgagtgggtccaaaggtggtagactctaaatccgcgaaatcgaaaggagaaaggcccctttttacctcgttttggtacgattccggccacggggaagaagcctccgacgatgagatcgtggaacgatgacgcggtcgcaaggttacaaatcagtggcggtgacagagggtcggtgcagagagcagttggccgacagtcaggggcaagtggggcgtcggctgaacctaggggctagggtttcttgatttttttggttattgggctaggttaagtttaggttttgggctaggggatttaattagaattgggcttgattattgggctccaggtatgggtttgaaaatgggttaagtgggctaagtgagtagggcaaatttgggtttcaacaatactgatttagcaaaaacctcacaacctccaaatgtaaacaatcactctaatcatctctttttttttttgtattttatcaataac

SEQ ID NO: 50157 - DNA, 573 bp, Gossypium hirsutum
  unsure (1)..(573): unsure at all n locations
  Clone ID: LIB3829-013-Q6-K6-E12
ttcgctgnaaatctagttataaattgccctgtacttcataggagtcatgacagtggctcactgttctgttaaagaattcagggaataaacttagcattttttaaggttaaccaacatgacttaaccttaatgttctaattgaggatcatactgttgttgttgttgttgttctttttcagtctaattaacacatttatgcagagtggcccttccattgctgcatttcttttctgttcatggattccactgttggtattatcgaatcattaatgctttaaattgttgtgattttctaaggttcttttctattaagtttgatgaaattgctgatcagacattcttgttactgtttgatttgcagacctcatcaattcttgttcttgattgtggtgtgataaagagtttcaaagttggtgaaaacagtgttttaatgtttcaaaacattcttaattgaatcatgcaattatatcatcatccatgctcattgaacagccaaaaggtgaggcttgctttggaagagaaaggcgttgattacacctcatttcatgtcaatcctattcttggcaagaacat

SEQ ID NO: 50158 - DNA, 566 bp, Gossypium hirsutum
  unsure (1)..(566): unsure at all n locations
  Clone ID: LIB3829-013-Q6-K6-E8
cccagcgtccggttctttttcacccacaaaanaaaaattgcttatactacaattaaccatgccttcaagtgctcgtctagttcacaggcaatgaatcatgggccttttccggcgactctttggcgccaagaagcctgcccaacaacgccccgacaaagacaggaggcgttggagctttaccagatcttcccatcccacgtcttcgacttctcatcttgatgccctttctggtccatgcaatggcacattggatgccaacaagcgcgccatagcagtagcagccgccactgctgctgtagctgaggctgctctggctgcagcgcatgcggcggctgaggttgttaggctgacaagtggtggtgttggcagcgccgatgggagcaaccgacgcctcccacaagaactagcggctgttaagatacagtccgcttttcgaggttatctggcacggagggcactgagggcattgaaagcattggtgaagcttcaagcactggtgagaggtcacgttgcgaggaagcaaacagcagacatgctcagacgcatgcaaacattggtcagacttc

SEQ ID NO: 50159 - DNA, 329 bp, Gossypium hirsutum
  Clone ID: LIB3829-013-Q6-K6-H8
cgggagcttgggggtaagctgactttgcttgccagagggatgagtgtatatataccatgtaaggggctgatccatatgtcagagattcatctgactgcatatttggcacgcaaggacaacactatagagatctagactttgccaatgtgtggaattgtgagaggaggccagcaatgatggatctgcctactacaaagccaatgatacaacccttgaactgatcccaaattggtgccaggatggtaaaatcttgccggcatgaatggatcatagtaagggaagcccattattccactagcagatctgtaagatgccaccagacgtaaacc

SEQ ID NO: 50160 - DNA, 541 bp, Gossypium hirsutum
  Clone ID: LIB3829-013-Q6-N6-B11
atcacttcttgaagtttcctttttcatgcgagtcataaagtctgattcaaatcgtttgaaacaaacatggacaaacaaattgataggaatttgcaaccaatatgtgaccggttcatctatggtcggtcccagatcggttgccagaaccagagccagatgtaggacgatatgccccccaaccggtgactcttgacacagttcggaaatgagacaaacgctctctttccaaagcaatataattatttggataagagctttctgcttccggtaggttctgtccagatgaacttgatcgagggtagacatagaagcccccagtttgatcaggttgtgggactgctggggtcattggggccacacctcttataccaggaactaccggagcaggcacaccaggtcgattgaatcgctgttgattgaaacgatgttgctgtctataataggcaagagatggccaggttctatcatgggtatgagcaccgctgcctggatgatgatgaaaaactgaagagacaaacgaactcccgcctcttgaactgga

SEQ ID NO: 50161 - DNA, 521 bp, Gossypium hirsutum
  Clone ID: LIB3829-013-Q6-N6-B8
cctagcaaatagtcgctcatataaagcaaagataacatcgaaatgttccagtttgctcgaaagaaaagcccactgcatacatgtattgacactaacaacccagcactactgagcaaaaaagcgagcaaacacgcataaggctaaggaccggtccacaagcatatgcaagcttggaacaacacaaccatccaacaaaggctagctacttaaaaacctcgatgtcctattgattaatagatatttaaccaaacttatgtgacctgctatttaattgcttctttttaaaccccattttacaatcctggttatagttggagaggccctttacttgaccatcatgactttgacgaactcctcctagttgaactgcccatgaccatcaacatgggctttgcggaataatgtcgcttacttgcttatccaggaagctactcaccaagtgtttgacatgacactggcgcatactaggctgccgaaatgaacccattctgatcccttgtcaaacagccctgatgcctctt

SEQ ID NO: 50162 - DNA, 529 bp, Gossypium hirsutum
  Clone ID: LIB3829-013-Q6-N6-C7
gacttgaagcatattttaacttaattgaaagatgataaatataaatacatgtgtgtttctcttttcaacaccaaagtaattttgggacgttaaagaggaaaatgattgggattgctatttgggtttgctacttattattagtaagaaaaaataatagctttctgttataccccctacggcttggaaaatgtggtagcacaacaaaccaccagaggactagtggctcggaaggcttgatcctagccagccttctgttatcctcgaaagggtctttgccgaccacccctacgaacaagcttctcgctccttttagaagggtctcatccatccattcctcagggcacctgctcttctgttgagagtgtgacttttaggccaccaaaccttacttgaatcttacaaccttgcactatcatttagaatgaatgctagaatgagccccatcacatacatccctccgtgcagttcacaatgatgatagaatcttcaagcatgaaacctctattatatatatatccccagactcaat

SEQ ID NO: 50163 - DNA, 519 bp, Gossypium hirsutum
  Clone ID: LIB3829-013-Q6-N6-E12
ccaactcattttatgtattatcaatttacagtacacctgtaacccacaaatccttaatatcttttcagcaaatttctgatttgaagtgagcaccaagtttttattaatgttttctccttcctccagccattaaaatattttcctataacttttttataggtaggcctttgttgcaccaaaccccagtagtctgctatatttggcctgcaacttatatactcattttccaaacccaaaagcaccaatcgagccagcacgggtacaaatgtcgcatccgccatcgtgaactcatcccccacaatatatgttgggtcattcagctttgtttcaacttcatcaagcaattggaccaagctttctgtgctccttttaacaagatcagcattcttcagcttctcctcggtctcgtatgcttctctgagcttgctggggtaagcactagcaaggtctggtgattcggccatccgagcgatcaccactttccttatgaatttaaaaacgtaaaggcggtgcttgtca

SEQ ID NO: 50164 - DNA, 525 bp, Gossypium hirsutum
  Clone ID: LIB3829-013-Q6-N6-E8
aagacacgaaccaatcatctggattaagttaagagttctgcttcacaactatataatacaaaatgcaatctaaattcacggagtgggaactgaactgcaaagcttaacatgttcagcaaacggcagtcgtgtcatgctgtttcggacctgtagaccactgtagatctaagttcgtaacatcacagtaagttaattacagccctagcacagcacagcagtgcctaatcacacacgaggaaataaaaagggaggtcattgcccttggtgggcaccagcaagcttattcaagcaatcagatgctagattatacctgtacctataatcaacatgttgagccgaatctctttctgaatcccacaacccctgaaaggttcttctgttagaaccatacttgtcaaactctagtctctgccttggggcactctgagaccggtacttagcccggaatgattccgtattagccatgtaatttgggtgaccagaaaatccacttaaatagccccatgagcattctctctttgcgaa

SEQ ID NO: 50165 - DNA, 457 bp, Gossypium hirsutum
  Clone ID: LIB3829-013-Q6-N6-F9
aagatgaagaggaattaacttttatatcgaaattccgtaccagctaatctctttgaaatacaagcaatgaaattcatcagcaaaacccttgcttcctcccacctcattagttactctagacacatgaatgatggcacattatgaatgtaccatgttagacgttatcatcagtacataaaaaaattacttcatcccagatgatactacatgactttctcctcatgcttagccactaaagtcactgataaagactagttatttctaattaggccagtagattccaaggttttgctgatttaactcataaatccccctcctggcatattagggggggcctgtgatgaaacttgcccctgaaaaactaattgggatcatcctggaccttgaacgtaagcaggacccattcctgaaccaaccatttgttgttgctgaaaaagttgctgttgctgcatctgag

SEQ ID NO: 50166 - DNA, 463 bp, Gossypium hirsutum
  Clone ID: LIB3829-013-Q6-N6-G8
aaaaaaaaaaaaatcttggggccataaaaagggaaaagggggggcctttgttcaaacgggaaaacccgccctaaaaaagcctcagggaaaggttttttgccgggggcattcaattccaacgggaaacccctaaaactagaaactttttttattaaggggggggaaaatttgggggtttttatccccaaaccgaattggcagcgaaatattgcagggctaaaagcccaaaaggggcattttccttggccccaacgggggattggggatgggaaaaaaactcaggcccttaagtataataagccccatttttgtcctcagaatgggaatcaacgggggcacccttggatccccccccccctctttttttctcggccccccaaaaggcggccttttaagcatcctttgggttgccccaggttttttaagctagttttttgggatactctacataatggggaactaa

SEQ ID NO: 50167 - DNA, 437 bp, Gossypium hirsutum
  Clone ID: LIB3829-013-Q6-N6-H9
aaagccttcaaaaaaggggtttttaagattcagggggcccttttccttaggggtacaaacgacacccggcccaaaaaaggaggtccccaaacaaggggttttttaaacctttttattataaaaaccaagttttttttacttaaaaaaaagagttttaaaagcccattggatccttaaaccgcatttgggctaaaattttacccttgcaaaccaaaaaaaccgaaaggtactttgccgccagaatttcctgggcttttggggagccaagggccccccttgccaagggcatggggatctggatggacaactacagtttttccaaaaaaggaatttgggcctggaaaaaaaaattgtttggcggggaaggaaaaacttgcacagcctttataaccaaaagggacattccctaaataaccaacggggggggtttaattttt

SEQ ID NO: 50168 - DNA, 599 bp, Gossypium hirsutum
  Clone ID: LIB3829-014-Q6-K6-A11
tgaaaaattaatgcttcagcacttgtgctgctatgactccgaagttattgttaatggtgacttgtcaaaggagacaatcatgaaggaagtgccatctctgcaaaaccatgtaatggcagaaggttcagtgctcaaggagtcttttttcccccctttcaatgtgccatcaaaagactcatcagaagcatgtttttcaaatctggttcaaggtgaagacttgcaaccatcagcttgttctgtaggtgggaatcttggcagttctaaaacagaaaattcaactgttactactggtggcaaagatagtgactgcaatgagaggggaaacactaaaggtggttttgaaatcccagtgaccttatcacccaattgtggtggtttccagaactcgggcactgcaaagatcgcgagtaaagagaccctgcagaagattagttgtgcttcaaagattgaggtttcaagcactgttgcactagaagatttgataggaaaagcagtgaagaaagttcctggtaaagctctatctatgagtactactagtgaaacatcaaagaatgctcaggctactatgtctctagataagccaatttgtaacggtagtc

SEQ ID NO: 50169 - DNA, 563 bp, Gossypium hirsutum
  Clone ID: LIB3829-014-Q6-K6-A12
gggggaggacgttctaaaaataacgccaaggtgggcttatgaagccagctttcacaattatgcgtgataaagactcaaagtgcttcctcctattgattcgtggcactcatagcattaaagatacactaacagcagcaactggtgcggttgttcctttccaccattcagttttacatgaggggggaattttttttttgttttaggatatgcacactgtggaatggttgctgcagctcgttggattgcaaagcttgctgcttcttgcttgctcaaggctctcagtgaatatcctgactatcaagttaagatagttgggcattcacttggaggtggaacagcggcattattaacatacattcttcgggaacagaaagagtttgcctctagcacttgttttacatttgccccagctgcttgcatgacatgggatttagcggagtcaggcaagcacttcattacaactatcatcaatgggtctgatttagtgcctacattctcagctgcttcagttgatgaccttcgcactgaggttacagcatctttatggttaaacgatttgaggg

SEQ ID NO: 50170 - DNA, 592 bp, Gossypium hirsutum
  unsure (1)..(592): unsure at all n locations
  Clone ID: LIB3829-014-Q6-K6-A7
gctttttctgcatatcttccttgcaatatccgtattaaagtcactcccggcacccagccatcattccatattgagatatggtctcctacccctaccctccacacaatccatccatcaaagtttttttgtcgaccaaatactcctccagatgttgagtactacgttgcctacggtggagttcacgatcggtgcaaatcctttgggttctaatagtggtgtcagtcgagctacgaagaaggtctgtaccaggatggagttactaccggacatggatgactcgacaatagatgggaatggacaaaaggttcagggatcggaggtacctagagtgtcgtataaattagcactattaggggcctngccagtgcctgcgcagaacgctttaatgaagcaagatttcgctctaacagaaggcaatgtgatcacggaggttgtcgagggtgtcccattgatcacgttttttgatcgggtacaagagtacattgaacgcagaatgtctagaacaatcattgtgaaaatgttcgggggaagaattggattcatcaatgcatcgttgaataagatttcattgtttgtggagtccaagatgccc

SEQ ID NO: 50171 - DNA, 587 bp, Gossypium hirsutum
  Clone ID: LIB3829-014-Q6-K6-B7
gcgttcgattttgttggttccaaaattatgtcaaagttaaagctactggtagtccaatgaccagtgtagcacaagtaatagtggtagctatcaagaaaaggaaattaaaacctgtggagcagccttggctctcccttttcaagtattttcctcccaagtctatcaactccaagcttccctataccgaccaattcagattcttggacaaagcagctattgtgacaccccaagatgaaataaagggtgatggatcaccagcggatccatggagactgtgcagcttgcagcaagtagaagaagtgaaatgcctgtttagagtgcttcctatatgggcatcacaaatcatgtattgtgttacccttgttcaactgcatacctatgccgtgttccaagccgttcaatctgatagacgcctcggaaatagcaactttaagatcccagctgcatcctatgttgtcttcatgatgcttagcctgaccattttcatacccgtatacgatcgagctatcgtcccattccttcgaaaaatcagagcaaaagaaggggcattacaatcctacagaggatcggtattgggatgtttgtct

SEQ ID NO: 50172 - DNA, 593 bp, Gossypium hirsutum
  Clone ID: LIB3829-014-Q6-K6-D10
cttttactatcttcaattcattgagtaattttctttaatgaaccgattgttttcaaatctccattttgactgtcagttgtcaaaatcatttctttttatatattctcatgttgataatttgattaattatggaatgcaaagattgggtttctaaattttggttcaaattagatatgggtttggaagatccatccattgatgtgtttttaagacgaaattagatggagttaaagcaatattcaagatttaaccatttattaaattagggtttaggatccaatcttcatttttttttttgatatgaatattcttgtttgcttatggaatttttgtccatggtacctttgtaacatatcagattggaatttttttggatttctgaatatatacatatatatttatttatctttcatgtttgatttatgatccaatcatcacatatggtgaattagcttttattttagattttcagcattgtttttgcaattggtgtttctccaggttttgagagttgtgaaggttaagaaattcttcagtaatggcattgcaagagaagctggatagatttaataagcagcaggagaagtgtcagt

SEQ ID NO: 50173 - DNA, 585 bp, Gossypium hirsutum
  unsure (1)..(585): unsure at all n locations
  Clone ID: LIB3829-014-Q6-K6-D7
gctttctgccaatgaactgtcgtataatgtttagtttagtttataatcatgtaatatttgatccttcaattttacatatttattatctaggtgggaacttatttgatctgttttagcttttcttagggccagtttgagatattatgcttgtccggttcttacttactagccgaggatggtggaccacgcagtcgaacagggggcataagtgcttcactttctactcctgatggtcatgtcataggcggtggcatcgcaacattgattgcatcaagcctagttcaggtatccttttcatttctccaaatttaacttctattttgatgcttataaaatcagacgagtctgactagggtcttatttgcatgcgcataagacgtgctggttggaatgagtgggtttgaataagggtgtgatatgtcattgaattgtatgtctgcaacccggatagtgttttcggtgggttaaaaaaatgagaagcttatgcatatgattttaaggtattatacacttgctgcagctggtagtttgcagctttgtttatgggggatctaaaacaaanaacaagcaactggctagcccaaa

SEQ ID NO: 50174 - DNA, 554 bp, Gossypium hirsutum
  Clone ID: LIB3829-014-Q6-K6-H11
gcttttgctgtattcatgcaatcttgcttctggtgttctttgcaatatccataagcttgtctagcagcttaagctcttgcaggacaagctgacaggaaagacaggctggggtctggctttatcccctgtagggtctacccggatctttccctgttgctgccccctttgcactgaagtgtaggaagtttgcactcagtggtggaggaccgaccagaagtccaaccaggatagggctgagaaggagccaatcttttatgtgcaggcacctgaaagacgatgcatagcaatacatgaaacgtcaatgagtatacagtgccggctgtccatcctcagcatgatcctattaaggtaatggataatactatccattacatgccacactataagcccttcccttatccaaacgtgaaggcacacaccatgcactactagggagttactccagagagcttcattcgaactaccaactggcctacatatgacaagactgatcatgtaaaagcattaataaccttgcacctttgacaaactataatgcttcaacttggatggat

SEQ ID NO: 50175 - DNA, 533 bp, Gossypium hirsutum
  Clone ID: LIB3829-014-Q6-N6-A12
aaatcttgtaaaaacttcaatagttactggcttcatctttttggagttcactaattaacaattccatcattttcttatacataggcatataatgatcattgatcatggttcttgatagcctgattttactgtacagttctctgggtgtttcgtatataccaacacgttcatcattcgacccatccccatccccgtcgccatcatcatcatctagcttcccactaggatccaatgaaggtatcgaaacaatatgcataattctgcctgggggatagaactggtggttctccaaggcatccgaggaagataccgtttttttactttctgatgatgtatcagctataactgtctcttcctccgttatttctttcgccacagctgcttcttccgctcgggcctgaagatcaacctcgcttgcccgcctcttaagctccttctctagttcgtaccacaactcaccgcctgtgatttcatccacggttgatgtagtaataactctatccattgtaatcaggggttcgtcttcatctgtg

SEQ ID NO: 50176 - DNA, 457 bp, Gossypium hirsutum
  Clone ID: LIB3829-014-Q6-N6-A7
aaaaaaaaaaaaaaagggcggcccccctttttttttttttttttgacccttagacctttaaccatcaattcgggcctaattttgggccttaccaaggggctaacccttccttgggcgtaacccactccccaaccttttttttcaaaattcggagatctaaaaacattttaagggggccccgcccccccccaataaagggtcgggggggacccccatttttgtttcatttttaagcccccccccaaatttttgtttttcaaaaagggggtttgaccccccccccaatgcccacttaaccccccggccaagggcccccccctgacccaagggtccccatttaaaacaaatgtttggcggggacccatacccaacccgttgaaaacaggtattaatttttacctttgacccccgggactttattaaatcaaaacaaaccccccacagcccaaggggtccc

SEQ ID NO: 50177 - DNA, 525 bp, Gossypium hirsutum
  Clone ID: LIB3829-014-Q6-N6-B11
agtggtcaagctctcgctgcaagtcgtagcttattatttcattaaaaactttgtttagagtgcaagatacactacatatatcatcaaacgccaaaaggattaattacactttccaataattacatggatgaggatctatataatacaaaagttgccactaattgaggcacaacggcattcaagggaataacaagggggcaagagaaagaaagaaagaatcatgaatgtcgacaggcaggagcacaaggtaagcaaaacctaaaccacgacccaaaaatattttgcgagcaaaaagcacgcacgcacgcacacccacacacgacacgcacatataaaggcatgcaaaccaaacttaactcgtagctgtagtacatagactacatcgcatccgaggaccaccggcctcgctaccattgtcatcctcctgctcctcctcatattcatactcatataacccctcagaggggcctccagtcccttttttgttggtgctattaatttcagtagattccatcaagcaagtcg

SEQ ID NO: 50178 - DNA, 552 bp, Gossypium hirsutum
  Clone ID: LIB3829-014-Q6-N6-C7
caaccaaaaagaaaaaaaagggtaatataaatatgatcacacatcattacacaagtagcagatcctgattctgatttcgtgggatccactaatccgacaagcaagccccttaaaccttcttggttgttggccatacccatcttccccatttaaacaactccacacccaatcccttgtgctcaaaaatccttctattttttaatctaatctcttcctttctcaaacactccacacttaccaaaccagcacagcacactttttagttaagactacattatagaagctaaagttataacactagtactgaattttcacatgccacaacaattgctaatttggacaaatcaatttcaaagctccctttcacatcatggagcaaaaaacacatgtgaagaaatcaaggaaaataataaagggagggaaacaggagagaaacaaaattcttcaccctaaaaacattggcaaaaagccaagaaacaaagcttttctttttgttctctccaaagagttaaactagaagttggatgattgcttctgtgaagcaaaccactg

SEQ ID NO: 50179 - DNA, 511 bp, Gossypium hirsutum
  Clone ID: LIB3829-014-Q6-N6-C8
ataatgtaagtattatagttacattcattgcagatgagaagaattgttgagcagactcaaatggtaaacaatcgggttatgatcctataatatacaggcattggagcaaacaaactccatgagcaaattacaagccttagacatctccttcaccgaatatgttaatgacagagtgttaacttctttatttgtagttaaacggagacatggtggcaatacatgtgaagttttttaaccccactctcagaataaagcgtagccctaaaagatattttcaattttccttatttcttttgtttccaagtctgatggaactcaatatatatacttatttaccagcaatagaaactcccatcccttcctaatcattttgtcgatttctccacaatatacacctcacttgattatatcttttactctggtaaagactagcctatagacaaatattaatgttcatcttataaataaagagtacatataaaaatctagaaactgaacattcagatataca

SEQ ID NO: 50180 - DNA, 518 bp, Gossypium hirsutum
  Clone ID: LIB3829-014-Q6-N6-D11
gcatcaaatgtattcacataaaaccaaacaagccccaaagggtgtgatgacaaaaaatagccttatcttttttctcttagacgtccaatactgaagatttagcactaaagtaagctataacaatcgttggaaaagggtactttggaagcttggaggctcttgcaaagtctatgatcctcttttgccagtttaatcaaccaaaacttttttttatatggaaacacaagaagcagagggacagacattaaaaaagttcatcctaagacataaaattaagattttgcagagtcaaaacatttatattaagttctcttaaagcaacaaatattttaaaaattatatacaaattccccatgtaaagaagcatgacacaaaagtgcaaaccaagtgcgagaccaaatgtttttctatccaattacatgctattttgctgttggggtttctttttgtgtttgcacccgagaaagaacttgcaattgcaaacacctgtttattatatatgcatacttcttgttcac

SEQ ID NO: 50181 - DNA, 543 bp, Gossypium hirsutum
  Clone ID: LIB3829-014-Q6-N6-D7
gaaagaaaaaaaaaaccattaacagaagctttgagttataaatggattccggattttagacccttttatcatgcctgacagccatgtagaatagcttcattgctgtgtgttgacagttttcttgtttttcatccaactttgaaatgttgcagataatagtagatggatttcacagttaccacagacaatatatcttcgccctacaaactagacaaactcacagtggcttttgttacaatctaagttagcaaccctgttgcacctattgggcggatggggaagattttaatttttttcgtacttctcaaagattcagtacatgtacaacaagtatgtacgtgaatgcagtgctcatcctcgcatcaagtcaatatctgcgtgagggtttctcagaccaactggccgtgaaccgggccaagcactcatagaagggggaatgaaatgttgagttgaaggtgcagttgttggcatagttgagtcaccgcagcgctggggcacagcctcctctgcttttgggctagccagttgcttgttctttgtttt

SEQ ID NO: 50182 - DNA, 526 bp, Gossypium hirsutum
  Clone ID: LIB3829-014-Q6-N6-E10
aatgaaaactctgaaatttatattgcattaataatattacaaaacatcagattgcataaaagattctgagaatgaagatgatgaatttcaggtgtcctgagaatctgattgaaggttaacaatttgagaaactacaagcttggagagttcattaatggcagcctgaacctggtaatcatctgattcactatggttttgccttgaccatccaggtaattgtgaatttaacctggtatattcatttgcagcaaccccggttttctttgatgtggcaagaactcgctccaaatcagcttgtgataatggccttggatctccagatgattttcctttcttctcctcatctaataagtccctaatgggaaagtatgcggctttcttgcagagttcgagaatatcggaccccgtgtacccttcacacaaactggctatgtagtcaaagttgatgctttcttcaatattctcacccttcaaaatcaccttcagaatctcaacccgctccctgcggtcaggtagtccaatctcg

SEQ ID NO: 50183 - DNA, 505 bp, Gossypium hirsutum
  Clone ID: LIB3829-014-Q6-N6-E8
gggccccggctggtttggctggtttaaaggtttaaagggagaggaggttatgctttggcaaaaaaaaaaaaaaagggggggccccccttttttttttttttaaccagcccggtgatcctggggggttttttttcttctccgattggtaaataacaagggccattgggcttaccctcaaggtcgggcctttttttggccattaaaccctggccccccccccaaaaggcccccggaaatgggtggaaaaaaccaaccaaggggggatgccccgaacctttttttaaaagcctttaccggaaatttccctttgtaaaggggaagggccagcttgcttagccgcataagcattgggggccctatggggggggggcttttaagggggggggggacccctttttttaataataataataccgggggaaatgccctggtttttgggggccttttcctttttcctgggtactacccaaacctgggttcccaaaacccttttccccccccccgg

SEQ ID NO: 50184 - DNA, 494 bp, Gossypium hirsutum
  Clone ID: LIB3829-014-Q6-N6-F10
aaggagccattttacttaataaagtccctatttttattacatttttttattccatttcgaaccaatcaaaccgggggtataggggacccaggacattacaccccggaggtcaggggccacaaagggggggggggggggaggggggaccaaacaggccaaaaggggggggggggaaaagggccaaaaataccaaaggccaaaaaaataagggggggggggggcatggaaccggagggggggggggaccgggggggggggggccggaacctgcaggggggcgagcggaaaaaagggggggggggggtaccagcgtggggaaacagggggaggggggggggccggggcgaaagggggggggggggagaggccaaaaaacaaacgagccgggagaaaaaaggggaaagccgggggggccaaatgggggggggaacccacacaaaaggggtgggggggaggggccaaaaaacaggcgggaaaacgggcgagccaggggg

SEQ ID NO: 50185 - DNA, 523 bp, Gossypium hirsutum
  Clone ID: LIB3829-014-Q6-N6-H11
aatacatataaacccatgtatgagacctttatttaatatgttgatcctcagcaaaatcacgggcctcgttgttggaatagggagcccacatcgatgacctgcttaagctcgtccacgtctaacaacaacaggcgggatgaaatacccaaccacgcttttaaacataaacacgtgtggttaggacctaaagcatgggccggaaggccctcatggggaaaactactccagacctgaccttggtcactacaaagccggaacgtaaacatacctgctgtggcaacgcaaatcgaccccaccaccttgcggtatcttacttagatactaaaataggccaacaccttaaggttaaccagaactaaaccgaaagccgtagaaattgaaggatggcctgaaacagcaaattcagaccctaaagactgtatatgagaccttaccgtagagtaaacaattggagattacgaagggtgctgtactgcttaaacaaatctactccttggaatactccttggcgaccggtgaagaa

SEQ ID NO: 50186 - DNA, 600 bp, Gossypium hirsutum
  Clone ID: LIB3829-015-Q1-K6-A10
cggccgcgtggggcagtgtgtaacaattttgtagttaatagacagagagagagcgagagaggcagagggcatatgcccaccattaacgcttgtctttcaatccacacgcttcaaccctttgcaaagttattctttgttgctgttgttggtgatagagtgagttttctagagagccaaagttcaaaagaagagaaggacccagggccagtgagttagagagagagagagagagaagtctttaccttttctttgtgctcttccagatgctctttcaatggggaaaaatgaggacccagatctgcagcaaagagagcagaatcttgaatcagggaatgatcaagggcgtccagggagctgttggatgcttttctcaaggctttcaaacgacctcagtttcaaatgtgtttttgttttgtttcttagtttgtcggttttgttgccagggatcttctggatccttccttaccgttctataaccactggatttgatgccaaacaagctattaagctcagtgcctcagttcgtgcatactttaaacttcagaaaccagtttcagagcttgttcggtatgttgaaaagttagaatatgatatctatga

SEQ ID NO: 50187 - DNA, 464 bp, Gossypium hirsutum
  Clone ID: LIB3829-015-Q1-K6-C9
atgaaaaccctcttttatatgtctcgagtaactcgttgctttcaatcctaaagccacgcaaatcctgtggggtgaaacagaacaccctcgtagtaactttacaccaaaaaggcaatgggaaaggagcaacaggatatggtcaccgaatggaaaatccaccaaggcacatagataacggcaagaagaacccggggtctggctcttctcctgctgatctccacatccctgaggacctaccacacacgtactgctgaagaccatggcaattgctaacaggaaggaacagagagctacagctgatagtctacacaacctgacatactgaaaatacctgcaccgcaaaacaactactaactgacaggtaatgcaagcaacgatttgaaggctaagcgtattacacctaagcattatgcaacttgccatcacgactgatgaagaacttgacaccttgatcaaatgaacca

SEQ ID NO: 50188 - DNA, 558 bp, Gossypium hirsutum
  Clone ID: LIB3829-015-Q1-K6-D1
ccccgcgcactgccacgcggtctcccacgctcactaccactcgtgctatcctcgtctcgtacgatcacactcctcatgtgctctgctttgttcttaataatgctggcatacaagtctgaccaactacaaccaaacaggttattatatctactgtaattatgactgtggagaaagcaataccaacttggaatagcgtgccatcatacttaaccgatttacaatactggggataatgcaattgttactaactgggaactatcattgtgcttcaccgttgacactctggggcgtgatacattattgattggtatttaactgctgactactacacgcgcgatgctgacagtccctggcctgaacttatcattgcctgcgggacaggatcctacaccaatgttgtatacagccttgctctaggtgacaactctgccagcatgccaagatcagccatcgctatcataattggccttacttttagctacactgctctgaacatgacagcagttgcctgtccttagcaatgttaagcaccattgctacctgtgctgccatgtgtgc

SEQ ID NO: 50189 - DNA, 519 bp, Gossypium hirsutum
  Clone ID: LIB3829-015-Q1-K6-D12
cggcatcctgtgctgaagctgtatggacatacaatctcctacccttactgaccaggcttactaacaagccaggttgaccggccagcactgattacaccgctggcttttcttaccacacaaagctatagtaccgacctctgctgacctggccgagcataaaaatgctatccagctacagacctttatgcagtgactccccatttacccaacatgtcacaccagcatattcagatgacgtaccagctatcatctaatggtaccacatcacatgggagtgtggtctaccactcgcttaaccttactacctcaaagaatactatgtgcaaaatgtacaactgcaacgcatcaaccctcatactcctttaacacccataacacacttcctacctcactgtactcgctccttatctaatagttggttggacatatcaaggaaaaacgaatgaaaactccaacacaggtgggacttattctgcaagatcttgcctgagaatatgatccctgatactactatgacac

SEQ ID NO: 50190 - DNA, 524 bp, Gossypium hirsutum
  unsure (1)..(524): unsure at all n locations
  Clone ID: LIB3829-015-Q1-K6-D4
gnaaaatcattcccanananaaagattaagagggaaggagctgatggcagcaataacaagcgcggtgatagccatagcgggagtgatattgggatggatagcaatcgagatcgcttgcaagccttgcctggagaagggcgtgaagccattgaccgatctcttaaccctgattacgaccccgacgatgatctccaagcccctctcaaccctaacccagatccccaatctcaccctggtatttcttcttccacttcatccaaacccctacaaatttaagggttgttctaggcaaatttgtgtcgatttattttctaccttatttgtccaggtgatttggtattgttatgtttgaactttgaatgaatggtgtggttgaattgttatggtactactatgatcacattcaattgtaccgttgttggcctggttttggtttgtttcaagtgacataacttggtttatgcaaccatgcctttcaaacataacatactctacagattattgaattgagtgcaggatttttt

SEQ ID NO: 50191 - DNA, 581 bp, Gossypium hirsutum
  Clone ID: LIB3829-015-Q1-K6-D8
ataatactttgacgtggaaacaatgagcgagcacgcaatcttacatggcaagctggagtctggtgcattgcactatgtgtgctcccaatgtggcaccatgtgcgcgccctcatgccgaaccatgggcacgcacactgagctttgaaactgacatagttgccatgcacatgaaggagcctctaaaactccaagcctagctgtgtcgctggagtataggtgcattactgaaacgctaaaactgcacaacatgtctttaaagatgtgggccacgcacaacaagaccgtaacttaccaaatgcttgaatgagatgagcactaggaacacatatgctatgcgattacttgtgcaagactctccccacatagcgacggccacagcggcctacggcactgaactctccattatgaaaagctccaccaggagttgggacattccagcactctgcttcagcatatttatggaactcacagggtgaatagctggtcatatgctgagggaaactgatttaaaggattgaccatgatgaggaaagatccatgagcgaagtcggctgcgtattactattactatcaaactgatc

SEQ ID NO: 50192 - DNA, 559 bp, Gossypium hirsutum
  unsure (1)..(559): unsure at all n locations
  Clone ID: LIB3829-015-Q1-K6-E1
gtggntacgaaacttatgctgtggcttntaaaaatcaaggccccacctccccccgctaaacattggctccttcgaggaatagtagcaattcagcgtcgcatttggacccttcgcatcgtgcgcctatcgatttggttacggttcttgacgtcagcggtagcatgaccggcgctaagctccagatgttgaaacgcgccatgcgtttagtcatttcgtcgctcggctcggctgataggctttccatcgtggctttctcggctacttcgaaacggttattgcctttgcggaggatgacggctcagggtcaacgagctgctcggcgcattattgaccggctggcctgcggtcaaggaaccagcgttggcgatgcgttgaggaaggcaaccaaagttcttgaggatcggagggaaagaaatccagttgctagcataatgttgttgtccgacggtcaggatgaaagagtccaatccaacgcttccaatcaacggcaccattcaagccacgcctcgtccactcgtttcgcccacattgaaatcccggtccacgcgttcgggttcgg

SEQ ID NO: 50193 - DNA, 581 bp, Gossypium hirsutum
  unsure (1)..(581): unsure at all n locations
  Clone ID: LIB3829-015-Q1-K6-F10
ttcanatatgctaatacattgcttattgaatctcatcaaactctctgattactcttaaatcctgttcttatatgttttttcattatacctattattttacagcaaccttgagaaagaaagaagagcttgattcttgccagttttttcccttgatttggattaacacacaagtatgctttttttgtatgacaatttttttttacatgtttggaaaccaaatattcatttgtttgtatactatagcttcatcacactttgattgattcaaatctaaatttttgtgaacaaatattgttgtacaatattagttgcatcttctagtgtctttcctttttgcaatatataactgcaattgagtatagattgaaaatcgagtctatagctgtatacatttatttgaagaagcaatttgattgtcaagagttgttctaagtacttaggggcaatataaataagaaagataggagagattaatggnagatgttaactataggattaaaggtggagacttgtgacaaaagagccctgctttgctataggacagttctaagatacctgctttgctatacgataggggaatg

SEQ ID NO: 50194 - DNA, 470 bp, Gossypium hirsutum
  Clone ID: LIB3829-015-Q1-K6-F3
gcctgcttcaggccctctcttgccgcgaccagcccgctgggtgaggaacctgccgtgtaagccagcggattgagaaaaggtgcacctgttggcaagtgctgccctatgggcctaacactgcataccccgggcatgagcttccctgggaaggtccacgagcccggaaatttcacgaacatgaaagtcgaaatgactgttgagacctacaatatctacgtattcaacgtcctgaaacaggtccatgcacatattcggcgtctgcatgcgaaggtatgtggaatcatgatcagcttcttgaatgacatattcaacgaaactcgcccaaaaagtattgagactggccttgcacagcatgctgtccacgctctcttacagagagatccataccgatgttagacttgttcttcctggtgaacttgcggctcacgacgtgcccgaaggcaccgcagccggaaccaagtttactagtg

SEQ ID NO: 50195 - DNA, 445 bp, Gossypium hirsutum
  Clone ID: LIB3829-015-Q1-K6-G2
gtggcacacgatatcattccgtgtagggatgcacggctgtgctcgcctagcgcagactaccaccactaccgcttgtggctgcacctgaagtgtgcggatctgaggctccagggggtagaacatagaatagagccttgcacgaggatttttgcggcacaaggaagagtgcacccctgttttatatttggggagcaaatgctctagtgtgctccaaatacaattggacgtgtccaatccagattgactctcatttctctaacttggtgacgctgcaggctctgaaagcatacgtcacctcatgccgtgcgcccaatcacagaatgtgtgatgaaaagcttcacccgcacgctgaccaagttaatggtagcattcagagctcggccgagaacgatgacctgctcgagtatacggactgccaatcagatttgctgaaggcaacttgcca

SEQ ID NO: 50196 - DNA, 589 bp, Gossypium hirsutum
  unsure (1)..(589): unsure at all n locations
  Clone ID: LIB3829-015-Q1-K6-H10
agcgttcaagcttttggagcagatcaatttgatacacaagaccctgaggagtgtaaagccaagagttcattctttaattggtggtactttggtatgtgtgcgggtaccttaacaaccctttcaattttaaactacatccaagataatcttagttgggttcttggatttgcaatacctggtattgtgatggctgtgggactggttgtttttctgcttggaacaatgacttaccggtatagtgtgaaaggggatgaggaaagcccaattgtgactgttggtcgagtgttcattttggcagttaggaaccggaaaacatcgtattctgcaattgcagcagaggaagaagcccgaggaattcttgcaactgaaagttccaagcaattcaaattcctcaataaagccttgcttgctccggatggttncaaaggagcaaggagaggtgtgtagcatcagaagaaggttgaagaagcaaaagctgttataaggcttgcaccaatatgggctacaagcttgatttatgcaattgcctttgcacaatcatcgaccttctttactaagcaaggggctaccatggacagatcaactgcaa

SEQ ID NO: 50197 - DNA, 580 bp, Gossypium hirsutum
  unsure (1)..(580): unsure at all n locations
  Clone ID: LIB3829-015-Q1-K6-H11
gctttgagtgctttggtttatcccttgcttactcaanacgatttgtcccatgtgttttcatctgttaggagggacctcaattttattgatcataacaatgaccttgggtggaaagaagatcaacggtttcggcctattgttgttgacccggggctttacctagcaaggaggaccaaaattttttatgctacagagaaacgggcaatgcctgatgcttttaaaatattcacaggttcgccgtgggttgtgttaagcagatcctttctggaattttgcatctttgggtgggataatctaccccggacacttctgatgtatttcaacaatgttatgttatctgaagaaagctattttcataccgtcatttgcaattcaccagagttaaagaacactaccgtaaacagtgatttaagatatatgatctgggacaatcctccaaagatggaaccccactttctcaacatttctgattatgatcaaatggctcaaagtggagcggcatttgcaagaatgtttaaagaagatgatncctgtgttggacatgngtagatgaaaagatcctcaagcgcaagcgaaacca

SEQ ID NO: 50198 - DNA, 365 bp, Gossypium hirsutum
  unsure (1)..(365): unsure at all n locations
  Clone ID: LIB3829-015-Q1-K6-H12
gnatcgtttgaggctcctatttttctcaacactgatggggcagtgcaattagtatctggaaagtagttgttggaggagtggttcgtgatgccaatggagattggatttttggtataaccgttaccttggaaaatttttatttttaatgctgaactttggggcattttgaagggactcaggttaattcaacgaagaggtcaccataaagttatcatacaatttgatagtaaaaaaaaaaaaaaaaaaaaaaaaaaaaaaaaaaaaaaaaaaaaaaaaaaaaaaaaaaaaaaaaaaaaatataaaaaaaaaaaaaataaaaaaaaaaaaacaagcaaaaaacaaaacatataatataaagaaaccaa

SEQ ID NO: 50199 - DNA, 596 bp, Gossypium hirsutum
  Clone ID: LIB3829-015-Q1-K6-H7
ccccgcgtccgcgctcagctgaatctttgctaccggcgacctctgatatctctcatttggagatgcagaagagtagccataaagttcacaagcaagagaatcccaattgcttggaattgatggacgactttctggagatggagaagttggcatgtctgccaaatgatgctggtggagctaatgatgtttcaagccatccaggtaattatgggaattatagagcagaaggtaatatgtcacgcaatgctgtccaagatcaggacatcttctctgtgcaagagtttggttttagtccatcatcaaagcagggttcttcaagtgcaagatcctcaacaacagagcttcagcacgatgtggaaaatctgcccttccaaaagcttcagtcgatgatttctacgatatttgagtctcaaactaaggactcgaatttggggaaggttttggaggatatcaaatgtgctattctggaaatacaaggttctctgcctcagcactgtttatatgaaggagttcaagcaggtcatggtccctctgatccaaaggatgtatctggacagagtttgatattcttagatgaagagaatattactaagaaa

SEQ ID NO: 50200 - DNA, 524 bp, Gossypium hirsutum
  Clone ID: LIB3829-021-Q6-K6-C1
attgttacagctggggaacattcaaatatggagaaagaatggagaattggatgatgagatcggggacatcctacacctatggatgcttggatgttattttaaataagcttggcatgaaggaagctacctttttgccgaccaataaagtaaccgatgatgagcagggtaagctatatgagatgggcgtttttgattttcgaacagccaccatgtttcttgctcctttggttacagtaattctcataaacattgcagcatttgttggagctgttgtcaaagctttggttgtagatgatgatggagatcaatattgggaaaagatgtttgggcaaatgtttctttcgtttttcatattgatttcaaattttgcagttattgaagggatgatcatcaggagagacaaggctaagattccattgtcttctactttgtggtctgttgtgttttcaatgtttatcttgttgatcggctctgtgattgtgggttaaattatggcattggaagaataaagaagactttaatct

SEQ ID NO: 50201 - DNA, 363 bp, Gossypium hirsutum
  unsure (1)..(363): unsure at all n locations
  Clone ID: LIB3829-021-Q6-K6-C3
tgctgacaggaattaacatggggggggccgtgctnccgaccaacatcttgtgggttaaccctgactgtgggctcaagactccctttttttttgtggtcaaaccacccctaatcgggggggtggtggtccaanctctcctacccatataccccnccatagataaatctccgctgttgaaatgctatgcctaccacttctataataaaaaaaattggtgtaatgtgatctgtttatctttgaataactttgtttggtggttcgatctttgttacatgcccttggacgttctttgatttccttatttttgggttagcttttatctgatgataatgctccttttgtgtgattattatgtttatccgg

SEQ ID NO: 50202 - DNA, 583 bp, Gossypium hirsutum
  unsure (1)..(583): unsure at all n locations
  Clone ID: LIB3829-021-Q6-K6-D6
gcgttcgggnattccttagctaatgtttatattcaaaccctaagattccatccaaaaagctacatcattattatgaaagtttccagaggtgggctgccacttgngaaagaggagatgcaatgtccgaatgatatggatttactgtcagatccccgagtagaaaacgaagtctcttcatgtcgtgctggtgcagaaatttcttgtatcatcaaagatttgctggatgcttctactggcatggatggaactaaagcactggcaaaatacttgtccattgggaagcaattttaccgggaggcttctgagttggatgaaaaaaatacatcactttgaggctggcattcgaaggccttattttcatgtgaaggaacttgacatcagtcaattggagaactggcatgaatatttaaacttcgtagatatgcatggtgactttgattgggctgttaaactttatgagagatgcctaattccatgtgctaattatcctgagttttggatgcgttatgtggatttcatggaaagtaagggtggaagagagatagcaaactttgcacttgccagagcagcagaagtttttcta

SEQ ID NO: 50203 - DNA, 466 bp, Gossypium hirsutum
  unsure (1)..(466): unsure at all n locations
  Clone ID: LIB3829-021-Q6-K6-E1
caaactgtgtctgcatctgtgcgggggtggaggggaggaaacccacaattgcaaagtcggtaaaatctactgctccagccaggcgtggaaagaaatagttaaggtctcaaaagtttgaagactgcaaaaacatctgcagtgggtatttttactggtcaattggtgggagttctgggggggggggggctgaagttgttggatttaggggacaagcttnctcgagcaagagagaatcgtttacaccaagttgattgtggtcaaagtttggaattctgaaaatggcttttaacatgtaatcaatcaataattgaaaaaaaaaatcatgttaaattcatctcttttatcttagcacttagaattgattgcagcacatgtatatttgtttttccactttgcacccttaaaggttagctgaggatgtgttagtgggagtttatattaggctggtgggcggaaaattcataca

SEQ ID NO: 50204 - DNA, 385 bp, Gossypium hirsutum
  Clone ID: LIB3829-021-Q6-K6-E3
gcgttctcggacgcgtgggaaaaatatcagtgggggggggggaggggtcaaaaatagctatttttgccaattaaaccctaaaatctttgggtgcaacaatgctccaattcgccttgttgaagaacaggacaagcaagcactcggtaccactattttatgtgccccttgagcactctaagcaaagaggagggggagtcaccagcccatctatctgactgggtaaccgagaaccaaaagttaccaatctgctgtgagaagtctgtgcgcataacagggtctacagactaattgccgaaataagtccttgttcttgaggaacgacttaacccacaacaagagaaagtccttgaaaagcaacctttaatcgatgatgatatagggtcat

SEQ ID NO: 50205 - DNA, 238 bp, Gossypium hirsutum
  unsure (1)..(238): unsure at all n locations
  Clone ID: LIB3829-021-Q6-K6-F2
gggggggggggggttaaaaaataaaaagttttcatgtgatgggtaagtccgggggggggggnaacttacctttgtcaaatgaattcacttgactcgacatatagagaaacctcattttttttttttttccaccgccccaaaccctttgtttgggtggtggggggcaaaanctnccaatncnnnantttcattctattgagagaatcaaatccccntaggaattttattgttcantttg

SEQ ID NO: 50206 - DNA, 602 bp, Gossypium hirsutum
  unsure (1)..(602): unsure at all n locations
  Clone ID: LIB3829-021-Q6-K6-F4
tctgccaccgtggnaagggcaagggcgtggtcaaagagggagcgccactcaaattcctaaaccctaataacctaaatagctttattgatcgattggctcgaattaatcgacgaaatgactagccaatcggtgtctctcccgccggcatcccgccggaattcttatagaagaggtccttctgcccctgagaagtctcacacatccgacaatgccaagccgacttctccttcctctgttggtggtgagaggacggtgaagaagctgaggttgtccaaagctctcaccatcccggaaggaaccactgtgtcggaggcttgtaggcggatggcagctcgtcgtatggatgcagtgttgctcaccgatgccaatggcttgctctctgggatcattactgacaaggacattgccactagagtaatagcagaagggttgaggccggagcagactgtggtatctaagatcatgacatgtagtccaatttttgtaacgtcggactctttggccatcgaggcacttcagaagatggttcgaggtaaattcaggcatcttcctgttgtggaaaatggtgaagtcattgccatgctggatattacaaaatgcct

SEQ ID NO: 50207 - DNA, 578 bp, Gossypium hirsutum
  Clone ID: LIB3829-021-Q6-K6-F5
gtccgattgtacaacactttgctgaagatgttgacttaaagaatgaatttcactgtgacatgaaattttattcagctgatgaacttgctcaacatgtgccaacttgcaaatatagatcaatgacctgccaaaatgaggttgttatgccaaatattcaattagccaaatggggaaccatgattcagtttgcctttataagatgattccttgtgaacaaaactgctcggctagcctcatgagacgtgatatggatagacactgcataactgtctgcccgatgaagcttgtgaactgccctttctattcagtgggttgcaaatctgccataccccaatgtaagattgaagaacatcgttcctcggactttcattctcacctgctatatattcttcaaggcattcacaaggaagcatctgtagaggttctaagaaaacgagtggagcaactactacagaaatattctagtaagctagcgaacatccgagatttgagatcactaacatacaaagtcaaggatcttgatgcaaagcttgggccgctgaaagtttgtgcaataaacgaagttgatgtagccacaa

SEQ ID NO: 50208 - DNA, 582 bp, Gossypium hirsutum
  Clone ID: LIB3829-021-Q6-K6-F6
tttctttgttgaggaaactgtacctccatggggataccgcaagcttctaggagctgttgttgtgatagcagcaaatgctggtggtgcttggactcctattggtgatgttactactaccatgctctggatacacggtcaaatattcacattgcagactatgaagggtttgataataggtgggcttgtttctctaactgttccgttggcgcttatgtcattgactagtgaagtaaacgggaaaggacaagattctcccaatattttggcatctcaacaaatggctccgagagggcaacttgttttctgtgttggtattggtgctttggtttttgttccagtgttcaaggctttaaccggtttgcctccttttatgggcatgttgttcggacttggagttctttggattctgaccgatgctattcattacggtgaatccgaaaggcaaaaactgaaagttccacaagctttatcaaggatcgatactcaaggagctcttttcttcctcggaatccttttgtccgtgagctgcctagaatcagctggtcttcttcgggagttggcaaattaccttgatgctcatat

SEQ ID NO: 50209 - DNA, 601 bp, Gossypium hirsutum
  Clone ID: LIB3829-021-Q6-K6-H4
ttggcttatgaaagcattgcctttaatcgccgtggtacccttctcgccgctggatgctctgatggaagttgtgtaatttgggattttgagaccaggggcattgcaaaggagcttaaggatagagactgttccgctgctataacaagtgtctgctggtcaaagtatggtcataggattctagtgtctgccgctgacaagtcattaacactttgggatgtagttagtggtcagaaggttacgcgtatcgttctgcaacaaacgcctctacaagctcgtttacatcctggttcttcaatgccatctgtctgcttagcttgccccctgtcatctgctccagtgattgttgacttcagtactggagatacaactgcactcccagtcaccgttcctgatatgggaaatgttgttgctcctccttcacgcaacaagttccctgatggagctccttacacattgacggccgcatgctttaacaagaatggagatctggtatatgtggggaactcgaaaggtgaaatacttataattgatcacaaaaacgttaaagtgcttgctatggttccaatttctagtggcgctgttgtcaagaacattgttttca

SEQ ID NO: 50210 - DNA, 534 bp, Gossypium hirsutum
  Clone ID: LIB3829-022-Q6-K6-B4
gttctaacacctggggcatggggggacaacatgatttccctcaacagcacactgcaagcgtgcctttgggagaggggttctccttttcttccttgcaaaacacgcagtggtctccttgtagcaaaggctcactcttttatgatgtggttgaaggactcaccgttggggggggaccttgaattgaagaatgccccatctttcccggagctgaactcaatgcaactgattgaaggatgtttcattagacgcggtcttgtacctgcattcaaggacataactgagagacttggattggtgaggccaaagaaatttgctagactggctttgctatctgatgagaaaagagagaaagccattgaagcttatatagagggaggtaaggaaaagttagaaaagctgaagtcaaaagttgggagcaaaagaacaagggtggtgaaagaaactcagaaagagaaaatttataaggagacctttgtcaaatcctaattaaaaaaatggcctaacttcactaattttttttgggaattctacctc

SEQ ID NO: 50211 - DNA, 444 bp, Gossypium hirsutum
  unsure (1)..(444): unsure at all n locations
  Clone ID: LIB3829-022-Q6-K6-E3
acgnaaccatatctatgttctgtggggaggggtgtggggtgcacttgattgttcctatcactccaaacacccaatggcatagataatttttctgcataaatctgatgaagaattcatgaataaccaatccatccattgcttgtattttgctcaagacatttctgtaggccacgaggggggggggtactccaaatctccttgacagcttgacagtcgcggaaggcatgttcaagagactcatcttcttgtgtacacctgggacaagcagcagaatttcgcaaccttcttttctgtaaatttatgtagatatggataaaatttctgtaggctctccaaaatgtaattttaattttttctgggagctctgtaagccttcttttttttttgtatacctgcttagatgctctctattgtaaggcaggctccacttcaaaaaaaacacaa

SEQ ID NO: 50212 - DNA, 533 bp, Gossypium hirsutum
  unsure (1)..(533): unsure at all n locations
  Clone ID: LIB3829-022-Q6-K6-H1
cgtgggcggacactcgggcgggcgcgtggngcggacacataaaacagacgcgtgggtggtatttcatcgctgaggggggggttctanctgccanaacttgctttctgtcaaagaaggtggtttctttttacttctttttttttgtaagcttaagttatttgccttgggggggggggggcacttangatttttacctccatcattttgggtgagatgaacttatactataggtgccatagattctataagacacgattcagatctccattgttgattaaggtgttatttctctttcaatttatatttattctgatcccaaatgtgcaaatgatcatgccgtatggtaggatggtttttatggtattgcagttgagtgcgtgctcaaacaaatgactagtttaattttctagttgactcttggttctgctcattgggtgtgtactttaaacttcgggagacgttatccatttaagttgttaaattgtttactttacgaggcgtgctggctacatgtgatcctagttaatctttac

SEQ ID NO: 50213 - DNA, 566 bp, Gossypium hirsutum
  Clone ID: LIB3829-022-Q6-K6-H4
taggtttcctcttcctgtttcttgacttaatttagggttttcttaggaaaaaaaatttcgtttcttttttctactcatggattacagtagagagaacgtagttcatgtaattccgacaaatgataattgggtcccgaattcaagtgtcccatcagtttgggcaacagaagaagatggtgggggttggaacaaccaagaaacctccaccgacacgcttctttccaattccgaccagccaccgaacaagaaaccaagaaattcccaggatttaaacactaggtccagagccataggcaagatgttcttcaagaccaagctttgttgcaagttcaaggccgggacttgtccttacatttcgaattgcaacttcgctcacagcaccgaagagctccgccgtccacctcctaactggcaagaaatcgtggctgcacacgaagaagagaaagggatcctgtcggagccgagggaagaatttcaaatcccatctttagggtctaccagtttctcaggagaaacacagaggtcatataaaggaaggcattgcaagaagttctattcggaggaag

SEQ ID NO: 50214 - DNA, 544 bp, Gossypium hirsutum
  unsure (1)..(544): unsure at all n locations
  Clone ID: LIB3829-023-Q6-K6-B3
ggcaaattaatgaatacgattggagaaagattgaccatcctagggggggggcatatggatgcttattttgagaggatggcgaagttgtcgaacaatatgaaattgtcttctatgtatcaggttcatgttgaaggatgctatgggtggtgagaaagaataaatggcagcagaggaggaaagttgaagggcctaaaaagattgagaagtgcacagagatgctgctcaagagcgacaagcacagtccggtaggcttgctcgtggtcctggcttcaatgctactganagaagagcacccatggattttagtccacgagggccaatgttatcttctccagtttctcaaatgagtagtttccgggggatgcagggtcaaccccatggttttggggctcaggatgttcgcatggatgacagacagtctttggagtctaggactctatcggttcccttgcctcaaagaccaactggtgacgattctattactttgggcccccacggtggccttggtagagggatgtcttttggaggaccacctgtaatgtcc

SEQ ID NO: 50215 - DNA, 576 bp, Gossypium hirsutum
  unsure (1)..(576): unsure at all n locations
  Clone ID: LIB3829-023-Q6-K6-C1
atcttgactccttttgtctcttcaagagaggttttggaaacgcctcctgcttccccttcaagtccccagtgtcagtctccaggctacctatcagatgatggatcgccaaggcgaagagggaaagcagacttgtctgtttttaaggattttgttgaagattgccttgggtgtgaacccaaatcacttgagagacatgctaagccaaagccacagagttcaaatgatattcaagttgagaagttttcaggtttgcgtataaggaagcaattggtcagccctgcaaagctaagtgagcacttgtctgacattcgttttgttcggctaccgactttgaagaatttgttggtgggagacaccctttatggatgttgggcaaccataggagtactgattgaaaaggggattccaaagactagctctattgggaaaagctatagcatatggaaaattgggtgcttagataaaaatactgtttctcttttcttgtttggtgacgcttatgagcagaacagtaaggagcangttggaaccgtttttgcattattcagttgcactgttcgcaaagacaccaaggga

SEQ ID NO: 50216 - DNA, 594 bp, Gossypium hirsutum
  unsure (1)..(594): unsure at all n locations
  Clone ID: LIB3829-023-Q6-K6-C5
gcgttcgccacactcacgtgnanactgaaccttgcaaaaggcaatagcagtgcccatattaccatcgtcccagatgacttgttccttgtaagagtgagtgaaaggcactctctttcaacctccaacaactttccttttaaaaaaatccgggcttttaatggccgccttatcaattgggactcatttttcaccctcatgtcgtttcaagaaccgatctttgcacgcgccttctgtctactctttgcctagctttgggacttccctttatagaagcagagccccaaggttgcttagcaatggagttcttgctagagctgaggataaggccaggggctcttcttctccaagtcaacgacaagttcaacccaacaatgaagagcagattaaggggctgtcctcagaatctggaacatgtgatcccttatgttcggttgatgaaactagctcgctggagtttgaagctgcttaccagccaaagactgatttattgaaaactattgcggttttcacagctgctttaacggggactctggcaattaacctaacatgggttactgaccaccaggatattgctatggcattgctttttggaat

SEQ ID NO: 50217 - DNA, 561 bp, Gossypium hirsutum
  Clone ID: LIB3829-023-Q6-K6-E5
gttcataatggacttttgcgggggtgggggtgggttttgaaagcggagtgtgatatcttgaaggaattggtggagagaggggggcgattatactttgacgtttgcaggacattctcttggttcaggtgtagcagccatgtttttttttttggttgttcagcatcatgatagggggggggggggggcgacagaaggagaattaggtgttatgctattgcacctgcaaggtgcatgtcgctaaacttagcagtccgatatgcggatgtcatcaattctgtggttcttcaggatgacttcttgccacgaacagctacgcctttggaagacattttcaagtcggttttctgtttgccatgcctactttgtatgagatgcatgagggatacctgtataccagaggagaagatgcttagagatccaaggaggctgtacgcacctggtcgcctctatcatattgttgagcgaaagcctttcagattaggaagatttccccctgttgtgaggacagcagtgccagtggatgggaggttcgagcacatcgttctttcttgtaatgccacc

SEQ ID NO: 50218 - DNA, 341 bp, Gossypium hirsutum
  unsure (1)..(341): unsure at all n locations
  Clone ID: LIB3829-023-Q6-K6-H3
ctctctctctatatatatatatatattgggggggggaaatanacttattaagttgataaaaaagaaaggaaggaaaagatgggnacacgttttttttttttttttcnaancaatgnncncatattgggggggggggggganncactnaaanaaancacccctcaatcccgttgcgggcagtaccttatacaggtggctgcgttnaaaaatccggagagctgggctaaattttctacttcccattgcttgctcattccccgttcattgctcctcctttttcttccatctcactccccctctcccttttcttctcccttttttttcctccctcacccttttcc

SEQ ID NO: 50219 - DNA, 586 bp, Gossypium hirsutum
  unsure (1)..(586): unsure at all n locations
  Clone ID: LIB3829-023-Q6-K6-H6
gcgttctggttngaggtcataggattctggcttggggctttagtaattcgaattcctcaatcggtaatgctttggtcactactaatttgccttcatttgtgccaccaaagnatcctgtgtttgaatgaacagggttcatagttggagttaccattggggctgtcttgcttgttagcttttgcatggcgaggtactttcttttggttagatttagaaggaaaagaaacggtaagaaagatgatattgaaacttgggaattggagtattggcctcacaggattggttatcaagagatctatgcagcaacaaaggcattttcagatgaaaatgtgattggttctggaggtaatgggaatgtctataaaggggtattgaaagaaggacaagaagttgcagtgaagaaaatttctcatgaaagtgagcatgggattagagagtttttggctgaggtttcaagtctagggagattgaagcatagaaatttggtgggactgagaggttggtctaggaacgataaagggagcttgattttggtctacgattacatggagaatgggagcgtcgataagagaattttcgactgtca

SEQ ID NO: 50220 - DNA, 572 bp, Gossypium hirsutum
  Clone ID: LIB3829-024-Q6-K6-B5
tgggttccacgctcgtcttgccaggaggtggatgagacttgataacttctatcaacaactcattgatgaacatcttaatccgagtgggctaaaaccagagcaagaggacatactcgatgtgctattacagacatggaaggatcgtgattttctatttgatcttaccctagatcacggggggggtgttattatgaatgttctttttgctggaacggagacaacagcggttactgtgatttgggtcatgagcttcttgatgaaaaatccagattgtttgaagaaagctcaagaggaagtaaggggtctgattgggaaaaaaggatttctaaatgaagatgatgttcaagctttaacttacctacaggctgtggtaaaagaaacatttagattgcaaccagcagttccattgttgctaccacgagaaacacttcgaaaatgctgcataggtgggtacaaagtacctgccaataccttggtgcacgtgaatgcatgggcaataggaagagaccctgaagcttggaagaatcctgaagaattttgtcctgaaaggttcattggcagctctattgact

SEQ ID NO: 50221 - DNA, 532 bp, Gossypium hirsutum
  unsure (1)..(532): unsure at all n locations
  Clone ID: LIB3829-024-Q6-K6-C5
gcgtgggnagatcatgcggggggggttcttcaacaaacatggaaaacaacccaggagcagcaggcccttcttctgcgtgggtggttccaagccaatcaatgagtcaaccactgatttctatcaacatgaattccacaaacctgagttcacaactggngatatctgaaaccagtgcgggggggggaatagttggacctgaatcagctccatggcaagaaaacaggttgcttgttgatgattcttcttttaggtgtgtgttcccttgtgaagggaacgagagaccaagtcaaggtctttcgctctctctttcatcaagtaatcctactagtatcgggttacagtcttttgaactaagacaaacaagccatagtaaccatgatgaccagccagatgatatgaggtttattggttcaagttcaagagatgggttctttggaaagccggcaattgttcaacaacatgaaggtcagttccaaataaggggttccaggtacttgaatgctgctcaagaacttttgaatgaattttgcag

SEQ ID NO: 50222 - DNA, 608 bp, Gossypium hirsutum
  unsure (1)..(608): unsure at all n locations
  Clone ID: LIB3829-024-Q6-K6-D4
tccgcaataatgggnaatttatagtatctttcaagcttctaattcacccaccaaccataaaggagcagttgcagttagacagccttatatccggatagtgggaatggaagagacgaatgaagccagctctcgagggcctgccacattcacccaagaagaggtagaagagttcaaaaaatttgcctcaaatcaagatacatatgaagccatatgctccaaggttgctccttccatatttggtcacgaagatgtcaagaaggctgttgcttgtcttctctttggaggagccaggaaaaatttgccggatggggtgaagctaagaggtgatattaatgtgttgcttcttggtgatccttctactgccaagtcacagtttctcaagtttgttgagaagacagctccaatagctgtttacacttctggaaagggctcatcagctgctggtcttacagcttcagttattcgagatagtagctctcgagagttttatcttgaaggcggggccatggttttggcagatgggggtgttgtatgtattgatgagtttgataagatgagaccagaggatagggttgctattcatgaagctatggagcagcagacaatat

SEQ ID NO: 50223 - DNA, 281 bp, Gossypium hirsutum
  unsure (1)..(281): unsure at all n locations
  Clone ID: LIB3829-024-Q6-K6-E4
cactattttgtcacacgcttttgtggcttttgcatagtctattttctctttctgccggnagtcagnaaccaccacacgcaatgacccagnacccagggnaccaggtttaatggcaaatgnngagatattttcgagagatgaaagggatataaatagagaatattaaagacttacatttcaattatgtgttaatttcaagatttatgtaatatttttaattatgtagtgattcaaagacttatgtaatgtttttaattatgtagtgattcaaagatttatgt

SEQ ID NO: 50224 - DNA, 524 bp, Gossypium hirsutum
  unsure (1)..(524): unsure at all n locations
  Clone ID: LIB3829-024-Q6-K6-F3
cccacnaaaagaaaatcttgtgtagttcttgtggggggtattttcttcatagccaagttgacccctttttcttttttgcgtgtcttacacatttttttttttttttcnccgcncaaactcactttggtggtcgttggggggntctctcanntctnccctctncctcntaacgattggtttgtatactgttggtnaacacagctttttccttctctgtcgttgatggcttgcttcgtgtccttccttctccctttccttgtccatgtctgctttgtgtgttttttttttgtttcctctccctttcctgatttggtttccttttctttttctctgctctctccttgtccccttcccttttcccctcccgtcgtttttttttcctcttccctcctctcctctcctcctttcttttctcttcctctccatttcctttcctttcccccttcctctttcccccttctctcttcttcttttcttctcttctctttccctttccttttcctctttcccttttccttcccctc

SEQ ID NO: 50225 - DNA, 227 bp, Gossypium hirsutum
  unsure (1)..(227): unsure at all n locations
  Clone ID: LIB3829-024-Q6-K6-G1
aaaaactaattggcgcatacaaccttttgactgggggggtcttaaatagcttttcagctgagagaaaccactcccgttgaattgccacccactgttttttttttttcnacnatngctnnnnaaagtgggggggggggggganataaananannaancttaaaatgcacaaagatagagataaagagaaggataaagagcataagaagcacangcaccgtggtgaaga

SEQ ID NO: 50226 - DNA, 354 bp, Gossypium hirsutum
  unsure (1)..(354): unsure at all n locations
  Clone ID: LIB3829-024-Q6-K6-H3
gcctggggggggggggtgccaaaaacttgctgttaggttttctatataaagttggggggggggtagtttttatttttcttcttagggaaataaggtattatttagttnncaataaaccctttttttttttgtnnccgnattctcccntgttggggggggggggcgtttcaatnncnattttnnatattantntaaagaagagaatatgaaagcttggtagggatgaatcaacccaaaattaaaggaagagtgggtaaataccaagtgggaaggaccattggagagggaacctttgctaaagtgaagttcggangaaattctgagactggggaaccagtgggtcttatgatcctt

SEQ ID NO: 50227 - DNA, 599 bp, Gossypium hirsutum
  unsure (1)..(599): unsure at all n locations
  Clone ID: LIB3829-024-Q6-K6-H6
gtcgacccagcgttctctcgattcccaagnaacctaatttttgtgggatttgtgattttgattcacctttgcaaacaaagatgtttgtgagggtggaagtcaaattagagatattttaaatgacttgagctctaagcttgagcttatttctatagagaaaaatcagcccctaaaaggaatattccagaatatggtggggccgagtcttcattttccagcatgtctgatccatctgatacctcatcaggttcgagtaagaatgttgtaggtggtgttcaggatgtagttgatttgcgtgaagatgtttatgaagaagagtcaaaaaagcttaatgtcaaattggtgtctgcaaggcaggtttttgattcaaatgttgaagaaaaagaagaaaagagtgaatcacagagtgactttaggaatgacacttttgttactagggtacatgaatctaagaaaaacttccaaaggctaaagaagaatgaacctaagaatgcatatgagcgattgatgtctgtgggtaggtcatttgcatcaaaacatggagaaaaagaggatgacaatgattgtgtagtattgagttcaaagcaaggatttaaaaa

SEQ ID NO: 50228 - DNA, 326 bp, Gossypium hirsutum
  Clone ID: LIB3829-029-Q6-K6-A5
ctgcgaacaatctagattggctctttgtgttagtaaagaatcgcgaactgctattgttcgctgttgggccgtgggatgtggtcagtgtaacctcatagcctgtctctagctacgctaaacccgtgaaacacctgaatgcccttgtgatgctgcgtaatcccaactctaaccgggcaaatggttaaccaggtaaccccggacaacagtctcccacacatctcctactacttcagaggtcctccgttcggtccgcctcccctcccccgtgatccttactcttgtctgcgtgtggacgacaagaaccttcctctctgaactggacctta

SEQ ID NO: 50229 - DNA, 596 bp, Gossypium hirsutum
  Clone ID: LIB3829-029-Q6-K6-A6
cccacgcccgtccgcaaaaaacgaaacacaagcgcatcgactatggatgacgcggagggaggtctcagcttcgatttcgagggcggtctcgatgccggtccccccgcccccactgcctccatgcctgttgtcaattccgatccttctgccgccaacaataccaacaattttaccgcccctggtggtgtccaggcttcgataaatgatcccgtcgcaaatcaaggtggtggagctggccgaaggagcttccgtcagaccgtgtgccggcattggctccgcagtctctgcatgaagggtgatgcctgtggtttccttcaccagtacgacaagtcccgcatgcccgtctgccgtttttttcggctttttggtgagtgccgggagcaagattgtgtgtacaaacacaccaacgaggatatcaaagagtgtaacatgtacaagctaggtttttgtcctaatggtcctgactgccgatataggcatgcaaagctcccaggacctcctcctcctgtggaagaagtcctgcagaagattcagcagttaagtgcttacaattataacaacaaattttatcaacagcggaatgctggcttccccca

SEQ ID NO: 50230 - DNA, 595 bp, Gossypium hirsutum
  Clone ID: LIB3829-029-Q6-K6-C5
cttttggggtctgttgttctgagcccaaatctccgtccccccccccgactctctctccgtctttctcctctcctgcaaaaccctagatctttcaccccttcaacgtcgttttccggccttcttctcgctcccagatcgcttctcgtttgggctgactgacaggaatggcagaaattacggaagctacaaatatggaaacaaccccggtggagaataacaatgagctggctctcatcactcctgaaacacagcctaagcgaaggaaaaagaagtccatggcctgggagtacttcaccattgaaactgtgagtgctggatgtagaagagcatgctgtaaccgttgcaaacaaagtttcgcttatagtactggttccaaggtagcagggaccagccacctcaaacgtcacattgctaagggtacctgtccggcactcctacatgaccaatataacaatcaattgaccccatataacccgaagaccggaggaagtgaaccacgaaagcggcgctacagatctcccagttcacctttcataccattcgatcaggaccgttgccgccatgaaattgcaagaatgatcataatgcatgagta

SEQ ID NO: 50231 - DNA, 314 bp, Gossypium hirsutum
  unsure (1)..(314): unsure at all n locations
  Clone ID: LIB3829-029-Q6-K6-F2
attgacttagcaaattggcctgctacaatcatgatcaatgtttgctaagatatggttgagacttctgtagagattaaaatttgtttcccaaattattctggtatttaagattgaatgcgtagaatatgagatattatgtaatgttgtgataagngaaaataaatatgcgttactctttttcctttaaaaaaaaaaaaaaaaaaaaaaaaaaaaaaaaaaaaaaaaaaaaaaaaaaaaaaaaaaaaaaaaaaaaaaaaaaaaaaaaaaaaaaaaaaaaaaaaaaaaaaaaaaggggcggccctttttaaaagaac

SEQ ID NO: 50232 - DNA, 587 bp, Gossypium hirsutum
  unsure (1)..(587): unsure at all n locations
  Clone ID: LIB3829-029-Q6-K6-G2
ataaatcaaatgttgtntgaacttaatggaaaatctttatcaacagattcagaaaaagagaaaagttggggaagattgataaagccattcagaatgggagagaagtagacagaaggaacatcgagtatgctgcaatggaccaactagtacaaatggctaacaagaaacgtttggcttgtcgtgggagtaattcatcaaaaagtgcagttcgcaaggtttcgaaacaagttgcattatcttttattaagcgaacgcttgatagatgtcggaaattcgaacagacgggcaacagttgctttagcgaagctgcattacaagatatcatgttttctgtacatccatgcagcaatgaagcaaaatctgttgaaggtattggctctggaactgctagtaatacttgcaacgaaacatcgaaccatcaagccgaagccaggggttcaggtgctgtttgtggtacttttgagaggtacgattctccagatgcccttctggctgttcactcgacagagcatgctgtttccaagtacggatctacgttgaacaaaggtaggaagagggaagtattgattgatgatgtagttgggagt

SEQ ID NO: 50233 - DNA, 402 bp, Gossypium hirsutum
  unsure (1)..(402): unsure at all n locations
  Clone ID: LIB3829-029-Q6-K6-H5
naaaccctaaagtgtttttattattttctccattccctcactctccttgtttcctagccgaaggctagtttccaggccttcaacccccctacttgtaaccggcgaagcaaggtcctccacggtgtgagcacaacgcacggtgcgtgatcgagcacgactctgacgtggcgtgatagagtagcgcacgttgcggggtgatggcgtccggcgcgcgagggaggcgtgtggcctgttggaacggcgcaagaaagggttagggttggggtttgttttgggtttagggtttgggtttctatttttttttgtattttgggcttaaaaattggactgttttggtctcttttttgtttattgtttatgggtcttgggccgggcaattttggcccattacaatagtaatag

SEQ ID NO: 50234 - DNA, 368 bp, Gossypium hirsutum
  unsure (1)..(368): unsure at all n locations
  Clone ID: LIB3829-029-Q6-N6-B3
ccacataaaaatttgtgcaattcattgttttttttgtttacacgatctgtccccaacaaatgatttattacatcaccacaaataaatgacaatttgtccctactttggcagcattcgattaatggcatagtttaatgaaaacatcagggacaaaaccttattaagggatcacaaagacagtttatttacaaacatatatatatatttcaaatgattggagaagttggttggatttcttgtcatatattgtcttgaaaatgggctgaagcattttggcatgtgtgggagtactcaaaagcggtgtngttgtgtagtattcaaaaaggaaaccaagatgtttttcgaacgttgggaaaatgaatgattga

SEQ ID NO: 50235 - DNA, 371 bp, Gossypium hirsutum
  Clone ID: LIB3829-029-Q6-N6-F3
aaacacccccatttcatattcagatttccgagaaagaaaataaaattcacacccttagaggactggaagcaaaatatgcttttgtctccacatatccaattcacacgtatttggatttttatcccccccccccccccctatttatatatttgggtgaggggtttaattatttccatagctttcccgggctatcatgacttgccggagcaacccttcctgggaccggcgactgggccgttggtgggggtgttttctcgggggctgagattggcatgcttttattctcagccctgttcccccgctcccatgattaaattcctccccccccccggggggggaataattggggtggggcccccccagtggaacgg

SEQ ID NO: 50236 - DNA, 372 bp, Gossypium hirsutum
  Clone ID: LIB3829-029-Q6-N6-H3
ggaccaaatttaaaacttttttattgggaaataaactaaccaaaacaacccttccaacccccatcctcgttggaagcctactccaaccggggcggcccaaattccgggttaaaagatttcccggttccccccttcccattgccaaaggcaactaaggccttccaatttcaactgcccaactagtcctccccccaaaacgggcttcttttttgtttacccggttcaatccaaaggggaagaaaaagaaaaaagagggacccaccaccctatttaaagggggttaaatgggggttacacaactggaatcggatggggcaagggctccgaagtgcccctggtgccattggggaaccgggaaatttccctcggggg

SEQ ID NO: 50237 - DNA, 402 bp, Gossypium hirsutum
  unsure (1)..(402): unsure at all n locations
  Clone ID: LIB3829-029-Q6-N6-H5
tttttttttttttttttttttttttttttttttttttttttttttttttttttttttttttttttaatncaaaaaatttctaaaacaaagggaaggggccaaaattgcccggccccagacccctaaaccattaacaaaaaagagacccaaaccggccaatttttaagccccaaatcccaaaaaaaatagaaacccaaaccctaaacccaaaaaaaaccccaaccctaacccttttttgggccggtccaaaagggcaaaacccttccttggggggcggaagccattacccccaaaagggggctttttttttaccccccgtaaaaaacgggcctgataacccacccgggggtgggcccacacccggggaggaactttcttttcccgttaaaaaaaagggggttg

SEQ ID NO: 50238 - DNA, 601 bp, Gossypium hirsutum
  unsure (1)..(601): unsure at all n locations
  Clone ID: LIB3829-030-Q6-K6-C1
ngacaacagcagcagcagcagcaatcatctcaacaattactctccccagctggatcactgttgcagcctcaaatgttgcagcaacagccgacccatcaacagagccaaccattgcagcaattgcctctttcacaaagccaatcacaacctcttggcagcaatggcttctcaacgtcaatgcctgttcaacctcaacaggtttcagtgaaccaaccccaaattcacaagccatttactgctatgagaactcattctggtcttactgacggagatgctccatcatgttcaacctcaccttctaccaataactgtcaggtttcctcattgaactttttaaacaaaaatcagcaagttccatccatattggtgtcagatcctcttgttgagcctgcaaataccctggttcaagagcttcagagcaagcctgatattagaatcaaacatgaactacccacttctaaaggaccagaactatcaaagtacaaaagtactgtgacagatcaattagaagcatcctcttctgaaacatcatactgcctggatgcgggcaccatccagcataatttctccctccccacctttttggaaggtgatcttcgat

SEQ ID NO: 50239 - DNA, 158 bp, Gossypium hirsutum
  Clone ID: LIB3829-030-Q6-K6-E3
ctccgtttcacttctgggcttcaaacgtctcaaatctaactttccccagttcaatcccttttccgaacttgacaaatacgagggacgaagtgctcattgtttcggcacagttaacaaagtggtacatacacaaggtttctatgctttcgtcatttcca

SEQ ID NO: 50240 - DNA, 584 bp, Gossypium hirsutum
  unsure (1)..(584): unsure at all n locations
  Clone ID: LIB3829-030-Q6-K6-E4
cgccgntagnaaaaacaggcagcggctccgttcccagtttgggaacattggtgacgatatgtcgagttacttgcctngagggttcatctcaaggacccgagacaggggagtgattgttccacaatgggccccacaagtggaaatcctgagtcatccatcttgtgggggatttttcacgcattgtggttggaattccgcaatagaatgcatcaccaatggattgccaatgatcgcttggccactatacgctgagcaaaggatgaatgctacattgctgacggaggaaatgggcatagctcttcgatctgaaaccttaccatcaaagggtgttgtggggagggaggagatagagaagatggtgaggaagatttttgtggatgagggtggacgtcaaatgagggccagagtgaaggaactgaaacttagtgctgagacagcttggagcaatggtggttcatcatatgatgcactagctaaaatggtgaaacacagccagaaaaaagctatagaaatcgatgtttaacggcaatgtgtgtctccaaaataaaatttgtggcaattatcatgccaaaggaatatttcct

SEQ ID NO: 50241 - DNA, 203 bp, Gossypium hirsutum
  Clone ID: LIB3829-030-Q6-K6-G6
aacgtaaaagtttttttatagggcaaccaaaattaaattaattggccggggtttaaaaacgtcggaactggaaaaaccctggggttaccaaattaaatcgctttgaaaaaaatccccttttcgccagttggcgaaaaagcaaaaaggcccgaaccgatcgcctttccaaaaagttgcccaccctgaatggcaaatggaacccc

SEQ ID NO: 50242 - DNA, 453 bp, Gossypium hirsutum
  Clone ID: LIB3829-030-Q6-N6-A1
agtaaattgaactattattattaagatgtgacttatattcaagcttttagttccacatgtaaagaaaccattttacataagaattaaactcaggactacatttaatattgcaaacaaaaacccttatttgtgtcactttccatcagtttattcgcaacgttattggttcttgaattaaaagtttggaccggctgctaagatctcttgagtcagcttggtgtccttgccaatcttgtaatttgtgaaggtctcaaagttgttcttgaacagacaacctaatttcaacaatgtgtttttgtatgccttcttgtcaccccaggtgttctctggacgcaggatttccgacggctctccctcgatctcagtggggatctctagcccggacacgtcgattttctcataagttgccttccggaggcttccggggtgaatagcatgggtgatttttcgggt

SEQ ID NO: 50243 - DNA, 431 bp, Gossypium hirsutum
  Clone ID: LIB3829-030-Q6-N6-B4
agttaaatctattgattgatttttataataatatgtagaaataacaagctgacatagtattacacatgccataatatatttgccgcatcaaattttaaaaataacaaaacctatcttaatgaatttaattgctaccatttaatctcatgttctatgttcccttgaagttgagcaccttgatccactaaatcttcctctttgtatagcctcctcaagcacaagcaaatggcaaccccaactaatatacccacacttgccactggaaccatgatccaaacccacagttgattgccatttcctcctatatcagtatcagaaaacgcccacgatttcacagagttgagctcagtttcattgcttgttgaaccaaagaatcccatgaaaacctcctgcggaagataagtagagagatctacaggctaagaacgcac

SEQ ID NO: 50244 - DNA, 453 bp, Gossypium hirsutum
  unsure (1)..(453): unsure at all n locations
  Clone ID: LIB3829-030-Q6-N6-D1
aacgcaaagtctccatatagtgtaagttcattggtagacaagggacaaaatctccagttcatagtcatttctcattgctagtcaaaacatttttagatggaacaaaaagaaataaatcactagactgactacctatctttgtctatataaacatgaaatcccttccttttaaaacaccaagcgataaaaatttcatgttgcacaagctggtaccaagcaggaaaagaatcctggcatcttctttcgcttggaagagtgaaggagctcaggggggattttgtagagatcttcatcaacaggtttaggaggtcgaacaggtnctctcttgggaataggagggggaacggcctcgtatttggagggcttactattgctgcttgtagtgttggcattattaattggcaaagacagatggtgggggggattttggtggtgtttccttggggggtcggg

SEQ ID NO: 50245 - DNA, 336 bp, Gossypium hirsutum
  Clone ID: LIB3829-030-Q6-N6-D2
agcttcaaactagtctgttttactggttaatttctaaacgtgtcgcaataactattctgcaaatattacatttgtagcttctctacaacctaaaagagcaaaaaggtttatcaactggcacacatttgagggacttaattggacagggttttattaccattattctctctgttctaagggctgaagttggacatgcgggcaaggcctttccggttctcctcttgtccagagaggtttgagatcacctctctttttccccaatgtaataaatggcccaagaatgaaaggaacaatgtaaagcaacccagggtggccggggccctccctcaagttcaa

SEQ ID NO: 50246 - DNA, 570 bp, Gossypium hirsutum
  Clone ID: LIB3829-030-Q6-N6-F2
gaaatgccattttggcaagctttgatttttgattttcattgtttcaggtccccagtacacacacactatccgctctgtgctgtggaggtttttaaccatcttatttctcactgtcaaccaattgtatgataaacccacttttgctcttcattcactacaaaaactcgtatatattcagacccaaaacactacattacagcattctatcctgcaggtccgacataaaagtggatgcaaatgagctaagtttctttccagtctcccctgcaatgttcttaaggttcgacatatcgtgttgtgccctggaaagagaatcggttgatgaggtcactagcggggaggccctgatctgcgtctttacccaataggacagccctggagatggctggtggtcctggagaattctgcccagggacttgagcgtcattgtctgctggtcttggctggtcccccaaaaaagggcctcggtgaaatagattggggtttcaagaactttttttgggtttgtgttgttgcctgagccttgggccttttgggggggttgggggatggggttttttttgaaccccc

SEQ ID NO: 50247 - DNA, 345 bp, Gossypium hirsutum
  Clone ID: LIB3829-030-Q6-N6-H6
ggggaaaaaacaacctttttattcattaattctcagccggtccattggaaatcccaaaacaaaacaaaaaaagacccccagcccaataactcaactaaaaaaaaaaaaaaaaaaggggggggggtttggggggcttaatttaaggcccacttttaaacaaaagggattccttgggggggaggaaacaaattaataacctttaagcttgtagggcatgaaactaatggcctggcctttacaaaaggtgtcgaaccccaagattttaaaaaaagccttgggggattcctttttggatttcccaagcttctttaacacccggaccggagggggggccccccaaaaggg

SEQ ID NO: 50248 - DNA, 597 bp, Gossypium hirsutum
  unsure (1)..(597): unsure at all n locations
  Clone ID: LIB3829-031-Q6-K6-B4
ctcgnaagnacagnatccggcaggccttatatcctcctcctccctctcatcgagggccctttcagggcttcgcttcagcccggaacagacaacaacgtcgacgtttgtgtcgaaagcggctcgacgaaggtggccgcagccagcttccggagtgttgtttacgttcacgtcggcgaagatccgttcattttggtgaaggatgccatgaaagtgattaggactcaccttggaaccttcaagttgttagaagagaaaaccccaccagggatcgtggacaaatttggttggtgcacgtgggacgcattttaccttaccgtgcaccctcaaggtgtttgggaaggtgtgaaaggtcttgtcgacggtgggtgcccaccagggctggtgttgattgatgatgggtggcaatccattagccatgatgaggaccccatcactaaagaaggcatgaattgtgccgtggccggggagcaaatgccatgcaggctcttgaagtttcaagagaattacaagtttagggactacgttagcccaaggagtttggctaatggttccactaatatgggcatgggtgcctttatcaaanaccttaaggaggaa

SEQ ID NO: 50249 - DNA, 595 bp, Gossypium hirsutum
  Clone ID: LIB3829-031-Q6-K6-D2
ctccagctttgtcaggcagctcaatacatatggttttagaaaattgaccctgaccgctgggaattcgctaatgaggggttcctacgaggtcagaaacatctattgaaagacttaagagggacaagaatgttctcatgcaggaacttgttaggttgaggcagcagcagcaaacaacggataaccagttgcaaactgttggccagcgtgtacaggtgatggagcagaggcagcagcaaatgatgtcttttcttgccaaggctatgcaaagtccgagtttcttaggccagcttgtgcagcagcaaaatgaaagcaacaggcgcattactggagcaaacaagaagaggagactccccaggcaggatgaagaaaatttagctggtgaaaatggtgccgtatctgctaaagggcagattgtaaagtttcagccttcactgaatggggcagcgaaggcgatgctgcaccagataatgaagatgaatacatcacctagtttggacccttcgataaataattcgggttcattcttgattgatggtgttcctccttccaatgcaccggacagcaggagctcgtccagtcggatttcaggtgtgac

SEQ ID NO: 50250 - DNA, 574 bp, Gossypium hirsutum
  Clone ID: LIB3829-031-Q6-K6-E1
accgacgcggtacggacgccgcttccgcacatcacctacgtacttacgaaactcattatcgaaaagcaccatcaagacagtctctaatcaggcctattatctgccgaactatactctgaactccacttttacttaacaccatacttaaacatgtatggaaccaccgcccagaagtcctccagctcttccacaacctcctcacataccaccactcctatgtctacttcgatcactccttcgaccacgccattgaggtccgcgattacgtccgcgactacaccatcgtctacagcctgctctatcgtatgctctatctcagtctccatactactgccataattttcgacaggattgtcgacaggtgtgaacccgatggaaaacccaaaaaagtactgaaaatgtttttgcatgggcgttaacatgattggcgtcatgataagacaacttttaatacaatatgtgaagctatatgtgaagataaaccaggggacaaagcaaggatacttataaaaaggcttaaaggtaaggttgaagctgatgatgctagtgataatgcaagtggttaaggttggag

SEQ ID NO: 50251 - DNA, 435 bp, Gossypium hirsutum
  unsure (1)..(435): unsure at all n locations
  Clone ID: LIB3829-031-Q6-N6-B6
ggcagaaaaaaattcagttcattacttcttcaatactggccatcatacccttgtacaaggggtataccattataatgcatattacccaaacaacaatcaccattggtgtttattatacccaagcttttccaccttttcctttagtatttacaatcccgagattccggggcttttttgggggcttactcaactggaaaatcgggggcccgcataatcgccttacacctttttttaaacttaaccgggcaccggttttatatccacttttacattcaggttnaacatttcccatttccccttcatttaaaaaattggggcccggaaagggcccaacttcctcttttctgttactatcctgacgggtccattggttctttttggggggccttttcggggtactcaatgggggaaccctcaaaaacttaacaagggggg

SEQ ID NO: 50252 - DNA, 369 bp, Gossypium hirsutum
  Clone ID: LIB3829-031-Q6-N6-D2
atagtcgagaaacatcatacatatgtatttggataaccatttccaatgcatttatgttattggtacatgtagtaacaccaaaaataacccctttcaacaacaaaccatttctctttgaattaaaaagcttttcttgaccgcatcatagatcatcatcaacctctgatctgtccatttgatgaaagaaggcccatttgctcggtaagatggttcatatgatgaattccatcccatccgttctcttgcctcaccggtgcttgctgttgttccaggtttgcaccattttcaagtgagcttgaactaatttcatcggtgtcccccgttaaagggcttgttgcaagaaacttctcccaaaaaacgtcattaatt

SEQ ID NO: 50253 - DNA, 380 bp, Gossypium hirsutum
  Clone ID: LIB3829-031-Q6-N6-D5
aaatccaaataaattatctcaattcattaaaaccattaccaaaaaaactggtttttcattacaagacaatggatcgattaggcaaccttaattaataaacctgtcctcgcacgggaacaaaaacaacaaccaagttgctccgcaactttagccggaaaaaaaaaaaaacccttttgaaggattagatttctacatgaatttaacgtcgagatatgtcgtcggatttaacagttttccccgctgtgggccggaagcggttcaagcacaaaaagggggtatctttgggactccttgacgttgtagctccaccaaaacgccatccgttgatggcggtttcagcccgataggaagcggcagccacggtttcgataaaacgtctc

SEQ ID NO: 50254 - DNA, 558 bp, Gossypium hirsutum
  Clone ID: LIB3829-031-Q6-N6-E6
gagcaagataaagctgccgctgcttttgttatttttattaaaaaaaaaaaaaagaacatgcggagaaacaaattgatgaaccccatcaatccgatctagcggagaacacaaaggatgaagcaaaatattcaccccccaaatcaacaaacgtagtcgatcttaatgttaccaatcgaaacttccccttctttaggcaccaaagtcaccacaataaagcgatcttcagatggaatcttcaaatcctccagcgcatctgataatggcaaatacagatttgtactaagcatcgcctcggagtggcaatcatctccgtgcggtaaattcgaaaagctccccacgaactccgcatcttccggtttgcaagggttgtcgtcgtcttcatcgtcattaatggagacatcgaattgcactgagtcatttctgtctagctgtatgttttgaagaaccaatacttcttctttatcatcttttttcttatttattgggctcctttggccttagaatctcaatgcgtacgggcccccttgcctcacactttaggaaaccccctggggtatt

SEQ ID NO: 50255 - DNA, 439 bp, Gossypium hirsutum
  Clone ID: LIB3829-031-Q6-N6-H6
ggaatcaatgatgccaattgttattccaattataaacttgcataccatagcattctacatataatcagaacaaacacaggcaacaaccctttttaatgactctctacagcttggagcctcttctttttataactataccagtcttctctttacagtattgagtatgcacggattacctccacgattggggctcgacacaatggacattttccgccaccccgaaccaactcgttcgcacattttgaacaagtgcacatgtgtccgcatctgtacaatagggaatcaatatgggtatcacaacaaacacaacaagtccctttccttacatgaccccatttcgatccatcctctgagggttctgcactcaaaactttttcaccagctgaacgattcaaagcagcagagacttcctgcctgacagaacgctgtaactccagct

SEQ ID NO: 50256 - DNA, 586 bp, Gossypium hirsutum
  Clone ID: LIB3829-032-Q6-K6-C4
tttctcttataattgtaagtctcggctaagccttagttttctatgcacttagtgcacttgaggagttaggttctatatatagttggttctaccgcttgaatgatatatgatcggccttgccgcttgaataatatatgatcggccttgttgccttagtattatagtgcactaagaagttagaaaataaaaggttaaccgactccaaagagttggtataatattacttgtaggtcctaggtcttctatagtgagtgtgttgggctcatcgagttcccaacaacaaattttagaatgtttattcctatggatttagttttctccttatatatggttgacattagtttgcttttacagcaagttatggaaaggcgttgatatgctgaagtcagaagaacttgcaaaaggaatacaagattgtgtgatgaaaattgttaagaaaagagaagacaaatttgtgaatggagaagctgacagctttggcaatgattttttaggattacttgtaaatgcatatcatgattcggacgaaaataacaggctttcaatggaagatttggtagatgagtgcaaaacattctactttgcc

SEQ ID NO: 50257 - DNA, 450 bp, Gossypium hirsutum
  Clone ID: LIB3829-032-Q6-K6-D1
gttttgtcacttcaaacctttctgattcagaaaacttgcttcatgctctacttcacctcttgctgagggtccagagtttgtggataatgagagaaggttgtggaactatctaattaagaatccagactggagaacgacttttccgatgaggcaaccacgagtgtttgagaggacaggtgacggctgctggaaaagagctggcttttcatcacaaggacaaggaacataatcaactccattaaagagcttacaagttatgcagtaagctttctgttcaatgttgtatgcatcattgggttaaatacaggccacattttccatgaacatgtggaaagatacccagattgctgggtttctctctctctctctctctttttttttttgctttgatgataaaccctgtattggtaaggtaagtagctaattggaagcaagagctaattgaactat

SEQ ID NO: 50258 - DNA, 578 bp, Gossypium hirsutum
  unsure (1)..(578): unsure at all n locations
  Clone ID: LIB3829-032-Q6-K6-D5
tagnactgtgagggacagtgcggtgagtgtcattttaaaaaagatatggatggtgttcttgttgatgagttgttggcaatcctcgcaatgctgtcaactcatcaaaggctatagaggaaatcggagagcttggaggtgttccttgcttgcttcacattatcagggagagcacctgtgaacgcaacaaggaaaattgcatcgcaatcctccacactgtatgtcttaatgatcggaccaagtggaaagcattgagggaagaagagagtacccatggaacaatatccaagcttgctcaagatggaacttctagagccaaaagaaaagcgaatggcattctggagagactaagaagggctgttaatattactcataccgcttgaagacattactcaatgtgtgcattatttgtaaattctgtttccgactctcggtgatcattgtggcttatcatcactctgcttttgtaaattcttgtgcctcatcagagtttttaatctcagttttacgagctagctgctgttaataaacactgtggaagcttatgtttataaagattttctcttcttgtttggtccaat

SEQ ID NO: 50259 - DNA, 591 bp, Gossypium hirsutum
  unsure (1)..(591): unsure at all n locations
  Clone ID: LIB3829-032-Q6-K6-F2
ggcagnaacagcagtattgtattaatcgccagnaaaatccatgattcatgaccaaaacaccaaaacacccttctcttctaggattaatttcgtccatctggctttcaaatttcctacataaacaaaaatttaaatttcgtattttaccctacaaaatcgaagatccaatcattttctcgccctccaaacagacccccttaccctcccccttttggaaaatggaggaaaacggtaacagagccgaagccgttcgtcttctaggaattgccgagaagcttctccagaatcgtgatttcaacggttcaagagacttcgcaatcttagcccaagagaccgaaccgctgttggacgggtcggatcagatcctagccgtcgccgacgttatcctcgcaggcgagaagagaataaacaaccaccaagattggtactccatcttacaaatcgacggccgatcagaagacaacgatctcataaagaaacagtatcgtcgcctagctctcctccttcacccagacaaaaacaagttcccgttcgccgatcacgcgttccagcttgtggccgatgcgtgggctgttttatctaacagctcga

SEQ ID NO: 50260 - DNA, 372 bp, Gossypium hirsutum
  unsure (1)..(372): unsure at all n locations
  Clone ID: LIB3829-032-Q6-K6-F4
ggnaagtanagtttcactatggcaccattaaaaaaggcttgggactggcccatcagatatccgtgcctttaccctcgactatcacttgcaggtttgagatgcggttgccacatcttgtgaagtgaataatagtgggggtaaggctaatgtgctgaattgttgggagtgaaatccttttaccgtttctttggctctgagaaattgggtttagtctggtgctgtatcttccatatttgagttttccaagtaatatccctacaatgttgatctggattattggtgttatgagttgcctttcatatacttaaaaaaaaaaaaaaaaaaaaaaaaaaaaaaaaaaaaaaaaaaaaaaaaaaaaatggtagaggtagt

SEQ ID NO: 50261 - DNA, 382 bp, Gossypium hirsutum
  Clone ID: LIB3829-032-Q6-K6-G4
cccgggtcgcccacctcacttttgactaaattttgtagctcaaaggagtcttgcttatgccttgcgagcgttgcatgatgacattgtattattgcataagattctttgctaactagtctttttgcatgctaatttgagctagggagaatcttgagcaagtgattttgagcttattataaacattgggtctaaaaaataaaaccccacaatgaatgtgacaaatgaaggcactaacccacataaaacaagctactttcttgtctctcctaccccatcaagtgcacatattgtcaaaatacattcacatgtatatgttttgttgtgaaaaagatttagtgtttgtacttttggttacagttgttttttgtccggctactaggac

SEQ ID NO: 50262 - DNA, 540 bp, Gossypium hirsutum
  Clone ID: LIB3829-032-Q6-K6-H1
gtgcaaatattctgcacttaacttccacattgcttcttatttccttattactaatggtaagcttgctaagtaatagcatgaaactatcaccatctagtagttatggttctttacatcacttaaagattttgcgtttcttattgcaggagattttgaggcatggcttcattcatggaacgcgcactgttggaagcatgatgttacctccaggcgttatttgttcaccactggaatggtaaatccatgtggttttaaatttctttttcttctgcatgtaatcttcacttgatctgttccctcacctaaaccagcaaaaaggttgggtccaatgatgcatcccagtttatggggagttggtgagaatagtcggcatttgatgcgtgatgaaatatgcctagatgtaatggttcgtggaaaattttctcacaagtcatcgactaagatcacttgtatctctgcaggttcttcaacatgcaaaaccattgaaccagctaccactagttggacccttgatctctcctcccgttaatgcatattgct

SEQ ID NO: 50263 - DNA, 577 bp, Gossypium hirsutum
  unsure (1)..(577): unsure at all n locations
  Clone ID: LIB3829-032-Q6-K6-H5
cagnatcagnacgtacgagnanatgattttagagcattttggttagctagaaacgagaggattgtagattggttgctttatgaaagttcttcaattatatgtctccaggaattttgggttggaaacgaagaattggtgcatatgtttgaagagaggcttagtgctgcaggctataagaccttcaagcttgcaaggaccaacaaccgaggagatggtttattgactgctatacaccaggactacttcaaggttttaaattatagagaattgctcttcaatgactgtggagaccgagttgctcagttgttgcatgttaaatcagttgtccctttttcaataaatcagaataactgtgttgaacaagaaatccttattgtgaacacccacctattatttcctcatgattccagtttatccattgcaagactgcaccaggtttatcaaatactactatatctggaaacgtatcaacaagaaaacaaactcacccagatgcctgtcatactctgcggtgactggaatggaagcaagcgtgggcatgtctacaagttccttaggtcccagggatttgtatcat

SEQ ID NO: 50264 - DNA, 390 bp, Gossypium hirsutum
  Clone ID: LIB3829-032-Q6-N6-D6
catattggacatggttttctagcatacaaacagaccggtagtgaagtgatacattcaataagagctacaacttaatcaatgggtcaaatatttgtttcttcaaagtctcctacatttcatttttccggcggaaaagaaaatggtaattttcaccttcatgttcttttcaagaggtatcccaaaatgacgccaattaagccaacaagtattacatacatgagtggaataccagtgtgaccttttctggctttgcgtcttaagagttccagtttttgctgaaggcttttattttggtgaatgggagggtttttttcctcggctagcttggaaatgcgagaccttgcatccgatgaatttggttgagggtgatgctggttgacatgagccctt

SEQ ID NO: 50265 - DNA, 480 bp, Gossypium hirsutum
  Clone ID: LIB3829-032-Q6-N6-F2
ggtgaaagaacttgctgacttgacattgctgaatatatcataatgttacaatgatagcctatgtgctagtcagtacatagaaaacaatctacaaacaaaataattaacaactacaacaatacctacaaatttaacccccaaccgttgcagtgtttcagcttcggccttattcttctttctcggttcatcgaaatcctctggtaccctctgttacaacctcgaaagttcccgcattacgatcaggttcattctaaaccaaaaagctacaaaaaagtaccgaatttcattaccgatcaaacctcacagaggattcttcctcggcctccctcttttccttgagcccgatttcgacacattccgacctgaaaccactgccacgttattcatattttctaccaccttcgttgcggtggtcgaaggaataaatgaaggcggcgttggtactggtgctgccgctgacactggtgccggcatgggggc

SEQ ID NO: 50266 - DNA, 221 bp, Gossypium hirsutum
  unsure (1)..(221): unsure at all n locations
  Clone ID: LIB3829-032-Q6-N6-F6
aatgagaaaggaactaatcattaaactaaacgttcctgtggatgcgccaaaacctaacaacataattctgcagcatcccactagatgaatgcttggatcttcatttttcanccacacatcctaacggataaaaggcttcaagattctgtccggccatcctgtgattgtttacctacatggcttaagggggactttttttatgataccccctatacttgccc

SEQ ID NO: 50267 - DNA, 494 bp, Gossypium hirsutum
  Clone ID: LIB3829-032-Q6-N6-H1
tcgcctagaggagacaatgcgtgcaaaacagatgctggcaaccatgtcccatgagataagatctcctctatctggggttgttagcatggcagagatcttggccacaacgaaacttgaccgagagcaaagacaattgttagatgttatgatatcttcaggagatttggtccttcaacttataaatgacatccttgatctttccaaggttgaatcaggtgtcatgatgttggaggctacaaaattccgaccgagagaggttgtaaagcatgttctccagacagctgcggcatcattgcggaagattcttacgttggaaggaaatgtagcagatgatgttcctattgaggtcataggagatgtgctaagaattcgacaaattctcaccaacttgatcagcaatgctatcaaggttacacatgaaggaaaggtgggaggtaaactttatgtagttccagagccgccttttgcgaaagaaggatctcagaatgggggct

SEQ ID NO: 50268 - DNA, 472 bp, Gossypium hirsutum
  Clone ID: LIB3829-032-Q6-N6-H4
ggagtctactttcattgttcttcactactgaaattttaagtacatatgagttcaaaaagtgtacatagttacacaaatgaatctgcaaactgtcatagttaatggatcatggagttgatttcacaaggggttcaaagttcttgaattgatttcacaaggggttcaaaagttcttgaacaatcccctccaccgtgacgccgcctgccagatgacttggtttccctaaaccaaaatcacctcataagagtggcaggactcgaagttggtgtggcaaatgaactgatccttttcttcctttctattctttggagaactcgtagatgtggcggtttcggttttgttgtttccttggaagacttttgtgggcagaaaggatgatcaaacttgggaagaggcctagcatggggaaccattgtccttctaagatgcttcaatgctttctctttctcaatcattctagcaggctcacttt

SEQ ID NO: 50269 - DNA, 501 bp, Gossypium hirsutum
  Clone ID: LIB3829-032-Q6-N6-H5
aaagtcaaaaatgttccatttacttcatatatcctggaaatttgaggtgacaattatgagcttagcttagcttagcctagcctcgcctcagactcaaatatccaaagtttttgagacccttcccccccattttgatttcattcattgattcatacaactgtcagctacaacccgacccagcctgattaaaatttatgccaggcctattcgtgctttgatttttttcatcaaatagcttagcctcatctgcttgaacactgcaaacttgttgtataaacaaaaacaaaagctgatttctcttttctgctatcaacaaccagtctacgggctccgacgtggacaccgcaatctcaccggtgagaacacagcggttagccgggcatgatcagaaagagagtagttttccggccatatccccttctctacttcacggggggaaaagagctgcattctttactgtaaaaccgacaggctcttcctcattaccttcatttgagtcat

SEQ ID NO: 50270 - DNA, 526 bp, Gossypium hirsutum
  Clone ID: LIB3829-033-Q1-K6-A2
cgactccgtcggtttaccaagtgttggtgctgccgctgaaccgcctcctaaaaggaatcgtggaaggccgcccggttctgggaaaagacagatcgatgcattaggtggagtttcaggggtgggatttactcctcatgtgatcaccgtgaacaccggtgaggatatagcatcaaagattactgctttttcacagcaagggccacgcacgatttgtattctctctgcaaatggtgctgtctgtaatgttacactccgccagtctgtattatctggtagtatggtgaaatttgagggccgatatgaaattatttctttatcaggttcgttcttggtttctgaaaacagtggtagttgcagcaggactggtggattaaatgtttccttggctgggtctgatggtcgagtggtaggtggtggagttgtaggcgcactacaggcagcatcaccagttcaggtcattgttggcagctttattgcggatgggagaaaacagaacttagatgttttcaaaacggtacctctcatg

SEQ ID NO: 50271 - DNA, 532 bp, Gossypium hirsutum
  Clone ID: LIB3829-033-Q1-K6-B10
cggacgcgtgggcggacgcgtgggcggacgcgtggggtttatccatgctcctccacagatttgctagggaatgggatgtatattactttggcatcttagaactgtgggtgttgcaatttgtttatcgcatgatactgcacaggtttcctttggagtggggatatatgttactttggcatctttgtaggttagctgttgcacgccatcactttcttcattaaatattgcttaacattatagccgcatgtattcaggtaagcttgtttattagttaatgtctttaaaaatattttaggatgttcacgatataggtccgcatcaaatacatgtacctttaaaaataataatggaatactggcgttgattgagggttctgccattttgggataacggtgataggaaaccagcaacaactgagaagtaaatgtctctgcgaaatacttttttaacttaaaagatacaggttaaagtttacataaaatggtattaattgtctaatacttcatctgttactgggaaattgaggcgaact

SEQ ID NO: 50272 - DNA, 551 bp, Gossypium hirsutum
  Clone ID: LIB3829-033-Q1-K6-B8
gtgaatgctgtattgggaactaatgggggtacataattcatgaagcatataagattattgaatatgctaaataaatataatcaaattatgaaactatgctcttataggaactgaatattatcagtacattattggtggaagatacacatatgaaagtaattgttggctctacgtaagacacagaatatctatatggtagaaccatggatgagaatacattcgaggaaagatatatatatgctttacattgtcaaggacttatgaatgttgctacgctatgaaaagcctatttaaacgttactagaaagatttcatcaaacataggttaaaagaggtggatctgtctaagtacattaaagactgcgatctgtatataagaaagcatcacagcttgatgaaaacacacttacatgaacatgcttgagaggaccacctcagaaaccatatggatgaatcaagttaccatatggactaaaactagcccgtcgtatatttacaagattgatgtacatacattgaaaaggactagaatgcataagtgtagcttataa

SEQ ID NO: 50273 - DNA, 520 bp, Gossypium hirsutum
  Clone ID: LIB3829-033-Q1-K6-C7
caatgatgttactttgggacagcttcctgtaactgataagcttgtgtattggtttttgactcgagtcttaacatctcaagatttgagtgatgcaaagaaggatccagcctacataacaaaagcatcactagaagcaataaagggtttccctgaagaaatagtggagctggtaaagaacacagagcccaatacgttgtacctgactgaacttcggtatcgggcgccatgggacctggtgcgcaccaagttcagaaaaggcacggtggttgtggcaggagatgcaatgcatgcgatgtgccctttcatctcacaaggtggaggggcgtcgctaggggacgcagtggtgttggcaagatgcttgtctgagaaacttaagcaagcagcggaaggtggaggaaagaggttggttgaggaagccctagatgagtatgtgcgggagcgtaggatgagggttttctggctttctttgcagacatatttcattggacttgtacaagacaatacgtctaaggtgaagaaa

SEQ ID NO: 50274 - DNA, 397 bp, Gossypium hirsutum
  Clone ID: LIB3829-033-Q1-K6-F1
cgcatacatgaaaatgccttctttcatcttcaaaaaaaccaaaccttcctgttgttaaaatccgtaaaaacaagccggtttgcttcttaaatgtgaaatagatagctattgtacattgttgatccgttgcatcgacaatggagccgtatttgagaatctgtattggcccttagtgaaaacaccgtccatactatgagtaggggaagtggggttagtgtgcatcaacatacctaatatggggtttcaaactaaatttaagctggtagattaacattgttcttatatatatatatataaagagagagagagagaataggaattgtgaacttttttgaactttgaatttgtgtaaccctatgtttcatcttaatgtttttggatttgtaaggttgattgt

SEQ ID NO: 50275 - DNA, 525 bp, Gossypium hirsutum
  Clone ID: LIB3829-033-Q1-K6-F5
tgctttcttcccgtatcgatgggtgcttatgcaatttggtgcttttatcattctttgcggggcaacacactttataaacttgtggacattcactatgcattctaaagttgttgctatggtgatgaccattgccaaggttgcatgtgctattgtatcatgtgcgactgcattgatgcttgtacatattattcctgatcttttgagtgttaaaactcgggaactatttctgaggaacaaagccgaggagcttgacagggaaatgggacttattctcactcaagaagaaactggaaggcatgtaaggatgctaactcatgaaatcagaagcacgcttgacaggcatacgatattgaagactacccttgttgaattgggtaggaccttgggtctggaggaatgtgccctttggatgccatcaaggaccggtatggatttgcaactttctcatactctcaattaccaaatacaagttggatctactgtgccaataaatcttcccatggtcaatgaagtcttcaatagtgc

SEQ ID NO: 50276 - DNA, 525 bp, Gossypium hirsutum
  Clone ID: LIB3829-033-Q1-K6-F8
aaagttggatggatgctccaagatttagcaccaatcacctagctggaatagaaagatttctatcatttgcaattgaaaaatcagtttttaacggaaaaatatattgtccatgctatctttgcaataataggatattgcacgaatcacatattgttggtgagcatcttcgtcttcatggtataataaaagaatacaagcattggatttttcatggagaatgcattgaaagaacatcggtgcaaaccgaccaaacagtgagaacttctccatcaatttgtacgcaatcacaagacaacgaagccgatttaagagatctcataacggatgctctaggtatcaacatcccaactcttaatgagagttttgatggagtttcagaataatggttaggaggatgattttaatgaggcccaaaggactacagagagagcaactactcttttagatgattgtgatattccgctctatcctggttgtgtcaagttttcatgcgtctcatccttacttcggctttaccactttaaa

SEQ ID NO: 50277 - DNA, 532 bp, Gossypium hirsutum
  Clone ID: LIB3829-033-Q1-K6-G4
atcaacttcaatatctaaagtgtgttataaaagaaaccttaagactgcaccctattttacctttattgcttccaagagaatgtggcaagaattgtgagattaatggatttgagataccttccaagaccagagtgattatcaatgcctgggcaattgggagagatccaaatcattgggctcagcctgaaaaatttgagcctgaaaggtttatcaacagttcagtagatttcttgggaacaaattttgagttcattccatttggcgctggaagaaggatatgtccaggcatgctatttgcagtgccaaatctagagctaccacttgcccaactgttgttccattttgattggaagttgccgaagcaagaagatatagatatgaccgaggagtttgccttgtccgtgaggaggaaaactgatctagtcttagttcctactccttaccatgcttctattatcgtttcctacaagcacaaggaggatatatttgtctaggcatatcatagattaaattctgctcttagtccttctac

SEQ ID NO: 50278 - DNA, 525 bp, Gossypium hirsutum
  Clone ID: LIB3829-033-Q1-K6-G9
gtattaacattaagcatggctgagcacccgaatcttgttaaattgataggtttttgtgcagagggtgatcaaagattacttgtttacgagtacatgccgttagggtcattggagaatcatttatacgaacttccggctagccgaaagccacttgattggaacacgagaatgaaaatagctgctggtgcagcaaggggtttagagtatttgcatgaaaaaatgaagccccctgttatataccgggacttgaaatgctcaaatatattgctcggtgaggggtatcatccgaagctatccgattttggtttggctaaagttggtcccattggcgataagactcatgtttctactagggttatgggtacatacggttactgtgcaccggattatgcaatgaccggacagctgacatttaagtcggatatttacagctttggggttgtcctcttggaactaattaccggtaggaaagcgattgacgagacaagagatcgctcagagcaaaatctcgttgcatgggcacgt

SEQ ID NO: 50279 - DNA, 357 bp, Gossypium hirsutum
  Clone ID: LIB3829-033-Q1-N6-A1
aaaaaaaccccatagaaacccatcattttaaaaggggaagaggggggctggggggtaaacccaaggaaaaagccgcaaggggtaaaagcaaagggcattcagggggggaaagaaagaaaacgaagccaaaaattccatcccgccccactaaaatatacaggaggggcgtcagggttaaagggaaaacagggaacaaaagggcaaaacaggaacataattcaaatttcaaggccccattttaaaactttgggggaaacaaagtaaagccggaacttccctcgttaacgggttccaagggtaagggcaaacagttccgagcttttaaaaacgcgcagcctttccaatggggacacaaac

SEQ ID NO: 50280 - DNA, 481 bp, Gossypium hirsutum
  unsure (1)..(481): unsure at all n locations
  Clone ID: LIB3829-033-Q1-N6-B1
ggtaacaaatccccgtttctctgggttgcaaaacagggggtcaaaacaaaggcgccgnccccgccttcttttcgaaggttaaaaccagaaaaaacaacggcaaaaccccaggggcccaaacacaaaacgaaacaacaccccccacaaaaaagaaaaaaaccccccaacgcccaaccccacaaaaaacaggcaccgaaagaccaaaaaccaaggccgcgccaaaccaaaaaaaaaggcgggcccaccgccccgggaaagagggggcgccccccgcgggggaaagataacaaaaagcccggggaacaaaaacccaccggggggggggcaaatccaaaacccaaaaagggggaacccctatccaaaaaaaaggaaaaaacccccccacaaggccccaaaaaaaaattttccagggagcccacggaaacggaatcccaggccgccgaaaacctcgaacccgggggccgggacccacaaccccccg

SEQ ID NO: 50281 - DNA, 507 bp, Gossypium hirsutum
  Clone ID: LIB3829-033-Q1-N6-E2
gaatcaaaggacattttcagtatatttaaacaacaaattttcaactattacaagattctgttttgctcaaaaaaaaagccctttgctccctcagttcccaacaaatagaattttaaaaagattgcatcaccattcatcatacatcaatctccttcacaaactaacataatgaaatgaaacagtatatattatatatataaacataaaactaaaaaaaaaaaagaaaaagaagcttccaattccatttccaagatcctgtacatattcttcttctaaaccccactaaagctttcccaactttggcattttaaatgtttcaatcaacatagcaaccattataataatcataaaaaagcttcaacttttcattcattcactcaccaccaattcccccctttgccattgccattcttggattctccctccttgaaattccttcttctttttaagaaaatgataaaaaatttaaaaaaggggtgtcatttaaacaagaacccaaagtgtaaa

SEQ ID NO: 50282 - DNA, 531 bp, Gossypium hirsutum
  unsure (1)..(531): unsure at all n locations
  Clone ID: LIB3829-033-Q1-N6-E3
aaaaataaaaagtttagattgaataacccagagttggaaatagtatttatataatacaagatatattgaatccagtcatgagaaataaaaagggtttccatttgactcgggtaaatacaagacatggaaacctacagataaatggtgaggcccttcctctacttcttgatagtttctaattttcgatatatctacaatactagcaaccattaaaacaaattttccataaatctaaatcttggggcttcttcaggcttcataactccattttcagttgatttgcatgcaatgttgctgctgaatttgctgaggagtcacaacttaaaagtgagttctccagagtaacgtaattattgcagacttcttctcttccccaaataggctgcttaagtgtatcaaaatgccactggtgctgaaactgttttctgtatccattgacttgaacgtcaggccaaatcagaggtgtaaccaagctggnggaagttaccaccatccatagtagatccactttctggtgtgaataaactatcg

SEQ ID NO: 50283 - DNA, 529 bp, Gossypium hirsutum
  Clone ID: LIB3829-033-Q1-N6-F1
acattcaacctttcaaacccaaaaccttacaaagacaaatacggttacacaaacataaggttccacaaagtcacagttcacaaagtctatatttctttttatatatctctctctttgaacattgttaatttaccaccttgaatatataccggcacccaatattatggatagacccctgctcactaaccccgctgcccattctcctcaattgccctgcttatagactggggggcgattcaaattatggcctacggatactttgaaaatccgccccatcaacaatgcaccgtatcaacatatttcacattctataaattaaccatttaggaattacaccttttagcatctacagggtttgactacttggaagatgagatattgcgtaataataaatgcgcattctcatgggtgcacccacgcattgctgaccccgacctttacggaccccaactttccctataaccagttttacctaagctgggccgaattatagccatagctgatcactgtgataaatggttactcggtc

SEQ ID NO: 50284 - DNA, 473 bp, Gossypium hirsutum
  Clone ID: LIB3829-033-Q1-N6-G4
ccgaaaaatataaaacctaatttttaatcaagttaaaatccaatacctaaatccataactttcacaaagtggagggcctaagagcagaattaaatctatgatatccaatacctaaatccatacctttcacaaagtagagggcctaagagcagaattaaatctatgattggcctagacaaatatatcccccttgggcttgggggaaacgataataaaaccttggtagggggtgggacctaaaactagatcagttttcctcctcacggccaaggcaaactcccgggccaaatctatatcttctggcttcggcaacttccaatcaaaagggaacaacagtggggcaaggggtacctctaaatttggccctgcaaatagcaggcctggacatatcctttttccagccccaaagggaatgaacccaaaatttgtccccaaaaaatctactgaactggggataaacctttcaggctcaa

SEQ ID NO: 50285 - DNA, 514 bp, Gossypium hirsutum
  Clone ID: LIB3829-033-Q1-N6-G5
aagataaaacttaaacattaataaaaagaagatgaaaaagtctaaaaacggtgaaaattcattccctatacaggaattgaacccaaaaataaaccccatttatggggacataaaaaataagcagccccaaaatttacaaaacataccggcctaagctgttaatatattgaacttacaaaagaatgggtaactgactgctaaaacaggtaggtggagaatcctaatccataccaccacccatgttagcccgtggaccttggcacaagttggccttgataagaatgcatatgatggtttagctacttgatctgataatataaaacctattactcggctttcatggaaggcacacagccattggatgtgcttcattaatgcgcataacccaatggacttattgctaaacgggacaagctttaaaccaatattttcattcccaacagtactaccgataacacgggcttaatgccccagtgcccccttgaagctaacctttttaacgagcggcagagcc

SEQ ID NO: 50286 - DNA, 533 bp, Gossypium hirsutum
  Clone ID: LIB3829-034-Q1-K6-A7
gtgattctggttcaactcatgaaccaatggtaacacatccaacagaggtgagagaggttaagaatagccatgagccatctagtcatgctcctgttgttgcggatgcctctgaaactgcacaagctctcggcccgaaatcccatgagactgttacaattgatgaagtaggtgacgattcaattgcgcagccaaggcggcagaatgataactctaacaaccagcatgttacacccagcgctcctgcctttgataatttgccagactatggcaatgacattgaagaacaaatgattcaagctgctattgaggcctctaagcgggatgctgaggagttaagtaatactgggccttggcgtaatatgtctcattcagaggatgctgtacttgaagaagcagtttcattgtcctttaagacagcagagcaagagaaggcattgcgtgagcagggttactgtgccggaacatcagaagtggaagcttctataccacctaaggagcatctcgggaacatggcagtctcaaatgggaggtta

SEQ ID NO: 50287 - DNA, 526 bp, Gossypium hirsutum
  Clone ID: LIB3829-034-Q1-K6-A8
aaatatttctccaagtccagtttgttcagtcatggtggagcttcctgctattactgagaatgaactgggaaaagaaacaaaaccatctagcgggagtgaaaatattactccaagtcctgtccacttgtttgcttttgattctactgatagggcacttactccaacagatgatgagttgcaacagtcatcagctgctgaaagggtagatgctaagtctgttgatgttagcaatgaagtagagcccactgcacaaccagcatcttctcaggattttgctgctgaagcttctaatgaagattttgcacctgagaaccatggtgaggcgaaggtgtctccaggaattaagagtgtagcggatggtcatgttgaaagggatgttgaccctctggagctggaagcatccgtggacgaagatattgctgctgtgccatccagcatggagcttgttcccggagatcagagtaaagtgcatgttcaagcaggagttgcaggttgcgaaggtgatgatggtattcagggcagagac

SEQ ID NO: 50288 - DNA, 246 bp, Gossypium hirsutum
  Clone ID: LIB3829-034-Q1-K6-B1
gtcagtatgaaatgattcatcaagttctcattatcctttttcttcttaaactacaggatatcacatacctagttttatgtcagtcagttagattgtcaccattttcggctgacattattcttaagaaattcatgatacatattttctatggtgagattttgatttgaatcacggtgtagtccggttgtttatgtgatcacatttaagaagtgaatttcaataagctcaatatctgtattttgtctt

SEQ ID NO: 50289 - DNA, 517 bp, Gossypium hirsutum
  Clone ID: LIB3829-034-Q1-K6-B11
atggagagtagaatttaacctgttaggattctttgtgtgcaattccttgtaccttggaagacctaaaggcggtgctcgtcgcccccgttctgaacctgctctcccattgctgtcttctagtagagagggtgatgatttgaagttttctggggtccttaaaaagcttggttactttatcgactcttctgatggccttcttctttgtggtcgtcacccgaagacctattttgtatggaatcccatcaccaagcaacaacataaactacctcatccgcgggtgcaccttgaggagttgtgcatggccttcattgttgaagactcacctgacgatgaaatctgctacagggttgttcgtgcaaaatgtgaaagcagattcgaggaggtcaatgttgttacaatagaaactttcttgtcaaagatcagtacgtggtgttattccaagctgagatgttcttcaactatatctctatctccttggacttcaggtaccgtgattggagatgtcatccactggtat

SEQ ID NO: 50290 - DNA, 528 bp, Gossypium hirsutum
  Clone ID: LIB3829-034-Q1-K6-C5
tgccctcagaatgccggtggcaatcaagatgtgtctaaaggaactcctgcttctggtggtgatcaaacaggttctggagttcaacccaagtctcccagtccaacggaactgcttcgaaccggtgaaagtgctaagagtgattgtgttgaagtttgtgataaagaagttaggccctcagaagcatcatcatccgagacagctatgcaacctttggaaacagcagttcctgtttctgatatctcacaagacaagagtattgaacagtcccggtcagaagcagatgcaagcaagtcggaggagaaatcagtggctgctactggccctgataacattccagattccagccagctttcttgcgataccacaatcactgagagtggcaaggaggctaagggagatggcactgaccctattgttgagccctctagcaatcaattagaattatctgcggcatctcctactaaggtagaatctgatcagttgaatcagaatagttctgaaaatgaaacagcgatctcttcagaagac

SEQ ID NO: 50291 - DNA, 528 bp, Gossypium hirsutum
  Clone ID: LIB3829-034-Q1-K6-C7
aaaggatggcagccagagctggttttaatgctccgaggttgaatactgaaaacatcaggtctactgatacttcgcttaaccccgagattcgttctccttacttgacaatacctcctggtctcagccctacaacattgctggactctccggtttttgtttcgaattccttggcacagccatccccgactactggaaagttctcattcattcctaatgttaatgataggagctgtatcccagagtctcgtgataaaagtgaggataactattttgaagacatcaatgcatcatcatttgccttcaagcccattgcagaatcgaattcctcttttctccttggtgcgacgagtaaagttactccggccagtcttcctcagcagtctttttctaacgttgaagtttcagttcagtccgagaattctcagccatctcgaagcgtagacccgaggaaactgcaacaacaaaacagcaacatgcttagccttcaggcagatttcttgaggtcatcaactgaaaaagatacgggga

SEQ ID NO: 50292 - DNA, 522 bp, Gossypium hirsutum
  Clone ID: LIB3829-034-Q1-K6-F4
gggaagggctccataacagattagcaacaaatgtccaaaatcaagcagacagcaattctgcaaccacatctagcaatgtcatcaatgattctagacacgaacttccccaaacaaacatgtcaccagatgtccaaggagaaaacattgagcgtacacaacttaggagtttggaaagtggcatcgcagagttgcctaatcaaacaggagttctggttaggaacatggctgttgagagcataagttggcaagaaaatactacccaaggtgggaattggcgagaaccagctgcgaatgatgagagaggaaactggcaacaaccaacatatgctcagttcaacgaattgagagacaacagtacagaagtaatggatacaaattggcaagaaagttcagttagtgagcatcgtcaagaaaatcctggaaatgaaaatggagaagcaaatcgtccacagggagcccagagggtttggcatgagggtcgctctcaagaagctgttgataattggtcagaagggcgttctg

SEQ ID NO: 50293 - DNA, 525 bp, Gossypium hirsutum
  Clone ID: LIB3829-034-Q1-K6-G12
gaagatttagaggttcacaagaggatgaaagctattggtgaccttatacaacttcattcccctgatatcatttgttttcaagaggttactccgatgatttatgacatttttcgtgggtctaattggtggaaagggtaccggtgctctatctcggacaacacggcgagtttgagagcttacttttgtatacagttaagcaaattgcctgtgaaatcctttcgtcgtgaaccttttgataattcgataatggggcgagaactttgcatgactgaggttgaagtttctgggggtgaaacaacgcttgttgttgctactacccatctcgagagtccgtgtcctgctccgccgaaatgggatcaaatgtatagtaaggaacgtgtagaacaagcgaaagtagcgatcaatattctcgagaataacccgaatgttatttttgggggtgatatgaattgggatgacaaattagatggtcgatttcctttaactgatggatggattgatgcttggaacgagttaaggcctgct

SEQ ID NO: 50294 - DNA, 527 bp, Gossypium hirsutum
  Clone ID: LIB3829-034-Q1-K6-G6
cttcgcttctctcaaaaactcccctcttatctttcttcatcttcgatatcaaatttcataaatactaaaaggaaataagaaatagaaagtgggttttcgaagatgttgcaagatgtgtggaacgctcctcctggattcaggccttgtaaatcggcccccacttctccggcgaagcccctcggggttctgagaactcgctccgagtccttccatgccatccacaaagtcccagtcggtgacactccttatgttagagccaagaacgttcaattggtggaaaaagatccggagagggcgattcctttattttgggcagccataaatgcaggggatagagttgatagtgctttgaaagacatggccattgtaatgaagcagcaaaatcgagcagaggaagccattgaagctatcaagtctctgcgtagtagatgctcagatcaagcgcaggagtctcttgataacattctattggatctctacaagagatgtggaaggttggatgaccaaatagcattgttgaagcacaa

SEQ ID NO: 50295 - DNA, 353 bp, Gossypium hirsutum
  Clone ID: LIB3829-034-Q1-N6-A5
tttttattctagatctcattgaaaactactattaaagaggaaaaaagaaagagactaaccaagggccgcccccctttcgttttctttcgaactgtaactgcccttcttaagcacgctatatgtcgcggaccccatatttgcccgggccaaatcgagactccaatcaatcaaagcaattgaaacccgacccactgttcgtttcacaaatactgacccccaagcgcaacaccccccccatttcttttacattagcccaacgtcggatggcccaactgcagaaaaccttgcttcccttgtttcccttgcactcccacccggtccaaactggaccccgcgctcgtccactcacccgc

SEQ ID NO: 50296 - DNA, 276 bp, Gossypium hirsutum
  Clone ID: LIB3829-034-Q1-N6-C1
cgcgggccggggccggcccgggaaccccggaccggcacggggaggcgaaccagggctccctaaagggaggggcaaaggaggggggggaatggagggggaaagcggtttccgggggagaaaagagacccgcgcaaaacgccaaaaaaaaagcgagccgaaagcaagaagggaaaaaccggggaggcaaaaggagggacgcaccgcacactaacgggaaggcaaacagggcccgctttccaaaggaaaaaccagtcaacccagcggggaaaaggaagt

SEQ ID NO: 50297 - DNA, 516 bp, Gossypium hirsutum
  Clone ID: LIB3829-034-Q1-N6-C6
aaagaaagaatccactaatttatatttattaaaagatctcgagtaaaaacgaggccaagaggggaaacagagacgcccaaatctaagttcaaccacccattattaattgtctgttaatcattgatcagatcgctatttgatataacaactccatgaattacgtgcatttaaaatggacggttatgcctgggtgctaccctggacagattatgggaaggctgctgtatcgatggaactaatgagggacatctgcgcccagaagcttgtcaaagacagtgcctgcttgtgagaaaacgaagattggattcttctgaggatcacacaaaagtgcgcatgatatcataacattctaccttataaatcaaaaatatgaggagaaggctcttgttattaagaattcacaggattggtgatgtaaaaccgattggcctgaacaatgatgctggaaaatatataaccaccagttagttggactggttaaacagttggaggtcatgatcccttgactgaacaatg

SEQ ID NO: 50298 - DNA, 417 bp, Gossypium hirsutum
  Clone ID: LIB3829-034-Q1-N6-F5
aaaaaaaaccatttactaaggggggcccaaaaaattccttaaaagggaaaaaaaaagggaaaaaaaaaaaaaattcccggggggggggggggaaaaaaaaaagggggccaaaaaaaaaaaaaagggggccaaaaaacaaaaaaaggggggggaaaaattggaaaaaaaacccccaaaggcccaatcaaaaaaaaaagaaaaaaaacccaaattttcccattaaatttaaacccccggcccgaaattcccccttttcccgggcctttaaaaaaatgggaggggcacccgggattgggggggcccaaaaaacaaaagaatttaggttcccccccggtttgggaaaccccatttaaaccccccctttcccgggaacccaaggggagaaaaagttttcctacaaaaaagagggggaaaatt

SEQ ID NO: 50299 - DNA, 519 bp, Gossypium hirsutum
  Clone ID: LIB3829-034-Q1-N6-G5
aaaaatgaaacccggcctatataatatgctttgccccatttactctcaaaaaaaattcaagaggtagataaaaccagctacaacagccgaagagtataatgcccctactggccattgttttcatagaatttgacagaaaaccactccatggcatatgcatcaaataaggaggtaaggtgtgtggactgaacctaagacagagacaggtaggtacttacggagggagtggacttcgttactttggggctctgcggcggatggttgggggtgatttcaccgaggctttgcttactcgatatgagctgggagaatattttatacatggacaaagcttccattatacttaccgacaccctttcgatgtgcgttttagccgcgccatttaagtttggaccctcacttaatattacagaagtgagctaccattgaaaagccttggagtcctactttgcaggcaccaaatcacaagcctcttcagaggtggttgggtgcggaccttgagctactcggagacccttc

SEQ ID NO: 50300 - DNA, 527 bp, Gossypium hirsutum
  Clone ID: LIB3829-035-Q1-K6-A3
tgaagcctttggtgattgagaggattgagacgggtgatggattagttaaagaggataacactggaataaatgctagtgagtcagatgtaaatacaaatgatgtagagggttcgaatttgaccgaacctaggattgagagagaggtgtctgagattgagaaagaggcatggaacatactacgtggtgctgtggtgaactattgcggaaatccagtggggaccgtagccgctaatgatccagctgacaagcagccgttgaactatgatcagatatttatccgtgactttgtaccttcagcacttgcctttctgctaaatggggaggcagagattgtgaagaattttcttcttcacacattgcagttacagagttgggagaagactgtggactgctatagccctgggcaaggattgatgccagcaagtttcaaagttcgaacagtccctcgtgatggaagccctgaagcatttgaagaggttttggatcctgattttggtgaatcagccattggtcgtgttgcccctgtt

SEQ ID NO: 50301 - DNA, 531 bp, Gossypium hirsutum
  Clone ID: LIB3829-035-Q1-K6-A4
caggaacagaggtgctgaaaaactttatggttatttagaagcagaagctttaggacaaaatattattaagcttgtttgtcatcctaaggatttcgggtttgcagtaaatatagttcaacgggttattattggggagagttggactggactgtttcctattaagaatagactaggggagaatatttctgtagttgcaactgttactcctttttatgatgaagatggttctgtggtgggaatcacttctgtgacctgtgattcacggccttttcaagaaaccaagtttgaattttcagctgaaaggcaaccgaaaggaaattcttcagcctttacccggtctaaaaacaccatctcggttaaacttggtcttgatcctcagcagcctctgcaagctgcaattgtatcaaaaatatcaaatttggcgtccaaggtgagcaacaaagtgaaatccagaattaggacaggcgagaatcgtgttgatgcttatgatcataaagaagacgcaacttacagtggagtctgtacaccgaa

SEQ ID NO: 50302 - DNA, 533 bp, Gossypium hirsutum
  Clone ID: LIB3829-035-Q1-K6-C7
agcatatataccctagcaaacccttttactagatacagactatcctgcccatgcatgctgctgcttgcctttgtttatgccggcctggagaaggccaaagtctccatgcaggaacagggggaccaaatgaaaacacggtaccctaacgagaaagagatggctagggaaaggtacgaatatagacaggaggatgcatagctgaggaaacaagaggcccgccatcttaacaccacgtgctggccatgctgtgggaggtggtatcggtggtgctggctacaccacagctgggtacaacagaggggatcctgcaggctatggcggtccctggggacatgactaccgcgggttccttaccgtatgtagcgtgtatgatacaggcaggcaagatgacctcaccagtatggtgtttggcggagatacagggggtgcttacggtacaacggtaaaccaagacttcccaagtgcggagcctaacaatgctgggactaaaaggagcacccgtggaggtacccagaatgatccttattatcgat

SEQ ID NO: 50303 - DNA, 531 bp, Gossypium hirsutum
  Clone ID: LIB3829-035-Q1-K6-D8
ccgtccgaaaaaaaaaaaaaaaaaaaaaaaaaaaaaaaaaaaaaaaaaaaaaaaaaaaaaaaaaaaaaaaaaaaaaaaaaaaaaaaaaaaaaaaaaaaaaaaaaaaaaaaaaaaaaaaaaaaaaaaaaaaaaaaaaaaaggggggggccgttttaggggtcccaagtttccgcccccggccttgcaacgtattggtttttttttggggcccccaaatttaattcccggggccgggttttaccaccggggggcggggaaaaccccgggggtcccccaatttattcgcttgggaaaaattccccttttccccggtggggttattagaaaaggggcccgccccgttcccctttccaaaaattggcccaccctgatggggaatgggccccccccttttaccggccctttaaccccgggggggggggggtttccccccagggggccctttacttttgccaggcccttagcccccgttcttttggttttttccctttcttttttccccactttggcgggtttcccccgaaaagtttt

SEQ ID NO: 50304 - DNA, 525 bp, Gossypium hirsutum
  Clone ID: LIB3829-035-Q1-K6-E5
aggcggttttggatacaacttcgattaccgtattcaattttccgagtttttctttacacggctgaaattcaacaggaaaaaataataaatcgctactttccattttccaatcttgttgaacgctgagctgagttcctttcctttcatggcttcctttcgcaggctccttcctctttgctcttccctaagaggaacgaggttttcttcttctggagtatatgaaagtttgttttctttctctctctctctgtctcttaaaatttatgtccacggtttgattttttattgttctaatctaaatctgtaaatttggacttccaagtattatatttttattttttgtgtttccttggtactgattagcgagtagttgaattatttgtgatttatattactattgtattttacaattaaaaaaaaaaggatttggagcaaatgtatgtggctacagcaagtttacatcctccgtgcatacgatatccaagtttgaggaaaaaataaagcgtgcagaagcagacgcttcgg

SEQ ID NO: 50305 - DNA, 510 bp, Gossypium hirsutum
  Clone ID: LIB3829-035-Q1-K6-F11
ctcattttctgtcttccccaaagtgccaaaaaatccctggggtaaaggaaggaatgataagatcatctatgctggtgatatatggtctatcggatatcgagctaaccccctcacgatgaactcgggtgccgcgtgaagcaatataacaaacgctgcctaaactagacatattactacaagctcatgttggtacggatgattagtagtgctttggtgggacattgatagtgctaattatggagggtacgggacatgaattcaggattgacggaaatgtcacattgtgcgtacttggacagtgctcaataggcaaacggcatcgtttgaaatggcaggacgaacagtttcagcaacaacaacaacaggacactatttcagcagagtaagctggaggcgttgtctagccaaaccaaccacgtacaaggcttgcagggcgggatcatggccggagccagcggtgactgggcgctatcggacatggttatggatgactacgagaagcctgaccct

SEQ ID NO: 50306 - DNA, 519 bp, Gossypium hirsutum
  Clone ID: LIB3829-035-Q1-K6-F2
ggaggatcttcatcgttattttgattacagtgcaggaactgagggattcgattttgttcctcctgctggttgcaatagttttggaagatatgagattgctctgttatgtttggggatgatgcactttcactttgggcatcctaagaaggctttggaggtcctaactgaagctgttcgtgtcgcccaacagcacagcaatgatacttgtctggcctacactttagctgctatctgcagcttgttgtctgagattggtttctcaaccactagtggaatacttggatcgccattctctcctatgatcagtgtaggaacttctttgtctgttcagcagcaattgtttgttctcctgaaaggatctctaaagagagcagagagtttgaaattgaagcaactggtagctgccaatcatcttgcaatggctaaatttgatttaacgagacctctgctgtcatttggtcccaagacttccatgaagcttcggacatgcccaattattgtttgtaaggaactacgatc

SEQ ID NO: 50307 - DNA, 384 bp, Gossypium hirsutum
  Clone ID: LIB3829-035-Q1-K6-G1
aaaaaaaggaagagaaaaggtttttcgctctagagagtacccagaattggtcattccccccgccgtggctccgccgtgccggccaccgtgaaagtcgcccataggtacacgggcggtggacatgacaagggcggtggctgcaggctatgggcggtgctgagtcagaagaccctaggtgcggcgcacctagggtttgaaatgttgctgtttttgttatggtttgggtcacattgctttgggcctagtgggtttagggttaaaattaatttttgagtctgttttgaaattaagtttagggttaatgggtttttagtgggcccgcaaattgggcttgtacaactgacatggtgcattatgcaaattgagaaaagtgtaacaatcgac

SEQ ID NO: 50308 - DNA, 472 bp, Gossypium hirsutum
  Clone ID: LIB3829-035-Q1-N6-A1
ggtcataaccatattcattgcaaggccatatgatacaaaagcataccccaaatcaccaatttatttgccaccaaatccattcccaaatactcccctaaaacctgatcacaaaaccggttttcactcatgagaaagacaccgaaaatgatcttcatcgaccagggccatttattcatctcgggactaaagctacaccactccattttaaacaaaaccccaaaactcagttttccattttcgaaaatgtcaaaaggctgctccaaagcttccttccttacaccaatgaaagcttcacaaaattcctgaccggaatttgaaacaaacataacctttgcaatggacttgatatcaggaattacatgttcagggaccaaatcaacaattttttcaccacattcctcgctacaaaagtttttgctcaaagcttccttcgctgactcattatctaatgaaacaacagactccttgaaaa

SEQ ID NO: 50309 - DNA, 530 bp, Gossypium hirsutum
  Clone ID: LIB3829-035-Q1-N6-A4
atctgggaatgttccgagttttctgatttctcactctttagttcgtgctcgatacaaattccgatctagaagagtatgatccacaatataaatatatataatatatacctttattgacgttccctccgaaaaattccaggctgacatgaaaaagaacaagcgacattcactaacaaccaatccaaccacattgaaatttggggttgctcacacggtaccgtctccttttcagctttgtctagcctgagatttcaacgccaatgttgcgagtctaggtggcaattcccaaaacacttggatttgattcatgatcccttttgagagccgctggacgagttacgggcttcctgaaattggatggtgcatcgtctttgaagcactctaagcttgtccatcagttccagaaatgttggccgactttgaggatcactgagccagcaactctcaattatagaagcccacagtggatctaaatagttcggaatttccagccgttggttcatgaacccgacagctccaatcacctgtat

SEQ ID NO: 50310 - DNA, 497 bp, Gossypium hirsutum
  Clone ID: LIB3829-035-Q1-N6-B1
attataggttttatttttttatttattatgtgtttgttataatttgtttaaagcttttttttgtttatcaacccctctttgtttaaaggactgccgcaacaaacacatgaaacatgggagctttaaacaaggaaaacggggcatcagacaagcatacagcactacccccatatatataaacagaaaggggatgccaaatgccccaaaagaacaaaatcgtgttaacttactccaaaaaagcccctactttcccattgtgaaaaaaaaatggtaccaccaaaatacgccgtgccctttatggaaccatttttgctacaccaagggcctgacctgtcgccaggaaaaaccacatcaaaaccttttgggggagaatactcaggggaaaaagggccaatactcccagaaccaaagcgggaacccaacactggggacaccaccaagagcacgatggactcttaatttgccggagcagccaaaaagacacaacccttattcaa

SEQ ID NO: 50311 - DNA, 530 bp, Gossypium hirsutum
  Clone ID: LIB3829-035-Q1-N6-B2
cacttgacatgtattcattccaattgtatgataaaaaaaagtatacagaaaagagggcaaaacagataaacttatgaatgcatcatactttaacaaattgactactccaaaatgggtaacaaacaattatacaaaaagcagcagctgagagactaaatgcaacccagccactgaatgatatgtatatgcttaaagatatatatgccaacttatgctgaccaaaaaaaaaagtgaggaaaataaggaaatcaaaactaggtgatggaaaggacagtggtgaaaaatgaaatgcagcactttgagactgtttccaaagcgctgcacatctttcaaccctagcctcggtcatccattccaatgatggatatttacttggagaaaaaacaaaccaagggcaaaaatgatgtttgtcttgaaacaagagcagtgagaacactgaagctaccggactagttagccaccggtttgatgtcacagttactgaaccctctcttaattaatgctcctccatgacttcattgtgattttca

SEQ ID NO: 50312 - DNA, 525 bp, Gossypium hirsutum
  Clone ID: LIB3829-035-Q1-N6-C1
gcaaattaatagcttaacgcagaaattcaaatcctcacacaacaagtataaattaaatttgtaaaataaaataataataataataacctaattaatgatttactgagtctgaaatcatcaacacttggaaagctgtacataaatatggaaatcaagtaaacagccgaagacgattagtaatcctttggcggcatattggacaattcgacacttttgacccacattccctgcaagtcgtatgcccgcaattaaaggccaagtcctttgtattcgtaaggcatattgggcatgtagcctgggtctgatcatccgcaggtgatgatgatgagacattgcttggtacacgctcaggtggagcaggtgtaggtctacggtaggaaactgggggaggccgtggaactactttcttggcttttccagttcgttgtccaagaaagccaagttctgtcactgctttgtactgtaacgggatttccatgagagcagcaagcgcaaaagcagtttccttctcttctggacttatat

SEQ ID NO: 50313 - DNA, 462 bp, Gossypium hirsutum
  Clone ID: LIB3829-035-Q1-N6-C4
acggggaaaaccccataagggggaaaaaaaccgggggaaaaaaacccaggggaaacttttcaccgcggaaagggaacggggaacaaattggacaaaagaaccgcccggaccaaacacttttaaaaaaaaaaccccaagaagaaaaaccctaaccaaaaaaacccccaaaaaaaacacgcccaaaaaagggggcgcccaaagcccccccccttaaaaacccaaaaaaccagaaaaacgcccaaaaaaaaaacaagggttcccgaggctaaacaaagccgacaaagggaaacccccaaaaaaaaaaaaaccctaaagaaatggggaaaaaaaaaggggaaaaattttcaaagggtaggaaaagaactaaaaccttcaacccaaggaaaaaaaaaggcccaaccaaaagcccgaacaactaccggggccaacaagagaggcccacgcacaaaaaaaactcccaaa

SEQ ID NO: 50314 - DNA, 516 bp, Gossypium hirsutum
  Clone ID: LIB3829-035-Q1-N6-C5
cagcagaatcaaatcattaatagcattagaaaacagtattaaactatagttgtacaatctgtctttagggatcacccctagctaggagtgaattacaatatgaaattaacattcatatcatgaaaatccccatccaactctctgcaagctaaagaaatccgaccccctataagtaacaaagataccgactaagatgtgggactctgtacgataacattaacgtcaaaagtaccttgaatgtacttgctgtagctaagtatgtatatgttggcatttgatcattccaaaaaggaagaaacaagaaagggtgattagttcatcgcagggagtagagcacggagtcgaataggagtctttgatgggcttactcttatgggcaatgatcccagaactgcaccactgcagttaagagctgtgattgcactttctgccattgtaaactcaacaaaagcaatacgagatgaatgatggtagtctcccaatatcctcatgcattgaacctccccacaaactgat

SEQ ID NO: 50315 - DNA, 543 bp, Gossypium hirsutum
  Clone ID: LIB3829-035-Q1-N6-C6
aagcagaatccaaatagattagttagcatatctgttcatatatatatacactctagataaagagtagagaaatttaatggctaagcagaatgagccacacttttatctaaactagtagcttattttgacaaattatacatagtgaaacataaatcaaagatagagctgcataggagagagtatataccttggacatgatgccaccagttctcttttgcttccatctgatccaactaacaggtaaaaagcacaatgagcatgagcagtttcttctcttcgtgatctcggcaacagatggaggattcgaggaatgttatggtgaaggctgagaagttcaaatggtctgaaaggcttgacgatagtccgagcaggtatgaacagtttatttgaaaagatcattcgaatcgtcttatcttcttaaaaagaatcattttcttcatatgtccaaatgagagctttcatgaaataatagcaaaacaggatgatatatattctgaagatcccattacccacatagcgtttcactatgctcggatcaattga

SEQ ID NO: 50316 - DNA, 507 bp, Gossypium hirsutum
  Clone ID: LIB3829-035-Q1-N6-G1
tttttttttttttttttttttttttttttttttttttttttttttttttttttttttatttgttttttgtaaaactaataagaagacaaaaaaagaacccaggccccagaaaaagcccaaggggggggcccacgaaaaaaccaggaacccgaaacctaattgaaaaaaaaacccgaaaaagcaaaaaaaaccggaaacccaaaagggccaaaaaaaggggaccaaaaaaacaacaaaaacaggaacacggggaacccaaggggggccgcacccaaggacagaggacaaaacaccgaccaaagcccggcgccaccgacccaggcaggaacaccccccgggaaccaaagggggaacaccaagggggggacaccgggggggcaaaaaccaaggaaaagaaaaaatctgggacccaaccaaagacaaaaaccttttgtacaccctcgaagaggacgccggggacgacccggaaaccccggaacgggacctggaggggaacaagggaaccgc

SEQ ID NO: 50317 - DNA, 534 bp, Gossypium hirsutum
  Clone ID: LIB3829-035-Q1-N6-H6
aagctaaattttttttgttttttttttactaaaaagtgttttcaactttcaacagaatttaactagcagaagcccttacaaattaaaccaaaaaagactttaccactagttttttaggcaaagccaaatttgggtgaaagaatgaaggtctgctaattaaaacaactgttggaactctcacggaagcggggatttacaaaagccacataagggtgcctcttattgttcaaaccacccaatgggggctttgagcttaaaaggccaaaggaagaagccgggtttcttggaacgaggtcccacaaccattaaatcacggataaggatctttaacacaaaagatgcaaaacttgcctagggcctgctaaacaattgcgcagacggtcaaggcaactagtagattgttcaactgtacaaaacctattgtgtgaatgagttccctaacagttttgatattcgggtatggcataagaaacataaggcccaacaaggagaagcatgttcattgttgccttggtcactgtaggaaaaacccat

SEQ ID NO: 50318 - DNA, 518 bp, Gossypium hirsutum
  Clone ID: LIB3829-036-Q1-K6-A6
ttaccagccatatttgatatcccctgaaaagggtttgagatctctaataaaaggggtgttggagctggccaaagaaccagcacgtctttgtgttgatgaggtacaccgtgtcctaatagacatagtttctgctgctgcaaatgctacacctggtttgggaaggtaccctccattcaagagagaggttgtggccattgctagtgctgccttggatgggtttaaaattgaagccaaaaaaatggttgtggcacttgttgacatggagcgagcttttgtaccccctcagcactttattagattggtgcaaaggaggatggaaagacagcgccgggaggaggagctgaagaatcggtcctcaaagaaaggacatgaagctgagcagggaatgctgaatagggcaccaagtcctcaaccaggtggtcagcaaactggtggaaccttgaagtcattgaaagagaaatttgggcagggtgagaaagaagtacaggaggggtctgctttgaaagttgctggtgctg

SEQ ID NO: 50319 - DNA, 523 bp, Gossypium hirsutum
  Clone ID: LIB3829-036-Q1-K6-A7
ggagactttacctgagtggagggacaaattcctatgttacaaacccctcaagaaactcctcaaaaacatcccttcaaccccatcgcttgatccccatcatcaacggcctgtatttgctgacgccaccaacactgctgttactcccgtcggtcatgatcatcaacaccctccgcttgatttgcaagattggtttgttagaattctgaatgaggagctcgaaaaattcaatgatttttatgttgataaagaagaagagttcgttattcgctttcaggagctgaaggaaagaattgaacaaattaaggagagtagtgggaagggtggagtttttgcatcagagagtgagtttagtgaagaaatgatggatatccgcaaggatcttgtcaccattcatggggagatggtgcttctaaaaaattacagtgccctcaattttgcaggaattgttaaaattttaaagaagtacgataaacgaaccgggggattgttgcgactgcaattcactcagcttgttcttcaccaa

SEQ ID NO: 50320 - DNA, 390 bp, Gossypium hirsutum
  unsure (1)..(390): unsure at all n locations
  Clone ID: LIB3829-036-Q1-K6-B3
cggaanccaccaacaacggncaacaccccgaggggncaacgagnaaacngagaagggggaggggcaganacacgggggacgagnnaangggaggaagaccggcnncgacaccaaancaacccacggagaagacgggaggaaaaacaaaaaaagacaaaagaaacaagnngaacgcaaaacnggggggagnggcagnagnngggaaacngngaaaaancaccagaaagggggaaaaangaacnggagggcgaagaaaacagnaaaaagaagccgaacgagncnagncncaaangaaagaagnggggaaagcaaagcaaacacacacccagggacacccaaaccccaccgagacagggnnggacngaaaaagaaanccccnngcccaaccag

SEQ ID NO: 50321 - DNA, 283 bp, Gossypium hirsutum
  Clone ID: LIB3829-036-Q1-K6-B6
atagccattaacaatgaatctcacctgttgcttccattgaagaaacgaaccttcatcgagtttcacaacatcatgtcgaggaagcgaatttaccacacgttcagcagtgaacacagatccaggaacgtcaacagagtcagacgcagcagagtgtgtcgttgccatgatcagtaacaccaagcgactgataccatgaagaaaactaggtaatctttgagaatttctttccaatcttggagaactttgtttactaaatgaatttagactatttgcttgcgataac

SEQ ID NO: 50322 - DNA, 485 bp, Gossypium hirsutum
  unsure (1)..(485): unsure at all n locations
  Clone ID: LIB3829-036-Q1-K6-E9
ttcccggtttttctctttcgtccggtagttatatcgncatgcatcatccagaggatgtgccttctaagctttgntgaatcttccatgaatgctgagaattatggggttggagtgaacaaaagttctgccattgctaaataagcaagtaatcataattgtggtttgttacgggaaatggttcaattaggtgtgtcttcatttcattggggggctgtaatgtatcatttgaaagttgtcacttggagccattagcacttataaactggtaggcgtttgactttttctagtccggcaccgccgcaccaatataaagttctcttttgcttcctctaccaataatccggtaggatggaacatatttaatatgctgggcctggggctggtaatgtgtcctaccacagatgattccggcggccgagacatgcttctaaagacaaaatgagcccaccggcttcgggggaccaggtatacatcccggtcgcccc

SEQ ID NO: 50323 - DNA, 529 bp, Gossypium hirsutum
  Clone ID: LIB3829-036-Q1-K6-F1
atttgctattacttgttgcatgcattttgtgggggaaaacaaataatatgcaggccatgttatcaatctattgtttttgtataatcacatatgttctcatgttctcatccttttttacaatctgagaatatttcttttcgttctggttggtattcaggcaaagccattttaatagtaatgactctaggatttgaactcagtccaaatgcttgaggaagaagtcaaggggggacaaataacaagcatgccatgttatccaactattgtttaccacaacttttctaatccgttttacagcttgagaacaattttgttcgggttgagtggtatttaggtaaagcccttctaattgtaatgactttaggatttgaacttagtccaaatgcttagggaaaattcaactaccacttacttccaaccacgaattgttacgaatcgtttatccatctatagttttcaacattccttatagttcctgcattttagttaccttaattctaactagacactgacggtgcctatttcggga

SEQ ID NO: 50324 - DNA, 326 bp, Gossypium hirsutum
  Clone ID: LIB3829-036-Q1-K6-G3
agctgtgggtctgggcgtgctgggcgtcagaggataattgttctctggaagctgatgacctaggatacaccggcatcaggcttgtttctcatcttgcccatattccttcttcggctggtcatctcaaggatgtgttgctattgatgtctgagacgcatcgactgcaacgtcagggggttattcgtgcttcagtgactctggaccatagtgttggagaaacgaattctgtggccccgctattcgagattaatctaccagttccactggaaatgagaagagaggactttgccttaccatcagctactcccgtgaagctcgaacagcta

SEQ ID NO: 50325 - DNA, 525 bp, Gossypium hirsutum
  Clone ID: LIB3829-036-Q1-K6-G6
tgataatgagttagcgagttgtaattgtgatgatgagggcctttggagtgtacatagcattttagagtgccagaaggtgagtgatttcttcattgctgtggcttatttttcgatacctattgaactgctttacttcattagttgttcgaacgtccccttcaaatgggtccttgttcagttcatagcctttatagtgctttgtggattgactcatcttctcaatggatggacttattatggtccccactcattccaattgatgctgtccctcaccattgccaaattgctcaccgcccttgtctcatgtgccactgctataacactattaactctgatccctctcttgctcaaagtaaaagtgagggagattttcttgaggcaaaatgtattggagttagatcaagaggtggacatgatgaaaaggaagaaggaagccggttctcatgttcgtatgttaacacaggaaatcaggaaatccttggataagcataccatattgtacaccactttggttgagctttctaa

SEQ ID NO: 50326 - DNA, 441 bp, Gossypium hirsutum
  unsure (1)..(441): unsure at all n locations
  Clone ID: LIB3829-036-Q1-K6-G8
agctgtgccgtgggtggagatacgttgcactcgatggtgaccgatcgaatatcgcttcaagaaggttcttcagtgcttgatcttcaggccaacgactacttttcttgctccgttgcaaggaaaagatcaaactcgcgctaccgccttcaatcatctgatgaaggggggacactcttgagagaactagcagatcatcgttgatggtaaaatcccgagatttaaagcatattcttcgatcgtatcatatttattgttattgcagacatagtagttcttatcggtcatctacagtatatcatgggatatatacctagatggattttacattagacgtagcaaagttcaaagattagttttatatatttagtagtaaaagttctttttgaaaataataaatttccttttttttccnancatatcccaataaaaaaaccatttttc

SEQ ID NO: 50327 - DNA, 526 bp, Gossypium hirsutum
  Clone ID: LIB3829-036-Q1-K6-G9
ctgacgcgtggtgcggccgcattggtgaaaagaagagaccgatcactttttgctagctaagctactgaggaaggtattgaacctcagaacagcgttggccgcaactaataatatcataatatatgagataaagcttatacatccagaactaccctccaactacatatgtaaactagataaacaatatataggctcgctctgggactttctttaagccacatggtgctgatatgtttgacggtctttatggcttcgatgataaaggagaggctactcgactgcaccgtcagcggtagagacagatagatctggtaggcctggggcgatgaggtaaagtggaacgaagacatgccaacaaagattctatgtcgcttgagacaatggcttattcttcaaattgagcgcctgaccctgctacagggacttaccggacggagaattggggggctgatatcaacgcagatgacctccggtagatggtggtgaatcacaagattagattacagccaaaacttgccaccgcatg

SEQ ID NO: 50328 - DNA, 538 bp, Gossypium hirsutum
  unsure (1)..(538): unsure at all n locations
  Clone ID: LIB3829-036-Q1-K6-H1
gtttaggatagtaggctagggttaggttaggtttgggcttagttttgggtttttggggcagttgggttagtttgtatctgggccaaatttgggcctcaacacatcgcataagtgctttcccttccttatttgctaacatccattccattccaacattgtagtataaaacagacaatctaataaagagaaatggttcaaaatcaaaaaaaaaaaaaaaaaaaaaaaaaaaaaaaaaaaaaaaaaaaaaaaaaaaaaaaaaaaaaaaaaaaaaaaaaaaaaaaaaaaaaaaaaaaaaaaaaaaaaaaaaaaaaaaaaaaaaaaaaaaaaaaaaaaaaaaaaaaaaaaaaaaaaaaaaaaaaaaaaaaaaaaangggggggcccttttaaaaaaaaaaaatttttccccccgggggaagaaaattttttttttttttttggggccccaaaaaaaaaatccgggggcgcgttttaaaaaccggggggggggaaaaaacccgggggcccccaaaaaaaaacggggggagaaaaacccttttta

SEQ ID NO: 50329 - DNA, 453 bp, Gossypium hirsutum
  Clone ID: LIB3829-036-Q1-K6-H11
gtcgttatagttttgcgatagcgaaacctaatttcatggcagtggccgtacatcgacaacgctgggactgggataaccctgccgatcccaatcttattggacttgatgcacattccgcttgctgcagttggagtaataaggaacaggccggtaccgctcgcccttaccaacacatgctcaatctgaatggggactggcactcgccctgtacctgaacatcaagcgctgtgggtgttgcgctcacgcgcaccgttaccgttgcaattgccatagccctagctccttttgctttctttcttttctttttctttatggccacgttctttggctgtcccggtctagctctaaatctgcgtctacgtttacggttcagatctagagctttactgcacctcaaccaactaaaactggattatggtgaacgttcaggtacagggccatgatcctgataga

SEQ ID NO: 50330 - DNA, 526 bp, Gossypium hirsutum
  Clone ID: LIB3829-036-Q1-K6-H8
ggaaggactctagaagacaagcaattaaagaagaggaggccagatccgaggctgaaaagagaaaaaatgcataccaagcagcatttgccaaagcagatgaggcatcaaaatcactgcggctcgaacaaacgcttacagttaaacctgaggaagatgaaaatcaggtttttgctgatgatgaggaggatctttataaatcccttgaaaaagcaaggaggttggctcttaaaaagcaagaagaaaaatcaggtccacaagctatagcgctccttgctaccacatctgctagcaatcaaactacagatgatcatacctcaactggagaggcacaagaaaacaaggttgtgatcactgagatggaggagtttgtatggggtcttcagcttgatgaagaagcccataagcctgacagtgaagatgtcttcatggacgaggatgaagtgccaggagcttctgaacaagatagaaaaaatggagaaaacgaggtgggtggatggacagaggtcattgatactagtgctgatga

SEQ ID NO: 50331 - DNA, 545 bp, Gossypium hirsutum
  Clone ID: LIB3829-036-Q1-N6-A1
cctactacactgtgcccttgggggccagtggcccctactgcgggtcggcaatcgggcgacgggcgcgtgcgtcgctactagcccggattctgacttacaggcgttcacacatgctccaccccacggaacctttgagccgctggctaatcaaccaagcaagacgaccaaaagaccgaatcaacaaacccttttttactagggggaattactcctgagacgcggtcattagaccgggaaaattaatctatctcaggactgaataaacccaactcacttttcaaaaaagccggagaacaaaccaacactttttgaaaaatgctaaaaagtggttgcaagagcccccttcttacgaccaaaaaggctctccaaaattaacgcccggatgccacaagaaacataaccctggggaagctcttgtgacaccgaaatccatgtattgggaccgaataaacgatttattggccacatttttacggacaagagtttttcttggaaacttaattaaacgagcttttaccctatggaaccacacgagtattgtgaac

SEQ ID NO: 50332 - DNA, 517 bp, Gossypium hirsutum
  Clone ID: LIB3829-036-Q1-N6-B1
gagagaaaaaataatgcattggttgggattgattaaagactgctttgaattttcgggcgaaattgacaagaggacttacataacattctcttgatttacaatagaccatttacctgcctccctggtttcagacaagcaaggattcctgcttactttaactgaacatagacaggatatgcgctgtgaaaaagccaaccagctgcaactgaaggaattaaggaaaaaaagttcttttaagaaaatgacgactgcaacctttggctctctatatatggaccaacttcagtaaagctgggtgcagaataacactggatgccaaaggcacaacgtagccaatattattctttcttaaacattgtaaccattattcacctggaaaggcttaccgctcatgtactgctctgagcagaattaacatttgccgctgcagcatatagccgcgggcgctttattgcttgcctttgagttgcccttaccatgagggttgttatcttcagggaacttcatcagagagcct

SEQ ID NO: 50333 - DNA, 270 bp, Gossypium hirsutum
  Clone ID: LIB3829-036-Q1-N6-B5
cttacgtggcgctgttcaatcaggcaaggctgtttagaggaaccactttatgtattggacaaggcattaggagaggccggcattgtaaagttcgcctcaggtgtagcaaatactccaagcaaaaatctaacagctaattggcgcaccatttcctgaggctttagataaggcgggaaacaagccaccctaaggtgccctagaactcaaactatactttgtgagggaagtgaactggggaatctcacatgagctgttatgcaggatagtcac

SEQ ID NO: 50334 - DNA, 517 bp, Gossypium hirsutum
  Clone ID: LIB3829-036-Q1-N6-F1
gaggaaagtacagggaaatcccctcacagttatccattgaacttcaattttcaaatgaaacaagtagatgaactaaattactgtaaaataaaagtagaggaaatgtatttaaaaaaatccgaaaactaatggaaataaaagcagaactaaatttcaaaaatctgaaatgtacagggactaaaatatatttgaacatgataaaaaaatgcaacggtgagctgaaccaaaaggaaaattgatagttactctaccaagaaagaattctgatgaagaaattgaaaatttaacaattgaaatatatagtaattcgtttaaaaaaaaacatcaaataaaaaggacctaaaaacatgatatgattacctgaaagactgcagaactatacctgatctcattcaaaagcattgcttccaaaatagatgattagggcaaatggcaatacaactgatgaagaactatttttgccccaaaaaagagctttaattccgacattatatcacggtttgtggatcttgaaccc

SEQ ID NO: 50335 - DNA, 434 bp, Gossypium hirsutum
  unsure (1)..(434): unsure at all n locations
  Clone ID: LIB3829-036-Q1-N6-G1
atggggggnaaanncccnnttnaatggggaaaggggcaaaaatggggggcaaaaaaaggggcaaaacaagaccaaggggaaaaaggccccaaaagggaaataaaaaaaaaaaaggggggggaaaaaaaaaagggggtgggccaaaaaaaggcaggggaaaaagttttggaggcaccaaaaggcccggaaaaagctaaaaaaccccaaacctccaaacctttcttcttcccccaaccacctttttttttgggcggggtcccaaaagcaaaccaccccgggattcaagaaaaaaaaatgggctgggggggcggaaccttcggaaagggaggcaggggaacccggcctgacccatggggcataaacaaccccgggaaattttaaaggggcaacaaaacccccgggcttcaaaaaaaaaacggaaaagggctgcaaaa

SEQ ID NO: 50336 - DNA, 361 bp, Gossypium hirsutum
  Clone ID: LIB3829-036-Q1-N6-G3
ttttttttttatatttttttttttgagttttactttttatttgtgagctattcattaactttctgaaaccattaactttattaagttttcttcccataatggagagaggaatgcctgttaatttcaccccgtgttcccacaatgccgtatacccacaatggctgcaaactcggcaactatcttgcttctatacagcggagaaagatgctgataaacacaagcgggataaaaatacacggaagctagaacccaggtttaaatcaaataataattataggaaaagcatacaatgcagccacttacttactttccaacctgcctatataagaaaaacaaaagcagccaatcgaagctgttgctt

SEQ ID NO: 50337 - DNA, 474 bp, Gossypium hirsutum
  Clone ID: LIB3829-036-Q1-N6-H2
ggggtcagtggccctttatgcggttttggtatcggtcgacgggcgcagagcgaagttaatagccccaaaactgactgagacgttaagggccataacccatctcatggtatataagcgccactgacttttcaacagaatgaaaaggcccactgaacaaataaggggttccggaattactaactggaagtacaactgcgaggcaacaatcccccgagcagggggaaccagtattacaattgcatatagaaaaaaaacccgcacaaccggggggaaaacagggaaaccattcgtgttttaaagccaacaatttacggcaatgtggccatacctgggtgggaaagaaccttttccatttaaagttgattgaaaaaatgaactgagcaaagcctgtacttaacataccccttattgaacaacccccagaaaaaagattgggttccaagcaccaaacggcacacttggactccacctttg

SEQ ID NO: 50338 - DNA, 490 bp, Gossypium hirsutum
  unsure (1)..(490): unsure at all n locations
  Clone ID: LIB3825-023-Q6-K6-A10
tgtgaagccaaattactgctgtagatggtcagtaccaaattggaatctatgctctacgtgcaatacgatatggcgaggagattacatttgattataattccgttacagagagcaaggaagaatatgaagcatctgtctgtctctgtggtagtcaagtttgccgtggcagctacttgaatttgactggtgaaggtgcatttcagaaggtactgaaggagtggcatggtatacttgaccgacaacagctaatgctagaagcttgtgaactaaattctgtatctgaagaagattaccttgagctagggagggctggcctaggaagctgtttgcttggtggattgcctgattggttggttgcttactcagctcgtgtggtgagattcataaattttgagagaacaaagctccctgtgcaaattttacagcataatttgtaagagaagcatgagttctgtatagacatatctctngatgcagagaggaatgatgc

SEQ ID NO: 50339 - DNA, 604 bp, Gossypium hirsutum
  Clone ID: LIB3825-023-Q6-K6-A11
gtttccaaagaacttcgttgcatttccctgttttgccttttcccccccaaaggctggtttcttatatcggttttcttcccccctcccttcttttgtttaacatgttagagttgagcttgatcataattcataatttttgtctttggcaattgcagttaatgaaatggaatttggcatgattttgatcttatttgtggcttcaatccctacaattttggctgaagatattagttatggaacaattgtagttgatgggactacaagtattgctcaaaccgatgataatttcgtttgtgctacaatcgattggtggcctcatgataagtgtgattataagcagtgtccgtggcactatacatctacaataactttggacttgtctcatcctatccttaccaaagctatccaagctttcaaccgtttgagaatacgaattggagggtctttgcaagatcaagtgttgtataatgttggaaatttgaagtctccttgccatccattcagaaagatgaaacatgggctgtttggattttcaaagggatgtttgcagatgaaaaggtgggatgaactaaaccatttctttaatgctaccagtgtgatgttg

SEQ ID NO: 50340 - DNA, 612 bp, Gossypium hirsutum
  Clone ID: LIB3825-023-Q6-K6-B7
gccaccggctgcaccttcgctgaaacgaaagctcacgctctacagagctttcagtggcttaacacagacgcaccaccaccataacccaaccagcccgtcctcctcacctgatgatattgaaagccaacccatcttggtgaactctgtgagccgagatgggtcgcaaagttatgaaacgacgttcttgatgtcgtcggaggaagggggagagtatgagctggtttactttagaaggcttgatgatgagttcaacaaagtggacaagttttatagggctaaagcgcaagaggtgatgaaagaagctgatgtattgaacaagcaaatggatgccttgattgcttttaggattaaagttgagaaccctccagggattcatttcgacaggtctgtggagatgactcgtcttgcttctgatattgcagcttctgctgctgctctctctgcttctactccatctggggcaaaatcagcaagcaaaagggctgctcacctggaagccattgaagaaagcacccatggccaagctgatgatgacgataatggcgatgagaaagagagaaatactccgactttagaagccaaaccagcaaaacccaaacccaaggtcattgc

SEQ ID NO: 50341 - DNA, 588 bp, Gossypium hirsutum
  unsure (1)..(588): unsure at all n locations
  Clone ID: LIB3825-023-Q6-K6-C12
cggncgcgtggggcaggaccaggggtctagctctattgtcaatgcatcagttgcatcccctgctgcccagaacatgacatttacatatgcagacaacataaactccagtgcttctcttcttgtgaagcgggagaatcctggcggtccagtgtcacccttaactggccttaataaaagagctaggctcaatgctactggatctgacagtattcttcagcaacaaatcagttcacatatggatggcctccatggaccagatatgagctggaagaatatgttactaccccagcaagcgacggcaagaggaattcaatatgcaaatgccagcatgcagaagtatcctctgcaggcttttgaaggggttctgaatcaggaggttggtacaatgccatttgctgctggacagtcagcagtgagatatggtgccaaagaagagccatttgatccagacaagttggatagtgctgaactcaatagggaaactgatacaaaccatttggatccacagcagagacggcttcaaccaagattaccccatggacttgtgaggcctggtttccttgaaacaccttggaacggtattaacca

SEQ ID NO: 50342 - DNA, 524 bp, Gossypium hirsutum
  Clone ID: LIB3825-023-Q6-K6-E8
atcaatcagaacccttcgggtgtaggatgatccaggctgtaaacaccctgtagcggtgcgacgttatgagatcaatgctattgctacgttatgttgaattcattagaagcgtaacaacacaatgtgtggactgacataaaccgatcatggccaaatttagcagtgtagcgatacatccccctttgaaatggaggctaataatgccaaatggccgcatccaacactcgtttacagagttgaccttcctgcatgtgaagaagcacgtctcgcttgcattgaacataaacctcggcgcttggaacactcatctcgcatccaacacattactcttggcacatgcttacacccttgctgacattatcatgacatttaatttctactcgggtttcttgcatatctgaccaagactaaacctctgaatccttcatgttgagaggtacttgctgtaccttgcctaatccccaaaaataagatgatggtaggtgaaacgaagcaggccatctctctaccaccaggttcttcaa

SEQ ID NO: 50343 - DNA, 565 bp, Gossypium hirsutum
  unsure (1)..(565): unsure at all n locations
  Clone ID: LIB3825-023-Q6-K6-F10
tctatttctgctgttaaaacgtgatgttgcatttaaatcatccattcccttcccttttccagttcggtattttggtgctcgtgacagtaactgcttttgggttttataaatctgtatgggaactcctgattgtgtttcttactgatttctcttaatttcaacattttttcatgttattgtgagaaaatttcaaattgatcgatctattgtataaaatttaattacttagtgcttagggtaattcgatataaacatgatattcttgacatttttctttttctttccgtagtgcttgtatctctgttatatttgaatcttagcagatgcaatttatccgatgatggatgtgagaagctttcaagtaagtttcatatttacccattccatgtttgtagagttaaaaaggttctgagatggcctttggcttatgggtattttcttttgacagagcttggtaatctgaaaagattgaacttgngtttcaatgacatcagtgatgcatgtttgatacacctaaaaagtttgacanatttggagagcttgaacttggattcatgtagaattg

SEQ ID NO: 50344 - DNA, 272 bp, Gossypium hirsutum
  unsure (1)..(272): unsure at all n locations
  Clone ID: LIB3825-023-Q6-K6-F7
gattttctgtttgttcagnataaggaagaggcttagacagcagaatgtagcaacaaaaaaaaaaaaaaaaaaaaaaaaaaaaaaaaaaaaaaaaaaaaaaaaaaaaaaaaataaaagaaaaaaaaattaaatatgcaaagacatgcagaaggagtaagctcttttttaggagaccactatttttgttgggggtggggggttttttacaactttagtggttggtgaaatccttggtgtttcccacctttttcttcttggggcccttccctttt

SEQ ID NO: 50345 - DNA, 513 bp, Gossypium hirsutum
  Clone ID: LIB3825-023-Q6-K6-G12
gaccatggtggacccacttccgtggggggggttgcttgatcactcctttatcttttccatcatttatagcaacactgagtgaaaaatcccatgctacttatttggaactaccctctattgggatttgggaaatataccaacaaaactctcttaactgtttctgactatgaataaatggtgtggtgagataataatacaaaacccatcaaatcaatatgagattactcttggctaaatttctccagaggttttaatgtttgatcaagtaattcaaagcatcaactttataacagtgggggtacttattactgttttcaagtagacgaattccatgagcctgaatgacttacgcgccttatatgttaatcaagactccaaatcatcctcaatactctggcacttaaactcccacactctgaactatcgtggcagtaatatattctaaagaagaaacagggagctctactctattgcgcctatatgaaattattgattaggctgggcaaacattta

SEQ ID NO: 50346 - DNA, 611 bp, Gossypium hirsutum
  unsure (1)..(611): unsure at all n locations
  Clone ID: LIB3825-023-Q6-K6-H7
tctaaaaaacaacaaacagnanagaagtatagagataaggggngaaaacgttttttttatttggtgtttacgagctctgatttttcatctgttgcttctgctgcaattgatgtaaggtggaagagaagaagatagagaggttgtggtgtgtttgtttgcagaaggggaagtgaaaacgacttttgatagattaaaaaaagtggattttgattgactggatgcgtgaatcgagaagattgttgataaaactgtgagaagtataggtttggtgttctaatttcgttaggttttctctgaagtctcagagagatagttgattttctgtggaaaaagggaagctttggttattgatgtttgaaccgctggtagatttgagtgggattttagattagggcttttttagtatagatttgaggagtttgagagtgtagcagatgtgagatctgagctaaaagatttttttttgaagaaatgactacgtcggagatatcgataaaaggaaattgtgtcaacggaagaggagatagtttttcttccggttataccgagccacgagatactaggaacgccatggaagggcagaacggtcattccgctcgtacaactgacat

SEQ ID NO: 50347 - DNA, 583 bp, Gossypium hirsutum
  Clone ID: LIB3825-023-Q6-K6-H8
atattaaagacccaagagattttttgacctgtggaatgccgtgtttgatgagctctctggcattagacctgatgtggttgctaaaaataaaaatgtaatgtctggtctaaatcttatagttgcattaattgaacaaaataacttgttcctatttaattgtttgattgttgtattccattaatcatgttaaccactccctcttccttaatgttttgagttgtagcaactgtgaccgtgattgtagctgggaagtggttgctgtgccaattctgttgtatgatacacatggcttgtgagataaccactgagtacaaattaataacctgtaccagactgttgctgccttgttggatcatgttgaaaatggttttagctgttgcctagctttccaccttgtttgcttgtagcgggctgttgctgcacttcctgcaggatcgtgtcagttttaatacctcggtgtttaaatggatatgatatgctgcccccttatcacatgtttggtcaaattttattatctttccctgtttgaagttactttgctattatagtgatttccttcttatctagaacagatcactattcc

SEQ ID NO: 50348 - DNA, 424 bp, Gossypium hirsutum
  unsure (1)..(424): unsure at all n locations
  Clone ID: LIB3825-023-Q6-K6-H9
cctgtatcagtaaagtccatcataaagtcagataatgaatggttcttcttttgtgctcgaggaaggaagtacccaaatggttcacaaagtagacgggcaaccgaacagggttattggaaagccacagggaaagaacgtaatgtgaaggccggttcgaatgtgatcggcacgaagaggactctcgtctttcacacaggtcgtgctccgaaaggggaaaggaccgaatggatcatgcatgaatattgcatgaaaggaaaatcccaggattccctagtggtatgccgtcttaggaagaacagcgagtttcgtctgaataacaattcanatcgggttgctcggaatcacagggagttgtcaatcgtgcatgacagtaaccatgctacctcagatggtggaactgatctaaactgcatctctgaagggg

SEQ ID NO: 50349 - DNA, 605 bp, Gossypium hirsutum
  Clone ID: LIB3825-024-Q6-K6-A8
ctttgttgctgtactgatgattcttctgacgatgaacaagcagctgctgttaatgaagttgattttaaagtttctagtctcatttcagcttttgcaaactgcagctttatacaaaatttgtgctggttacttaaattttataggagcaattcaagtaatacaaatcaatacattataggcttgttgcggaaggtaactgatgaccttgagcttgctccaatgctttatcagttgtcactccttgtaacattctatgacatactagaagagcagaagttgtctccaagtgaggaccatgcagatattgttgtctttattactagtttagtcagaaaaatgctaaagaaaatgaagcaccagccccttctttttattgaaattctcttttggaagacacggagagaatgccattacatcaatgctgaatatttattacacgagcttggccatttgaagaaaggaaacagaaatcaggatagtgttccaggaaatacggaagttgagtcctcagaggcggccaatgaatgggttcgcagaagcatagcagatgcactgggtgacgacgaagctgatgttgtaatcgctcatgacatcagacatcagaa

SEQ ID NO: 50350 - DNA, 605 bp, Gossypium hirsutum
  Clone ID: LIB3825-024-Q6-K6-B10
gggaaaggaaacatggcgactctttggccaagaaaacgaggccactgccgtgtttttcccacccaaagactaatcaaaccttactcttttcttttccccgcatctaattccttaatttgatcttctatcaatcatatgttgaagaaaaaacgatggcaaactgtcccgccgttcatggtggctacccctccgattatgttgctgtttccatagccatcttcgccgtgattttacttattgtgaggtcaagtttcccgtttttgatacacaaagttccaagtgcaagaggcagtgccttttggattccagtcattcaagttgttgccagcttcaacttcctgttatcgcttgtgatggctgggaatttcctcaagtacaaaaagagccactggtggttgtcttgctatgtttgggcagtatgggttgaaggtccacttggatttggtttgttgatgagctgccgcatagcacaggcctttcaactatactatgcatttgtcaagaggcgtttaccaccggtcagatctcatatttttcttccactaattgtcttgccatggatcgccggtgctgcaattattcatgtgaagaagcctctcaattgc

SEQ ID NO: 50351 - DNA, 583 bp, Gossypium hirsutum
  Clone ID: LIB3825-024-Q6-K6-B8
ccccgcgtccgccccgcgtccgccccgcgtccgcagaggttctgatagcttatgctgctacggaagttgaaaaaagtaaatcaaacgccatttacacgaaaagtctccactgttcttgagagtgcaagatggatgatctgatatcagtaaaatattaacaaattctttagcaattcagtattcaaaaaggtagtctgattaaagctttgatttaaatggctgaatcggtagcaaatcccacagttgtgggagcaagtacggtggaggaaacatcgcccgatttgttgaagaatacaccatctaacattgcaagattggaggatgtgatagagcattgtaagggccgtcggaagtatcttgcacagacaaggagtccttcagatgggggtgacgtccgctggtacttttacaaggttcctttagctgaaaatgagctagctgcctctattcctcgaactgagatagtggggaagagtgactattttcgttttgggatgagggattctcttgctatagaggcatctttcttgcagagagaagaagagctactatctagttggtggaaagaatatgctgaatgctg

SEQ ID NO: 50352 - DNA, 590 bp, Gossypium hirsutum
  Clone ID: LIB3825-024-Q6-K6-D9
gtcaaattcttggattccacacccttctctctgcatccactgacaacaccctgaagtcatgggatctcaagaaaacttgctcggatggatcgaccaccaatacttgctgcttaacctttagtggccataaaaatgagaagaactttgtgggtttaactgtcttggatggatatatagcatgtggttcagaaacgaatgaggtctattgttattatagatctctgccaatgcccatcacttcgtataagttcgggtctgttgatcctatttctgggcatcaaaccggtgatgaaaatgggcagttcgtttcaagtgtctgttggagacaaaagtcaaacatgcttgttgctgccaactcaactggaagtatagaattactgaaactagtgtgatgaaaacctttccccaaaatcagttctgctcgataacctgtaattagcttggtcgtcctaaagatagattacatttactttgagaaacccatgatttggttcaattgcagaggctgaagggtaaaaatgagagcaaaaacttgtgcaccaactttgagtctgccttcaattgagtgtgcccatgcacgcagtcatatt

SEQ ID NO: 50353 - DNA, 605 bp, Gossypium hirsutum
  unsure (1)..(605): unsure at all n locations
  Clone ID: LIB3825-024-Q6-K6-H10
cattaaccttgttngagatctcatggatgtgaaccagtggtcaactctgttttcgggaatagtttcgaaggcttcaactttggatgttctctcaacaggagtagcagggaattataatggagcccttcaagtgatgacagctgaatttcaagttctttcacctcttgttcccactcgtgagagttattatgtaagatactgcaaacagcatgccgagggaacttgggctgtggttgatgtttccttggatactatacgccccagtcccactgtgagatgcagaagaagaccatctggttgcctaattcaagaaatgcccaatggctactcaaaggttacatgggttgagcatgtagaagtggacgatggaggtgttcacaatctgtacaagcaactggtaagctccggccatgctttcggagcaagacgatgggtttctactttagatcgacagtgtgagaggcttgcaagtttaatggcttctaacattcccaccggcgatgttggggtgataacaaatcaagatgggagaaagagtatgctgaagctagctgagcgaatggtaatcagtttctgtggaggagttagtgcctctacagcacaca

SEQ ID NO: 50354 - DNA, 597 bp, Gossypium hirsutum
  Clone ID: LIB3825-025-Q6-K6-B12
aattgaagtgttttcttccaagttcttacctttattttcattcaagtgataatttctcttcaatttagattatacccattttgtcttcagcttactggagcagtatttattcctttgattcttcaggtctaccaagagactttctttctttatttgaatgtttgatataagtgtacttatttccttatacagagtgatataaatttttatgattactaaatgcttgcttgacaagatcttgtttattataatttttttcaattttgaaatgtgtattgtaattaaacaatatgcttttccagttagttgacaaagaaaaggagcttctaagatgtaacttcattttcaaaatttggcatgctcttgatgatgtcaaagttgggcctttcttttggctgatttacagttgtgctctcgggtttgtgttgacgtgcccaagttgccaactaaagagggagtggaaagattttctgaataggaaagctttctccctcactaacagtgttcaaatcaaagcttggtttaataggcagtggcacaggcaactagaacaaaatcataaaaattctgacccaataattagactctcgatttatt

SEQ ID NO: 50355 - DNA, 583 bp, Gossypium hirsutum
  unsure (1)..(583): unsure at all n locations
  Clone ID: LIB3825-025-Q6-K6-B8
agnaccttacttttagcgccatctttggtgccaaaatctcgtgtctttgtgctagggtttgaagttaacaattcttcagaaagaaaaattaaagcagcaatgaatccggttcacttccaacccgcgccgcctccaccttggttcccaatgttaccgccggaacctccgaattcgagtacattttgggagaccagaaatgtgcgtgatcgccttagagaattgcaagataccctcaatcttgccaacgccgtgcaaaaggagttggaaatactgacgatgataaaagatgggtcgatggacccttctgtttctgagttcttgaagtatctagaagataggaggattgatttggaaactcaagagctactgtctttggaagcggcgaatgcattgatgtcaaagctaagagctcagttagagccctttagatatgttgcagatgaagggatcccgtgggaggagaaatcagcagtagctagactgaccaataaaattaagaagtctaaaaggaataacctttggaggaaaagaaagcggaaacgaattgcagaattgcttgcaaaggagcatgaacaatttgatc

SEQ ID NO: 50356 - DNA, 615 bp, Gossypium hirsutum
  Clone ID: LIB3825-026-Q6-K6-A8
atattcctctacttcatatgctaccagcaactgatattttgtagtaaatgcttttatgatttctggttgtctttatatggttatgtttactgcacaggaatttcttaggaatccagacagatatatacggcttggtgctcgtcctcctcgaggagttctcctggtgagtagatcgtaagaaaactatacttcatgatgatgttgacgcttttattctgtagaaatcatgccttatttgcaaaacattattaatcttcagaaattaggttgtacttcccggttctgtctcttattctttagaataccttctctgcagaaaactttggttctcttaatgcttcctactagtgtgtcttgttatgataagctcaataagtttatacttggaattcaacatgttcaatgtctccacacagtgcttagatgctacgagcatgtgatggtttctttgcatcagtaccttcttatataaaaatggaaataactttggtttttatggttttatttgtgttataggtaggtcttcctgggacaggtaagactcttctagcaaaagctgtggccggtgaagcagaagttcccttcataagttgttctgccagtgagtttgtagag

SEQ ID NO: 50357 - DNA, 580 bp, Gossypium hirsutum
  Clone ID: LIB3825-026-Q6-K6-B11
aaagacaaccctcttggctgtcggcaaattgcttcttctggggccttagagaccttgtcttcattgattgcaagccacttcccttcattctgctcatatttacctcgcatcaatgaaatggacgaaacttcaagtgacatacctcttactgattcagagttggatttcctcgtagcagtacttggtctgcttgtaaacctagtggagaaagatgaatacaacagatcacagcttgcagcagcttctgtttgtttaccaaattcaaaagggtcaacagaggagagtcgcatctctgtgattccattgctatgtgccatctttcttgcaaaccttggagaagaggatgcagctggcgaagttctgtcttggaataatgaagcggcattgctacaagaagagaaagaagctgagaagatgattttagaagcctacgcagctttactacttgcatttctttctaccgaaagtaagcgcacacgaaatgctattgctgattgtctcccaaatcgcagtctatcaattttggttccagtgttggagagatttgtggcgtttcattttacattaaacatgatttctc

SEQ ID NO: 50358 - DNA, 614 bp, Gossypium hirsutum
  Clone ID: LIB3825-026-Q6-K6-B8
ggagggccttattaaggcttggagctttaggcttactgcttgaaacagcaaggcgagctttcgctgtggatgccatggagccagctgaaggcattcttttgattgtagagagtcttacattggaagcaaatgagagtgacaatattagtatctcacaaagtgttctcactgtcactagtgaggaaactggcactggagaccaagccaagaaaatagttcttatgttcctggagaggctgtgtcatccttcagggcaaaagaaatcaaacaaacaacagaggaacaccgagatggtcgcaagaatcttaccctacttaacttatggtgaacctgctgctatggaagcacttattcagcattttaacccatacttgcaagactggggagaattcgatcgattgcagaaacagcatcaagacaatcctaaagatgaaagcattgctaagcaagcagccaagcagaggttcacggttgaaaattttgttctggtttcagaatctctaaaaactagttcctgtggggagagattgaaggatattatcctcgagaagggcattacaggtgtagctgtcagacatttgggtgagagttttgcaattgcagggcaggctgga

SEQ ID NO: 50359 - DNA, 585 bp, Gossypium hirsutum
  Clone ID: LIB3825-026-Q6-K6-G9
cggacacatgagtgcttggcgcagtggctgtagacatgctaaaaatctgtgatagggtatagtatgtgaagacgtcttaatcccatgatgacaagttcattcaagttaatatccagcttatacgcccattgaaagtacctgtttcttgacaatcaagactcagaggaacaccacttgctatgtgcttgcctttgcttctgaattgactgaagtgtttgattgcttgtatacttacgattcagattataggctatccccatcactggaagactggaagtcggctgagactttatgcacctgcttgaaacctgtatgcgatgcaaacatgttccttacaactacaactctccctaccgaaattacattcttttatgaagtgtgcgaaaatacattgtggacttgggtcactccatcacttgctaggatgctttcatcagaaaccttgcatctatcaatgcatgatgaagatagaccagtactggatagactgtaaactggttatggcattggatgaggtcatggatcctcattcaaaatggaaacttgacgagttcaggcccacaaaattatgtggcgaatatgctc

SEQ ID NO: 50360 - DNA, 583 bp, Gossypium hirsutum
  unsure (1)..(583): unsure at all n locations
  Clone ID: LIB3825-027-Q6-K6-A11
ttttggtaggatttctggntggttctgtttctgctcccctcgtttgttcaaactccagcggtgaacttgttgtgaatccatctgcctcggtcttctctcagcaagatcatctacttacctcttggcttctttccacgatcggttcctcttttctgtcttccttcacagatgtgcgaacggcttgtgacgtgtggtcgacggcaaacagcctatttgcgaccgacacaggtgccaaacagtcccggatccgtcatgagctgcattctctcaagaaaggtagtctctccatcacggggtatgttgcgaagagtaagggttggtgtgcacttctagctgtgtctggttctcacatctcagaggccgaggaaacggagattatgggcttaccatctctaagctctctataaatactatattctaagtgtacaaaggcaagtttaaggtccaaatacagaagtgaatttcttctacacattagtttagcttctctcaactctgtatagcagattctttaatcaagattaccagagtctcttcacaccagtttaagggggaagtcgtccttcagttcatgtttacaaaa

SEQ ID NO: 50361 - DNA, 460 bp, Gossypium hirsutum
  Clone ID: LIB3825-027-Q6-K6-A2
gccactgcctgcaaagactataggcaagagggttgtcatatgtacgcaagcgtgcatgtagagctgaaagaccacagctcagctttaatggcatgctaccatcctttcttgtcataagatgcgggccatatggactagcaaataaaatctactactcctacagcctgacaaaagtggcacgattactggcggccggtatatacaatgcaatcacacaaacacgctcaagctacttaataaatatgctatagcgaaagctaacccaaaatgactggtaggtggtccacatcatgcccacacttaaaaccatgcacctacctaaaataatttctttaaagaacaccgcgctttcggcaaaaggccttatagcgaataggtcctttcctggcactcaagccaacatgtgtccaaccggaatggcgaactgtacgctccctgatccatttcattaaatactgaa

SEQ ID NO: 50362 - DNA, 446 bp, Gossypium hirsutum
  Clone ID: LIB3825-027-Q6-K6-A5
gtggttgcgcttattacaggacgtttgcaaataccattatcatatggttctttgtctagactgcttctaatagatgttggaggggtctactgccgtttaagctcctcaatcatggtaaggtttttgtaaaacaccagaaaaaggccaattttcagcatgccgaccttctatatattcagtacttgccatactctaccggattatcattactctggtttgatatgaaagatttctatgttagagtcatcacataacaaggtgatgattcaacccccgagattctgactcttaatgatatcctcctataccctaacacccttctggaaaataatggcattataatccccatatactctgatggggcctatctactccttataagggatcgtgttgataacagatcacaagaaaccacctttgttagcacagatcatggtaggcttaca

SEQ ID NO: 50363 - DNA, 593 bp, Gossypium hirsutum
  Clone ID: LIB3825-027-Q6-K6-A7
tgccattttcgcaagcagcaaattagatccccatttgctagggtttcgacacagttcagcagccctaaaggctccattttccttcgctcttcaaacaccatttcaccatcataactggagaatgatacgaaggccctcctaatctccatcaaagtagagatttaaggttcattttcacccgacaatccccgtctcaaacttcgatttcgacggaggagacgaggacccggacgatgcatccacgaaggtacggaggccagttggcacggtggtacgtggcgcttggcgtggaggtgtacggcgtacagcgtatggaggtgctggaggctgctagaggctagttgcggcgcaggcgttaggctagggttcttagttggctgaagtttgtttaagttttgggccatttgggccaggggtatttgggttaggttattttgtaaatgggcttgtaactgggctattgggttgtattaggtttgggttttaaatttgggttatgtaatttggacttatggacatttaaatttagtttttgtttttgtttttgcttttgtctgatttgggcttattgggcccggtcaaatttgggcatt

SEQ ID NO: 50364 - DNA, 586 bp, Gossypium hirsutum
  unsure (1)..(586): unsure at all n locations
  Clone ID: LIB3825-027-Q6-K6-B10
cggncgcgtgggcggncgcgtgggctgcatggccttgccttaaaattttgtgggatcagaaactcgagtccagaatgcgctaatcactatgtatggaagatgtggtcacactaagagcgcgagatcagtgtttgatttctgttcaagtcgcaacttatgctcatggaactgtatgatctctgctttttcccagaataaggaaggaagacgagcactagaattatttcactttcttgaatttgaacccaacgaaatcaccatagtagcccttctctcagcttgccatcagcttggacttctaagacagggaaaacaaatccatggtcacgtattgcggattggaatctttgagaattcattcatatctgcagcccttgtggatatgtatagcaactgtggacagctggacctaggctggcaaatatttacaaggtcaaaggataagtctatcgcagtttggaattctatgatttcggcttatggataccatggtgatggccaaatggcaattcaactgttccacaaaatgtgtgattctggcgttagaccatcaaaaagcagtttcgtaagccttttatcagcttgc

SEQ ID NO: 50365 - DNA, 524 bp, Gossypium hirsutum
  Clone ID: LIB3825-027-Q6-K6-B2
gccataggctgtggtttgaacatgaaccgaggggaggctaacgttgtgaaaataccgacccaagccaggtagagccaccaaagagctgagggaagaaaataagtgagtatgtgacatcctcagctacactacctggcggtatattataaccagaacactgatgggtgacaagtagcgactgatggtggtgagtaataggacaagccataaaagcataaaggagggctgaaggagatgctaaatgaggtgcatgaaataggaggtaaactagaaaaatatgactaggtgtgtacaacagatacttatgacgatgataccaatagagtataagtagataaaaccagggcagagggaagcaccgcaatataatcgaccggataacatataacaaggctcagatgatgaattatatcctaataatggcccaactgactaatatagtgtaaacaatggctcttcattcatacatgcatcgaaatgaaaataaggagtggctaagaggtgtgctttcaaccaatatatgc

SEQ ID NO: 50366 - DNA, 571 bp, Gossypium hirsutum
  unsure (1)..(571): unsure at all n locations
  Clone ID: LIB3825-027-Q6-K6-B6
atcgactcctacacacaattaggcctgcctgacttcaacttggggttattcctgggtttggaggtacacagcgacttccacgactcgttggtctcacgaagtcccttgaatgatgttgacatctaagcctgttaaaggtgaagaagcacttggattgggtctagtcaatgctgtcgtttcatctcatgagttgatagagactgcacgttggtgggcactagatattttggcacgaagaaaaccatgggttgctactctctacaaaactgaaaagctagagccccttggggaagcccgggaaatatttaactttgctagagcacaggctcggaagcgagctccaaatctcaaacaccccttggtttgtattgatgttattgaagagggtatagttgctggtcctagggcagggctgtggaaggaggctgaagctttccaagtacttcttaaatctgacacatgcaaaagcttggtccacatcttctttgctatgcgcggaacatctaaggttcccgggattaccgacagggggctaatgccaanacaggtgaggnaaagttgctgtacttgg

SEQ ID NO: 50367 - DNA, 268 bp, Gossypium hirsutum
  unsure (1)..(268): unsure at all n locations
  Clone ID: LIB3825-027-Q6-K6-C6
cggccgcgtgggttcatcagctttgcttttagtggcantaaaaaaaaaaaaaaaaaaaaaaaaaaaaaaagaagaacaaaaaaaaaaaaaaaaaaaaaacacacgcaagcaaacaacaaaggacatcttctatggaggcacctattttgaattcacgggcccccgccatacaacgccctgtgtggggccaaccctgggggcaccccaagtccattccttggggcacctcctccttttgcccgcggggggaataccaagggaggggccc

SEQ ID NO: 50368 - DNA, 288 bp, Gossypium hirsutum
  Clone ID: LIB3825-027-Q6-K6-D10
ttcttttaaagcatttgttgcctctaactgagcctctgactgtgggactccaaatggtgctgcagacatcacaacaggcttaacatcctgttgcacatgctatggaaccatggctgcaatctttggctcagactttggccgatggttcaccttatggcccttcttgtgcatctggtagtgcatcagactatgtgggtcactatgtcgtggacatgggaaagctcataactattctaggaactcttcttggggctcttaatcagcctgaacatacactgcaacaaacgc

SEQ ID NO: 50369 - DNA, 598 bp, Gossypium hirsutum
  unsure (1)..(598): unsure at all n locations
  Clone ID: LIB3825-027-Q6-K6-F4
ggntatctcctctttgttttcgcattttcttgctgtctgcagcacaacatggtccccatcaaaattatgttatagagaaaatggtatgtcccatgaaggtagatccaactctggatatacctgggggttttattttcaaggggtcaaactatcactgtcgagtttaagagcagctatgaggatcttctctggcatcttcaaagaggtcatggccccaaaacttctcacccttcttgatttgtatgaattttatgcaaattttgcatctgcttggcttcagaaaaattcagaaggtttagttttgatgatgcaacccctcatagttacatatactagtgggcatatgccttatgaagttgatatgatggctttgaaggaaacgttaaaccaggttccggatacagtgactgatgttttaatagatggccttgaggttgataaatgtgctgaggaaaaacaagttggagagctattgaatttgattccagaggatgagagatggcatattataggggcttttgtgtggcaacacatgtccagattcatgaaacataagttgaattcattagccatttctgatgacagttttctttctggc

SEQ ID NO: 50370 - DNA, 547 bp, Gossypium hirsutum
  Clone ID: LIB3825-027-Q6-K6-G11
cggccgcgtgggggcttttgctcaagttccagacttgaatatatggtatggacccgattcctactgggtgcgaatattaaagattgttccagcagagactttgtgtccgtgaggaaatgctgaaatcacccaaaacataacagagactctattaaatcattgctacctcgcctgcactattatgagaatggaacatgtattgtgcatcatctttttgggcatgaagttgtagagaggataaatgaaatgtactgtgatgcatttctcacagcacattttgaggttcccggagaaatgttctcattggcaatggaagccaagagaagaggaatgggtgttgtaggctcgactcagaacattttggatttcataaaacaaagggttcaggaagcactagacagaaatgtcgatgaccacctccaatttgtcttgggtacagaatcgggaatggtgacttcaattgttgctgcagttcgcagtttgttagattcttcaaactctacttctagcacaaaaatcaacgttgaaattgtctttccggtctcat

SEQ ID NO: 50371 - DNA, 607 bp, Gossypium hirsutum
  unsure (1)..(607): unsure at all n locations
  Clone ID: LIB3825-027-Q6-K6-H1
tccgtgnagagtgccgttcgtggttgggcttagacagtgatagctccccttatagaaatacatctattgtagaatttgtcttggaaaactcaaaggatgacgatgacagagatcttcccgggctttgcaaactgctggaggcatggctaatggaggtggtttttcctagatttagagacaccaaagatatacaattcaagcttggagattattatgatgatcctactgtcctgagatatttagaaaggcttgagggagcaggtggttcacccttggctgcagccgcagctatagtgaggataggtgctgaggctactgcagttcttgatcatgtaaaggctagtgcaattcaggcattgcagaaggtgtttcctcttcgtcgctcagaagagactgcgagacatcaattagatggtgagatgaacaactttcttcctgttgaaagtgaggagactcttggaaaacctgatcaagaggattctgccatcctagctgaggttcctggaataagcagtttggaaggaatgtatgaagaagaaacaataagtgacaaaattaaagatgccagtgtcaagatcatgtctgctggtgtggtaattggagtgat

SEQ ID NO: 50372 - DNA, 603 bp, Gossypium hirsutum
  Clone ID: LIB3825-027-Q6-K6-H7
taaaaaaaaaaaaaaaaaaaaaaaaaaaaaaaaaaaaaaaaaaaaaaaaaaaaaaaaaaaaaaaaaaaaaaaaaaaaaaaaaaaaaaaaagggggggacctttttaggggttccaagttttacgtccccgggggggggccgttttggtttttcttttttgccccctaattcctttcccgtgcccgtttttttttggggtccgctttgggaaaacccttggggccccccttttttttcgcttggcggggcatccctttttccccccccggtttattcgcttgggggcccgccccttttcccctttcccgccttttgcccaaccgggtgggccagtgggccgccccctgggggggcgctttaagcggggggggggggggggttccccccagggccccctctccctttgccggggccttggccccccccccttaccctttttccttttcttttctcgccccgcccgccgtttttctttttaaggtttttttttggggcgctcctttgggggttcccttttagggttttccggggccgcccccccaaaaattttgttttgggtgttggttccccttgggccccccccccttgatgccgggttttttc

SEQ ID NO: 50373 - DNA, 545 bp, Gossypium hirsutum
  Clone ID: LIB3825-027-Q6-N6-A11
ccatggaataactagcatttagacatacataacaccaaacatgtccttgattagccattccaacagctaatcattatcaagcatttacataccatttatcaaccatatcataagatcatacacacaaaatggctagatgctatacatgccatactcaaaatgaaacgactagctataccaaaaaaatcctcgtgatagtgtgcccggacctctgacgtactttatgatctccgagttagcttgacaaaactcgaaacaaaatatgatcatctatatcgatttagtccactatctttttccttccttggtttaactccggattttgttcttcttgatctcgaatttgtggtcacgaaaccactattccgattaggccctatttcgggatgttacaaagtccttggcaatgctactctgaatattttcagattacatgtcatcttgcaagggtaatgcagctgaaccctaagattccaagcttttgatccatccacgtagcaaataatttaccacctcaggaacttcatcatgagggcaatgccctg

SEQ ID NO: 50374 - DNA, 193 bp, Gossypium hirsutum
  Clone ID: LIB3825-027-Q6-N6-A2
actaaaaaagtataatttctgttataaactagcaaaaaataaggacctattacagacctatataggcaacatacagggcccttgaaaccatagacccaaatccttcaaccacacatgctcgctatcggcgtaatacaccccctcctgagacataaacctttaacgccaagctccggccacgtgcttcaaccca

SEQ ID NO: 50375 - DNA, 403 bp, Gossypium hirsutum
  Clone ID: LIB3825-027-Q6-N6-A5
cttaacggccccttttttttttttttgatttttatttaatgatatttattaaaatattcggaattttttacatgagaagttaacatccctcaaatggacaacaccaaccttgtcaaaactaatgaccttctttttttttccggcaaacaaaccactattgccggaaaacaggtttatcgggaaaacagtcttcggcttgacatgtactacctaaacacagtcttgcaagacccgttgaaccgtctaacaaactattgaaagaggcggggaactctacaaaacggtctggtgggcctcttgttacaagaggcggaagcttgggatctacgagcccctgactccgataagagcaagggctaaataaccccttccgaagcttgagggttctcggaagtacaaacca

SEQ ID NO: 50376 - DNA, 492 bp, Gossypium hirsutum
  Clone ID: LIB3825-027-Q6-N6-B10
agcggaagattgcctttatgtttttatttgctcaattttaaatatcacaagacttaattactttgtttataagaactaaattgctggactaaattactctatttattttgaaaagaactaaattacttcttttcccaatattacaaaaaccttctagtacttttttttttttaaaaagggggatttcttttgtcatttccatgctgaagccgaagaagaagcagcatcaatattaatactgtaagcaggcagcttcttcaaatttttgtgctgaattttttgcctgaattccatggcatctttccatcctcctacactaacatacaggttggccagggaaatatagtagccgacaacattttcaggctccaatccaaaaagatgctctgcaacttctcttcccatctccatatttccatgataattacaagcacttaacaaggctccccaaacgccaactccagcctctcctggtatctgctttaaaaactc

SEQ ID NO: 50377 - DNA, 509 bp, Gossypium hirsutum
  Clone ID: LIB3825-027-Q6-N6-B2
aacatgacaaaacctgctttactgccattaataacacaaacgcgcaacaaccaaagaaaagacattcaacatacgaaattattaatatatttcaaacaccaaaatagagatcctaaaacggtaatcagcgcgacttctcaatttttacagacccctacttccatgcaaaatactatactccccatataaaaaactctttatacttctcaaacaccttctattggtagagcttccatcggtgattcaaacgttaatgctccagacaccgatgtttccttgcttcaaaaacaccattccatcgaacctgttgctggatccactcgtgacccttaccgcctatcctaaccctaaacccactttgtaaaccttaaacctcgatgagcttacgaccggttcacagttgacaccggaatctttgaactggaaaatctacggcgctgtttgccatgcatagcttcgttcatggatagctaaagcaaattgggatcttatagctgaccatttactga

SEQ ID NO: 50378 - DNA, 556 bp, Gossypium hirsutum
  Clone ID: LIB3825-027-Q6-N6-B8
atggggcaaagccaaagaatgatgattactcattttactcaatcataatcataaagttaataactgaaagatggatcttattttatatattatatgtcaactcaaacctcaataaaacgtttgagtcgatccgtcgacgcttgctcttctatatgaaatacccgatgatcttacatcatatgggttagaccagcctccttgctcaaagtccgaggctctaccattactattccaatgctgtctaattgagtcagtgtacaaaaatgtcagtgaccgcgcatggccatccatctccgcccccgaatctgtgtcaaaaccatgataggaggacgaggcagctgtttctgatgaaattccattttggttgtaccattcaggtcccgtttcaccaaataaataatctgagaagtcttcactcctggaagagtccttagtgcttgtagtgctgcacgagcttgcatcggagccgctgaaaatggaagaactctcactcgatgaatcagctgaaggaattctttgcattggaggatgatacttatgtttacgttgtgatatt

SEQ ID NO: 50379 - DNA, 488 bp, Gossypium hirsutum
  Clone ID: LIB3825-027-Q6-N6-C6
attaacacctcttcctcgctcgcgtggggctccccccgttttaccgggccctgcacgcgcgcgggccaccaccccccagaggggggcccgagagagcggggggggggcacgggggcggaaccggcgggcgggaaaagggggcccgcggacacgggcgcaaaaaagaccagacgcaaaaacaaaaaagaaagaggggggggccgaatgagggagcacacacacaacaagaggggcgagcggacagccccccgggcagaaaagaggccgcccgcgccgcctgaaagaaaaaagcaccccccccgcggagagaggcggaatgccgatcgcgcacccggggggggtttttgcccaccagacgggggacagccaactgggaatcccccacccccgggggcccagagaggggcagcgggccgcgcacgcggggggggccccccgggagaaaaccctgctggagggcggcgaacggcggcaaaaaaaacgagccc

SEQ ID NO: 50380 - DNA, 456 bp, Gossypium hirsutum
  Clone ID: LIB3825-027-Q6-N6-D10
ggccaacaatggaagggtttaaccttttttcaagcaaaagcaaaagactgtaagatcaaacccccaaaaaggaacttttttcatcctgctttttgatctacaaattgaaatctgtatcctatgtttacatatttatatcatttccctatcttccttttttaattctaaaatcaaagccatcaaattatggggctaaagttttacaacagaagcaatcagcatttcagcatgcccgcatttgttctgtccatacaaagaaaatttacccacaatagaagcgacctcacctgtatcctgaatgaatgtcccactcgaaagtggaaaaacaacagcagcattttaccctacaatcattgcatttgcattgctccaaggacaataatataatttgattaaatgacagtcaattggcttgaaaaggaccaaatttttcactcccggggccgagccagccaa

SEQ ID NO: 50381 - DNA, 504 bp, Gossypium hirsutum
  Clone ID: LIB3825-027-Q6-N6-F2
atggaaactaagctccttcaatccaacattcctttggaagaagcaatttcgacaggtttagaacaattataacacattcgcccccaaagggggggcaatgaatcccaaaaataaaaaactaaaaataataacccggtcacgggattgacccacatttataattggggccccaaggggaggcgaggcaaggcaagggggcataataagcaactggggcaggctgatcagatctataaaaacttcatcaacttggttttagggaatctgggcacgggttttatgaaagaaaaaattgggcgctaaaaagccctcactaatcaatcgggtgggaggtttctatgcctatatacccttctgagcttttaaagatccaccgggtttccccatcagcgcctagttgcaagaagggaaccaatggggcagcccgaaaactattttctacccgcctttctaggggggggcattttcatcaaaatccaaatttatatttacaattgggtttta

SEQ ID NO: 50382 - DNA, 559 bp, Gossypium hirsutum
  Clone ID: LIB3825-027-Q6-N6-F4
acaagaattaagactcgctactcttctttctcatatatatactgcaaaatcacaccaaaatctatccagggtaccaaataaaaccgaacccgagaaaacccagatcggaaccacgtagagaaaacagagtggaccatctacaacactccgccagccagaaaacttaaaaaagatgtatagaaacaaaaattgaactgtgaacccacaattggagcctcacattcagcatttgtctcaccaagggatttttttttcgttcagagagtaaagctcaatggaagagagattgaatgactttagcaggcagtttttctctttccctgatgattttggttttcattgccggcgattaacaactcagcaggaaatatgttggtgatgccaagttagtgcaagagatatcaaaggcactgagctcataatatcaaccaagatcatgaaacgcagcttttcttttcactgttctgaaagaacaaaagaccagcttttgttcaccttaactgcttttggactcggataagtttcatcttgatgccacgtcacagatcgttaatcattg

SEQ ID NO: 50383 - DNA, 565 bp, Gossypium hirsutum
  Clone ID: LIB3825-027-Q6-N6-F7
aagttcaaaaactttaagatgtattatataaatacataatatatccttaaggtattcttaatcatctctcttttatcgtcatttctacagtataaagtataaacaaaatgtatagaaacaatatacaaatagatcaaataccatataaagaaaaaaggctaaaacactactgcctttgacccaaacccaaaacaaataaatctcgaagttacttgaactcgaaaattactcaaactttaaaacttcaaatgattctacccaaaataacccgacccgtctaattgactggtctaatcacaatacagatcaccctcttttcatggttggtaggattccaaatactgtatataatgactccaacactctcccaatgaacctcgaaacagaaagtcaaaaacatttcccaccatcttaaatctcaacacctccagggagaacctatctccctatatatattttgtatttttgggttagtacccgaatagtcttgcgtttatgcaaaagctaagcttcttcatgaaactcaacctttgaaccaggacttcaatggagcaaaaccatatga

SEQ ID NO: 50384 - DNA, 552 bp, Gossypium hirsutum
  Clone ID: LIB3825-027-Q6-N6-H1
agctcgcatcttttaatttgaactgcttgcatgacgggaaaacgctaactcttgttttctcaaacaatataacaaatatagctacgtaaaaaggcaaagctggtaacgatattggagctttcaggttttttatgctttatacatcatagctaagatttgtagacagatccttcagtgattttccagcctgagttggaacaagacatctcatatctcgtggtgtaggagtttacattagaggcattgttctccggatgatgaacatcagtcaagcaggtggattcttccagagtagcttcgactacagctcgctggccatctagtgaaagggtaacactgtcaatggccatgttcagtagactatattcatatacccaaccaagctgagcgatttcggctgcacgatctgtccatgtcttcaacatttgaccatccagaacctctggcaatttatcaaggcggtgatcaggtccaaacgcctcagatttaatattctgccacttgcgaacaatgccttctgcaattcttgcatccattctaggtaattcttgc

SEQ ID NO: 50385 - DNA, 581 bp, Gossypium hirsutum
  Clone ID: LIB3825-028-Q6-K6-A5
gttttatgaatggtaaattgagtgtatgtgtgcactatttgaatggcggctgaaactgatcaaagcttcagcactagaaaaccttggatcgacatataataaaacctttcaccttattgcaatacaagggtcttctctccttcaaattttgcggcaaaatcccctcttagcagggtaagtctttatagaattattattattattatttattcagtaaagccaaaaccggaatccccatagattatatcggtgttgatgtgcttactcaacaaggtggcgcatcaaagggggtcaggtgagtacgtcaggtttcctccggctggagatggcggtactgaagaacaacaagatggctactcccatcaaatacaatcccaacagaaccaaccgatgatgatgcagcagcatggaaaccgagcacaagcaacccagttgtctggcctgacgcatggtgtttctggacaaagggcttctgcttacggtgctaacttagctggcatggccccatctagttttggctacagtggctcggcctcagctgcttcaccttcaccttctgcttccccttctggttctggttc

SEQ ID NO: 50386 - DNA, 584 bp, Gossypium hirsutum
  unsure (1)..(584): unsure at all n locations
  Clone ID: LIB3825-028-Q6-K6-A9
tgccaacctgactaanaggaatttcccttgaagtcccatgaattatcaactatttttttttttaaggatctccatattcacaaaagtccaacttaaagaaacagtcgaatttcagtttaattggaacaagcagaggcttgagaggaagaagttcgaactaaagaatggagcaggtagatgaaccagtgaaagatgaaagagaacaacatgtcttggctattggttttaggatcatgcctggtgtttcccctgtggcatctatttctcagtctcagcaccagccatttccgaccccttcaccgttctctttctcggtggcttcgacaaggtggagctcaagacctttgatacatcgtcactcgaatctcttccttcggttctcggtgcttctcttctcctttatctcagctctcacactggttaccccatccacaaacaacaaacaccatccatctccaagcttcaccgattactcagaattgatgtaagcacaactgtaatttcgcatttactagttgccttaatctgagagaaaacctcagagatttgtattgtcttggtgtagatactgcttcattgtagcc

SEQ ID NO: 50387 - DNA, 588 bp, Gossypium hirsutum
  Clone ID: LIB3825-028-Q6-K6-B11
ttttggtgctttctagtttgttccattaaaatagtagcaagtttaggaatttggtggtcgaacatgggtttagtaagttgaaagaaattgagcatcactatgtgaactgaggtgttggagattgcggcttaaaatctgtccattgtggttggtggtaagtggtaaaagagggaatccaacatagggaacttgcttctataatgcatgtcataccaaatggacaaacttgaggctgattttagattaaattaaatattagtttgtttaaatgatatccaaataatttaatataagtttttaagtattttagatataaaaaatcaaatctttcatcttcgaatcagcttgtgtccttgtaagcgattctataattttaatgttttactcagttttttccttaaaaacattactatttcttttataggattctacttactattttttcttttgagttccttcatgccaagttccacttattattattttttgaataataatcgactagaaatttattaataaaaaaagtaggaaaacatagctggatccaaagactgggtccaggcttgttaaaagattaacacactttcg

SEQ ID NO: 50388 - DNA, 560 bp, Gossypium hirsutum
  Clone ID: LIB3825-028-Q6-K6-B7
tccgttcttgcgcacaggtccaaagcggctctctcaacacccgacggatccccttgattattcgactctctatgataacgatagtagcacttctgagctgcatgaccaaacgactgcagatctggcattgaatgcgagatcggaaggtcctgccacggccacgaacagacgtacggccgccacgatttcctccttcaaccgacggcgcatcctcaaccagatttgcattcaaacttacctcctgcaacacctgagcttgacggctctcacaatcaactagagcatcgaccacacgttgtaacgacagaacacccgtcgacagcctagcggaggagataaccgcctcaaactctgacggtaatcccgcgagcatcacctcaatcttctcttcatcagagagacgagaaccagaggcatctaacatagcacacagatctttaattttagcaacataagctttaatggaaaggttacctttcttcaaagaatgaagctcatgccgaatgcgtgactgctttgcaccagtgtcagccacaaacaaatttatcgccatgttccac

SEQ ID NO: 50389 - DNA, 594 bp, Gossypium hirsutum
  unsure (1)..(594): unsure at all n locations
  Clone ID: LIB3825-028-Q6-K6-B9
cttggcaaanacattttggtgactggtggtgctggttttattggaagccacactgtgctagagctactactgggaggctacaatgcagtggtggtggacaatctcaacaattcctctgacgttgccatcacgagagtcaaagaactcgccggccagtacggcaacaacctttattttcaccaggttgaccttcgagacaaacctgcgctgcaaaatgtatttacggaaagaaaaatcgatgctgtcatacacttcgctggattgaaagccgtaggtgaaagcatgaagaaaccattgatgtattacagcaacaatatcgttggtgcaatcacgttgttggaagtaatggaagcctatggatgcaaaaatctagtattttcatcatcagctgccgtctacggttggccaaaggaggttccatgtagagaagagttccctgtgtctgctatcaatccttatggaagaaccaagcctataattgaagagatttgtagggacatacaacatgcagacccagagtggaagttcatattgctgagatactttaaccctgttggtgcacatcaaagtggctatatcggagaacatccccgt

SEQ ID NO: 50390 - DNA, 205 bp, Gossypium hirsutum
  unsure (1)..(205): unsure at all n locations
  Clone ID: LIB3825-028-Q6-K6-D6
cccagcgtccgactggtgtccgcttggaaacagnaaaccaattcccattctcctgtgggaatactacatgccgtgcagcgcgacggagccgtgtcagtgggatttttaggattagagactctctgggtaggcaaggcttatcagcttcaaatggctgaaccttactatgtcgggcagtttgtgcggctcaaaccaaatgtggtta

SEQ ID NO: 50391 - DNA, 570 bp, Gossypium hirsutum
  unsure (1)..(570): unsure at all n locations
  Clone ID: LIB3825-028-Q6-K6-E1
ggnattcagtcagtttcaagggccgatttttcttgagccctggtttggcgccaacattccagatttatatggcatccatgtttgagaatcaatacaagttacttgctcngatccggnaaacaaagtacaagaggtgattgttgaaacgacattggataaggaagagattaaatccacaatacaatcatgcacaaatagagtggtgtagggttctttttcatcttatcaggacattcttgaccgaatttggaactcctttgatcccgaaagtcgctttcaaagggtgataagagagcgaagtgaaagtctgaaaccatggggagacttagtgttggggggattggattctcttctcttgtgcaccccacttacaatggcaactattataatcatgttgcatcacaaaatatataagctgtgtatcttcctttcaaaagaattttatatgtttcatacaccaactttcataaacattggattaatgatcgaatttatcactgtaaactgccacttctaatgtttatatagtttttcttaaagactttgcaagttannnaaaaaaaaannaaa

SEQ ID NO: 50392 - DNA, 531 bp, Gossypium hirsutum
  Clone ID: LIB3825-028-Q6-K6-E12
cccagctctgttctttttgcacctatgacaaagatcagagagaagaaaataaaaacagtagtttattgatttctctgtattgattcaactcatctggttttccaattgataccccattttcattccttgtttcttcttcgatttactcataaactaacttagtccccaaagattaatacgttgggtgtgtacccatcacccaaagtttccatctttcccaaaaggagtttgtacccatagctgatcaaatttgataactttgttataccctttttttatggaatcagatagtattgattgtatggcatcatcggatgtgatggatgatgatgagatccatcatcatcagttatcttcttcattgccaaagacccacagcaacaatgggaacagcaacaacagtaccttgtcatcagctgttcatgcaagcactactagtgtccatgaactccttgaatgcccctgttgtaccaattctatgtacccttctattcatcagtgccacaatgggcatactctctgttcaacttg

SEQ ID NO: 50393 - DNA, 578 bp, Gossypium hirsutum
  unsure (1)..(578): unsure at all n locations
  Clone ID: LIB3825-028-Q6-K6-E7
cggncgcgtggggttangatgaacgatcttaataaaatctctctattaaaatttaagtcaacatagcctttcaattttgccctcgttaaggtctcgatcaatactgtgtaggttctgctaaagcgaagtactagtatttatcttggttaaacgcgaagaataaacaagtgatatttgttggttaaaattggttaatgacttaactaggttattctaataggattagaaacctagagacaagtaatttggataaatcataagatgattagaacaagagttgttcaccaaacttgaatagttacatatgatgtaattagcaagtgttgcttacctagataaccataatcttaagagtaaagccaaagttgacttaagaggaggtgaaatatggatccttaacccacttgaaatacttttcgagaaagtctttctgaaactaatatatgagggtattaattttgtaataaaatagtgggaacatcatataataaatttcatttaatgattgatataaatttgataaattttcacacgcataattttattgttgtagatatattatggctgcaaacactaat

SEQ ID NO: 50394 - DNA, 578 bp, Gossypium hirsutum
  unsure (1)..(578): unsure at all n locations
  Clone ID: LIB3825-028-Q6-K6-F3
natgnaaaccctcattttaatgattattattcgattaattgctgttgtctagtaggtacttggcatttttggacatctgatgaataattttttcttcaacattttacttgcataatataatgctttgggttgttttggttacataaagtatacttgcaccatattgttaagagaaatactatatttaatttatgataatgcaaataaagtgagaataaagaagccatgtttcatgtttttttttatagggcaaagtaggaacataaatttacttaaaaatatggtaaataacagtttttaatggactaattgtaacgagaagagtaagttatagcattaaatggattaataggtgagttggtgtgcgaatgtgaaaggatgttgcaatgccttggctagtgtaatgactaggacttggctaatgaaatacttcatgaaacatgaagtgtaatggataattgtaataaagatatggctattagctcaatgagcttaaacaaatgtgcatcatgaaaggttgagtatatcagaaattgtgtgaaacaaggcttaattattattgacaaccacctatctaa

SEQ ID NO: 50395 - DNA, 560 bp, Gossypium hirsutum
  unsure (1)..(560): unsure at all n locations
  Clone ID: LIB3825-028-Q6-K6-F4
natagttttatttatttatttattatcttaatgttggcaagcttgcagactgcattcctaaagtctcgaagaggatttgttcgtatagccatggaaatggggtgtccactagtccctgtttttgcctttggtcaggtaaagtaattccttttcttgcttcttctccgaccccactttagtgctttaggaaaaagcacgtgcacggaatcccaacctatgtatgatatgattacatatcaatatttagaaaatcaaaacatcagctatttttaagcaattcacttcattgtcattgtcggtcaagaaatattgggtcttttgatgttgtgttactctatttttacttactttaatttgtctccactatcttcgtttagagcaagtatcggatgcttggttgtaaacaagtgtaggataagctttgccgctatgatgtgacccttcatgtagggcatgtgatgttactgacctgatgtgtgatattctcttatctatttataacatacttcccacaatagtgtacgtcacttgattcatctttttgttgtatctcctgcttc

SEQ ID NO: 50396 - DNA, 567 bp, Gossypium hirsutum
  unsure (1)..(567): unsure at all n locations
  Clone ID: LIB3825-028-Q6-K6-H1
ctgggttccttttttgggttaagctttgatcaaaanagnaanaataaaaaggaagacgatgatcatggacaagaactggaagtttataagattaaaacaaggtttcggagttggtgtcttgctgtttttgttatgtcaaactttggtttgttggtcattgaatgaagaaggattggcgttgttaaggttaaaagatagagttgtgaatgatcctttttgttcattgtcgagttggaaagaagaagatggagagttagaccattgttcttggtttggtgtcgagtgttctgatggcaaagttgttgttttgaacttgaaggatctttgtcttgaaggaacattggcacctgaacttggatctcttgctcatattaagtccattattttgcggaacaactcttttactggaattatcccccaaggcatcggaggactcgacgaactagaggtgttggacttgggatacaataacttcagtgcaccgattccgcccgaacttggaaacaatttgtcactgacgatcctgtaagtcgacagtgtccagggacgataacggattggatatct

SEQ ID NO: 50397 - DNA, 538 bp, Gossypium hirsutum
  Clone ID: LIB3825-028-Q6-K6-H11
gcgttcggttttgtattatggatgctcgtgttcttgatggtataatcaataggttgcttgaagttagaggtaaaccagggaagctagtccagctttctgagtctgaaataaggcagctttgtcttgtttctaaagatatcttttccaggcagcctgttcttttagagcttgaagcacctattaagatttgcggagacattcatggtcagtattctgatctcctgaggctattcgagattggtggtttccctcctcatgtcaattacttattcttgggggattacgtagatcgtggaaaacaaagcctcgaaacgatatgccttctccttgcatacaaagtcaaatatcccgaaaaagttttccttctaaggggcaaccacgaatgtgcttcagtgaaccgcatctacggattttatgacgagtgcaaacgaagattcaatgtccggctttggaaagtgttcactgattgttttaactgcctgcctgtggcagctctggttgatgaaaaaatattctgcatgcatggtggactttcacc

SEQ ID NO: 50398 - DNA, 580 bp, Gossypium hirsutum
  unsure (1)..(580): unsure at all n locations
  Clone ID: LIB3825-028-Q6-K6-H2
gttttgttagtttttatgtttttagtattagggttattaaagatggaggtaantcatagcttagggnatagnnaaactgaagnagtatagtacaatggaggatttttccaagtatgcccatagtcctgcccatttagctgttgcccgacgagaccatgctgggcttaggcgcattttctcgactctccctcggcttgccaaggctggcgaggttaatactgaagctgaatctcttgaggctgagctccaggctgatgctgtctcagctgtcatagaccgtcgtgatgtcccaggtagggaaactccgctgcatttagcagtgcggtttcgagatccaatctcggcagagattttgatggcagctggagctgactggagtcttcagaatgagcatggatggagtgctttgcaagaagcggtatgcacaagggaagaagcaattgctatgatcattgcacgacattaccagccacttgcctgggcaaaatggtgtcgtaggcttcccaggattgttgcctcaacatctcgtatccgtgacttctacatggagattacttttcattttgaaagttctgtcatt

SEQ ID NO: 50399 - DNA, 584 bp, Gossypium hirsutum
  Clone ID: LIB3825-028-Q6-K6-H8
gtccgtagctgtgtgaacagtagtgggtgatttgagctgccaccaaaaatcattacgtgtgcttaacaatacactgtaactttaatactaagccagccactgcccttcacgctactaacatctagaagccatggctgagtggcgaaggcaatggacatgtgctctcaaggacatgaccagatgtgcacttaagatgtttaaagaatctagggtgattcctttaaaacaagcatcatgtactcaaaagctataggaccaggtcccagttctgtaccaatgcatttgttgcgagagaagctgtggttctctctctgtccatggtaacatgaaaaggaaaaccgagacaacagggctggccaggtaactttataagagaaagagagagagaggatgggaaatttctcccaatcttctatataaatgttgaaaattacaagccatttgcctggcagcttgagctctccgttgtgaaggcgggaaatagggtgatgaatttgttgtaattttgacagtggaggatattgcttttgaaaatatatcactctactggtatttttgaatgtaaatagatatggaattgccta

SEQ ID NO: 50400 - DNA, 582 bp, Gossypium hirsutum
  Clone ID: LIB3825-028-Q6-K6-H9
cttctccatgctttcaaaattccatttcttgcatcggtagcgccgatcaactagatcttttaatacaatcattgttacctttctagattcctagtttcttcattgatttttgagctcattggagtttaaaacccccttctgcctatgggctcagactctgttgtaccaaatacccttctttaacattctcccctgtctttgttaaccaccccttccatttcctttgggaccttctctatcaaatacatcagagtgttgtatctacgtcctttcggtgccagcatgtgcactgcttcattggccttctgagatttgattttattgattactgttaaagcatctccttcaacgctaacctctcagaatcctagttcatcaacaaaaatgaccacctaaaaacatgcccttacttctgccatggttggcgtcacaacttcactactagagagcaagaggagcagcctccttcatctgtagaggcacatttaagttgtatcgaagcttaccttgagacaatggaaacccaagtctccatgattcttgacatcttgcagagtagtcatccctaacgctgacaaccac

SEQ ID NO: 50401 - DNA, 432 bp, Gossypium hirsutum
  Clone ID: LIB3825-028-Q6-N6-A11
ggggggggaacccccaccaaataaaaacccccaaaccccaaaagcaaagtacaaatagggggggggcccaaaataaaaaaaagggcctggccaaccggggggggaaaaggaaaaaaccaaacccggaaaggtttaattcaaaaaaaacccccccaaaaaaaaaacccaaggaccttaccacccacaatcttcctttggggcttttcaggggccaatattccagcgggggggggcagccctttggccccaaaccggtttgagggaagaaccccgggaacccaacccccgaaccccttaacccccccccgaaagggaggaccggcccccccccaccgggccaaccctttggaaaggtaaccccccattttaccaaaacggggaacataaacggccccaaaccctccaaaggaacccggccttgggcggaccaaa

SEQ ID NO: 50402 - DNA, 556 bp, Gossypium hirsutum
  Clone ID: LIB3825-028-Q6-N6-A5
caagcacaacaagatttcttctttaatagaaaacaacgaagtacatcattaatgaatcttcggcttctaacattttaagttacataaaatcctagatccttgggtttttatcccctatttactttatactacacgaaaatataagttgaacaaaaaatataataaaataagaagggaaaacatgttctaattttttcaaaaatatttatatataaaaaatgagattactattattaaccagaggatgaaggacaagaccacggcggcaccggaaaatctgactcacttgccggagttcgatcagagggttgcctgaaaatgctcatttgttggtgctcagcaaaaagcagaggaaaagaagcagaggaagatgatgatgatgacccagaagccgcaaaagaagccggcaaagatggaaaagacgacgacaccattggctgctggatattagcaaactgagaatattgaatcatttggtctaccaagcttgtagcttgttgtccatgcaaatcaccagaattctgtagcaactgagagtactgccaatagtctctca

SEQ ID NO: 50403 - DNA, 533 bp, Gossypium hirsutum
  Clone ID: LIB3825-028-Q6-N6-B2
cgcacacgaatttcgaaatgggtttattaagataatgcttagctcccaagaaagaaattttctactctcaaaacctcaaaggtccatagtaattaaacaaatggagacaacatttatgcacacaaaaatgacttcttttaagtctctaaccctcaaaaaaaccagctagaaaacttaaacacactctcttgaatatacatatcccgtactacaaaatatcaacttctaaaaacatagggtttagcaccttaaaaaccctttctgctttaatttctccctgtatttgcttgggtatatgacaacagagtctaaacatagaccccctttcgtatgcgtgcaatcgatttgagtcatcgatagcttaatctttgttgatgaattcgagttctcgacattgaagtccccgatatggtagtgaaaccattttccaggttcattcaaagtaaattgagatctggcatgctgaccatctgatgtccatagttgaaaccttacgggttttttatcccaaccatggatgtgctccgagttgc

SEQ ID NO: 50404 - DNA, 583 bp, Gossypium hirsutum
  unsure (1)..(583): unsure at all n locations
  Clone ID: LIB3825-028-Q6-N6-B7
atcgaaattacacataaactttgattcaatatgcaattatacatgaactttgtttgatgcaattatacacatngaaactttttttttttgtgaatattagaatataggaagttgttaattagttatgagtctggtaaggttgttgagaagtttagactagtcaacaaagtctataaatactgtaagttgagaattcagaagtaagcaattttgaatacaagagaaagaaattcattttatcctctcgtttatttctgtttggctagttctttcatggcatcaatcgccatttctgtttggctagttctttcatggcatcaatcgccatttgattctggatcttgtctatcatggcttccgctgatttcgtaactggtgagtctagctctgcagtgttctccggcgatcgtgtcacaaccggtcttcctcggcatgaagtggttaagcttgatgaaggcacctatattcaatggcgcaaacagatcaaattaatagtggatggatatggacttacaggattcttagatggcaccgttgttccaccgtcgcggtttatgcctttgcccgaggttcgcgtgctcca

SEQ ID NO: 50405 - DNA, 527 bp, Gossypium hirsutum
  Clone ID: LIB3825-028-Q6-N6-B9
ctctttttatgattgggggatgttggggagagagtcattaatccctatatgtatacccagcacgcttaagactttgcaactgcgatcatgacataacaccaaacatttttggtgcgaaaatttgtttagttaatatataatgagccttagagagaaagcaagcgtagtctcttgaccaatcatagctgggcggaacagactatactatcgtgatgtagaaccagacgtctctgcgaacacctagaagtggacagacatcatagcatgccctgaggtgggcttatttctctggagaatcggtaaaaccattggggcgatgatggcccatatccattgatacacctgcacatggactcaacgctatatttgggtcttcaatgcaactcacgctctgcctttaacacgagaagcatagagtattttagcatacccggatcgcctggcagaagtaacaagaggacatgtcttccccatgcctttgtcaatgcagcaaccattttcaaaactgacgttactttaccacttcc

SEQ ID NO: 50406 - DNA, 550 bp, Gossypium hirsutum
  Clone ID: LIB3825-028-Q6-N6-C12
ttttttttttttttttttttatttttttttttattttttttttttttttttttttttttttttttttgtttttttttttttttttttttttttttttttttttttaaaaggtttttttttttttttttttttctcccccactccattttttgttttttttttggtgaaggggaaaaccccaaccggggggggccgggggggggaaaaaaaaaaagtgggggggccggggacaaacccccaccccccccccaaattggtctgggcccggggggccccccccaccccaagggggggggggggaaaaccagaaccggacaaaagggggggccgaacaaccaaccgccctccaccaatccccactggcagggggccatagggaaaaacaaaacggggggggggaaggggaaagagaaaacccttccaccggcccaaaaatccccccggggggtgccccccaaacccccccccaggggagccaaaggcaaaacctttccggcagaaggagctattggggcttttcaaggccccgcggagggaaatcccccgcccc

SEQ ID NO: 50407 - DNA, 538 bp, Gossypium hirsutum
  Clone ID: LIB3825-028-Q6-N6-C3
ttttttttttttttttttttttttttttttttttttttttttttttttttattttatttttatttattttattctttttattttttttttattttttttttttttcaagggaaaattaaaaaaaaaaaaaaaaaaaacccacaaaaagggccccaagggaacccctaaaaacctaaaaaaaaccaaaaagcccccaaaaaaaaaaaggagggccccacaaaaccattaaaaaaactaatttaacaaaaaaaaaaaaccaaaaaaaaaaccccatgaaccaaaagggggggcaaaaacagggccaaaagaccccaaccaaacaaggaatcccagggcctaaagggctaaaaaccccggccccttgttttaaaactaaaggggggggaaaaccccaaggaacccccaaaaaaaaaattccggaccccaaaggggtttcaaaacttttttccccacaaaaaaagggccggaaaaaaaaaaaccaccccccccagggttgaaaaaaaaacaaaggaacattcggccccaaattgttgaaccc

SEQ ID NO: 50408 - DNA, 545 bp, Gossypium hirsutum
  Clone ID: LIB3825-028-Q6-N6-D12
aatcacatcactagttcacattaacttattataaagtattcactgttagacagcatgccatgtgaagaaggaaaaaagagttaaagaagaaaaactacaaaagaaacaaggttttacaatgcataaaatcattcaaaagaaaatataatggcagcacatttcaaatggatttccttcttaacgtacagacatacctaccctaagctgctctacatgtaccaaaaattttaagtgtgcatataatcacacgatgcccctttcttgcagtgtccattttcatggaatttgcatactctttgacctttaaatggtggtctagaagaaccaccacctccactgccaaatgatgattgcctgttccaaggtttggtgccaccaaaacccgattcgttaccctgggagctcctatctctttgatctgaaaacttgtctccgttgtgatttggctcggctccggctcctccccacatgcttgagtttctagacggtgttggataaccagggtttgcatttcctggtgctgcaacttgtcctggtgcaaccca

SEQ ID NO: 50409 - DNA, 558 bp, Gossypium hirsutum
  Clone ID: LIB3825-028-Q6-N6-E7
aaaaggaacaacacttattcttaataattatctcaaaaccaattttgtctaaacaagaaattgaaataatgtttttagtcaaactgggcacataataacaatcctctaaacataaaccaagtccactaggcaaagataaattatatgttcccacagctaatgtagcaacttttgctccacttccaactcgtaggtccacatctcctctagccaaagtcctactcctttgcagtccctgaagtagacgttccgcttattttggccttcttgacttcttcaaggtagatagggcagttccacttccaatgtccagtcacaccacaatgaaaacaatttccttccttagccaccccacctttaggtttcaatgcagcctttacttttccaggcttggacctacctttgcccttaggctttgtctgaactttagcctttcccttgcccttgttattatagaccatcagtataggcttgggtccaacctttttcatgttgccttcagcagttcgtaacatactgagcaactgtggcagagtcttatcaatttcattcatattg

SEQ ID NO: 50410 - DNA, 427 bp, Gossypium hirsutum
  Clone ID: LIB3825-028-Q6-N6-F10
aaaaaaagccccccttggggggtaaaaaccccaaaagggaaaaaaaaaaaaaaagggcccgggctttttttggaaaaaagaggggggttcaaaaggtaaaataaacccccccaaaggcccccacaggggatgaaactttaaaaccacacaggcgcccaaaggggggggactcccttttgaaaaacaagcccggggctaaaaaagaaaacctcccccccggggtgggggcccacccctgcggggggtaaactcttcgccacaaactgggggggacaacctcgccccccatttgggggtaaacttggcacaccccggggatttcgccccccaaaaaaaaccccccccccccgggggggaaaaaagggggacttgggcccaaaaaaaaccgggggatcccgggggggccactaaaagggggagaccccca

SEQ ID NO: 50411 - DNA, 444 bp, Gossypium hirsutum
  Clone ID: LIB3825-028-Q6-N6-F12
ggggcccggggggccccccggggaatccgggccgggccccggggggggccccactttccccttagggggggggtttaaaggcggggggaaaaaagggcaaaaggggttcccgggggaaaatggtttcccgccaaaaatcccaaaaaaaaaacaaccgggaaaaaaaaagggaaaacccggggggcccaaagggggggccaacccaaaataaatgggggggccccaacggccccttttcaaggggaaaaaccggggggcccccttgtataaaaaaaccgcccacccccgggggaaggggggtttgcttttgggcccccaggggggttttttttttccccaggggaaggggaaaaaggggttggcccttaaccgcggggccctaaaaaagttgaaaaaaggggcccccccgggttccccccaaaaggaaaaaacccgggggggggg

SEQ ID NO: 50412 - DNA, 548 bp, Gossypium hirsutum
  Clone ID: LIB3825-028-Q6-N6-F3
aatataaatctataataggctcataaatattaataaatcatatttactaattcaatcatcaaaaaatagagtttcgaaatttccgtttctggtatagctgaaaaatgagttgttatattgaagggagggagttgttttattttctcaaagttggtggttgtttgcatgattttctccatgtacgttgcggtttccttaattctttcaaggctggtaagtgctttcttgattcactccatggggttgaagaagttgaagactaggtccctcatcttttgaatttttgttattttctccttaggcatatggtttaggcttctgctggaccttctggtttgttgttcatctccagaattgggttaagacgtgttctgaagcccaacaaagctgattttggcatccaaatttttagaattcccaagcccaattcattggtcctatgccgtggcatagctgcagcattaggcattagtatgtgaatttcaattctttcttccatttgagtccaccggtcacctaattgaatgcgaagagccactgcctggtgc

SEQ ID NO: 50413 - DNA, 549 bp, Gossypium hirsutum
  Clone ID: LIB3825-028-Q6-N6-F9
caattgaactgattataattattattccatatatctgactttcatcagctcaaaatggatgacttggtaaggcattgaaaatggatatgatcaacaataatcatgtagtaaacaaagttcattctttctaaaaaccctaattcccaaatccccaagtgagaaatggaggagaataactctaagattcacatgccaaagttacaggttaactataaaaccaaaacggtatagggtgccattattcatacctaagggctgaagctccatgctccctttaaatgatggtcaaacctcatttcttgaatttgcaatgtcattcactgtggagcagacgcgattctgaattgtatgctaagcagcagaaattgcattatagcctttctcctcgagaacttcagctaaggagctatctcctgtcttaatgattcttccattctccataatatgaatgaatgtcggctttataacttccaacagtcgtcgataatgagttatcatcaaaactgagtttgttggagtcaaaagaccattcactgctttcgctacatc

SEQ ID NO: 50414 - DNA, 528 bp, Gossypium hirsutum
  Clone ID: LIB3825-028-Q6-N6-G12
aatccctatagaagagtatatttacttatgtcattttaaccaatactaaaataacaaacaaaacaacaagaacaacatagattgctattcatattgtacccccaagaaaatatctgcacgaaacccaggactgaactccggtagtgcggcaatgcgtcctcaatgtggtctacgtcctctcatccagatctttggcaagaaagttgcatggtacccggaatttgaactcgaatagttcatgtagtcatccttacgagatggtattaccattcaataagtgtaaaattcgagttccaacatctacaatccatattcctatcctgtgactaaagtttagtctcggggtagaaggccttcacgaagcaacccgagcagtttttacagcataagtaggggaaaaagaacaagctgtttttcgttctttttggtgcataaggaggaacaaagagatcaatgaacaagaattttccgaaacgataatagaacaagtaaaacctagcgagaactaaaacaataaccaaaagggat

SEQ ID NO: 50415 - DNA, 534 bp, Gossypium hirsutum
  Clone ID: LIB3825-028-Q6-N6-G7
aaaaaacgaaactaaaattttacattatatccgaaccaatccagaatttctttttgtcatgagtagttaaagttaggacaaagaaccaaagaaaaaaaatagctacagtgtgagaatcaattaaaccaaaggaaaaaaaatagctaccgtgtgagaatcaattattcatttaagccttctccattttcatcttccacagcaatctcaattctcttcttcatcaatctctctgcggaattaaccctcagcttataaccaatgaccaccaccaccgcagtcacttggggcggaggttcggcaatcaacgtggagctcgaaaacgtcgctcgctttgctatcgatgagcacacaacaatagagagaacggtacggttgtgtttgtgagggtagatcaagcagccgaggccatggccatggccatggccctggttggcaatgtattccagcgcacgatcctgttgttgaataagctgcaactcatgctctgaagaccattcagcagagatcaaattcccttgtgctttatcaacttaa

SEQ ID NO: 50416 - DNA, 557 bp, Gossypium hirsutum
  Clone ID: LIB3825-028-Q6-N6-H1
ggcttgcaaattatgctttttcttttccatttgcgtattttcacgctgaaatgcagaacgaagattttcctggatttcctctctttcttgagtgtatatatatgtatgtatgtatgtatcactgcatcagtgtgtgtgtgtatgtatatacaacagattttcaattcacctaaactaaatacgtgcaaccttcgttttgccttttcacctatataagatatataaaaacatcaaagtttcattcttataacttcaacttcatcccctagcttgcttctgtggacataatctccagctccgcccaccaaagaggagaaactttcgggattgcaccttcaggtgtaattgcagtgatctctctcaatcttgcaccgacttctctcatatctggtctttgttgaggttcagggtggacacaagattgatcacctctccgattttctcaacttgatctgcatcgaaagagcttagagttggatcaaccatctgcatgagtggttgatcccttcttaaatagtccgatgcccagtcgtagagcgaaccattgtcatccacca

SEQ ID NO: 50417 - DNA, 546 bp, Gossypium hirsutum
  unsure (1)..(546): unsure at all n locations
  Clone ID: LIB3825-028-Q6-N6-H11
ggttaaaaaaaataatgattcactcaaattttgacaccattaatatccccagggctccagtgcagttaagccctcctcaccaccatttctacatattttccaaacaacngaagaaaaatgataaacagctcaagtccaaagatccctattatcttcatgcaaaatccatgaatctgaattgacagatgtacattcaaaagacttcatgccttattgtccccatctagaaagtagcatttcttttttggccttattttctcttcttttttcttggccttatgttttttttccttgtatgtgttgttctaaatcaaaagaaagcaacaaatcacatcaaatgacacccctcttcttcctcctgctccggccattgctccttgattctagtaggagtaatggaagacttggttgaagctaaggttccaaacccaaacttcggtttcttatctgcagcctttattatctggaaagaacaagttaaagactcatccacgctcatcatggcagcagcattgtcgaactcgccgcagtaatttggtgctgaaa

SEQ ID NO: 50418 - DNA, 516 bp, Gossypium hirsutum
  Clone ID: LIB3825-028-Q6-N6-H2
actcttcttgccatccacagcatcttcctttgaaatttcagaagatgatttgtggctatcagcatgtctctgattgctaccttcaggggccaattttgagaacttcttcaaaatctttgaatcctcaggatcatcactattctttgaacctttcttattccagccaaaccaacccttcttatccttagcaacaccatttgattcacaattttcataggaagctcccgaaccattttctttgcactcaatgacaccatgctcatcatcatcacaaagaccatctgaatttcccaaacaaagtgccgaatccagctgcatccgttcctcagctgttaatacatcatcatactcatcattatcaccaccttttgccatcctttcttcatcatccacagaaaaaagctcttcatcagtcattgcaccaggaacacttcttgacttcacactcactgtcacatgaagcatatcataaactttagccttccagttcccaaccatctcacttctctcttgtcg

SEQ ID NO: 50419 - DNA, 474 bp, Gossypium hirsutum
  Clone ID: LIB3825-028-Q6-N6-H8
aaaaaattatagggaaaaaagaaactgtttacatgcctgagggaaatgagaatatggggcagtggggggggggaggcgagccgggaaggggccgggaaaaggcagcagggccgaaggagggaacgaactcacgggaagggggcgaagcggaaagcgaaggggggagacgggaaaccaaaaggaagagcggcagggaaaagaccaaaacacgcccggcaaaaagacaaaggccaaagcccggaccccgggggcgacccggggaccccggaacacaaccagaaggggcggcaggcaaacccatggggagggagataaaaaaccgggggggcaacggacaaaggcccaaaccaggggaaaaggggggtgaagggacaacaacggacgggacaaaaagcggaagccaaaaagggaaaacccaggccccccagcgaaagggcctaacaccccaaaaacgggaagggaaaacgggaaaaa

SEQ ID NO: 50420 - DNA, 553 bp, Gossypium hirsutum
  Clone ID: LIB3825-028-Q6-N6-H9
aaaatggaatggcagtatgcttactgacacatgaaactagaagggaaaaaaaatttctttcaatttcaagtgaattcaagtgccatatactaaaattagctaacccacctaaccactaattacatgaaatcaaaattagatttttcttttctaaatatggcttttacaaagttaaaaatctgatcagcccttaaatgtctcaaaatttccaatttgaccccttttgttgattgctatctaattagtctttttctgcttgttttttttatttaaggcatccgaatttcgttcttagcctatgtttatcctcaagcttttgtatgttcctacattagaaattgtccaataatttatcagaaatcaagcctctcttttgcaaccatgatcaatgtaaataatttaggcaaatgaataagtgttcaaatatgcagtttaatcaaccagtgtcatagaattcaaaaatgtaaattaaatcacttcactaaattgcaattgaaccaaaatttgtaaggtatttattctcaaacaattatacagtaaatttgggatatag

SEQ ID NO: 50421 - DNA, 350 bp, Gossypium hirsutum
  Clone ID: LIB3825-029-Q6-K6-A8
acaacaaaatagaagtattttggctttaaaagtaaatgaaaagcaaagttgctgttttctaacttagtgaaatagtattctcaatctttcttgtactcttttcatagtctatatgtttcgacttggatgtttgatgatttcataccaaaactttgtttcatcttctggtattgttgatggatgcatctaccaacctgaaccaaattaatgggaataatcaaagcattacttttaaaaaaaaaaaaaaaaaaaaaaaaaaaaaaaaaaaaaaaaaaaaaaaaaaaaaaaaaaaacaaaaataaaggaaccaaaaatacaaaaggcgggcatgcgaaaaaaataaccaccta

SEQ ID NO: 50422 - DNA, 556 bp, Gossypium hirsutum
  Clone ID: LIB3825-029-Q6-K6-B10
ctctgtgtcaaacttgttgtgcttgttattgacaagtgtactcttgatgtgttgtatttctttaagctagtttattaattatctaataattttcaaccaacaagtgattctggtggtgcccaaaaagttcgaaagaccatattaatcttgtactaatattgcatcataaaaatctcaaatgcgccatgcacttttctacccctcttaaggtaaacaagattcttttgaaattatatgagtgttacaggaggccatcaatgtggccgcaaaagactggggcctgcaatgtctccgttatgagataagggatatatctccaccccgtggagtaagggcagttatggagatgcaagcagaagcagagcgtaaaaagagagctcaagttcttgaatctgaaggagaacgacagtccaatataaatattgctgatggtaggaaaagtgctgtgatcttagcatctgaagctgcaagaatggatcaggttaaccgagcacaaggtgaggcggaagcaatccttgctagagcacaagctacagctaaaggaattgccttggtg

SEQ ID NO: 50423 - DNA, 585 bp, Gossypium hirsutum
  unsure (1)..(585): unsure at all n locations
  Clone ID: LIB3825-029-Q6-K6-B2
ctttcatgnacagnagnaattaatattttctaataaagtggtagtcgttatgctttgtgtttattctttttgtatttttcatgtctttcagaaagaaattgaaccttgttatcctccactttagtggtgtctctgcacagttctttttgcaattgatttgtcctcgctgttagagtgatctgtgatacgagagtttaattcttatcatgctatgataagtttgtttctgcaccttctcgaacttggtttcctacaaaatagaagttatatagctatccaagttgtaccgtaggcaagacttaaggttaagcataatgatgggtggaagcacctggtaggtccctctattatagagcttggatcaaattagtcctactattaaatgggccaacttattccttgtactattaaaaggaatcaaataaggccaaatgtcaacagagttaacatttattatttgaaaaatgtcatttactgtttaacagagttagttgtttcgaaagctgttataattttgcaaacgaaatcttttgtttgaaattgagctgcaaatggtcactttttaaacagtaaatgttagctctg

SEQ ID NO: 50424 - DNA, 306 bp, Gossypium hirsutum
  Clone ID: LIB3825-029-Q6-K6-F2
gctggtcattagcttctccatatagccgcacacccttgaattacaattcactaggccgtctctctacaacgtctcagatggcaaaaccctggtgttacaccaacttaattgtcttgcatacatccccctttctccagctggacgccatactcatacaaaggcatatcaccagatcgcccatcccaactattacgcactctgtatggataatgggacacccaactgtatgtttagaggaagcgctgcagtcagtggatggttacttctcacaagagaccgatccactactacaaaaaactagcgccc

SEQ ID NO: 50425 - DNA, 584 bp, Gossypium hirsutum
  Clone ID: LIB3825-029-Q6-K6-G5
ccgccgcgtgcgcggccgcgtgggctcagctgctccgtcttatataggcaactactatggctgccagattgtgtggtctatacgttaggccgtaaggtctcaaagtgggagtgtgaatatactcaaaggggaacaaaagctgacgagatctttacatgacaaaaaactggaccaaggaaaaagagagaaaaacttgcacgcagaggacccactccagaagcaaaacgcgcctgctggttcagggggtgctgccaccgctggtagcactacctttactgggcaacatttgctgaaaagttaacgtaagtccctaactacgtatttcttgctggtgttgcatcacctcggtgctgccgcgggatggtgtctcaactctaaagacagcaagcaagatgactgaaatgggggttaatgcgattggattctataggtggaacatggcatgatatggataaccccactgccctgttgctgtgcatagcaactgaaaaactaaacagactctcgcaagcaggtcatcatgatgatctgataacatctaggctatgaatcaataggggccttgtgtacctcaatgccaatga

SEQ ID NO: 50426 - DNA, 573 bp, Gossypium hirsutum
  unsure (1)..(573): unsure at all n locations
  Clone ID: LIB3825-029-Q6-K6-H4
ctgntgacttacgttcttggnaaggctgggtggaatcccgtctgaggcagctgactttngatgattgagcgagacacttatggaaagttgcagtgccatccttatgctcaggattatgtagatgcctccaagccatgtgcccattgtgcattttttatgggtttacaaagngaaacatggnagaaatagttcaagaaggtcaacagtttgatattcgtgggtcagttgatgagttccgccattcaataagtatgtacatgttttggaagcctgggatggaaatctatgtatcccatgtccgtagaaagcagcttccggcttatgtttacccagatggctgtaaacgttctcggaatctacaccttactccccagcagccttcttacaaaatatctcgcaacaatggtgttgcatatcaagctgaatctggtgagaaatgccttaaaaggaagaaggatcccgatggagaaaatagtgagcaaagtaggctggataaacggaggagtcctgataggaatcaatcagtttctcccgagattgttagtcgcaagcttggcagcgcttgcacaggtt

SEQ ID NO: 50427 - DNA, 484 bp, Gossypium hirsutum
  Clone ID: LIB3825-029-Q6-K6-H6
ctacctcgctgtgtctgtgttccctggctggcggctacatatatgtgtgactcttacccatcctcttagacacttgaggtgtcaaacgaacttgcggggcgtagatgaccgtgtcaagctacaaatgatgcatgaaaaatttggcacctgaaaaacacagcgttagcagggtccactccatctttccttacatgtaccacatccttactgatctacatcactctctacccagagaaagtaacattgcaaattactcatcaacggaaaatatccatctatactattcgagccaccctacctctactagactgcacgcgttatcatactaattctttcacgcttattaggttacgtgtttgtggcaaaatcatatcccaatgggagaacatttctctttttatatgcagactttttacaaccagtgtcatcatctctaacgctgttagtgattatcctcctattgtcaatacaaagcagatttttt

SEQ ID NO: 50428 - DNA, 598 bp, Gossypium hirsutum
  Clone ID: LIB3825-029-Q6-N6-A1
tcgcgatctagaactcgcgtacgcgtgcgcctacccggacacttcggaccgacccctgaatgcgtgccagctcctgctatcgtgccacctattactattgggagtaatcatagacctagctgtaatctgggtgatagctgtatcctgtgacaatattcacactaacattcacaaccgcacacatcatacgagaagcctgcatagcctaatgagccagctaacccacatgagtgacctaactcacactgaccgctttgcactcactaaaccttttccaccagctaaatcaatgaatccagctacactcatgaataggccaactcgctattagacgccattggcgtattgctctccaccagggagactgtctacaccagatagaccttcaccagctgatcgtcatagacctgctgcacgcgatacacgctcattaagcccaccacgctaaaatgctccagatgcgaaaaactgcgggatataacataacctggctatataacatgagcatcctactacctagatatatgccactaccgacatactccgatcaacaatcacgcgcatctcgcccatggccctcattgcgcccagcaccatc

SEQ ID NO: 50429 - DNA, 506 bp, Gossypium hirsutum
  Clone ID: LIB3825-029-Q6-N6-A2
gtgttttttttttttttttttttttttttttttttttttttttttttttttttttttttttttttttttttttttttttttttttttttttttttggggggtttggaaccggggggaaggggggtctcccccccaagccccaggggggagaggggagggggcctgggccccgggttcccggtttccaacatttagggggggccgccaacaggaaccccttttaacaaacctggggcccccctccttctatggggggggggatccccccaaccggggcgggggaggttccacccccggggtttccgggcggaaccggccagttttagataccggcttcgccttcccctttggctccggggccggggccccccgggaaagggaaaggggggcctccaaatcttcccccctttcctttccgggtcccttacccagggtcccactttgggggggggggccccccaaaaagagcgggacccccttttttggggggcttttttcacccccca

SEQ ID NO: 50430 - DNA, 524 bp, Gossypium hirsutum
  Clone ID: LIB3825-029-Q6-N6-A8
aaaattaatgcttttatgattcccaatgattggggcaaggggggaggggaggccagccacccaacaaaaaccccgaaaaagagaaacaaaagagtccagagcccgcaaacacggcaaacaaggcaaaaaagaaacagaggggacgggggaaaggaaaccccgaaaggacggagaaaaaccgaacaccagccaaaggggcaaaacaacaacagaaaaaccaaaaaccaacaattgaaaaccaaaaaacccccaaagtcagggggcacggacgcggcggaaaacccggaaatgccggaccggcacccgccggggcccccccgggccccagaggcaggcgccagaaagccggccgcaaccaccgaaagagaggggccccgggggaaaaggggaaccgggcacaaagccccccacccgaaaaaccggaaccccaaaggcgaaagcccgggggccccaaagagggagcgaaaagaaaaaaacgggggggcccaaaaggggagcctcccaacccaaaaacccggcgggcc

SEQ ID NO: 50431 - DNA, 574 bp, Gossypium hirsutum
  Clone ID: LIB3825-029-Q6-N6-B10
aggatgaagttttttcacttgggcaacacaagtgttcctttcctgaaaactttttaacctttggttgaattcttgagacaatcaaagataactatatccgtcctacatgacatagtagttctaaacacctggcaaatgaatgagcatcctttcatcaaattctaaaaactcccttaaatccttgccttccttttggtaattttcagaaccttttaactactaccaaagatgtgcccgtacaagaaccccagaaacaaaatctggttttcaatgggaatttgggtaaaatcacttctattctttcttcttggagctctgaagtgaaaatcctacttcaccaacatgatttgtgtcccttgcttccacagctctggggttagggatttcgccttcagtctctccaggaggagcatgctttgtgcttctggatagctcaagagaattgcttacatgagaatcaccagtagaagaattgctcaccaggcttttgtacatggtgagagcttgggcaatcatgttggcagggtttgcagctgaactaggaagtaacattgttgtaccctccttggcaata

SEQ ID NO: 50432 - DNA, 556 bp, Gossypium hirsutum
  Clone ID: LIB3825-029-Q6-N6-B12
aatagataaaaggataattaatacattaatcatacacaaaactaataaataacagaagtgtgtaaaactaattttatgagtgcaaataaatctctctcgtatgcgtgtatatatattatactttgagagagaaatcgggttttttctttttagcttttggctacacaagggtacaattataaacaacaaactaatatatagaagcaaaaaactaaaatggtagtactgcattttagtgttgttgcagccactcctgaatggcagagcgaagagcaaggttaggaacgagattggaatgtgccagcttaatatttgtcatgggtgaggtgtcatgtccactatccaaccaacctctcaaagcctctgcttcgtatgtgaaaccatcggctgctacgtgaggatcttgcattacttcctggaaaatggggcagataaaataggaaggaggatggcattgctcttcagaacccagctgaaacgaggatgagcctccacatgaagccctcattggctccagcaccctccacacatctgttgaaaggtcaggccgacacct

SEQ ID NO: 50433 - DNA, 467 bp, Gossypium hirsutum
  Clone ID: LIB3825-029-Q6-N6-D2
ggttcgggggcgtttaccatgggctgccggaggggggcggaccaagggggggggggaaaaagcggaggtgcccgaagaaaaaaaaagagaaaaaagcaaacaaatggctaacaagaagcccccaatgcaggcaaaaaaggggggggggggaacaaaaccaagcacagaaaaaaacctaaccccagccttaaagaacaccccgggcggaaggcacacaaacaccgaaaagagttgcaaagtcggggcacgcgggggggggaagaaaggaacaaaagagcaacccggcggaaacctccggcagcgcggcaacaacgggggggggaaaacggaaggggccacacaaaggggcccaacccccccccggcccgggaagttcacaccaagaacaagcgaacgacaagcaacaaacttaacggggggcacatcaacagcgggcaccaggggggcacaaactacacggccaccaa

SEQ ID NO: 50434 - DNA, 569 bp, Gossypium hirsutum
  Clone ID: LIB3825-029-Q6-N6-D4
gcaaacaggaatctgcaagattatatttcacaaataattcatatacaatcttatatgattgaaacttgaactgtacaataaaataaacagagacattttctaccattacctttgataaacaaaaattagataagagaactccacagggcgtcaaataaggggagaaagaaaaggaaacaagcaaaaaaaggcagacacgacaagaggacaaatgatagcttattttgtggttaattttaaagagaaaatgagaactgggtatctaattagaggctaaattttaaaagcaaatagaaagacaaggaattatattgaaagctagctagagaaataaaggtgctcttattccttgttaccaaatttcttggcaatgacagggcggacatcatcaatgtcaaccagagtctctaagaagggaagtaatgaaattagtgcacaatcggatggatcatcaaaccaactcttaataggaatcccattattcacttgtaacctgtaaacctgtggtgaattatcaattatagcaacttttgcaagatcaacacctaatactgttaaatctttagtgt

SEQ ID NO: 50435 - DNA, 485 bp, Gossypium hirsutum
  Clone ID: LIB3825-029-Q6-N6-D8
cccaagcaaaaaaagggggccttttctttcatcccataaaaacgggaagggggggttttttttcccagttcctgggggggggggggttttttttaacccaaacccctaaaccttacgggggccggcccctacccacattcgggggggggcaaaatcataaaagggcccaatcctgggcgggggctaaaacacttccgggccttttttccgaggggggttccaggaaaccccaaattttgggtaattaaaccattgggggggaaataaaaaggggggttgggggggaccaacttgggggttggaaaccccccggggggaaaaggaaaaccagtgggggaaaagccaaaggaggccctcggaagggatatcgatggcgggggggaaaaaaaggggggcgggggggaccggccatctaaaaaagcggaccaggggccccgggttttaggccactccaaaaaaaacggccaaaaaaaggcccctggggc

SEQ ID NO: 50436 - DNA, 519 bp, Gossypium hirsutum
  Clone ID: LIB3825-029-Q6-N6-E2
aacaggaacaaataattggattggatggatttttcatttaaaattggaaaacaaagctgaaacaacttatttaactttttctttttaacccaaatccatattttggcaacctacagagcaggacccgaataaatcacattcgccggctttaaactctggggcataacaacattaaagggcccgtatttcggcatcactttccgggtggccagggcagctgcctcgttagctctaagggttccagctgccatgatagcagcaaattcacggtttatctttttttggaccttggctcgagcatccccaaaagggtctgtggcagctccactggccgatgatttctcctgggctcctggcggtttgacaaatgatgtagtcttatccgcctccgcggggtttggctgctgatcagccttcaccttactgctaacctcgtttttcttaggggtatcagaagaactgttcacactggcacttgagggctgaaatggctgaccaaaaacaaaaggcttgaattgg

SEQ ID NO: 50437 - DNA, 474 bp, Gossypium hirsutum
  Clone ID: LIB3825-029-Q6-N6-E4
gggccggaggggccccccaaattttccccccccaataaggggggaaccccccccaaaccccaaaaatggggccaaaaaaaccctggggcccccccggagggaaaaaatgggccccccaaaaaaaccccccttttaaaaaccaggaccaaaccctggggccaaaaattggggggggaaaaacccccttggcttggaaccaggaaccccccaaacccaagggggggttttccccaacccctaaaccaaggcctttttggaaaattttcccccggatccagggggggcaaacccaaggggggttttccccccaaaaaaccctttgccccccccaaaaaagccttcccctttaaaaaccccggtttaaaccgggcccccccgggaaaccccaaaacccccttggggaaaaaggcccgttttcccaaacccggttaaaacaagttggggcccctttcggaccccagggccaaatggcaa

SEQ ID NO: 50438 - DNA, 180 bp, Gossypium hirsutum
  Clone ID: LIB3825-029-Q6-N6-F2
atctatcggactcttggtttgacccctaaatcactgaccggaacctgcaagcgtaccaactacccctatcatgagaaagctcacaaactagcagcattaatgatcatagctgagacctgtgtgataattgaaatcagaccacactttcacacttgcattacgacacacacagatcgtaac

SEQ ID NO: 50439 - DNA, 544 bp, Gossypium hirsutum
  Clone ID: LIB3825-029-Q6-N6-F6
aatccaagactagattctttcatgacaaatatctcatacaaaacctgtttgtcttgatgttcagacctagcttttgctaacaaaaatttccttcgctttacatatacaaatcattaaataaccggtctgggaattaatgattcataaacttttcttactcttgtgtattagtaagcagaggcaatgtcttagttattcttttctttctcatttttccgcctcctccattatcagtcgacttctttttttcctccacaacttcatcaatagcattcaaatggacggtgctgtttggcagccgtctttcttttctttttggcttcttttgagacaaggaacttatcttctgattcataactggttttgaggaagcagccttctcgattatactcttgtaatattgggtgaatgaagcattagcattggacttctcaaactgcagaaatgaatcaacaatttgatgatctttcggtgaaaatgccacctcatctctctttctttgcataaattcaatgttctgctccacctgatcaacaaatcgctt

SEQ ID NO: 50440 - DNA, 434 bp, Gossypium hirsutum
  Clone ID: LIB3825-029-Q6-N6-G4
ggccgcaaggggggatccttttaaaaaaccccccactttaaaaagggtccataaaacctttaaagggccccccccctctggggggggttccaaaaaaatcccccaatttagggccccaccaaccctaaaccccaaaaaaaagcccctaggggccgcctatttaaaaaaaaaaccccccttggggggggccaattttaggggtgggaattggttataaaattttttccccgggcttttttttttaaaaacctttttaaaagaaacaggggcccctcctttaaggggggaagggcaacaaggggaaacatttttgccccccctagtttaaaaaaaacttttttgggaaccgaacccccagactaaaagttttaaccccccctaaaaatttgccagttttttaaccacaaaaccgggcagtggcctttttttttttt

SEQ ID NO: 50441 - DNA, 503 bp, Gossypium hirsutum
  Clone ID: LIB3825-029-Q6-N6-G5
aactgtcctgttttacactgttcatttcaacaggaccaaacttttttttatttggttcatcagttcgaacttgaaaaaaaaaaactttttatgcaaacaaacaacaaacacagactcaaggcagaattcttacacaaaaaggcgctcctttcatttagtgggatcggtaataagagatcatctctgggtacctaacgcagggtgctctcttaataaacaccagacattgttaggcaccaacagcttgggtaagtttttggatttccctgtggaaccgaaaagcgagccctctggggtctaacgcacaaaccccatactgctgaggtaatattgcctgcctgtatccacccactacctgcgtggggtcccactgtaggatgtacaccggcaccgccatagccaccagggtcccctctgttgaacacacctgtggtgtagccagtaccaccaataccaccaccaccagcatggccacccgtggcgatatgatggcccacctcttg

SEQ ID NO: 50442 - DNA, 522 bp, Gossypium hirsutum
  Clone ID: LIB3825-029-Q6-N6-H1
aagctcacctatgccgaattatttaccacattcttaacaaaacatatcaaacataattcacataaataaatatgccatagccgggataccaaaatcaacatatctaacacttggtcaaaagcacaaaataaataagcccttttcgcatgggtcatattaacatacccaaaatcaaacattttaactagactatacatgccataagttcaatttcaaacttagtaaaatatcgaaaacagtactcgatagggggatagacttctttgacgatcgccgagctcataaccaacttccaaatttataaaacagaaagcgattacccacagtaagctatcaaagcttagtaagtcataagcaaataaacatttaatcatttacgtaaattaagctagacaattagtaataaaccattataatttcacatataattcaatttatcaaattatatatcaaaacttatataatttggaataacttccctttttaccaaataattaattgataatataactaatcatcatt

SEQ ID NO: 50443 - DNA, 568 bp, Gossypium hirsutum
  Clone ID: LIB3825-029-Q6-N6-H4
aaatgatcattgatttttttccctttttttctccttttttttttttgtgaaaacaaatgtcaagtgaaaaaagctgtgcagacaaggaaaaaaaggtacccatatcccaaaagacttcaggttctgccaagggacgtgtgcctaaaagtaagaaacaaacgccggtacctaaaatactacttaccaaactgctggctttctctgtcgggttttttttcttgtcggatcaacaatggttgcatagatgacacaccgatctaaactcgagatccttgcatcatgctgttgatgccaaactcaaccttatcacaggattctgcacagattctgaatcaacaactccgttcatggacttaagaaccacgccaaccacagtttttggcttcacaacagaaaaacaacaaacaaaaacatatagcttaggtaaagaagttgactcaacggatcaaaatatagcacgaggagggagacaataggttatttgaagcttgaactagtaagagtcgttcatctcgaggatcatgtagtgcccaacttgaagtttatatactactatggcaacaaacat

SEQ ID NO: 50444 - DNA, 576 bp, Gossypium hirsutum
  Clone ID: LIB3825-030-Q6-K6-A3
ctctcccccccaaaaaaaccctaaacttgattctttcatctaatcctttcctctctcttctaatttaaacttatctttagtcgatcgagcttctgctaccgtcgaagctgtctttctcatatctcaagcctcaaacaagattgaaataaagtaggtagcagagaggggtcttctgcagtgtgcactatccttcgtgttccttaaataatttatttgcaattatgggaaaatgtgttcacctatggatgatgatgagccagcagtgagatgcatgtgaggggcttggctactttacaaatgctttgatctctctgtttctctttgtcaggactttgagatgggttcttgcttctcatccgcagccaacggaaaaagtggcaacaaaagggatgaccaagtgacagatgcatccacggctataacctgtgcttcgcccaagaagcagaagcaaaggcaggggctagggaggtggaggaagaaatctagtgggttagtgccaatgggtgaggcagagcttcatctcattccagggagaatgtttttgaatggtgccagcagtgttgcatgcttgtatac

SEQ ID NO: 50445 - DNA, 510 bp, Gossypium hirsutum
  Clone ID: LIB3825-030-Q6-K6-B2
aatttgctcctaaaacccattcctatagattgagtacacccacaacgtaagatgctattgcctataataatgcccttatggactaatgtcaatgtcttctgacgagaaaagctagccatatgaaaacactgtaccctaatgtagaaaaaactgtaaagggtataggaaagtataaaaacaataacatgcattactgatgaaacacgcagacctccatcataacacccaaattgtaccatgctggtggtgatccaattgtctggactgtctaccccacagttgagtacaacaaatgcaatactatgggctataactcaaccgaggggacatgacaaccttaaacaccccaacaaccctgtgaaaatgatacaggcattcttttattacctgcatagtatgacgacaagtcggactaccaacagcgcttaccgaccaacaagaaacctatattacaaaaaccgcgcctgaacaatgttggctactaggaagagcacccaacagggtacccat

SEQ ID NO: 50446 - DNA, 390 bp, Gossypium hirsutum
  Clone ID: LIB3825-030-Q6-K6-B5
tccgttttttatcgcaagacgttaaaagggtccttgcgatcttgtgctaccatcctggaaaacatttggcatgtaagaggtagatctgtctcaagttgcctttggtagccgatcatgtatcaccgtatcattatatcaaacaggccctcaatggtcattcaaaatatctgttataggacctgatcgacgcatactttcgtcctgctctgccattttcattttcctttactgcagatacctagctatatggttatcgccggattgcacacagtttaattatttagatgctctatgaaagtggttattttgctggattgtataaaacctttacatatttgatctttcttcatatttttaatcaaatagaatggtttattgtcaactgaacct

SEQ ID NO: 50447 - DNA, 407 bp, Gossypium hirsutum
  unsure (1)..(407): unsure at all n locations
  Clone ID: LIB3825-030-Q6-K6-C11
gtttttgcnataaacaaggccgtggttccctctagctcaaaacgtacaatggaacacttcatggcctttagtgaaacgtgacgatggtaatgaagcggtggtttggagacatgctgtaaagcgtcaccctatactagcattcaacctttgaacaaggcgtagacttcacttcgtaactgatctgatctgttttttgaacaagaattagaaattattcatgtgccttaaagactcgtatcttatggtctctgtatgtctaactttacggaagggtatgttttttccatgtccgcattctactaactctaacggtcaattaacttatccactgtgtattgataaggtgaaggctactctattattgcctaacctactgtttaccctagtaccatcaggaggattaaaaa

SEQ ID NO: 50448 - DNA, 598 bp, Gossypium hirsutum
  Clone ID: LIB3825-030-Q6-K6-F9
gcttgtacgcacacaagcgttctagggagccaattctcgcaccacttgcctgcgagaagggagactgtatttcaactcctgctatataaagtaacactgttccctggcataccacgaaagagctgaaaaaacgctgctcgaacccaacggtaatcaggcttgacagaacgattccgctccagtaagagtaattgtcttgatgctagacgacactgtacctgacacgaggctacacgcaactaagtagctgcacgccctgaatggcagaatgacacacaccgtgaaaagggtcatatatcgcgtagatggttgtgggtccgctcaacaacacctctactcttgctaacccattccacaggtccttatactactacaaccattgattgctactgcacgagtcgagtttatccacgatactgtctaaaacaggctcgtccctcatgttttgactccaactgcataacggcctctattgcccaaaaagcttgattagctccctttagtaacgtgtagatccatctccaatctatacggtggtcaggacttccacagttgatgccacggaactaataaaggtatctaaatccaaactggaaca

SEQ ID NO: 50449 - DNA, 588 bp, Gossypium hirsutum
  Clone ID: LIB3825-030-Q6-K6-G1
tccgcccgataatatcaactgcagctgacatcctcaacttggtggtggtgggccttcaaggagttcccaatttgatcatcttcttcctccatcaatgggttcttcttcatcatcatcgtttcgccctcaacaacaggccatgggtttcgtcatggaagaatctaatcagattttcaaccaagaacatcaatcccagcatgggttgttgggaaacagcaaaccgttccaaggattaatgcagtttcctcccgacaacaacaacaacaacaacaacaacgccgcaagcaacgcttcttcggctgccaatctcttcaaccttagcttcctttccaacagcggcaacaatggcggtgctggcgattataatttaacatcttcgggtttgctcatttctgataatttcaacaatgaaaacggcggcaatggtggaaccaacaacgcctccaacctcttctccaacaacttaatgagtgatcaaatgacttccaacatcccttctctctttagctcatcggttcaaaacaataacatggtgccccaaatgtcagccaccgcattgcttcaaaaggctgctcaaatgggctctac

SEQ ID NO: 50450 - DNA, 555 bp, Gossypium hirsutum
  Clone ID: LIB3825-030-Q6-K6-G3
tccgtggcctgctggactaaacatctgagtctctttctaaagttatctgtcagtgatacctgtattttgaaactccttatggttatggcggtgcatttctgttgttgatacttcaggttgtttctaactgcgaaagccctagtcattctgcctttgcctgtgcacatgtcatcgtccttgtaacatcacagttcccacaagcgatggatcttgttcttgctgagatacatagagcttgcatttacactgtcccaaagcatatttcatacaccaaggtaacatttttatatcttatgtaagcctatctagatgaataacaagctagcactcaaactcactgtgtttctcaagtgtttgcatttgttaaacatgtagctatgcttttttgatatgtgaaatcactcaacttgctctagaaaagccaaacatggataaacggaatcatgctagtgtgcctttgttccttttgctgatatatggcttctgagttgtaatttgctattccagtcagcatttgaatccaaagaagcttattggaaggttattggatacaaa

SEQ ID NO: 50451 - DNA, 500 bp, Gossypium hirsutum
  Clone ID: LIB3825-030-Q6-K6-H10
acagacaaatgggctctcctgacttgcatgctaatccactgctagtctccaagcgtctgcctcagctagcaacgcatcattgtttctgaagtggtccacgccaattctctcgactgcagtgttaaacttcccaccaccactcttttcggtctcaaactcactaccccacgctcccgacgagtcctttccacaacgctttaaccggagtctgctagtccggtcctctgccgaaaagacaatcgggactcctgcctagacttacttataggaaaaatcaggcatcacgatcagattcttacctatagatgctggccaaaaggctaattacgctcaccctgggttacccatgggttgagctccggagggtcacattttatacgatgaaatcctgaggtctaatcctaagaacccttattggaccaaccgtgagcgtttcgtcttgactcgtgcccatgggtgcatgatgcaatatgctccgctgtaccttgctggctatgata

SEQ ID NO: 50452 - DNA, 580 bp, Gossypium hirsutum
  unsure (1)..(580): unsure at all n locations
  Clone ID: LIB3825-030-Q6-K6-H2
cggcaaanaccncggcaacgaaacagnaaagaacgggtctacgtttgcccagaaacgagctgcgtacaccataacccggctcgcgccttgggcgatcttaccggcataaagaacactattgcagaaagcactgtgagaagaaatggaggtgcgagcggtgctctaaaacgtacgccgttaagtccgattggacggcccatataaagagttgcggcaccaaagaatataaatgcaattgtggcactgttttttcgaggagggatagtttctatacgcatagaacattttgtgatgcgttggctgaggaaaatgccagggctcaagcggcgacttcttcaccgccgccgttaacaccgtcgactacgactatggtttcgccgggattgtcaactcagagttcaggtcaaatttttgttatcttattttatatgcgtattttaatcattacatgcagggtttctactaacgcatacatcgaaattgagataacaggttgggttaatatatcatttggtatttgaattcagttttattgtttaatttggtacttaaatttttttttaatttggtatttaagttt

SEQ ID NO: 50453 - DNA, 456 bp, Gossypium hirsutum
  Clone ID: LIB3825-030-Q6-N6-A10
caaaattaacgtattctactgtttggattgagatggggccccattttgcagagaaccttccaactttaactagaagtgctttttactcaacataacatggacaggagcctaatataactggcaagggcggaatattcctcttggcttctctggagctggaatatggaccagcttgcaagacgaaatcttataccacgtgcctgccactatggtcccgatgttcagctggcgagttttttcactactgtttcggcccgatgcttgaatatagggagtgcccaatcctgctggactatgccaagaccatctttttcatcactaaggctatttgttggatcaaagcccaatccacccatttgcatcattcgatgagtgtcatgcatcagcattctgctgttgcataatcagactatatactacccctcacaccacacaaatgtggaagatgccatgagc

SEQ ID NO: 50454 - DNA, 518 bp, Gossypium hirsutum
  Clone ID: LIB3825-030-Q6-N6-B2
gctcaccagctttcatcgttttatttatccgacctggctctcactggccatggcacctggaccaaacacttggtttataggggacaacattacgcgctctgtcctgaaaaaaaaaaaaagcaagccaacgaacaaaccctaacgtcactggcctttcagacctcacagtggcaatccttgaattaaatagcgaaccgtttacccggatcatcctgggtacctccgcgtatgctcctatatactgccaaaattgataggcgcccaactagtgaagatttgtttgacccatgatccaaacgcaccctgtgcatctcacgactacccctttcagcctttgaaagctggcctgcctgcctaatacctactacctgcggtgggaaacccacggttatcctgtatcaccgtttccgtcacagacaccgaaaatgcactgagtggtacccccctgagttgaatcctgtacccccaggaccacgacctccccatacatcaaacacatttttctgattgtgaacctc

SEQ ID NO: 50455 - DNA, 387 bp, Gossypium hirsutum
  Clone ID: LIB3825-030-Q6-N6-B5
ataagaaacccttatatttgattgaaaatatgagaaaatcaaatattaaaggtttttacattccaacgaaattacaactttttagaacatgaacactaatttgatcggcagcgcaatccaacaaaaaccacatcccttggcaaccgcagtcaaggaaaatgaaactggccgcaccaggacggaagtctgccactatcagggcctataacagatattttcgaatgaccatcgagggcctgtttgatatactgatacggggactacatgatacggctaccaaaggcagacttgagagaaatcatcctcttacatgccaaagtctttcacaggatggtggctcaagatcgcaatggaacctttttaatctatcttgacagatgagaaaag

SEQ ID NO: 50456 - DNA, 425 bp, Gossypium hirsutum
  Clone ID: LIB3825-030-Q6-N6-D5
ggggaaacccagcccccacaggcttagggggttaaattcccaaaaaaaaaaaggccttttttacacaaggagttcccttttcaatcggggggccccacccatttggggggcctttaagggtcccttaatacttttttttggggtctggatccaaagcccctaaatcaaaaaaaagcaagagagtttttgacggggcaagtccccagagagattttcaggagtaggggaaagggcggcccttggccccgtggggattggcgccatccccagggcccttgggggagaggttaacccaggaaaagcccccgaaaaaggaaaaaagggggaaaccacaggggcgctgacccaggttgccacctttcccaatttttaacaaaaaatacaagctgggggaattggggccctcgctgttatcccggccccgg

SEQ ID NO: 50457 - DNA, 546 bp, Gossypium hirsutum
  Clone ID: LIB3825-030-Q6-N6-D9
caactgttaatcaatatgaaaatcttatgtgaaaaaccctgaatttatttacagcagagctacaaaagcagggtaaaagcaactttaacaaggtatctttcctccctttagggtctaagtaggaccggtcatacctgcacgatttctcaacatttctgttctcttgcttctctccattacctccactaaccactccgcgccttctttaatccccgttctgcggtaaaagtagactttaatgtttatatcttctctaaatttaagtcaaggagacaagatttttatgaataaacagaacttacccatcaaaagcagaaacagcctcaaacatgtaaaccctttcatccaattttttaaggtctagatatcgggcgagttcttcagctgttacagcttcagaaagatcctgcatcaaagccacaaatattgacctcactgtttatcataaagaacaaaaggaaaacatttaacagttactaagctcaaaaaaatgaaaatcatattaatttaccattacatcctttgtaaattaagaagattttaaaa

SEQ ID NO: 50458 - DNA, 449 bp, Gossypium hirsutum
  Clone ID: LIB3825-030-Q6-N6-F7
ccccaaaaatctcaagctacattactggaccccttttccaaagggttaacaaggcaagggccattggggggtccctacaggggacactaccttccaaaccttttacaaaggtaaatcccccaaaactgggattttttgggggatttccttacatagggggaaaaactcaggggaaatgcgttggagcccctcccgatccaaggcactttttggacaaaaaaaagcccccatgacataatacccccctccaagtaatctccaatttcaaagctaagttcacccaagggtttggtggcatctaatccccccacattactggaaaaaaagggttttcccaccttttttaccaaaaaacgtccatttttgggaggatatacaaatgcaaaggacagccttgcattttttttccttggggggggagccacctttttcaccagaacagtcaaccc

SEQ ID NO: 50459 - DNA, 423 bp, Gossypium hirsutum
  Clone ID: LIB3825-030-Q6-N6-H10
aaaaaataaggatgattccttttattattaaaatcaaaaaaagacccaaaaggcaccataataatgccagcaaagttcctttgctgctgcaacaacagcactatggggttaaaccgaattctttgtataacctaccaactggagcacttgccccaaaccggatcgatgtccgattgccttccctttcaatacccacaatctctttcccacccaaaagattgtatcccgactcaatcacttacctctaatactccaccacctggtacaaacactttctttgtaggcccctgattgattatccaagacttgccaacaatacaagggaaactacccgaacaggtttttcagccttgcttaacacatcggcatgtttaaccaccatatacaactcatagccaattgcaatcatgattatgaaagctt

SEQ ID NO: 50460 - DNA, 561 bp, Gossypium hirsutum
  Clone ID: LIB3825-030-Q6-N6-H12
aaagagaacaatgacgagcttttcaattaatttaccaaaaagaaaaaagaagtaggacagaagacagagcgcaacattgaaaaggttaaaaaatacacctaatggggctgaacctaagctagtaattttgggggctcctctttcactaataataataataatagagttggttaagttggctaacagagaagggtaaaagaaggcatgtcttcaatccgcaacacatcatccattagaagttctctttccagctgagtccttgtcgatttcaatacttcattgaactccatgtacgtggcatttttctccagccattgcttgtccattaccacgaatgccacgcagtatagcaagtcgaatgcccattcattttctgttgcaaaccaaacacaaaatccattcaattggtaaatcccattgctttgttgttttactaacatcagttgcaggctcttacctgataacatctgtaagaaaactgatcggataaatgtcctaggtttcaaggcatcaaggtcaagcatttgcatgatcatgaatgtgatatttacgccagcaaca

SEQ ID NO: 50461 - DNA, 544 bp, Gossypium hirsutum
  Clone ID: LIB3825-030-Q6-N6-H2
cattaatattttattcttaatattaatataaaaaaaagttgataaaagaacaaaaatatattaaaattaatttaaaatatcaaaattttgtagaatgcatattaatgcaaactgatattgaaaccgtacggatctccgaaatcttttaaaaattaaaattgtacctctaaagcaaagctgagctattgggtgcaccatacgacgtcgtagcacctggttcaccattgaagccacctccaaattgagtgaacaaagcagataatccatttgaagttccaccgcgacctccgcctccgccgccgcaaatgccaagccctagaagatcaagcgtcgacgtaggcttgtgtccggtagagggtgttgtggatgatgatgatggtactgcaaagcttagaccacgaagtagtgaagggctcgatgtcgccgccgcacccatttgggatgccttttgtagcaacgcggtggcggacatggctggttgaagtgacggtgcagtgaagatggaggagaagctgttgttggagaggtagagaggggaggaaag

SEQ ID NO: 50462 - DNA, 618 bp, Gossypium hirsutum
  Clone ID: LIB3825-031-Q6-K6-A6
cggccgcgtgggcggccgcgtgggggatgagctcagcatagtatatggggatgaatctctaccccgtctctatgaaaattctaggatttcaacagatcagctccctggccagtcaggcattgttaggcgggctgttgcccttgggcgttatcttcaaaatccattagcgatggttgccacattgtgtggcccagggaaggagatactctcttggaagcttaatccaatggagaacttcctcacggcagatgagaagtatggcatgattgaacaggttttggttgatgtcacaaatcaggtgggccttgatgctaatttggctgctagtcatgaatggttgtttgctcctttgcaattcatttctggtcttggacctagaaaggcggcatcactgcagagatcattggtcagagttggaacaatttttactaggaaagactttttgtcagcccatggacttgataagaaggtgtttgttaatgcggtagcctttctgcgcgtcagacggagtgggcttgctgccaacagcagccagttcattgatttgctggatgacactagaatacatccagaatcttatcttgttgcccaagagttggccaaagatgtttatgatga

SEQ ID NO: 50463 - DNA, 586 bp, Gossypium hirsutum
  Clone ID: LIB3825-031-Q6-K6-C10
tgatttgataaaggaagctggtgttgctccggcaaagtgaatccgagtagaaagcttcgaggaaaggaagggaggaaggtggaaagtgcttcaggggatactacatttcaagctctaaagacttatggccgtgatcttgttgagcaagcaggaaaacttgatccggtgataggccgagatgaggaaatccgaagggttattcggattctatcaaggagaacgaagaacaatccggttctcataggagaaccgggtgtcggtaaaactgcagtcgtagagggcttggctcaaaggattgttagaggggatgttcctagtaatcttgctgatgtgagagttatcgcgttggacatgggtgcgttagttgctggagcaaaatatcgaggtgaattcgaggaaagattgaaggctgtattgaaagaagttgaggaagccgaagggaaagtgattctctttatcgatgaaatacatttggtacttggggctggtcgaaccgagggctccatggatgcagctaacctctttaagcctatgcttgctcgaggtcaacttcgatgtattggtgcaacgacactggaggaatata

SEQ ID NO: 50464 - DNA, 573 bp, Gossypium hirsutum
  unsure (1)..(573): unsure at all n locations
  Clone ID: LIB3825-031-Q6-K6-C11
cggncgcgtgggttttagcaaaacagaaaaaactctcattctcccaactctcccttcctctccagacgccggcctagctccggccaagggtaccggtggggttccggcgccgtcgccatcgtcgtgaccccttttcaaccgttttaaccccgggtaaccccgatctaccctaaaaactggctaaaaaccgtcaaggatcaatagaagaccgaaaaactcttcggtttccttccctccggccaccaacaaggtaagacctcctcttttcttttattatttaatatgtaatcttatatatatgtgctaaataaaacaacaaagaaaataaataaataaataaatcaagagacagaatgaagaagaagaaagaagaacaacatttcttcaaattttcgattttttattgattcatccacatttttttaaaaaaaaatcctccctttgattacatttcattaggctcttatagccgtttacatatttgctttttgctattgtttgtttctgttatcttcgcctttttcttgcttctgtttttgtctgttttttttgcaggcaagatgaagtcaacga

SEQ ID NO: 50465 - DNA, 621 bp, Gossypium hirsutum
  unsure (1)..(621): unsure at all n locations
  Clone ID: LIB3825-031-Q6-K6-D6
gggnatttgagtgagtggcaggtgcngatatgttctatttttatatctacggttataaatattttagagaaaacgaagagtcccgataaaatagactgagttgtaaaaaagagctgtggatttcaattctttgttctttatttctacaactggggagaatgggttgaggggtgagtaaagggtagatttataaaagaattttattacactgacaaaaatagtgggtgattttgcaggtaatgtaatgtatggtaatgtaatatgatagaatcgcattcttattattcttattataacatagaattccaagaactagctccatcttgcttgctattatcattgtggtggacaagttatcttcatgctttaatttttctttttaataatattatctgttcactctaatgtttatatcttttgtgatcgtaaaagtattccgtttttttatgagttagattgtatttttgttttatttgcttaaaaaaaagtaaattagttctcttatattagattaaagagtaaactgatttttctgtttaaaattttatctatttttactattaaaaatctttcttcgtggttatttcattagtgatgtcaactttggatggaatttttaat

SEQ ID NO: 50466 - DNA, 527 bp, Gossypium hirsutum
  Clone ID: LIB3825-031-Q6-K6-E11
taaaaaaaaaaaaaaaaaaaaaaaaaaaaaaaaaaaaaaaaaaaaaaaaaaaaaaaaaaaaaaaaaaaaaaaaaaaaaaaaaaaaaaaaaaaaaaaaaaaaaaaaaaaaaaaagggggcgggccgttttaagagagaacccaagtttacttccgcgggcttgcaaacgtaataagtttttttttggggccccctaaaattaaattaacgggcccgccttttaaaaacgtcgggacgggaaaaaccctggggtacccaaattaaatcgcttggaaaaaaatccccttttccccagttggggtaatagcaaaaaggcccgccccgatcgcctttccaaaaatttgcccaccctaaatggcaaagggacccccccctttaccggcccattaaccgcggggggggggggggttacccccagggggaccgttacatttgccagcgccttagcccccgctcttttcgtttttttcctttcttttttcgccactttggccggttttccccgtaaagttttaaatggggggctcc

SEQ ID NO: 50467 - DNA, 547 bp, Gossypium hirsutum
  unsure (1)..(547): unsure at all n locations
  Clone ID: LIB3825-031-Q6-K6-F4
ctcccctcaacgaacataacagaagaggaagagaataaaagnaaaaagaaaaaaaaacacataaacatcattctacaacgttaatcaatcaggctttgtttttgcctgtttctcgttatagtttctttacttttttttggaagacacgctgcacttgaagaagaacaaaaaaaaaaaaaaaagagggctctctttctctttagttgttattcgaccagggaactcagatctcactctccactaaaagtttttgcctttattcaactttttaccggtggaatagaattccaataatgatggagagggcagagtcatgccaaaagctatatacaagactgcggttatgggaatttcctgatgagtatgtgattgaacccaccgatggctcttctgcttcgtctttgaaaattaatcgtgctgatgcctcaatgaagctcattgatgctattccagaatgcagctctgttcgtgttcctaagattcagacaatttttggagtagttggaatgctaaagcttgttgcaggatcatatttaattgntataac

SEQ ID NO: 50468 - DNA, 603 bp, Gossypium hirsutum
  Clone ID: LIB3825-031-Q6-K6-G12
cataaacctgcgtggttgccctcatttggcttctcttcctgatttatcaggacacaaaaacctgcagaagattgttctcgcgtattgtgtaaaactgataaacattgacaagtcagttggtactttaatttccttgcaccacttggatatgacaggctgtttaaaccttgttgaatttccaagtgatgtctcagggatgaaaaaccttcaaacccttgtccttaccgattgctccaatttgaaggaattacccgaggacataggcagcatgaggtcactcaaagaactatatgttaatcgaacttgcatcgagaagctgccagaatctatttaccgtctcgagaaacttgaaaaactgagcctaaatcattgcatacatatcaaacagttgccaagatgtgtaggaaagctagcttctctgaaggaacttcatcttgatggatctggattacaagaattgcctgattctgttggatctttggagaacctggagaaattaagtttaatatcttgcgaatcattgactgcaattcctgatactgttggcaatctcaactcattgaaaagattgttcataaagggtaaagcaatcacagagttgcc

SEQ ID NO: 50469 - DNA, 581 bp, Gossypium hirsutum
  Clone ID: LIB3825-032-Q6-K6-B11
ccgggtcgcccacctccgggcgcgtgggtgaattcctttctggctgtctgaacccacgggaaattgtcattgaagatgtgcataagattggaggaacacctgctgttattcgttatcttttggagtttgggtatctagatggggattgcatgactgtgactgggaggacattggcagaaaacgcaaaagttatccttgtttacccgaggggcaggatatcctaaaaccggtgtcaaatcctatcaagaaaacggggcacatccaaatattaagagggaatcttgcaccagagggttctgtagcaaaaattacaggaaaagaaggactatatttctctggtcctgcacttgtctttgaaggagaggaagctatgctagcagctatctcagagaatcctatgagttttaagggaaaagtagtagtcattagaggggagggacccaaggggggcccaggcatgcctgaaatgttgacaccaactagtgcaataatgggagcaggtctcggaaaggatgttgcattgctcactgatggtagattttccggaggttcacatggattcgttgtaggccatgtttgcc

SEQ ID NO: 50470 - DNA, 613 bp, Gossypium hirsutum
  Clone ID: LIB3825-032-Q6-K6-C6
gtagcattcaaccatagtgcagtgtgtgaaagcttcatcgcttacctccagttacactgactaaagagcagcaagctatccatcataaaagtaggtccagcacataccagtggcaagagaccaacaattttccttaaagagggggattcaattccttctgatgttgaccctgatacaatcagatggattaccgcaaaccatccttttgcgaccactgctaatgacattgatgaatacttggcacaaaataatgtgttccacaaacatggtgttccattacgaattcaagctgagcatgatgcactccagagaaaacttgaagcactgcaaacggaggacaatttgaacaatctgattatcgacagtagaaatgctaaacatttccagagaccattcacattaaatgacaggtcagataaacctgttgatcaaggccccaataacaattccagagttgaaactaagcccacaaaaccagagcatgccttcgattcaattgaaagcaacttgtattcataggataatgcacaaccctgaaatatttcctggacttggaatcaaatgtatcgaatgctagtgttacttgccaatgaactcctaattttgtagtata

SEQ ID NO: 50471 - DNA, 593 bp, Gossypium hirsutum
  Clone ID: LIB3825-032-Q6-K6-D10
ctggttttgtatctcaagacctcgacttgcatggttacattcagagctacactaacgtgaccatgctgtattatacttgcttgggaggtgacggttagcttcactatgagtaggccatctctatacaagattaatacttgtaagaccccctttttacccaacaaaaattcctggcagaacgttccttaacaggcttattacaagctaaataatatggccgctgctaaaaaactaaaaaccactttttctttcaattatgggaaatgattacacccgctatgaatttgcctttagcgccttcactatcttgaacactccatcttgaaaacatgcatttggcattaacgtatcaccttttcaagttaaaaaaaaaacatattttcttttcgggaatctgatccaaacccatatgagcaactaagctaaagtctcctttttatttttgctaccaatgcttttcaaagattaacacacacaatagattaaaattaataccgtatacgtatacgctttaatatgcctaagagaccggtcattttccttttactgagtgcagacgccaaatggagatatgactctagaagaaccactga

SEQ ID NO: 50472 - DNA, 593 bp, Gossypium hirsutum
  unsure (1)..(593): unsure at all n locations
  Clone ID: LIB3825-032-Q6-K6-D9
cggncgcgtgggccggtttatgcataagtgaggaaatctgtaatggctcgcaggcagaatttatcatcagtgatccatcaccatcctctggctccacagtttctgatatgcatgatccagccagtgataggatcatgaacagtgttaatgactctcaaaactcccagactgaatcttcttctgtgcattcagttgggttctggacaaatggtggccttttgggacttcagccatcaaaacctcctgattttgctgtatcaactgtaggtcagggttctgcagctacaactagtgaagtatttggtcctccaaatcaaatacttatgtctttgcaagatggactcaaaggaaatgcaggcactgtggttgagaatgctaatttagatgcaaaccttggaagacctgttaattctcattttaatgataatcttgataatttaaatggtgttggctctatcctaaatacctcattgccacatggaaacaagaacccagtcaatcctaacatcaaagctacatctattgattctgatgaggagggatgatgacagtcatcaaggatgtttggacttggccataaattacttgtaaat

SEQ ID NO: 50473 - DNA, 604 bp, Gossypium hirsutum
  unsure (1)..(604): unsure at all n locations
  Clone ID: LIB3825-032-Q6-K6-E4
ttcaattttaattttgngatgaagccacacaccgaggaatgagaacaccgatgtgttacaatcccttgcaaaatgcaaacagctcgaaagtggtgctttcaggaactctttatcaaaatcatgtcaaagaggtatttaacatattgaaccttgttcgaccgaagtttcttaggttggatacttanaaatcagtaattaagcggataatgagcaaggtgcatatagctggggtgaagaagcagttaaaagctggagcagatgcagctttttatgatttggtggagcacacactgcagaaagatgaaaattttgagagaaaagtctcagtcatccatgatctgcgtgagatgaccagcaaagttcttcattactatnaaggtgatttcttggatgagcttcctggacttgttgatttcactgttgtgctgagtcttggtcctagacagaaggatgaagttcacaagttaagaaggtttcaaaggaaattcaagatttcatctgttggtagtgctgtttatctccatccaaaactgaattctttctctgagaattctgacacaacagatgataagatggatgagttgttaaacacattagatgttag

SEQ ID NO: 50474 - DNA, 511 bp, Gossypium hirsutum
  unsure (1)..(511): unsure at all n locations
  Clone ID: LIB3825-032-Q6-K6-F7
cccggngtcgacccacgccgtccgccggtattttgtagtgcacagctcccgctctagaatcgattatgtagaaacaagttggttgaggttgttataattcaatgacacgacctggttcctaagacaagaagcaatcgaggaaattgtagaatgtctgccttaaaacaggtcaccaattgaagtcatgcaggtactgatcttacaccgtatgcctttgactcagttccataaagagcttttattgtctccacaatatgcatcctttgtaggtgatgaaggctgcttggatgtcaaacaccatacccaaatgttggagggtgtaaagtgatctgagttctgtgtgaagagcaaattagttgtaaataccataattttgagtttgcaggtattctttccaagcatgttattcatgttttatccaagaataactgtttgcatattccagacccatacctgcccaggcgatgaacgtttgtgataaatcctcttctctaaacccattaatcaatgc

SEQ ID NO: 50475 - DNA, 593 bp, Gossypium hirsutum
  unsure (1)..(593): unsure at all n locations
  Clone ID: LIB3825-032-Q6-K6-F9
aattacgtgagtcatgatggagaggtggatcaagcgatattcaacaggcgataagctcatcgtcatcattacttgagtctgctgcggtggatttatccttaagtagaaaaagaaaagagatggagatgattatgagagtgtaagtgatcgtaataatggatcatcagtggaactgaaatggatgtcttctanagatgagattaacgaaaaagatgatgatgaactccaattgcagtggtcctcctccattaccacataataaagcagcagtgaatgacagtaaatatcaatatccgattcaggatagcgatgaaaaaaattatttcagtaaaactaataacaccattagagtctgctccgactgcaacacaaccacgacgcctctttggagaagtgggcctcgaggtcccaagtctctttgcaatgcttgtgggattcggcaaaggaaggcaagacgagccctggaagcagcggcggcaaatggagagactgttgcagcatcgatgaagattagggtacaccacaacaagaaggaaataaagaaatcacgtactgttggacaatataagaaagagttgaagagtaaatcaggc

SEQ ID NO: 50476 - DNA, 579 bp, Gossypium hirsutum
  unsure (1)..(579): unsure at all n locations
  Clone ID: LIB3825-032-Q6-K6-G8
gccagactcacactaaanaacaggacatcagacatacttaaaatgggtatgggtcgagatcgccaggaaacagctctttattgatgggcatctattgggtgaaacagtaaagtcggtctttctacaagacgtatcttgggggctcaacgtgactcatcttgacattgaaacaatggatcctgattatgacggaaacctaatgaggatgcctcgccaatgatatctctgaggctctggccctcactttgagcgttgccgctgaagaggagaagctgtttttgtatggaaaggacacaggggactggctatgaactgattcctgaaggatctaacatttaaggtactgacgagaattaacaccactatgttcgactgggttggggatcatagaatatacgacagctacttctccttaactagatccattatttggaaggattccgtgaattaaatcctaagaaatctattggtgagcataatgacaatgagcttgagatactgataagagatacttctgatgttcatctggatgacatgagggcaaatactgagtactctgggtatagagcatcattacct

SEQ ID NO: 50477 - DNA, 473 bp, Gossypium hirsutum
  Clone ID: LIB3825-032-Q6-K6-H9
gccaccttgctacttatatgcttcctgttacaaccggtatctagctgaaggatatatctgtcaaggcgggaagcctatgtatcggtcaataaaaggtcgcggtttggatcaagagagaagatttacccataggatgatgtgggtagggtccacgactaattaccccatgggcttaccaggtgtgtggcggaattagttcaatagggacaaattgttgcattttctacacaaaccattaccttgggcagagatacacaagacattgctctattatggaaaagctcttacaaaccctttttgaatgcggatgtaataggggtacatacttgacaattatacaaagcattttttgtcgggcaatattagaatgcttgttcttacttataaaaacgagagagggtatataggggtggagtattatggaaaaactgataccatcaaaagactccctatagagatacacatgggtcaac

SEQ ID NO: 50478 - DNA, 198 bp, Gossypium hirsutum
  unsure (1)..(198): unsure at all n locations
  Clone ID: LIB3825-033-Q6-K6-A11
nttgnagcagnaaaacagcaggcccagtcaggttgctatcacttagaggttgctatcacaccctttccttcgaaacaatcaaactcagatcttttcataaatgatgtgtgtttttttagtattacttaaacatgtgacaagtttgatcttgtatcacaaggctagcatagttaaataactagtttatatccttttacc

SEQ ID NO: 50479 - DNA, 547 bp, Gossypium hirsutum
  unsure (1)..(547): unsure at all n locations
  Clone ID: LIB3825-033-Q6-K6-C11
gctggcctcaatgaacacagtggcagnaacacttcctttgcaaanaggcttaatgcaaatggattcaaggtctatggaatggattgggttggtaagttttcatgaacagactactaaaatcacattctacttgaccagaaagcacgtctgcttaatgcacactttagcccctcaagtataccgcttttcccactttggtccttaaaagtttttttcagcccacttcagtccctaatattatgagatgttcccagtttatagtgcatgatcacctttactgctgttatcatttttaagtttatttgctccttgaattctgtaggacatggtggaactgatgggctacatgcatatgttcattctcttgatgatgctgttgttgatttgaaaatattccttgataaggttttagccgagaatcccggccttccatgcttttgctttggtcattcaacgggtggcgcgattgtccttaaagccgtgcttgatcccaaggttgaagcacaagtagcaggcattataatgacttcaccagcggtagccatcc

SEQ ID NO: 50480 - DNA, 609 bp, Gossypium hirsutum
  Clone ID: LIB3825-033-Q6-K6-C7
cggccgcgtgggcaacattgtgaaatgctgtgcttagagaattgttggatgtggttcgaataatgaagatgatgaaatgtagagtttagttgaattatcttctagtagaggtttaatactgagtttcaagtaaaagtgcatgcgtagaaataatgttttgtatcatttattacttagcttccggattaatgaaattattgtagatttgcaattcgtaactttatgatccgtttgttttcttgcaaatcgtataataaggtattttaaattcgaagctatgatgagattgacttgactttaattggagatatacttaatgaatttgtaacctagatggaagggaactaaggaaatagaatggaatcaacattgtaaaatgcatcttccagagaaatgttgcatgtggattgaatagtgaagatgatgaaatgtagaatgtagttgaattgtgttttgttataacagaggtttaatactgaattttaagtaaaagtgcacgcgtagatatgaggttttgtttcctttgtgaaggtttgtgctttaccaccttgattggtctgttgttatacaagaactcaaatattgcattaagggattgctgtatttggt

SEQ ID NO: 50481 - DNA, 567 bp, Gossypium hirsutum
  Clone ID: LIB3825-033-Q6-K6-C8
tcctttccactaaggcttggatctgttctctcgatatgtgcatttggatcgggaaatacactgtcagcggccaaaacgaagcggcacccaggaagccgaggattccattgaagaacggtagaagcatcgccagcacgatggtcagtatcacgtaacctgttcgccacacaaccctgagagcactgaaactgtaaaccccaaacaatggaagcttaattggtggactttctttgatgaaactgctgtttggccatcggttgaagcacctgtcttccacctgtttgaaaattggctgacagaatacctatgaagaaaaccatcatgattttgctgaagatatggggatattttattgtgtgttgtttgtaggtgatggtaatgggggtgtttttacctggtaagctcctataagatgtacaatgatgaatacattagccatgtcgataagccagtacggttcgtaaaagccaaaccctgttaggaaattgcctggtgtgttgttgcctaatgctgcgtaacccagagcaccacatgaaacgtagaatatggtggtgaccgagacgccca

SEQ ID NO: 50482 - DNA, 509 bp, Gossypium hirsutum
  unsure (1)..(509): unsure at all n locations
  Clone ID: LIB3825-033-Q6-K6-D8
cggncgcgtgggcggncgcgtgggtaaaaaaaaaaaaaaaaaaaaaaaaaaaaaaaaaaaaaaaaaaaaaaaaaaaaaaaaaaaaaaaaaaaaaattaaaaaaaaaaatatataaaaaaaaatattttttttatatggtataacattttttataattttttttttcgagtttttttaattttcttttattggggcggggttttttttttcccaaacttttgtgttattcctggcattttctcaatattaaacaggttttggtaaatattaaatttgtctccaactttatgtctttttcaaaagttccgcatttattaatttttaaaaaaatttgtttttttttaattgcattatggtacgcctctttttgtggttccttaaaccttgtgttttttttttttacccccattatgaccggttcttttgcattggcccttttttttttttcctccttttttttctcttccttttaggctttttttctgggttttttttttggggtttttttt

SEQ ID NO: 50483 - DNA, 398 bp, Gossypium hirsutum
  Clone ID: LIB3825-033-Q6-K6-E12
tgattaaaaaataaaaaaaaaaaaaataaggggggtaaatataaataaaaaaaaaaaaaaaaaaaaaaaaaaaaaaaaaaaaaaaaataaaaaaataaaaaaaaaaatgataaaaatataacaaaaaaaataaattctttaaattaaagtgaataaatatgtatataaaaggataataaaaaccttttttttttgggggggggtgttttcaaccctcggaagacgttcaaacttttgttttttctggtggctcctattttgaaggaattgcgcgggggctttgactgcttttggtgagtgaaagaactgtattttcctctatcttgcattcgtaagataacacagtttttttaccgggttgtgtaacttgaagatctgagctttattgattgtttgca

SEQ ID NO: 50484 - DNA, 568 bp, Gossypium hirsutum
  Clone ID: LIB3825-033-Q6-K6-G7
cccagcgtccgggcaagctgtgaattctatttgtcagggatccgctgctgacataatcaaaatagcaatgataaaattgcattccgtcatcgttgaaggggttgacagcctagaatctggttcttcaattttgaccaagtttcacatgcttaaaggccgctgccgaatccttttgcaggtgcatgatgaattagtgctggaagttgatccttcagtgatagatgaagctgcatcgctgctgcgaatgagcatggaaaatgccgtctcccttctagttcctttgcgtgttaagctgaatgttggaaagacatggggctctttgaagcctttccaggctgatcaacaaatggaggaagctatatcaaatgtttagatcagtaggagatatcctgttctctacttcaaaatgcagttatatcaaatatgaatggaatatgatcaagattttaacttgctggagatcttctgattccgatgtcttcgattagaggtttaaggaaaatatctcttaaaagggaattttggttgagtgggggtgcaaatggcatataggaatggttactggctc

SEQ ID NO: 50485 - DNA, 589 bp, Gossypium hirsutum
  unsure (1)..(589): unsure at all n locations
  Clone ID: LIB3825-033-Q6-K6-G9
gtggtcccanatccaaaagtccccggctagctcacttactggattaagtagtgctagttccttttctacttttcataggggtgcatggtgtacaccaccacggctgttcctcgaagatcagttcgatgttgttcctcccgatactggatctgtgagttcatatgggaaaaaatggtaggagaggaacctatcaagaagaagaatccgggagcagttaagatcagtccgtggacattggcacggttaaatgcagaagatgtttcaaaagctgcagctgaagcaaggaaaaagtccaaaatcctgcagcctgttgtgagacgggaaacctcttccgggctagaagcagaaagtagctttggaagcagtggccgacaagtgttctcaagagctgatagcagaagacgagcatctaagcgagtgcgtctcccagctgacctacccatggatcccttaatgaccatttctgctaaagacacatcaagtagtttggcacctcttcaactggaagcacgaagcgctttccaaaccagtcgagcaatgtcaagctatgctgggattgttgcctcttctcctgagagcagtttagact

SEQ ID NO: 50486 - DNA, 608 bp, Gossypium hirsutum
  unsure (1)..(608): unsure at all n locations
  Clone ID: LIB3825-033-Q6-K6-H8
tccggntttttctcgtgggggtactgggattgcatttagttcaagtgcagctgaatcttgttcaatttctaggtgcaacaatgtctggtctgaggcagcctcctcagaatctgttgaaatgctattaaagtctgtaggacaggacgaaactattcctgttcagactattagtaagaattcagatgcctgtgatgaactgggctgcataataaatcagatggagcctactttgaaacatggagatagtggtcttcctaaagtaggggatgacttacagcctgcattacagtcaggagagtgtccaggtaaacttcctgggttgaaagatgatataggaggagatcatctgctggttgaagatgtttctcaaacgcatgaatttggcacatctgttgatagcacattggacgatctaaatactagaaatactgatttgcctgtgactaagagagatgattctaaagagcatactgttaacgaaagtctagtggaagcttctgttgatcaatctgtggatgacagggagcaggaagataaatgtactggttcacaagtcgatgctgtgattcactccgtgcagaacgcttatgcaagtaatgctttgatag

SEQ ID NO: 50487 - DNA, 559 bp, Gossypium hirsutum
  Clone ID: LIB3825-034-Q6-K6-A6
gtcacaacatctgatctcttcttgactatgctttgacgtatgtacaaggcctaagaatgaatgatagcaacgagccgtctatcttgacatgaactgatagactttagctactccagcacacatgatctactaatttgacaccacaccatcccaatcctaaatggcaatatgctttcatattagactacacgaccggattgcacctgcttatgcactgatacaaccctaactgacaaaccaaatgttgatttccatgtacacccaataaccaaatcaagggccatgaccctatcatcaatgagctgcttgaagccatcttagctcattattgacatccaagtgcaatgttgaacaatttacaattcctgtaccaaactaccatcagattataggcctggctcattgcatcattgggagaggacgtcaagttttggggcaaccacatcaacttctatctcagcaacatcatcttatcactgctgctctaaccttgattatagctcaattgatatctactgatagtagtctacttccatgtgctaagcatgatacactttgt

SEQ ID NO: 50488 - DNA, 592 bp, Gossypium hirsutum
  unsure (1)..(592): unsure at all n locations
  Clone ID: LIB3825-034-Q6-K6-C11
cggncgcgtgggcaccagtttcctcttcctggctaattattgcagtctctttggggttattcttgttgtaaaagctaagttttttttcctcttattatacttcatcttattagtagttcaatcaatgcaaggcttaatttagttatcgttgagaataagtactgtgatggagaaagagcagaaggatgataggtttggctgcgaagatgaacttctgagagagcttcttgatgatgagtctcctctctttgtcctacagcaagggacggttcaagccaaatctaaaacttctggagaagattccactaagcgactcatctgtgcagggccgaagattgaagatatcgagaatgctttgtcagtgaaaacatggaacggtactcaatatcaaaattaattcgatacagcaggaaagaggtttgactaagattgagaataagtatactttaaagataaaaaactatggcaattgcatggcagatgatggatataaatggaggaaatatgggcaaaaatggatcaaaaacaccccaaatccaaggagctattacaagtgcaggaacccaagatgcagcgcaaagaagcaggtgga

SEQ ID NO: 50489 - DNA, 610 bp, Gossypium hirsutum
  unsure (1)..(610): unsure at all n locations
  Clone ID: LIB3825-034-Q6-K6-C5
gngctttttaccaagttctaccatggattctgtaaacaacatctgtggcctttatttcattacatgctccctttatcaccagatctcgggggtcggttcgatcgttccctatggcaagcttatgtttcggtgaacaagattttcgctgataaagtgatggaagtgataagccctgatgatgattatgtttgggttcatgactatcatttgatggttttaccgacatttttgaggaagaggtttaatagggtgaaactcggattcttcctccatagcccgttcccgtcatctgaaatatataggacacttcccgtgagagatgaaattctaagagcattactcaactccgatctcatcgggtttcatacttttgattatgctaggcacttcctctcatgttgtggcagaatgcttggtctttcttatcaatcaaagcgtggttacatagggcttgaatattacggtcgcacggtcagcattaaaatacttccggtcgggattcatataggacaactccaatccgtgctgaaccttcctgagactgcagctaaggtggctgagttgcgggatcaatttaggggtcaaaccgttatgctcggagttgacgaca

SEQ ID NO: 50490 - DNA, 582 bp, Gossypium hirsutum
  unsure (1)..(582): unsure at all n locations
  Clone ID: LIB3825-034-Q6-K6-C7
cggncgcgtgggtcatagggcattctcggggttgttgagatctgatgtcacttgtacgacttgtggatttacttccacaacttacgatccttgtgttgatatttcactcaacttggacacagttaactcatctgcagctgagaagacgggtttgtctactctgtcaggttgcctgaatttgtttacgagagcagagaggttaggttctgactcgaaactccattgtcagaattgtcaagagctacgggacacatcgaagcaactgtctattagtagactcccattggtgctttgtttacacataaagagatttgaacactctttaatccgaaaaacatcgaggaaaatcgatcaatatttgcagttccctttcgcattggacatgaccccatatttgtcatcctcgattgttagaagcaggttcgggaatagaatgtttgctttcgaatgtgaaaacaccgatagttcagcagaatacgagatatttgctgtgattgctcattcgggaatgctggaatctgggcattatgtgacgtatctgcatgtaaacaaccagtggtataaatgcgatgatgcttggat

SEQ ID NO: 50491 - DNA, 166 bp, Gossypium hirsutum
  unsure (1)..(166): unsure at all n locations
  Clone ID: LIB3825-034-Q6-K6-D10
gccctacnacgggcgacggccgcctgcgagggaccaagctaacggacgcaagcttgcgaccgcgtacctgctacatagtggcacctaaatagagtcaactgaacgcagttcacacgaccgcgggactgcaaaaacccggctgggacaaaactgaagcgacccgaat

SEQ ID NO: 50492 - DNA, 592 bp, Gossypium hirsutum
  Clone ID: LIB3825-034-Q6-K6-D12
gggcgcggtggtgtatcctctccgcctggtctcaagtctccaatctctagactctccatctcatggtcacgcggtaactccctccgagtctcggttttcgccgctccttcttccgatggctccgtcaatgatggtgacggaggaaaagtagtggaagtgaagctcggcggcggagacggcgagatcagcgaggctcattggcggaggatcgcctacggttcggtctctccttttgctctactccaaagcaggaaaaatgctgtctccagcttgtccaaaatgtccatgaattcttcaccttacgatggtgactggtgggattacataatggagtacagcaaggacataaatgcccttctagttaatcagaaatcggcttcagttccggttctcgatgacacgaagtcagtcataactaaaggagaggaaccaactagtttgaaggctgcgtgggagctattggaaatgttttatgcagaaaagccatctcattcatggttacccgaacgccttgttgattggttagctgttgtggaggatgatcccaaatattgggaagttatgtcatctgcacttgctgttgggtggctga

SEQ ID NO: 50493 - DNA, 629 bp, Gossypium hirsutum
  unsure (1)..(629): unsure at all n locations
  Clone ID: LIB3825-034-Q6-K6-F4
tatatccataggatttgaaattttgggattaaaaagaatttgttttattaatttgatcagtctacattccttcattcagacgattgagacaaaagatagctacttctccaataatccccaaacatttctgataaaataacgcgggaaatccatcttccccaggttccttagtgggccctaattctgacaaagcctgctgaatttattccttcgtgtatctctccataagcattgcattatattctttcgatatacatcgaggaactcacgacaaaacgtactcaaattttgccttgctgcttgcgtagaaaagtttttggaaatacattctggcaatcatttccatttcttgtaatttgtccgtttcatcttgcattttacgaatcaaatttctttgtctcttctgtgtggcttgttcgnggaagaaagctgtgtttttatcccctaatcttaaccagntgactcttgttctttgtctcttcgaatttgtcttgaccattgctccagccccattttcgtactgtntagcttgcataagagatctncctcagattgttcccagatgtttttgacctcattaaaaaacgaatcctctaatacccaccatgcttaaaacttgaattcttttt

SEQ ID NO: 50494 - DNA, 502 bp, Gossypium hirsutum
  Clone ID: LIB3825-034-Q6-K6-F9
cgctgtgttatcagatctttcttgaatcgggcggaaccaaattgaatttcacgggctatgtactaagcatgcctgatggtgatacaacggtggagagatcaagacctggtggtgctccagggaacagactttttggtggaccttcctaattttaggtgtcttcatcattcttcaattgtgcattaacattcaaatgcttttattatgcacttcctatattacaatgccatggtggatgtactgcttgttatcttaacgcattaatactcacgttttgacgcgccaactaacgagactcagtgcacttactaccaacttttacagcttacagatgctgaaaggttgctgatgagatacttaaaaacaaacaatattttaaagtggacctatccatgaaaaataaaatctagaactgcgtacaaagcaattctgccaattataataaacaccgttactatgaacctcacacccatattggattatgcctacatcacagttaact

SEQ ID NO: 50495 - DNA, 593 bp, Gossypium hirsutum
  unsure (1)..(593): unsure at all n locations
  Clone ID: LIB3825-034-Q6-K6-G11
gcgtttctgtaanagtggtcatgcggctagggttttccctttttactttttttggctaaaaattagttaaggctgtgggctgattggacctctagagttttaatatttaggctgtaattgggttggcaactttggtttaagtttcttgtaaatggactggtacattgggcttatttattatgttgatggggggactttattttgtaaattaggccaggccaaaattggcctattacaataatcttttggatcaaaaaaaaaaaaaaaaaaaaaaaaaaaaaaaaaaaaaaaaaaaaaaaaaaaaaaaaaaaaaaaaaaaaaaaaaaaaaaaaaaaaaaaaaaaaaaaaaaaaaaaaaaaaaaaaaaaaaaaaaaaaaaaaaaaaggggggggcgttttttaaaggaaccaaatttaattaccggggtttggcaaataaaaattttttttttggggcccctaaattaaatttactggccggtgttttaaaaacgtggggactgggaaaaacccggggtttcccccaatttaaacgcctttgggagaaaatccccccttttttccccccttggggttttatagaaaaaaggaggc

SEQ ID NO: 50496 - DNA, 600 bp, Gossypium hirsutum
  Clone ID: LIB3825-034-Q6-K6-G9
aaaaaaaaagagaaatgcgcaaaaatgagaaagagaagaaaaaaggtaacctcgaccttcttcatggtttttttttcttaccatcaggaacagaaatcagaaccgaatgaagttaggttatgaaaaaggattttttcaatgttcaagattgattgatcaaatggagctatttgaaatgtaatgattttgaccccgtgtttcttattaatatatatttgtgttctatttgaaaaaaaaatcctagcatatggattctgcatttttgcagtatttataatgcctgtgggatgtgcataggattataagtttgccatttgcttcattgtgccaattattgacgagctcctttaaaatattgcttgcttgtggaagtgagttcgatgtatctttctgtcagcttaggatgtaaccaatttcaggccaagttttccgtcattggtgatgcgctgtatatgtgcaaatggtttgtgtattagtttagcagagaatagggattttttattttacttctcatatccgtttttacagttcatggtcggggtatgtgactgaaggaatagggactttaataaaatatttgtaattgcaagttggctcttg

SEQ ID NO: 50497 - DNA, 375 bp, Gossypium hirsutum
  Clone ID: LIB3825-034-Q6-K6-H8
tccggcgacttttagtgctctgctactgccttgtacctgagcttgatgcttgtttgctcactactttctttctttttcaagatcatactgctgggccatataaagaaaagggggacctgtggcaatgttcactgatagccacggcagccctataaatcaataaacgtagggaatcattagagaacctttttattaaatagaaaattttttttttcacaaaatcatggtttatcattagagttgatgacctttaattaattcaaagtaaaaagatggtgttaaaaagaaggagggggttccctttaaaaaggacatttttttcactcctaatattgccaataataatttattttaaagaaaaacaaaaaggcagtt

SEQ ID NO: 50498 - DNA, 595 bp, Gossypium hirsutum
  unsure (1)..(595): unsure at all n locations
  Clone ID: LIB3828-023-Q6-K6-B11
gcgttcgtaaagttgcaccatgnatcttaaccgggggtgggggcgggattgataggcaattcacctcgcttattaagctcggcaatggaatgatgacttctggcaatggaatcaacacnnattttcgatgaaaaccaagatgtaccttttcacgaacggtgcccatgcaaccaatgtttctggtagggggctgacggaaatgtcagtgcatgcgataccggaacactgggcgagaacaaggtgaaaggaaagatcgtgtattgcctagggaattcaggacaagattatacgatcagaatgctggacggggcaggaaccataatggcagttgatgaaccaacagactattacttcctcactcttatacctgcaaccattgtgcttcgtaacaagaccggcgataggcttgatcgatatataaactctaccaagaaccctcaagctgtcatatataagactagaactgttcacatgaaagctccctttgtagcatctttctcatctagagggcctcaactaacaaacttcaacattctcaaggtaaaatcaatcttctcgccaccctctcccattgctctttattttcatttctaac

SEQ ID NO: 50499 - DNA, 444 bp, Gossypium hirsutum
  unsure (1)..(444): unsure at all n locations
  Clone ID: LIB3828-023-Q6-K6-B12
gcttttgcttttcccttcccggttcctccggaccttncgctnttcggcttccctctcaccgcaccggggccgnntcatttttttagcggttcaacatgcggcggnntggaactttcagtttcgtgaatcgggctcncttcaacgtcatattcttttttttcagacttcanaccgnctcagggggtgttggggcnnncggggangggatgagattgnggatttagagtgatagaagacgatgaggggcggtttacctattagccgtcgatcggttttcatgttgcgtctcgttgggatcgggacgcttggatcggctntgatcaagatccttctctgcggttgcgtcgtgtttcgtctacttgcaatcgcgaaccgtaaccgcgtctgttcttcgtttttgggatggaccggtgactttgcccgctcttcttctccaagggaaga

SEQ ID NO: 50500 - DNA, 533 bp, Gossypium hirsutum
  unsure (1)..(533): unsure at all n locations
  Clone ID: LIB3828-023-Q6-K6-D9
gcgtttgggcnnctgtggggattcttgcggcggggggggatgtgcgtancaaatttgcnccctggtgttactattgaagaattaagagacctttttggcggcnttggncangttggaagtattaagctgaagcgtggcttttttgatcattggccttggtttnttaanntntacacagatgagggggggggccagaaggtgatgcngttttgtcttatgaagatcctcgggctgcccactctgctggcggtttctttctctttcctgtcttgagaggctctncnntcggngtggctttggcagagaagactgcgcccactgtatatgatcatggcggtggtcaaggtggcttcggtggtggtggcgtctggcgcngggttcgtttctgagatggtggttctggtcctgttcggcttctccatggcgggngtcgttcgcgcccattctgtgaggcttctcgcttcctgtgttttctgcccctccgaatgtggtctttgggtttctggttgtgtttgtttgttggggtgtgttct

SEQ ID NO: 50501 - DNA, 320 bp, Gossypium hirsutum
  unsure (1)..(320): unsure at all n locations
  Clone ID: LIB3828-023-Q6-K6-E11
tgtcaaggaacgnnataaatgctgggccccgatccatgnatcaatagcaaatnnaaatgagtgcattcgnnccgtgtggttcatttcggcaacccagcgtaaagccatgtntatattatatttacatcannttgtgcattttaagaggggggtggggaggcagnaagaagaactgagnnctggtaccttataanntcggttcttcttccacgtgnngccatgagnaaacctgnatnnttgatnntggatttagctttnnntttcctcnnnctatggttnnngccaagttcaaagttcatttnntgtttattatnntcgat

SEQ ID NO: 50502 - DNA, 604 bp, Gossypium hirsutum
  Clone ID: LIB3828-023-Q6-K6-E7
ccccgcgtccgggaagttgatcggagccaagtatttcaaccgagggtacaaggcttacctcggcgaaaagctcaacgcgacgttcaagactgttagggaccacgagggtcatggttctcatactctatcaacagctggtggtaactttgttgatggggctagtgttttcggttatggaaatggtactgcgaaaggaggatcgcctaaagctcgtgttgcagcttataaagtttgttggccccctgttaatggtaaccaatgtttcgatgcggatatcatggctgcttttgatgctgcgataagtgacggtgttgatgtgctttccgtgtcgttgggtggcgaaccggctgagttttttgaagacggtattgcgattggttcctttcatgctgttaagaaagggatatctgttgttttgtctggtggaaactcgggacctgatcctggaactgtttcgaacttgtcgccgtggatgtttacggttggtgctagtacactcgatagggagttcactagttatgttgaactaggcaataaaatacgtctcaagggagccagccttgctgcagcaacattgaaatcgaaaacttcttatccattgatc

SEQ ID NO: 50503 - DNA, 583 bp, Gossypium hirsutum
  unsure (1)..(583): unsure at all n locations
  Clone ID: LIB3828-023-Q6-K6-E9
gcgtttctagnatttacttctctatttgtgggggggggggggggttgtaaaggaaaatgaaccaatcccatagcattagcttccaagctggccaggctcagggccnngctcaggagaagacccgtcagacggtngacanggctnngggaaactgctcattctgctntggnttcaatgcagcagggggggggggggatgctggctntttgcacatggcgcagctgatgccttgagggatacaatggggntactaacatatgaaacttctcctgcttgatcccaaattaccacacctctcgggctcctatctatctatctttttgtntntctntctctatgtctgtctgtgtgcctttttagcttttgatttttgctctggcntgtttttcttccttttgcttctctgtcttgtgcctcgaggttngattttccctcgctttttcagttttatatgaattttgggttgtcctgtgggtgcctgttgcttttctgtgtggctacgtttccgtcttcctttgctcttgtcctcttggtttctctttcccttccgttccttcgctgggctgttcggtgtttcttctgt

SEQ ID NO: 50504 - DNA, 572 bp, Gossypium hirsutum
  unsure (1)..(572): unsure at all n locations
  Clone ID: LIB3828-023-Q6-K6-F11
ccagnaaggtgganaatggatctgggggaaggactggagagtccacatccgagtcataattctggcatggaagcttcgccaataccatcaccgtcctcaactgcagcagcgccgactccggctttgatcctaacaaataccggcaagcgtatcgatagaatgggaagtagcctcactgggggcagttccggtattacagaccactcagcaacaccatcaccctcgtctatagcaaagacaccagctttgatcctatcgaattctgctaagcgaattgacagaatgtccagtagcctcaccagttccagttctggtactggagaaccctcggcgactccatcaccatcatcaacagcaaatgcccctgctctggtcctgtcgaattccggcaagcgcattgatcaggctgccaaaaagaaatacgtgaagcaggtaactggacgccataatgacactgagctgcacttgtcagcgcagcgtggtgatttggctgctgtaaagcagattcttgccgacattgattctcagatgatgaagactgcgagtggggaagatttcgatatggaggtttc

SEQ ID NO: 50505 - DNA, 372 bp, Gossypium hirsutum
  unsure (1)..(372): unsure at all n locations
  Clone ID: LIB3828-023-Q6-K6-G8
acacctcgcgcgcggggggggggggcgtgccaaaaccgagttggggggaatgcagatggatcttatcaggcgttgggtttgtttcgntntgcacccttttactgtgggcgagtttatacatgcatttttcttttttttttttctccgagnnncgactatttgttgtggaggtttactctctttnttttttcaatccatagtttcttggagggatggattatatctgcttcatcgaggaaggtatgttcgtcgagtcgttctctttcgtgtctcgagaaaaactcggttgtgacatgcttagtttttacaggtttgtgcgtatagtctttgtggtggggaactatggagctgtgtttcgtcgttggtttttgg

SEQ ID NO: 50506 - DNA, 614 bp, Gossypium hirsutum
  unsure (1)..(614): unsure at all n locations
  Clone ID: LIB3828-023-Q6-K6-H7
ggnagtttttcgatcgtctttagaacaagggttcttggattgatatgatgatggggcttttagctcttcttcttctcttagcttttgcgtcactgcagctcttttgcttcgccgatgatgataataatgacgatgatgtggttttttatgaatcatttgaagagtcatttgagggtcgatggatcgtctctaataaagatgattataaaggtttatggaagcattcaaagagcgagggccacgaagactatggtcttctggtgagtgagaaggcaagaaagtatgcaatagtgaaggtggttgatgaaccggtgagtctgaaagatggaaccaccgtgcttcagttcgagactcggctccagagtggaatcgaatgtggtggtgcctacattaaatttcttcgtcctcaagaggcgggttggaagcctgaggaattcgacaataaatccccttactccatcatgtttggacctgacaaatgtgggacaacaaacaaggtgcatttcatatttaagcataagaatcccaagaatggggaatatgttgaacaccatcttaaatacccaccttctgtcccatccgacaagctcactcatgtctacactgcaaccttg

SEQ ID NO: 50507 - DNA, 184 bp, Gossypium hirsutum
  unsure (1)..(184): unsure at all n locations
  Clone ID: LIB3828-024-Q6-K6-B12
ctcccctctccnntctgcttccgattcactcctcccttctgccgtttgtttttttgtcncntcttcnagacttaatgggggggggggggggggtttatttgggggcgtgtttcatcttgttgcgttgcttgctcatatctctgtcgctcgcctgggtcttgttgttcggccgctttgttttttt

SEQ ID NO: 50508 - DNA, 604 bp, Gossypium hirsutum
  unsure (1)..(604): unsure at all n locations
  Clone ID: LIB3828-024-Q6-K6-B7
cattgctgatattcatcacaattgaacagcaaaaatgtcgtgcaattagtaatttaaaacccaaactnnactcgaaagatnnttctttctgtttgtgcgattggtgtnnttttgnnttcgtcaccaaactgttnnncctgtcannttccaagtnnnctagggnagggtnntgttatagtaggtctgtataaatggggnaccattnnngggttnnngattcgcatgtgtggcctggtggttnncttcgtnnnattatttncnnatggttntnntggcttgttntnntttgggtgcaannntaactcaggnntaggaaaatgncccggctgcttttaccaggggnngtgtgnnnatttgtnntcaagnnggcangttgnnggtttattgatcnnncatcttacnncctctnnttactcagnacnntgggctnntgtccttttcatttccaaagnagnaagttcagtnntgtcagaagaaaatggaccgcctnnggatatgcnntttactcnntcaataccgnnnatggcagcncttcttttcagtgctttccctttcacaagaatnnttgatnngcattgnannagttccttagnannaaatttca

SEQ ID NO: 50509 - DNA, 594 bp, Gossypium hirsutum
  unsure (1)..(594): unsure at all n locations
  Clone ID: LIB3828-024-Q6-K6-C10
ttcaacatctaccctgntcaaatcccttcctggtgaggggaatttatgccttgtaggggaggttatttgattggaaacctgcagccagctcacatggatttccgtttcttttcacttggaaacttatggtctattgttggcggccttgcaacagttgatcaatcacatgccatattggatcttgttgaagaaaaatggtcggagttggtggctgatatgccattgaaaatatgttatcctgctcttgagggccaggaatggcgaattatcacaggaagtgaccccaagaacactgcctggtcataccacaatggaggttcttggccaactttgctttggcagctcactgtggcatgcatgaagatgaacagaccagagattgctgaaaaagctgtcatgcttgctgagagacgcttatctagagacaagtggccagaatactatgacactagaagagcgaggtttatcggaaagcagtcacggttgtttcaaacatggtctattgctggataccttgtggcaaagcttctccttgctaaccctagtgcagcaaaggttcttataactgaggaggactctgaacttgtaaatgcg

SEQ ID NO: 50510 - DNA, 452 bp, Gossypium hirsutum
  unsure (1)..(452): unsure at all n locations
  Clone ID: LIB3828-024-Q6-K6-C12
tttgtttcatttaaggatccagatgcagccatgagagcatgtcgaaacccgtctcctaccattgatggcaaggagggcgaactgcaatcttgcttcattgggtgctcattaatactcgtccaccaccacancatgggggggggggggggtctttttctttctaattgtcttggttcttgttgaantgtcatttccttatctcaattccaactctttatgcttatgttaaatggtcctggcgaatattcacttcaatatttggggtgaggaaagttattgtttgttcttgttttttcaaaggatcaaaaaattcctcctttttttttcctttgttcattctgtttatgttgttttttaccatattgttaaatacattttcttttgttcttttgctatctgtttttctttttttgtgttttttattctctttagttttcattcctttttttttt

SEQ ID NO: 50511 - DNA, 518 bp, Gossypium hirsutum
  unsure (1)..(518): unsure at all n locations
  Clone ID: LIB3828-024-Q6-K6-C9
cccgggtttcgcccccacgccgttctctttggctctctttcatcatgnaatatggagggagtgcaagaaggctgtgttgcttctaatgcgggtagtttggatttacatttatatgttccaaccaatttgctcaccatgnatgggtgccaagaaagattcgagcagcagtatatattctcgccttgggtcccacgcatttgccgnaganattatgctggtccatattcactttctctcttatcgcgncaatggggggcgggtgaggtatgccagcaacaatgngtgctcggtgcctcatggctcttttcttgtgagcgatcaaccaggggcattttanatcgattccctttcgcaagttgtntccttggctttgcncgattttaatccaccccgtttgngtggtgtatatggcttgnaccctggcncgtgtggattgcctccttgatattgttgctcaggtgggcctccctggaggggatgcactattggtccgtcttttccggttcttccctttttag

SEQ ID NO: 50512 - DNA, 609 bp, Gossypium hirsutum
  Clone ID: LIB3828-024-Q6-K6-D10
gcgttcgctattctcttctctgttgtatgacgtggcgactggggggcttttccaccttcatttcaagaatcaaatggaaacggtaacgatgtcaactccggatattgctgaagtggatcagttcagatgtcgtgttgatgaaatctttcaaaagatgataagcttgagaaaaaagtgaatgaaggtgaacagttctacttgaatgccaataaaaagaaaaagagcagttctaaaggtaactccattcgagaggaacaagataagggaaggcatgttccaagcattaaaaagcagcagcaagatgcatcccaacgggaatcaactgctgcaaagcgaatgcaagagcttatgcgccagtttgggacaatattgcgtcagatctcacagcacaagtgggcatggccgtttatgcaaccggtagatgtgaaaggtcttggtttacatgactattacaaggtaactggtattgaattaatgcatttttctttttagtttcctttcagtttaccagatataaagtcataactttccatttacctgttatctatcctgtttgagttgaggaatctggtgggcataatctaggaatgcataccaaatctgataact

SEQ ID NO: 50513 - DNA, 344 bp, Gossypium hirsutum
  unsure (1)..(344): unsure at all n locations
  Clone ID: LIB3828-024-Q6-K6-D11
ccgggttgtacccagcgtccgccaccatgncctgcagnancaaggcgggaggggggggggggggggccaccaggctaagttttgcgcaaggagccgttgcagctatttcttcattagtcaccttgttctttttgttttaagtttgagactcaaattctacaccattccataaaatgagtttcggctcccactccgtggggggggggtagagcagttctctttctcagcctcaatattttctttttaattactagctaacctctttttttatttatataatatatactagtcattatgtcatatgtgcttttttttctaagatntctacataaatatcgtatgat

SEQ ID NO: 50514 - DNA, 286 bp, Gossypium hirsutum
  unsure (1)..(286): unsure at all n locations
  Clone ID: LIB3828-025-Q6-K6-C9
ggtttcgttcattgtctggtgcggtttggtggtgcggtgtattcgccntggggcctgtaagaaggtctaccatccgccttcgtttgttgctgcacgcctcattttgtctttttcgtggggtgccgatgcacttgggtgcgtggccgttccgccggtggttctgttcctagctcctctgccggttccgccccagcgtctggaccagcattccagcgtggctgccgcagccttgccggtccttggctcgttggttggggcttgcattgtttctttgtcttcttacgtg

SEQ ID NO: 50515 - DNA, 357 bp, Gossypium hirsutum
  unsure (1)..(357): unsure at all n locations
  Clone ID: LIB3828-025-Q6-K6-E12
atactgggggggggganncgttngcttggtttcatttgaggatccagatgcngccctgagagcgtgtgcggacccgtctcctacccttgttggaaggagggcgaactgccttcttgcttcattgggtgctctttatagtactcgtgccccaccacaacatggtgggggggggtgtgtgtttctttttncttgttttggttcttgttgaagtgtcgtttccttatcttactgccggctctttatgcgtgtgttgaagtggtgctggtggaatattcactggcgtatttggggtgcggtatgttcttgtttgttcttgatttttggccggatcgtcttgttcctcctttttgttttcct

SEQ ID NO: 50516 - DNA, 419 bp, Gossypium hirsutum
  unsure (1)..(419): unsure at all n locations
  Clone ID: LIB3828-025-Q6-K6-E9
accttctttgcgtctgcttctcatggatctgagggagggaaacttttgctcatggggagttgattaccttaagtgcgacaattgcgtaccatggatggtntcatgtatatcgcagaaagatttatttgccatggngccaccgcattggctggaaattgtaaacggtccaattcacttctctttatgcgattggggagggggaggaccagggncatgggctggtgcctgtggtncttcttggcggacagcaggggttgttaatgattcctttgtgagtgtcacttgggttgctgcttctttcattcattggggtagatttgctgggcctgctgtgtgggttgctcctggtataggtaagtgggcgccggttggttctgtgtcttctactgcctgtctcctcttctttttatgtatcttgt

SEQ ID NO: 50517 - DNA, 221 bp, Gossypium hirsutum
  unsure (1)..(221): unsure at all n locations
  Clone ID: LIB3828-025-Q6-K6-G9
tagtatactcttttggaggggggagaagggcgactcagggtttaattcagataatataatatttatgtaggataggagtagtgtgcggctgccatgactgtccatatttncttacttattgtttaaacccccaaccaattattccttttttggcttgtccaattgggggggggggacaacaataaaataaataantantggacaaaaaacaaagagagaac

SEQ ID NO: 50518 - DNA, 597 bp, Gossypium hirsutum
  Clone ID: LIB3828-025-Q6-K6-H7
cggccgcgtgggcggacgcgtgggcggacgcgtggggggtgacatctgctactagaatcctattactgccaatgtttttaagtcattcctatggctagatattcttccacggcaactagtggaattgaactttgtctaattcttattcttacagcttctcttgttgtcattctcaattattcctattgtgttctaattgaaacaaagtcttttctgtttgcagattagaagtttagcatggccagcagttctagttggatgggtggcgcaaagtgccagccttggcatgaaagattcctggggacctttgaaagcattggctgtttccagtgccataaatggtattggtgatgttgccttgtgcatgtttttaggttatggtatcgctggagcggcatgggcaacaatggtttcacaggttgttgcagcttatatgatgattgatgctctaaacaagaaagggtacaatgcatttgccatctccattccaacatttgaagagctgctgagcgtgctagcaattgctggtccagtatttgtaactttgacggcaaaggtaattttctattctgtcctcgtatatttcgctacatccat

SEQ ID NO: 50519 - DNA, 365 bp, Gossypium hirsutum
  Clone ID: LIB3828-026-Q6-K6-A9
ataagcaggggggggggggcgtatggcatatctgttcaactggcaaccttcttgtatcattttgaaggatgggagtttgaccgggttttgtgtgttttatttaccgattcaaagtttggcactgttactggttttaactattctctttgcagacatacttggggggtggtgttaattttgcagttttgtccagtggatagttgctgtttacttcaagcatcctctactatcactaaagtataattttttatctattatcttttgttgtggcttctttttcttttcctctttttctcggctggtttgtgttcttttcctgttttgtgggtttgtgtttgtttctttgcccctgtgggtgttttttt

SEQ ID NO: 50520 - DNA, 472 bp, Gossypium hirsutum
  unsure (1)..(472): unsure at all n locations
  Clone ID: LIB3828-026-Q6-K6-B12
gccccgctttcttcntttccctccttgtttatccgggggggcatggatgggctgatgcggctttgtttggtccagctgctggttttccgtgtggctttccnngttcatttcttggtggccttgctcttggtttccttctccgccgcctcctcttttttttttttcnccgcnccnggccctctggggggggggggggggatgctgtttctgtttctccttgtttgtgttctctttgcggtgctttctccctcggccttctctgctctcgtcgcgtttcttgcttccttatttttggagtgcctttccgctctcttgtgtctctctgtttgttgccttttcgttttcctttttgtcttttccttcgtgtttgcggtctttattgtgtggctcttcccctgttgctttttggtctctccgttggttcggctttgtctttctgctttggcgtgtctttcttctccctctttggcct

SEQ ID NO: 50521 - DNA, 502 bp, Gossypium hirsutum
  unsure (1)..(502): unsure at all n locations
  Clone ID: LIB3828-026-Q6-K6-C12
atggcagttcttccaggggggggggcgtnagggtaacggtgcaaaaatggttcagccggttgggatgacgcgcgggagccaaatttgnaccctgttttgtncaccttccaaactgatggaactagtcccaagttttttttttttaacccatccaacatccctgggggggggcggtgctcgttcgctgtcctccctgntgcanaagtcctcatggcgggaagcatcacgaacccaggttgcctcgatgatgcattgtttcccaccgttgttcgggtcgtgaaattctcaccgcattacttggaccctancttggccatgttccgtcttgagatctttgccggtttgtccgctctcttctttatgtttggcctgttcttctcagtgctgttccgtgggtgcggtgtattcgtccctctcttgcttcgtgtgtcgatttactcgccgccgtttgtgtcccccggggtctgcctgtgttcttggttggttcggttgggaatttttg

SEQ ID NO: 50522 - DNA, 307 bp, Gossypium hirsutum
  unsure (1)..(307): unsure at all n locations
  Clone ID: LIB3828-026-Q6-K6-C9
ggggggggggggcggggggggncttctcttncttgcgttctctcttgcggctggctcgggctgggggcactctggctttccttttgctgctggcttttgtnggngtctctcttggtgctgttctctttgtgggcgcttcccccggctgggcttgggtggggggtggttggcttcctcaggtgggcttcctcctcgaatttccgtgttggcgnctctcttctttttctgttcccccctcttttcctcttcgtgcgtgcttgtgtccctcgtctctttcctgtcctgctgcgggccttctgccttcgcc

SEQ ID NO: 50523 - DNA, 329 bp, Gossypium hirsutum
  unsure (1)..(329): unsure at all n locations
  Clone ID: LIB3828-026-Q6-K6-D9
ccgggtcgnccccgcgtttttttgttgnggggttgtggttcgggggtgggggcttgatgttgcntctgttcttggggtgagcttcccatcttctcgggggggtgtggtnttttgggcngttttggttggcgcgttccttgttttttgangtcttgccccctggtcttttttgtccggtcgcttttttcttccttgggggggggttggttgtttgagctctgaagggcttcccattgagtgctccggcttcgtcctccgcttctgctttttctagcttgtgtggctctcttcttctcctgcgtcgactgtttcccggttttttattttta

SEQ ID NO: 50524 - DNA, 603 bp, Gossypium hirsutum
  unsure (1)..(603): unsure at all n locations
  Clone ID: LIB3828-027-Q6-K6-A10
gttctaanagtagagaactcaaaaacaggcaaacccctngaagnaaacaggaaagctgtttcacttttctcttcaaagacagcttcttctttcttttcttttcttttctttttttcaaatttcctttctggggttttcatttcatngaaagatttcaccttccactgcattgttttctctgttctatgataagtttgtcagtgataggttttgttgaatttgttcaatggaatcacttgtaatttcttcatcaaagagtaaccctccttcaacatctgggaatcctaggccatctcggcctccgtctccgaaccgatccgaaaatgaaaagactatttcgacatcccatgtagctactcttaaccatggcgtaaggattgttcgacatcccaaaggttctataggttatcaaaagcattcttccaaaccagctgatggcaatgtgcagcatgaagaattgcctgatgctgcaaaacaatgtttcgattcgagtaaagggaaatccgagaaagcggaaaacaaatcttccttcaaacatcccattgatgatcacaaaagtgctagttcaagtggttcattggaatctgaaaaattgtgcagttg

SEQ ID NO: 50525 - DNA, 601 bp, Gossypium hirsutum
  unsure (1)..(601): unsure at all n locations
  Clone ID: LIB3828-027-Q6-K6-C10
ggaaatgcttctaaaagtgcagatggtgccatgattcttaacacattaaagaagaaaattgtcccgtcacaggtgacagtcaaactgatacaaaaggagatggaattaagtgacaatcacaaatttctcattgatggcttcccacgtactgaggagaaccgagtatcatttgaacaaattattggtgtagagccaaatgttgtacttttctttgattgcccagaagaagaaatggtgaaacgtgtgctgaatcgtaatgagggtcgagttgatgacaacttagaaacaatcaaaaaacgtcttacagtttttcaggcattgagtcttccagttattaactactactctgagaaaggaaagctctatacggtagatatataaaattgtctcctttggggctttatgtttttccctttctaatttgtggcagcttacatagcatattggttatagtaaatgaagcaaatacttgcagatcaaggcaataggaacagaagatgaaatatttgaacaagttcgtccaatctttgccgcgtttgaggtatgttctgtgagtgcaatgatcctttctatccagctntgctgtttttttttgttacat

SEQ ID NO: 50526 - DNA, 313 bp, Gossypium hirsutum
  unsure (1)..(313): unsure at all n locations
  Clone ID: LIB3828-027-Q6-K6-D1
gntgtccccctgtctcctatgactgaaaggtgggataaagtgtggaatataattattttgtctctccagttgggttggctggttggtggcattggatgtctgctggattctaggctggaaagaaagctttgttattaacctttcattctaatttctttagattatttattcccctaatttgactcaaccttttgttcttttacgtttcgactgtattttacactctctactgaaaaggggtaatttagtctttgtacattatattaaagagtaaattagttattttttataaaaatttcatccatttgtacgt

SEQ ID NO: 50527 - DNA, 486 bp, Gossypium hirsutum
  Clone ID: LIB3828-027-Q6-K6-D10
tataaaaaaaaaaaaaaaaaaaaaattaagatgatagaaaaaaaaaaaaaaaaaaaaaaaaaaaaaaaataagagaaaaaaaaataaaaaaaaaaaatatataaaaaaaagtgggggagtgataatgagaggatattgttgtgtaactgtggggggttgcgctggataattgttttgggatgtggtatattggtatgggggtggggggtcttttttttgggtcgcggtttttttggggctggggtggtgcttttttgtttctgttgggggggggtgtttttctttttctgcttggcatgcctttgttgcggggttcgctcctcctttctctccctgtggcacttgcgttttggtgggggatggttctccgtttccgggggtggactcttttaggggggggggggtcattcctcccattctttttacttgccttctttggtagagatgttcggtccgctgttttccctttctttttccacggggggg

SEQ ID NO: 50528 - DNA, 534 bp, Gossypium hirsutum
  unsure (1)..(534): unsure at all n locations
  Clone ID: LIB3828-027-Q6-K6-D4
ggcagcaaaaagagtgcttgtttctcatattgtgcttgttgacaccaatttttttttaaaaagggtcgacttggattttgaaaatgaaaacgaaaatgagagtggccaccaatcctttttgataaggtgtgatcgggtcaccttaaaagtggttgtttttaataaataatttaattttattaaaacaacgattttggtccacgaaattcaaaaaagggctcggaagtcggttacgtacgaggaaggattagcaccctcgtaacgcccaaaattggtacccagttgattaattagtgtcttagcattgaagattgaaaactttaaagagatttgaaaatacgatccttgtattaaaaacttgtataaatcaaattacatgttaagaccctctcatttcggagagagaaaatgtcatacctaacgagttagggcatgttatttcacatcctcaaaaatgagcttgtcctttaaaaatctcatgcaataaaattcaaaagcatattcaattttttaaaaaaaaaaaaaaaannnaaa

SEQ ID NO: 50529 - DNA, 591 bp, Gossypium hirsutum
  Clone ID: LIB3828-027-Q6-K6-D8
gggctgttggcgagtatggtgggggtggtccaactcacaaagagctgctagagaactttttgaaagtctagagctacttttgtatgaaaatctttcatccagtcgtctaggtctgagacaggaagctgcggtcaattctaaccgtaagagcttcagtaagtcatcacaatcaaggcttctatgttttgttatcacagctatcactaagctcgccactcatcaccgtgaactattgccaagagcacgcgtagccttgatcaaggttgctcgatctcgaatatcagattcaaaggtgtcgaagtgagctcaagtttatttgggtttaattgatgagtctggtatttgtttgcctgtcttgggaccttcccgcccttcacatggattcgtgcattatccaggcactgtcaactggaatgaaggaggcaacaaaatggtcgcacatatcccgttttacattctcggcgaacaggaaggtccacccttccatgatttttcactatcagatgttcttccaagaagatcataaagctacatagtaaggtatctttggagtccagagtttccgatttatagcagggataagtaacattc

SEQ ID NO: 50530 - DNA, 605 bp, Gossypium hirsutum
  unsure (1)..(605): unsure at all n locations
  Clone ID: LIB3828-027-Q6-K6-F10
cacatatgtggcatgaccggnanaggtgtgaatgatgcaccagctcttaagaaggcagatattgggattgcagtcgatgatgcaaccgatgcagctcgtagtgcgtcagacatagtattaacagaaccaggactaagtgtgattgtgagtgctgttctgacaagtagagcaattttccagagaatgaaaaactataccatctatgctgtctccattactatccggatagtgttaggatttatgctccttgcacttatttggaagttcgatttttcacctttcatggttttgatcatagccatactcaatgatggaacaattatgaccatttccaaggacagggttaagccatctcccatgcctgactcatggaagctcaaggagatttttggcactggcattgtcctcggcacctatctagcttgcatgactgttgttttcttctgggctgcgaatgactcgaacttcttttcggataaatttggtgtaagatccattagacacaatcaagacgagcttacagcagctgtttacctccaagtgagcatagtgagtcaagcactcatcttcgtcactcgttctcgaagctggtctttcatcgaacg

SEQ ID NO: 50531 - DNA, 357 bp, Gossypium hirsutum
  Clone ID: LIB3828-027-Q6-K6-G5
gaaaactttgagtattcttacctttctcatggcttgttaacattcgaattccataaaataagacaattacttgccaaaatgagagcaactaggaggttgacttgaagatgtttaagtgattttaacataaagacaaggaggaaagccactatgggaagccgcaaagagtagccgtagatagccccctacatccagctgtttactcttcgcattgtgaaatgaccgtagatagcccccctcagctactatttcttacccttctctttattgttaaattattgttttatatgtcaggagataagattgcatctcaatctttatttttccagtttaatatgacatgacttaattttgttt

SEQ ID NO: 50532 - DNA, 577 bp, Gossypium hirsutum
  Clone ID: LIB3828-027-Q6-K6-G6
cggccgcgtgggcggccgcgtgggtggatggcaatcaaaatgacttggaaaagcttacgacagagttagttgggagttcattgaagcttctcttcgagtggcaggtatccttgactttcttattaatgttattatgtcatctatctcgaattctaccatgcaggttatatggaatggaataccgctggctaagttcaagcctgttagaggagtttgtcaagggtgtcccctttcctcctacctttttgtgctttgtatggagtggcttggtcacctgatacagtttgctatcttggaaggtaaatggagccctatttgactaaatagaaatgggcctgctatctctcatttattttttgtagatgatttggttatctttagtaaagctatggtggggtcttaaagaacatcctggataatttttgtgagttgtctggtcataaaataaattctagaaagaccaatatattcttttctaaaggagtggatgatactatggtgaattcgattagctcattgtttggttttcaacgtgttcataatctgggtcactatattgtagttcctcttttccacc

SEQ ID NO: 50533 - DNA, 405 bp, Gossypium hirsutum
  Clone ID: LIB3828-027-Q6-K6-H12
ctaaaattcacctgaaatttcttctctttttttccccattttatttttcccaaaccctttctcccctaacccgattacctttattttttcaccaatttccccaaatcggtagccctctgcatctctgtctgtaccctgctgctatatctctggcgacatctgctataaagtatattgaaaaaggacccaaggcaagggttatctttcagcaactgatatcaggagtgagttattgccatgcaatggtatatatactaatgctgaaaatagtttcccattttttacctattatatcttatctaattcgaaatttttcaccccttttctatatagaaaatttgtcatagggatctcaagatggaaaacacgctgttacatgcgagtactgttccgacacttaatata

SEQ ID NO: 50534 - DNA, 579 bp, Gossypium hirsutum
  Clone ID: LIB3828-028-Q6-K6-A8
gcaaaatcaagacatagcgttctttttctgcccccgtccctccattgagggacaggaagctaaaggaacccatggcttttccttcctttctcttcctcctcatcctccttccccttttcttctcccaactttcgcctgactattacaggcaattttgccctaacttggacaacatcattcgagatgtcgtcaccaccaaacagatcagcaaccccaccaccgccgctggcacccttcgcctcttcttccacgactgcatgataggaggctgtgacgcttccgtactcatctccagcaattccttcaacaaggccgaacgtgacgccgacatcaacctctctcttcccggcgatgctttcgacgtaattgtacgtgccaagactgccgtcgagctttcctgccccggcattgtctcttgcgccgacatcctcgccttggccacacgtaacgccattaccatggttgggggacccttctacaccgttaaccttggccgcaaggacagcctggtgtccactcagtccagcgtagaagggcacatgccactggctaacatgaccatggatgagatcatcaaaa

SEQ ID NO: 50535 - DNA, 451 bp, Gossypium hirsutum
  Clone ID: LIB3828-028-Q6-K6-B4
ggagcttgtaggtataagaaaatgaaagaacccacaaccaaaacatatttgaggaaggcagcaagctattcatcgaacaatccaaggtgcacgcatagctctgctttcaatttatgatgaagggcaattctcctgctgtgatttccctaaaaaatatatgtaagtgcctgtgaactttgttttgtatttttggtcccacttaactaatttcaaaagagatgattacgaatgaacatggaagagtggggcatataatggtttttttttttgttctttttttctttttaacaaaatttgtatttgctgtaaaatgttgaacttttagtgaataggtttcatataagctgcccttcatttgttttttgcttttttaaaaaattcttcttagtgtttaaaacatgggagcatttttactttatataataaaatggatcttgcttggttgtcaacc

SEQ ID NO: 50536 - DNA, 456 bp, Gossypium hirsutum
  Clone ID: LIB3828-028-Q6-K6-C6
ttaatgatcagggcactatataggctccggctgatcctggatctttcaatgaccctaattggcttctattctattgtttagaaaactgcaaaatgtccggcacaaggaatttctgatggtccagggaaccattgcttatgagaagaataaagatccccacattcatgcattagctgtcaaacttcccgataatataaggttactactatgtgaccaacgcatcgtatacaagatataaatagcaaagacagtaaactattaaccgttaatgcttttgcatgcaaaaacttaccctcaaacgttttacgttagatgcacctgcaatatattccacatacagatggttattcacattggcaaatcagacggtgtaaatatacattgtatgtagaccattaaaacttgttgataatatgtatttcttatcgggagatggtcactaataaattctcacat

SEQ ID NO: 50537 - DNA, 427 bp, Gossypium hirsutum
  unsure (1)..(427): unsure at all n locations
  Clone ID: LIB3828-028-Q6-K6-D11
attgcgttcctttgggnaggacgtcaccgactacgtcaacatcatcaccgctaaaaccccactggaaccggagccttggcgccgatcacttcatccttgcttgccatgattgggtaactttaccttttgtgtcatttatgattttgggttaatgttttctatcgatttaagcaatcacatcttttcattagcttgagtattaaatgctttgctcggatatgatactgatcatatgtaaaacatatgaaactaatttagacacgtgtgtacttattgtatagacagtttagatttttgatgtgcttaaaatacttaaacccaaattgtccatacaatagatacgtgtttaaaatttgatctttatgtttttaaatatgattcatgtctgaatcaatttgacatttaaaaaaaaaaaaaaaaattaaaa

SEQ ID NO: 50538 - DNA, 417 bp, Gossypium hirsutum
  Clone ID: LIB3828-028-Q6-K6-E12
cttacccccgtatgcctatcttatctggctggcaaacctggctcgagctgctgcttacccgaacacgctcacgctttgacgttgctagattccttccaagacctgaaggaactgggggccaaagcttatgtgaggccggcaaatcaccagctagcacatttctcttccgtgtgaaatagaaagtaaatgctgtgcatgagccatcaagatactaaccttgctgccaaacgacaaaacatccaaaagctatagtgatcgctcccgtggaatcatagaccaaagcaggcattcctcctatattactctctcatctcataaaacttgccatggtctgcattagaggttactaattcatggttgcgcccacataatcaatttcgcaaaatgtaatttctatttagaaaactatacttatat

SEQ ID NO: 50539 - DNA, 514 bp, Gossypium hirsutum
  Clone ID: LIB3828-028-Q6-K6-G6
tccccatccttccggactctttctcttatgcatacgcctacgcctgcccctgtgccaatttaaaactctctaactatagatattagtaggtgcttgcgagcttatgacagattactctagttggttgctctgtgcctacaactgatggaatctcagtatgtacaagcaacctgctgcaaatttttatgagttagccttcaccgcatggctcaataaggacgtaataattcatggatatatgtggctggctgtatatagtctagtgatgggcctgatatgtttatggaatcctgactttctttcaaccgacgaatttctggaacaacctttttcgctgaccagcgctgagagctccattttcctttgttatggtgtcactaatatggagaccgtacggaggtatcatcattcgacactttttatccatggccatatagtgtatcagtaacgcccatataacttatcttgacccaatacccattgtctgagcattgtttagcccaagcataagaag

SEQ ID NO: 50540 - DNA, 496 bp, Gossypium hirsutum
  unsure (1)..(496): unsure at all n locations
  Clone ID: LIB3828-028-Q6-K6-G9
gcgctctggcacacactccataattgtctgcctctacgggcatccaatcggtttgccctatatttaacctcactgtcctttggtgactttatagcagccatacttatctttgtggcgcacaagttcccggccagatgatgtaccacctctggtaaaaccgcccaggccaccttgtacggcggcttagatattgcggactcaatgatgcgcaccatgactgccatctaaccatgacattcaaaggttcatggtacacacagacttgtcggtcacttttcttngacaacaatagtgccttttattgatgtgtgctttgtctttcgtgtatcacaatgaaactggtgacccaaagatgactatccctgggacccctgctgtatgcagatctgtcactaactgtagacctcctatctttgctcttagaagcgactatggtgagggatataaccctcccacttcttattagattcttgccatgcctgatgttaccttaaaa

SEQ ID NO: 50541 - DNA, 572 bp, Gossypium hirsutum
  unsure (1)..(572): unsure at all n locations
  Clone ID: LIB3828-028-Q6-K6-H1
cttgggcatttgctgttggtgggattgcatggaaaaaggaaggaaccgaatggtacccttcctattcctggtcctaggggtttccctgtttttggtagcctctttactttgagtcgtggtttggctcaccgttcgcttgccgccatggcttggtccagggccaatactcagctcatggcttttagcctaggttccaccccagtggtcgtagcttctgatccccacacggctcgagaaatcttaacttcccctcactttgctgaccgacccattaagcagtccgctaaaagcctcatgttcagtcgagccatagggttcgctcccaacggaacccattggaggcttttgagaaggatagcttcctcccacctttttgcacccaagcgcattttagcacacgaacccggtcgccagcttgactgtactgtcatgctgcgcaacattgcgaacgaacagaagcttcatggctctgtttgcttaagaaaacacctccagtttgctgctttgaacaatatcatggnggagtgtttttggcagaagatatgaccagagaaaagacagtgaagaactag

SEQ ID NO: 50542 - DNA, 599 bp, Gossypium hirsutum
  unsure (1)..(599): unsure at all n locations
  Clone ID: LIB3828-028-Q6-K6-H7
cctgcactgctgaactccattttagnagactcagttaaaggctgccttgatttcaaaggcagacctgtgcaccgttcaagctccggtggatggacttcggcttctttcataattgcggttgaagttgctgagaggtttgcttattatggaatctcttcaaacctcataacatacttgacggggcctctgggtctatccactgccgccgccgctgcacaagttaacgcctggtcaggggtggccacgcttctcccactcctgggtgctttccttgctgattcttttcttggccgataccgtaccatcattcttgcttcccttgtttacattttggggctaggcttgctgactctgtcagccactcttccatctgtcaccacttccggtgccccaaatgctgatagtgtcacattaaacacttcatcaatgcttcagtatcaagtgatactatttttcttctcactatatctggtggcattcggacaaggtgggcacaaaccatgcgttcaagcatttggtgctgatcaatttgatgcagaacatcctgtggagtgcaaagccaagagttcattctttaattggtggtactttagtattga

SEQ ID NO: 50543 - DNA, 581 bp, Gossypium hirsutum
  unsure (1)..(581): unsure at all n locations
  Clone ID: LIB3828-029-Q6-K6-A12
gnaacctttagtgattttactatctttcactttttttagcacaactttatatgcaaattctcattcacaacaacattttgacactggaggcttgagtagagaaagttttccagaaggattcttatttggaacagcagcatcagcgtaccaagtggaaggaatggctagtgaagatggtagaggacctagcatatgggatgcatttgttaaaactccaggacatattgcaaataatgagactggtgaattttctattgatcaataccatcgctataaggaagatgttgatttgatgcagatgttgaattttgacgcctatcgattttcgatctcgtggtcgagaattttttcaaatgggataggagaggtaaactggaaaggagttgactactataatagattgattgactatttgctagaaaaaggaatcactccacacgcaaatttgtatcactacgatttgccactagcacttcaggaaaaatatttaggtttgctggacagacaagttatccaggattttgctgattatgcagagttttgtttcaagacatttggtgatagagtaaagacttggatga

SEQ ID NO: 50544 - DNA, 590 bp, Gossypium hirsutum
  unsure (1)..(590): unsure at all n locations
  Clone ID: LIB3828-029-Q6-K6-A2
atcacttctcggnaaagcatctctggatcatgacgattcgtgctttcaggaaggaggatagtttttgtcaggaaaatgttgacagagttaattccaatttacgcatggatttccacaacaatggatccaatgagtggttaggcttccgtttggaacttatcgggactgtagtcctctgcctttctaccatgtgtatgattttgttacctagtagcattgttaggccagaaaatgttgggttatctctgtcatacgggttgtccctcaatggagtgttgttttgggccatatttttaagttgtttcgtggaaaataggatggtttcagttgaaagaataaagcaattctcaagtattcagccagaagcagcatggcatattgaggaccgtcttccccctccgaattggcctacccatggcaatgttgagctcaaagacttgcaggttagataccggccgaacactcctcttgtacttaaaggcattacactgagcattaaaggaggcgaaaagatcggtgtcgttggtcggacggggagtgggaagtcaacattaatccaagttctgtttaggctggttgaaccaacagca

SEQ ID NO: 50545 - DNA, 474 bp, Gossypium hirsutum
  Clone ID: LIB3828-029-Q6-K6-A4
ctaaagctctcactttttcgtaatagcttcaagttcagaagtacttgtgggatatgtttgaatagtgtgaagacaggtcaagggacggcgatttacacggcggaatgttcacatgcttttcattttccttgtatagctgctcatgttcgtaaatatgattcacttgtttgtcctgtttgtaatactacttggaaagatgttccacttctttctattcataaaatccccagaagtattaaccagccaaagcccaaaccggatttgagatcttacgatgacgatgagccattgctttcaccaaccgctggtggtggtcgtttcgttcctattccagaagctgatgaacacgaagaagaaatcggcggcgatgtagaggagtttcaaggattcttcgtgaatcccaacccttcatccatcgaagtacacccattcaacggccgtgattcgaggaatgtacaagttcggttatcacct

SEQ ID NO: 50546 - DNA, 586 bp, Gossypium hirsutum
  Clone ID: LIB3828-029-Q6-K6-A6
aattgacaaaaatttaaatacttatcacatcattgtaacttattgaaaacaataaactttactattacaataaaacatgactgaaatatagtaggttatgagatggaattttaaatgaaatttgagtttaatgagattagactctttaaagctttgaaaatctacaaagcaacaaaagtgggtcaaaaagttgtcttctacctcatttggctttctatccaaagaataatatgaaacacaacaaaagtaaatgatgaagcaacaggtaataaagataaaggaggaacgaatcaagtaaagagcattgacaattgactttatgaaagaattgccaaagaaacaaggggttggagcaccattttcttctttatgtacaaaataatttgatatagaaattaaccaaagaatgttttgaagaaaaatgttgattttgaggggagattctagagtgattgattgtgtggttatatacatgtagaaaaaacataatttagcattgacaattaaacatttcattaggcttccaaactaaaaaaagctacaaagaacatttttagtgaattatatttaagtagaaatattatat

SEQ ID NO: 50547 - DNA, 536 bp, Gossypium hirsutum
  Clone ID: LIB3828-029-Q6-K6-B3
acgttccgcaaagggattttaagcattgctgcaattcctgatataattgggtggcttgctatatcttttgcaaaagattcatcttttctttacatgggaaggttgttgggaaggttttggtgtgggcataatctcttatacggcgcctgtatatatcgctgacatagcacctcataatttgaggggcagcttgtgttcagtgaatcatctatctgacactctctgaataatgctggcctaatctcacttgatctttttgctatgtggggcatacttacaggtataggaatactaccttgtccaatatccatacctggtctttttatcattccagaatctcctctatgtctggcacaatatgtggatgacacaagatcaaaaaacttctatgtaagttctcacccttttctatcctgatattgctattggagtgaatcaaatcaagagatctgtgccatcaaccactataagaactacgattgagattgcaaatctcaaacaaaggagatattgactttccattatagtgggacgaa

SEQ ID NO: 50548 - DNA, 185 bp, Gossypium hirsutum
  unsure (1)..(185): unsure at all n locations
  Clone ID: LIB3828-029-Q6-K6-B4
cggnaaagtggatatgatattcataataatgatgatcataaacattgtagtgcagtggattaggcaggttatatttttaattcagacttttgaaagcagcatgttttgaataaacaagcatcaatgttccgagcctcgtctatgtcagcagacatgaataaatacagccaagacaaattatattt

SEQ ID NO: 50549 - DNA, 212 bp, Gossypium hirsutum
  Clone ID: LIB3828-029-Q6-K6-B7
gtttatttcgaatggaaaatgcttgaaagtcctaaaattaaagtgatcataatttaactactctcatttccttctctagaaaaaaaatcaactctcatttcctgctctagaaagaaacaatgaaaatgaggttaagagcaaactttattttggctactgttgtcaacctatggatggtccacacagtggctagtttatggaacataggtatc

SEQ ID NO: 50550 - DNA, 589 bp, Gossypium hirsutum
  unsure (1)..(589): unsure at all n locations
  Clone ID: LIB3828-029-Q6-K6-C12
gcaacttggcgttctcctgttctactgagttaacacagttctccacggcaaccaaaattcctgtctttcacgcctttgaattgaatcctacgaattcaatcctgaaaattctctcttacaaactacangaaaaaaaacccanattttttttaacatggattccctgtcgtctgtctctccatctatagttctacctccgaccaacactttaccgacccgacggcggcatcgtccccaagttgttgccttctcgtttaccaccaatacccgtcttcctcgcttgtcgtctttctttggcgtgaagcttaaagggagattgaatcgagttgttgattgtaaatgcaaattcaacggtggggatgcgagaagaggagaagaagatgatcatggtggtaacgatgatgatgttgatggtgagaaagacgaggttgaaagggcgcttcatttggacggtacgattccatctacttccagcgagttcttgcgacgggtttcgtctcgggcgtatgatatgcggaggcattttgcagcaaagttttgatagcagcagttatgatgtgttggaggcaaatccatggagagatccttc

SEQ ID NO: 50551 - DNA, 509 bp, Gossypium hirsutum
  unsure (1)..(509): unsure at all n locations
  Clone ID: LIB3828-029-Q6-K6-C3
tggtaagcaataggaattgcagtgggagacagtcttgtcttgtgtccttgagntaagttaaggagtctacagtttaacagcccccccctnatatgctgattgcagtggtaggttatgacaagtatgtgtattgtgcctctattncgtggacttattgtgttctacttgtaccaacatggaattgcaaggaaatcgactttgtagtgtatatcgtgatcccccacacatttccagcaaattcttctaacagggccttcgttaactagaatcctcaggcactctgtaagaataaataaaaatctggagctcacaggtatgattgaccattaaaggtagctttaggtcctgttgatgatttgatgaaaacatcccggattcggaataccaacactgatgataaaatcgcttacatttacatttgcctatcacacctatttttgcagtcactgatatagatgcaagcgccgagtacgaagactagcagacactatgattattttggataacct

SEQ ID NO: 50552 - DNA, 587 bp, Gossypium hirsutum
  unsure (1)..(587): unsure at all n locations
  Clone ID: LIB3828-029-Q6-K6-C5
gcctggctgtctctccaaaacanagataagctctctcaagaagtctcttatgaaaaggagaaggctcaatgtaataaacggaagagacaaaatcgatgaagtgtacgaaatggcgaaaccaaattggctgtaatggaacgagcattggatattcaagctaatctatcatctgagttccctagcatgataaaatacatgcttccatcacatgtaaccggaggattttggctgggtcttccgaagcacttctgcttgaatcatttgccgaaggaagatcgaatgatggttttggaagatgaagaagggaaagagtttcaagttaaatatttagtggaaaagattggtcttagtggtggatggagagcgttctccattgctcataaattattggaaggagatgtatgtgtctttcatttagtgagaccctccaaatttaaggtctatattgtgagaaaaaaatgttcagaagaagtagatgttgctcttggccttctaaagctagaatcttccactcaattagttgacaatggngaaagaactaaagatatgtgaaatttcggtaggaaaaacagaagatagaaatgacc

SEQ ID NO: 50553 - DNA, 462 bp, Gossypium hirsutum
  Clone ID: LIB3828-029-Q6-K6-C6
ggccgacctttattatttttttttttttttttttttttttttttttttttttttttttttttttttttttttttttagtttttttttttgtttttttttttttgtttttttttttttttttttttttttttttttgttattaagactgaaagatataactttcaggttgcaatggttgattaaaacttttttttaatagggtgggcccacccaacagacagggtttcgaagggtaccaaggaactagaaaagattaggagctccttgtgaagaaaggatgttccattagtgttacacccaactggtgctgctgtaaaaggggcctttttttgttctgagagtcggctttcttttttgcacatcagatatattgttccctaagaacttctatacttcatgtcttagtggtcattcttttgtttacttcttaggaaacctttttgcctattagcccagattatt

SEQ ID NO: 50554 - DNA, 601 bp, Gossypium hirsutum
  unsure (1)..(601): unsure at all n locations
  Clone ID: LIB3828-029-Q6-K6-D1
cggccgcgtgggcggccgcgtgggttttngaatacactttcttttttgaatttctatttcaataatgtcttcttcagaaaagagagagaaactcatgtttatttagctaaactcgctgaacaagccgaacgttatgaagaatggtggagagtatgaaaaagtggcgaaacttgattgcgagctgacggtggaagagaggaacctactgtcggtgggatacaaaaacgtgatcggggcacgaagagcctcatggcggatcatgtcttccattgaacaaaaggaggaatccaaagggaacgaagagaacgtgaagctgatcaaagggtaccgtcgaaaagtagaagaagagctttccaacatttgcactgacattttgagcaccattgataagcatctcatcccttcttcttcctctggtgaagccactgttttttactacaagatgaaaggtgattactaccggtatgttgctgagttcaagacagatcaggagaggaaagaagctgctgagcagtctttgaaaggttatgaggctgcttctgctgctgcaaacactgatcttccttcaacccatccaattcgtctgggccttgcccttaac

SEQ ID NO: 50555 - DNA, 599 bp, Gossypium hirsutum
  unsure (1)..(599): unsure at all n locations
  Clone ID: LIB3828-029-Q6-K6-D4
ggctcgagtgtccgtatgcaaanaacctgggggtcaagcaatgtcggatattgttaacaataggtcgttttggaattcatgtatgttgattgctcgtataacatatcccctgttacgagtcctagaatagttggtagcaagaaacgatccgcaatgggatatgtttatgccgggatttacagagcaaaagaaacgattaagaaagaacttgtcaagcaagatgattatatggtctattggaatattatagataatagatgggaacaacaacggcatctccctctttacgctgcgggtttcttccttaacccgaaacttttctacaataccgaggaacatatacacaatgatatcctatcatccgtatttgatagcatagagaggttagttcctgatacgaacatccaggaccaagttgttagagaaataaatttatacaagagtgctacgggagatctaggaaggccaatggcagtcagagcccgagataatttacttcccggtgaatggtggtctatatacggtggaggttgcccgaatttgcaacgtttggccatccgcattctcagtcaaacttgcagttcaattgggtataaacc

SEQ ID NO: 50556 - DNA, 520 bp, Gossypium hirsutum
  Clone ID: LIB3828-029-Q6-K6-E12
ccggtgttgtcaagtcatgttcctaggtgtgtctttgcctttgcaagatccaacaaaatgcctcagacctttgcaggtgaggtccatttaatgactggttgacgccttgtgtgccttggtgcctttttttgcattggacttgcctaagatgaacctaggtggttgaaattcttgcttatcaaaagcgctttggggcagctggattaggccttgtgggctgttgctccatagcttatgctgatgagagatggcttgggtttgtttgatcctaactatataatggcttatttgtgatgacgtaagctcatcttaccatgattatatccgcagtatttcctaggtattgccaacaagtttgtgcttctagcaatttcaatgtctctattctcattaaggagatcttctttgcagctgcagtcatgcgaaaaagaatacaaaggagtatggtagcccccgattcgtagtggtgcgactggcacctaatggatgagggttaataatggttcacctcgcacctggc

SEQ ID NO: 50557 - DNA, 610 bp, Gossypium hirsutum
  Clone ID: LIB3828-029-Q6-K6-F1
gggaaaacatgtcgggtaactcaaaaggcaacaagcgagaaaagccaacacctcaacatgaacaagcactcaagtgcccaagatgtgattccatcaacaccaaattttgttattacaacaactacagcctttctcagacaaggtatttctgcatggcatgcatgaggtactggcccaaaggaggcgcattgagaaatgttccggtgggcggcgggtgcaggaagaacaaaagatcatcatcatcatcgtcatcgtcatcatcatcaaagagaagccaagatcaaccgttattaacatacaatactaacccactcattgctggtcacctcccacctttgaattacgacaccaatgacctaagcctggactttgctcggctccaaaaacaatctggattacctttcagggttgatgattttggaaaccctaaccttaacggttgtaccagaaatacttcaccacccaatcctgccattgttgatgcactaaaaaacacgttccttggaaaccagaacagcttgcagaatttttactatgggtttggaaatgagaacatgggggaggctgtagatatggaggataacggggaacttatggtaccatatcataa

SEQ ID NO: 50558 - DNA, 217 bp, Gossypium hirsutum
  unsure (1)..(217): unsure at all n locations
  Clone ID: LIB3828-029-Q6-K6-G3
gtgtttcatgnaaaatctcacaccatcagacatgtatcccgcgcagtgcaagtgaactagaaggccaccgtccccctctcctctttaggcttttcatttttactgtgaacgaatttacaagctttacaactccttgtcaaatctgcttggtcccatgcaccgagcgctctactttgtcttctatgcagccgctcgtattcttatcagtcttctttca

SEQ ID NO: 50559 - DNA, 587 bp, Gossypium hirsutum
  Clone ID: LIB3828-029-Q6-K6-G9
tccgcaaatcagcacacccccattccctctccttatttccatacgcggctgccccaaaacttcccttctctctctgtaagatccatcgcctccattcaccaactttggggaacgcaaggatccccggtgctttctataccggctctcgggaaaccgcccacgccacctttaacggtggcagcgctgctcctggcacaatgggtggtgcatgtgggtcacggaaacctgaacagacaaggctacggtgttaacacggcggatctgagcactgcgcttttcaacaatggccttagttgtgctgcttgctctgagatcaaatgtactagtgacccaaggtggtgacaccctgttagcccttctattctcgacactgccactaacttttgccctactaacttagctctgctaagtgacaatggcggaatggtgtaaccctccccgtcctcattatagatctaggccatggcctatgttcctttaaaaatgctgagaaaccgggcccgtaatttgacccaaactcctttcctattagagccgtcgcccgaaagcaaggggggaattaagattcacggttcaaacggtattcc

SEQ ID NO: 50560 - DNA, 353 bp, Gossypium hirsutum
  Clone ID: LIB3828-030-Q6-K6-A12
gcccactcgtacggcacctagctctatatggccctttatattgcctcagcgattatatctatgccgatagctcttctattcgtccttattatacataccatgacagaggagggggatgctgctggagaagcaactctaacaatactgcttgtaactctaggtaagacggaacggaagatgggacagaaaagggttaagcatatgggcaatcatagagtctagcaatgaggaaatccatgctgaaggtgccaagggcccacccaacaacgcatcgatcatagggtccatgatacaagccatgaaagcagcaaccatactgacgggaatactgatggaaagaatatgaagtgatg

SEQ ID NO: 50561 - DNA, 611 bp, Gossypium hirsutum
  unsure (1)..(611): unsure at all n locations
  Clone ID: LIB3828-030-Q6-K6-A2
gaattgtaacgtgcaaaaggtttgngaagaatcaaaacatgataacaaagggaatacagatggtgagatagaaggtaacaatgtgcaaaagggtcagngaaaagtcaaatattgaagccaaagaaaagaggatggtgaagaaaagggaaaaccagatgatagtgaaaatcataaggaagttaagtccgagaaagacaagacccagaacttggttatgccaccaccaccaccaacatggaaagatggttttcggggtgaagaatgtgatccttctaatatgtgtatggacaagaataaacggtttgctgcgtgtttgcgagtcccaggaaatgaatctccagatctatcacttctgattcagaacaagggaaagggggctttagccattaaaatatctgcccctgcttttgttcggttggagaagacagatgttcaaatccaagagaaacaagacggaaaggtaaaggtctccatagaaggttctggaatagggaacatgatagtcttgaaggatggtaaaggagaatgcagtctcgatttcaagggagttgatcgttcacaattccgcaacgtcttacgtaaacttcttgtcacaaacccctacaactgcg

SEQ ID NO: 50562 - DNA, 611 bp, Gossypium hirsutum
  unsure (1)..(611): unsure at all n locations
  Clone ID: LIB3828-030-Q6-K6-B8
gnatcctcgnagggatcatcattataaacatcaaaatcttcttcttttttcagattttggtgcaaanatcaatcgaacatgccaaggggaaaatgggagaaaatcatcaccaagctgctgcaacatcgtcaagattgaggataaagcacgttggaggagagatcgttgaggttcaaggaggtcacattgttcgatcaactggaagaaaagatcgtcacagtaaagtttgtactgctaaaggtcctcgagaccgacgagttcgtctctcggctcacaccgccatccagttttacgacgtacaggaccgtctcggatacgaccgtcctagcaaagctgtggattggctaataaaaaaagccaaatccgccattgacgagctcgccgagcttcctccatggaacccattggatgcaacgatttcaaccaagaaacccaataaccaagaagacctaaacacatcaacagcaacaaacaatgaatttcacatcgaaaaccttgctgctgggtctggttctcaatgcgttcagcagcacgaaatgggagataacttgaataataattcgggttttcttccagcttctttagtttctgatgagattgctgatactatg

SEQ ID NO: 50563 - DNA, 255 bp, Gossypium hirsutum
  Clone ID: LIB3828-030-Q6-K6-C4
ccgacgcgtgcggcgggagcgtggcgcggtacgcgtgggcaattaaacccctggttcttattactactactttccttggttcagtggtgaaggcttatcctagccttgtgttttcggttcatatcttgtcatctggggtaattgcgacgttgccatagctaaaaaagcatcggtgttgtgatggacggttgcgccaccggtcacgctatcatagcttctagaatcagccatacttgtctgcctatttctaactct

SEQ ID NO: 50564 - DNA, 563 bp, Gossypium hirsutum
  Clone ID: LIB3828-030-Q6-K6-C9
cgcaatctctcccttcccaaagctaaactcaccccaaggcccgaagatccattcccctcctcagacaactctggaccttaccgtcttttaatctcacaccaactcgatccgtcacctacatgccccgcccaggcgacggtgcgccgcgagccgttaccttgatccctggtgacgggatcggacctcttgtgacgggtgctgtggagcaagtgatggaagcgatgcacgcgcctctatatttcgagcgatacgaggttcacggcgacatggagcgcgtgcctgaagaagtgatccaatcaattaagaagaacaaagtctgtttgaaaggaggattggctacgccgatgggaggaggtgtgagctcgcttaatgtgcaactgagaagagagctggatttgtacgcttcgctcgtcaattgcttcaatttgcctggcttgcccacaaggcatcaggatgttgatattgtggtgatcagagagaacaccgaaggcgagtactctggcctcgaacacgaggtcgtccctggagtcgtcgagagtcttaagttgataacaaagttctgt

SEQ ID NO: 50565 - DNA, 421 bp, Gossypium hirsutum
  Clone ID: LIB3828-030-Q6-K6-E5
tcccgacactcttttcaataaaaatgactgctctaaaaactttgatggaccagatatcagggggccggcatactctctaaatcacgcttgaagcaactactaagggacacactcgtgaccctatcttaactgccaagctcgtggcgtacgaacaagaccctagccataaactccctttccactccactgatgctgcttactacttttcatcttgtatcctggcctgtgctacctggtaaacgcatggcacgcgtatgcatgttctttcaagaacatcgcgagggtgtcactatgattcaccattcctaacacttgatttcccgctcgaggcaatagaccgatcttacatggctgcgcactcactgtatgtcgagaactagagatatccacgccgacctgaatacgaagccatgtaacacac

SEQ ID NO: 50566 - DNA, 537 bp, Gossypium hirsutum
  Clone ID: LIB3828-030-Q6-K6-F5
ggttttcccagtggtaactggtgctggggaagaaggagtgctgatagagcacaaacgtagactaggtaaacattggcgaaggaaataaaatgagtgtataaaaagaggaggtggtggtgtgttgcttggatttttcaagcatgattaaggtgaataatattttcaagtttgggatgaatatgattagtatgtttcaggcgtgtaaaatacaaatgttcccactatgtaaatggaggtcacatggtgtgcaggtggcaaactatataatgtccatcgtgctaaaaaggtggcatgcaattattgatgtggtgggcgccatgatatgatctaacactgtttaaaccggtgcgattcaagacattgatcttattaatgctggcaaaagatgtttacgaggagccacattcctgcaaagaagcatcgaatgtaattccaataaaccattagttcctcaactgcgatactcccagaatcttgcaatgcaatgatatatggtagcttgctgcgtggcgaatgctgtacagctagccaggaaga

SEQ ID NO: 50567 - DNA, 523 bp, Gossypium hirsutum
  unsure (1)..(523): unsure at all n locations
  Clone ID: LIB3828-030-Q6-K6-G12
gccatncgctcttgcatctgctgctgcggtgcatgctaccattgctcgatcgcttgctggggtgcctgaactggtcccgtagcttcataagatggctgatgggattgctacacgggattataaccgctcagatgactcctcgcctcgatctgccccttacgttgccagctatgcctgatgctactcctgctcctactgctgctcctaaaactgcttgcgcaccttcttcttctccttctgctattaattctgacttaaatggccactcagatggtcaatactttcatgaatcctttcaagaatctcaactcacgcatcaatttaaactgcaataaaaaaagccaaacacatagtctagacctaagttcagatatgatgtctacttgaaagaacacttctcataacatgaatcatgatttgaatgagcaattgcctttgcaggatcctatggaaaccaaaatggataccgcagctggtgacctaactgatgccctagtcgatcccaaacacactattactcaca

SEQ ID NO: 50568 - DNA, 567 bp, Gossypium hirsutum
  unsure (1)..(567): unsure at all n locations
  Clone ID: LIB3828-030-Q6-K6-G9
gctgtctaacccagcttagtcaaccattttccctcagtaccggttgatctgtgaatccaagngggcggtctgacttaccatgttttctacttccgtttacgagcaaagcgcctttagacttggctcatttaaccctaaccaggacggatcaagggttacattacattacattacatcttacagtactaatatgtaaaattcaatgaaaatatgagtgtcaaaaaaaaaaaaaaaaaaaaaaaaaaaaaaaaaaaaaaaaaaaaaaaaaaaaaaaaaaaaaaaaaaaaaaaaaaaaaaaaaaaaaaaaaaaaaacggggggggtccgttttaaaaggatccaattttacgtccccgtgattgcaacgtattaccttttttttagggcccccaaaattaaattaacgggccgggttttaaaaacgttgggatgggaaaaaccctgggtttccccaatttaatcgcttgggaaaaaatccccttttgcccacttggggaaaaatggaaaaggcccacacggatcgcctttccaaacatttgcccacccttaatggcaaatgggacccccc

SEQ ID NO: 50569 - DNA, 575 bp, Gossypium hirsutum
  Clone ID: LIB3828-030-Q6-K6-H9
ttgcttgtgtactatagacatatttttgaacacttcaagtggattgaagaagtacgcacagaacgaggcaccgatgtcattattgtccttgttgggaacaaaaccgatctggttgataaaaggcaggtttctatagaggaaggagatagcaaggctcgtgaacttggagtcatgttcatagaaaccagtgcaaaagcaggattcaacattaagcctctattccgcaagatagctgctgccttaccaggaacgggatctctttcttcaacaaaacaggacgatatggttgatgtaaacctgaaatccagtggaaattcatatcaaaatccagatcagcaaggaggtggttgtgcttgttaaaacaaatactgtatttactacaagcttagcttaagagatagggaaaaagagatccaaattaagtttccgaacttccttcacgttacttagttagataacttcgtcagttggatgaaggggagcaagacctgcaagcaatgaattaataaggtaaggggaataccggaaatagatttttgagacattttctgatacgtaagtcaacaaaaatttaa

SEQ ID NO: 50570 - DNA, 521 bp, Gossypium hirsutum
  Clone ID: LIB3828-031-Q6-K6-A6
aattcgttttcagcgaccttgcagaattcaaacacgatgagccagattgcataaataaagatcatccttcaatttgtactgaaagtgaagaagtaaatggtttgtgtaatgtgaatagtgagtcattagattctgacaagtttgttcaggagagtccagcagctaatatggagaattccatagaaaagtcagggattatctctgatcctattagtatttttggaaatcatggagtagttggtgaaaaagatgggctgcaagtggaatcacttcctattatgcagtctcctattgccaagcttgattcaagcaacaacaaccctgtaagccattgtttagactcgagttctgaagccattaggtggaaatcgatcaggaaggatgattcaaacgagataaggtccaatgcagatgaggaacagcaattggcacatgaaagctctagtagagaggagagtgagacttcggggaagctgaaaaatattattcacatttctgctgttgagatatctttttgcaag

SEQ ID NO: 50571 - DNA, 523 bp, Gossypium hirsutum
  Clone ID: LIB3828-031-Q6-K6-B9
cttctgcttaactctcaaacgcgatggggaaggggggaacgaaataaaggcgtcgttaggttggagagtggtgtacgcttgggtcggtgacgatccttgcggcgatggaaatctgccgccgtggtccggtatcacctgcaccctcatgggtgactacagagttgtcaccgaattagaaggggatgcagtgtcaatcgtggggccgtttcccgttccggtgacaaatttgttcgatcttacaagacttgatatgcataataacaagctgaccggacccattccgcctcaaatcgagcggcttaaacgtcttaaaatacttaatttgagatggaataagctacaagatgttcttccttctgaaattggtgaacttaagagtctaacacatctgtatctgagcttcaataactttaaaggggaaatcccgaaggagctagcgagtctaccggagcttcgttacttacatctgcatcaaaaccggttttcaggccggattccagcagagttaggtactttggagaaa

SEQ ID NO: 50572 - DNA, 525 bp, Gossypium hirsutum
  Clone ID: LIB3828-031-Q6-K6-E4
atcgtggaccacctatcttagaggatgcactgcatctttcgcatcccacggaactcatactgggaggcatggttccattaaaagatgaaatctcaaccatggatggcacactacatacaccagtcaatggagtccctggtctgatcagcaccaggcttaaagatttcctatcattgataagagcaacaacccaaaacagacctaatgcttcaatttcatgagtgaacaatcacaaaattgcctaaaatattcagccctcattttaaacacatttctatcgagctacaaacatcaagctactgctaagctatccagtgacaaattcacaactaactctttacaccatacgcccactttcactgctctaaaagctcacccattcttagccgagaccaatattttacgtctaccttatggaaagaggactccacatgcctcaaatggctcaacaagaaacaagctaactcagtcttgtacaatagctattgcagcataactgtgatgacagaccaactgttcgaagaa

SEQ ID NO: 50573 - DNA, 545 bp, Gossypium hirsutum
  unsure (1)..(545): unsure at all n locations
  Clone ID: LIB3828-031-Q6-K6-F5
ccgggtcgacctcgcgnccgcggacgcttgggctggattgcccgcgggacttggggccatggttgtcggaccaagacgccgattgctacgctaaccagttccaggaaaccggcattaccggtgccctcaattattaccgcaacatagatacatatgtttttcttcccgctaccagtcacctaatatttttatttgctggggtggttatgaaaagttataaaatgattatttaattatttgtaaatttgtttagtcacttaattatgaaaagtcataaatttgtcactcaactattccaatttgtcttcttctttttttgtcaactatcttggatttctaggtgtttccatttttacgttaatcagtcgaagaccaaaaaagacaaaattaaataactatgagataattttataacttttcatagttggatgatcaaaaggaaaaaaaatagttgggtgactactaatgtagattacccaattattaattatgggtttttcatgttagttaaaatacgctctaagtccctttactttttgtaaatt

SEQ ID NO: 50574 - DNA, 534 bp, Gossypium hirsutum
  Clone ID: LIB3828-031-Q6-K6-F7
gccgatggtaagatgcagcagtggttccgggaaggagtggcaggaccgatgttgagttcgggcatgtgcaccgaagtgttccagtttgatgcctctgctccaggagccattgttccagcatcctcagttacccctgaatctgccaaaagtcgtcagaatgctacccagcttaacaagggtagaaacagaaggattctccatggtcatcctgttcctctttctcgatctgatctgaacataacccaagagcatgttggaagaaattccggaaagcaaaattttcaaggtaacaaaacagcttcttctatggtagtttctgtgcttattgatcccagagaggctggtgatggcgatatggatgacatgattgtaccaaaatcgctctctcggatctttgttgttgtgctcttagatagcgtcaagtatgttacgtattcttgtgggcttccgagatctggtcttcatctggtgactgcttaaagggataagagaaaaaggactgctacttcggcttgtagtgtttatatatatata

SEQ ID NO: 50575 - DNA, 536 bp, Gossypium hirsutum
  unsure (1)..(536): unsure at all n locations
  Clone ID: LIB3828-031-Q6-K6-F9
tcttgcgtccggtttttgttctcaaaaacaatttaaaatgtgtgcgttgttaagttaaaaaaaaaaaaaaaaaaaaaaaaaaaaaaaaaaaaaaaaaaaaaaaaaaaaaaaaaaaaaaaaaaaaaaaaaaataaaataaaaaaaaaataaaaataaaaaactattatataaaaaaaaatttttttttttacaggggggggtgtattaaaaaatcttttttttaaaaaaaaaaacacttcaaaaaaaaatctttttccaacaaatttaactttcctcaaattacttttttttcaacaggccttattttataaaacttcccaacaattccccttccttaaaatttattcnccctcactctgtagcggaccatccatcccttggggttttttttttacccgcagggtttcttttccccttcccagccccttaacttcccttccttttactttcttccctttttttttggttcccttctttttttttccccgtcaagctctttttcccgcgctttttttattgttgcgttttttttattt

SEQ ID NO: 50576 - DNA, 526 bp, Gossypium hirsutum
  Clone ID: LIB3828-031-Q6-K6-G8
attttggtccacctcggcttgtggggggaatgggtgtttgcatttcagggaactcatcgagggaggcattgttccatttaaagatgaaaacttcaccaaggatggcacactagatacaccagtcaatggagtccctggtatgagcagcatgaggcttaaggatttcccaacattgataggggggacaaaccaaaacgacataatgttgaatttcatgagtgaagaagcacagaattgcctaaaatcttcagcaatcattttaaacacattcgatgagctagaacatgaagtactgcaagcaatcgctgcaaagtccactaacctttacaccataggcccactttcgttgctcgaaaagctcacccttcttagccgagaccgctattttaggtctagcttatggaaagaggactccaaatgcctcgaatggctcgacaagagacaagctaactcggtcttgttcgttagctatggcagcataactgtgatgacagaccaactgttcgaagaatttgcgtgggggctc

SEQ ID NO: 50577 - DNA, 528 bp, Gossypium hirsutum
  Clone ID: LIB3828-031-Q6-K6-H6
tcttcatttttgagtgggaactcaaaggcttcaatcatattggtgattgatgatcttcctgtgactaatggaagatcagcttttgaaagacttcagaggtgcttggttctgcttgtgagatcgacaagggtaccaacagctatattggtcactgactatggtaatgcatattcatcaggcgtgactgcaagatggttggaagaactacagttgacacttgagagtgctggggctagtaaggttgcttttaatcctataacaaataattccataaagaaaacactctctagaatatgcagacaggagctatgtaatgtggctgctgaagagattgatttgattgcaagagccagtggaggtgacatcagacatgcaattacttctttacagctcttctgtctgaaaccaaatgtggaacttgatttatcatcatccaattctactcccagttgcccaaaagaaaatgcaaatgtgctcaataagttcagcggtggattttcttcacaatatggcagatatgaaaccctg

SEQ ID NO: 50578 - DNA, 533 bp, Gossypium hirsutum
  Clone ID: LIB3828-032-Q6-K6-B7
cttcagagtgcaaatcttcaaggcaaatacttgccatctttctatagatagtagatttcttactaaaagtctatattcttgaagtaccgatgtccaatacctatgttagacgcatgtctggatatagatatagagacatggtcctataaagactcttcaaatacatggaactcctgaaacagaaaaattgaacatatccatatcggacattcacaccagtgcccaagtaacttagctaaatgctactatttactgttaaggtttaaatattgatgtatcatcatcaattacattgttgcagatgcttctttgatagattgtagcttctgcggggctgatcttcgttctgcacacttacagtggattcactaaattaaaatcaacaagcaaaggtggttcattgaattgaatagaatgtacatatataaagtaggaaattacaagatcttaggttactataaattccttaagcttgttggaataatattttcagattcgtgattgtttgagctataatggtttggttgaatgaa

SEQ ID NO: 50579 - DNA, 514 bp, Gossypium hirsutum
  Clone ID: LIB3828-032-Q6-K6-B8
gagagtctaaatgtggaaccaattgctgacttggacttgtttttcgagcggctctatagctactattgtgaaaaggggctttggtgcataattataaaatggatagttgaacttctgagtgtgggctttaccatatgtttctcagggtttttcttattgtttgttgattggaatggtctccacaatgcaaaatgtgggatggatgcggttgagtctggaactaaaccgtgtgatcttgctaaggaagcacttcaagagcacccattaactcccttaacactttcaaaagctattgttgttggatatttggtgcttttttccgtctattgggtattctgttttttgaggttttttgcacaattaaaggataccctcggtatgcaacatttcttttataacagtctccatattaccgacagtgagattcagaccatgccttgggcaacgatacttgaaagggttgtccgattacaaagttcttcacaactctgtgtggtcaaggatctttctactc

SEQ ID NO: 50580 - DNA, 526 bp, Gossypium hirsutum
  Clone ID: LIB3828-032-Q6-K6-E9
cggacgcgtgggcggacgcgtgggttgaaaaatacgattatgcatggaatataggttctaatggcgcacgtcgccccaatgatatccttcggaaactagataaacatgtatccaacaaaagacatttgcccatcaaaatcaaatcaaacaagcaagtaaatggaagatgccggaggcacttagatcaccgtggtggtggtggtgatattacatacatttgtggagcagccacttccgatggtgctccttgtgagagaccggttagtggaaatggaagatgttggcaacattcgaattatggtcgcagtagtagttccaacaaaagacatgtgcccgtcaaaatcaaatcaaacaagcaagtaaatggaagatgccggaggcacttaaattatggcggggacggcggtagcagttttacttcacggaacttaaattatggctgctatgacagcagttttactccgcggtggttggaccatggtggtgatgatattatattaatttgtggagcaaccaccgacaatgg

SEQ ID NO: 50581 - DNA, 526 bp, Gossypium hirsutum
  Clone ID: LIB3828-032-Q6-K6-G6
gccgcttctgcagccaccatctctcccactactgctcacgccgccaacaccatacgccgcgcctttcacagtaatcctttcaattctctctcttcttttcatcactctattctctgcgctcgctttcgttgcctctcgctacgctctttcaccgctgtttccaccaaagccatgtctcaccctcagaccctcgatgctcctcaccctcaatcctctgctgctggcaataagcaagcactaatatctttgtctgacaagaaagacctggctttgcttggcagtggccttcaagaactggggtatactattgtttcaactggaggaactgcatctgccttagaaaatgctggtgtatctgtaaccaaagtggagcaacttacttgtttccccgaaatgcttgacggtcgtgtgaaaacactacatcccaacatacatggtggtattcttgctagaagagaccaaaaacatcatatggaagctcttaataagtacggcattggtacatttgatgtggtggttgtgaact

SEQ ID NO: 50582 - DNA, 519 bp, Gossypium hirsutum
  Clone ID: LIB3828-033-Q6-K6-A4
ccccgctttcgaaaagagcctacaaaggttagtggagtagcagtgtgtaagccagcattgaagtagggaaaatagattaggtggcgtataaacacttgttaagttagtatttaaacaaatatctccacgtttaaggcagtagtaagttgtgagtgtgaagcttttttgatgcattaaaggggggaaaacatttctttaaataaaaagatggtgttccgtagctaaaggctcagtgaaaagagcctacaaagtttattcgagtagtcaagtgtctgccagcattgaagtacgtcaattgttaatttttgttattaccaataatgaaatcgttgatcacatttgtcgtctggctggtttggtgaaacgtttggagaagactggatatctgattgcggatggtgaagaagataatttagcaattgtggtcgcggctgtgggtgtaacacatgctgactgcgcaggttttcaaacgtgattttgttgaatatgggtcactggagaggcttaccctttacctaa

SEQ ID NO: 50583 - DNA, 514 bp, Gossypium hirsutum
  Clone ID: LIB3828-033-Q6-K6-A9
ctgacacttagatcaacgctcaggggggggaggagagttcctataaaaacgagtgcctgccaagcccgtacaactgctacttggtctggtttcctacatgcaatagcgtccgcagcaaagactgatggtactccattgagcattgctgatcagaataaaaaaattcctccttccgaggcggggggcgcaacaccttgaggctgatccggggctgaatcttattatccgcaccatcaatactaaactttacggcttcccactgtggcgctcacacaataatgctactgtgttcaaaatctaactgctctaacgcccaaccacagaataaccgattcatagcccaaactccttctgcactcacatgacaccttgagacgactgctaatttacggggtgggagatttaccttggtaagcatatagttcctatatagcctgcatatagagatctttacttatgatatgttactcaggctccaaaacgtggtgtaaaattctctggacagggtaatata

SEQ ID NO: 50584 - DNA, 532 bp, Gossypium hirsutum
  Clone ID: LIB3828-033-Q6-K6-B7
gcccctctttctcctccaacaccaccggggaaagggggcggaatacatctggaagcatctccatctttggaggaaaatttgagggccacaactcctgccacacctatacctccacctcccccttctcctgcacctattagagctggatctcctgtaaccccaccaccttcacctcctcggggggggccacttttgaaggtaaattcagcatctaaatctgcacctcctccacctccaccacctcctcttcatgccaggcaagtggcatcttcagtaccaccgccaccgccaccacccacccctgccttggcatcaaaatctcaagttcctgctgccccaccaccccctgctccttttggtaaaaagacaaatggcaattttccagaacctcaagcggtaggtagtagtggatcttctgctcctggacgaccatcttttacttctcctacaaattcaaaaaacagacttctttcacgtactattagttcaaagagtcatcagacaaagaaattaaagccgttgcattggttga

SEQ ID NO: 50585 - DNA, 372 bp, Gossypium hirsutum
  unsure (1)..(372): unsure at all n locations
  Clone ID: LIB3828-033-Q6-K6-B8
atccgggggtggggggngnngnnnngggggggngnggggggggggggtgttttggggccttggcgcnnaagggtaaaagtcccccccgggcccccaaatgaaggcgggaccttttggggctcgggggttgccttattgtgtgttgttaaaaatgggggggggggggcccacngtntttaaaaagcaaaaaaaaaaaagaaacgaaaccgggtgagcttgctaaggaagccctcgcacgagcacccnttaactcccttaacactttcaacagctattcggggttggagagggggggcgggggcccgtctcttgggcggccggctctgggcgggggtctgccctttttagggagaccccccgtatccaacattt

SEQ ID NO: 50586 - DNA, 569 bp, Gossypium hirsutum
  unsure (1)..(569): unsure at all n locations
  Clone ID: LIB3828-033-Q6-K6-C6
cgggtcgaccctacgcgnccgggaacagtctttcgcaatcgggggcactactgggagtagtcactctcgaattagtccagtaacatcagcataagtctcataccaactatcaccagctcgcctaatccatgaattctacctcattcgcatcaatacttgtccaagctaaccgactctcctttatcatactgggaacctgccattataacttctcaacatacgtgacggtaatgaattccggttcttctagggatgctgattcaccatactatgtttccttaacctgcgcacgggttcataccgaacgctgagtatagactactgaaaaggactatctatactccggatccttaatattatgacaaatacttaatagcatcttaacatttacaatggttcaatatctttattcattgataaaatttaactacttaccatttaaaccacatacaattcatattgtatacacaatagcctagtaggtcaatccttaactaattccattattatttactctattgttttatttactactcggattatctatacttaatttactcacaaggcaa

SEQ ID NO: 50587 - DNA, 525 bp, Gossypium hirsutum
  Clone ID: LIB3828-033-Q6-K6-E9
cggacgcgtgggcggacgcgtgggttttgatgtggcatttcaaagaaacttccagaactaaatgatttaattttttatcttttgctacagagttctggatgggccccttacatctgttgccttcctcagcatggggaaattcatagcacgattttctggagtgaatacgagttgaatatgatttgccaaagttcagtatcaagaaacagttaatcaaaaggctaaaatagaaaaagattttgctgcagttgtgcctgcccttcagcaattccctgatcttgaaagcatcacacttcaggatttcatgtgtgcatatttctcagtaacatctcgagcctgggaaagcacaaagggcctatctctgattccatttacagattttatgaatcatgacgggggttcaaaatcaattgtattattcgatgatgataaaatgttttcagaggttattgctgatcgtaactatgctcctggtgaagaggtactgataaattacggaaaatttccaaatgccatgctactgct

SEQ ID NO: 50588 - DNA, 523 bp, Gossypium hirsutum
  Clone ID: LIB3828-033-Q6-K6-G8
aaaagttccttggtttcagtttctccgggcgggggggttctagtgataaaaaaacaagttcactcgtcgcaaattataagcacattcgatcttgatctggatctgactcttcaatttattcatttgtcgaaaatttcttctccaatttcgttttatttccaattaaggtcggtctggtaggggggggtctgggttccagatctctccgtttcaagtaagaatctccgtcaatatttttctacttttttagttgcaaagggaatcgaagaattattgggaatcgaatgttagtttagggattttcaattttgggagtttcgattttaagaccaaggaggttaaccaaaaagaaaagaaaagaaaagatgcatgcaaaagtggcacaatcatcatttagagatcggacgcaagaatttcagagcgtagcagataggttaagaaagtcaatctcgtctgggcagggccaaaatgggccgagtagtagtacgtcgagagcggaggaaaagagatctatggttgcgca

SEQ ID NO: 50589 - DNA, 526 bp, Gossypium hirsutum
  Clone ID: LIB3828-034-Q6-K6-C4
gttgactggtgtgttggtgaagtgcgaaaactagcagctgggggtggtcattccgctgtattgactgatgcatgttctttgaaagaactttgcgagtttaggcttgcagagtgtgtgaccttatcaaatgctgcacggataggggatgttgcttctcgaactggagcagatgctttagcacgtctttgcgagagactgagggaacatcatcttcatggtggtggtttcgacgatcaggatgacatcagcaatatgaagagctgactggtcgctacgaatttcgtgttgtgaccttcattaccaaccttagaattgtaggataattgtgaatcaattcaaaatccatccactgtattggttagaacagtatagcagaaactcaaattaaaacatgaactcaaataacaggcttgtttagtatgagttggtggaacttgaaagtttgtatggcttgataattggaaggcttacaaacaaacattcacccctaacaaaatcattctgtttctttttgtattttgagctg

SEQ ID NO: 50590 - DNA, 547 bp, Gossypium hirsutum
  unsure (1)..(547): unsure at all n locations
  Clone ID: LIB3828-034-Q6-K6-C6
ccgggtcgaccttgcgtccgatgatatttggaaangncnntgaggggctatctgaagcttaatttgttgcttttgtcctcttcaggtaaggaggggttaatcagttgggtatgatccatctagaagcaaatgatcatataaaggacatgttaaattgtcaataatgcatttaatggtaaatggaccatacaaatgactgggggcttatatcaatggagttcacaagtttgctttttaacatgtgctttttttaacatttttggtggataaacaggacaccgtgcgaaactagatcattattaatttatgatacttcgttgtctttatttttactttggtgctagaggctatatgggaagttaaagaattgttagtttctgcatttttgtttcgatgaggaaattttacaagatttagattttagagaattagtcctccttaccctaaagaaagaccaactgttcatcaaagtcaattttatatgtcatgtaaaggagcaacatgcaaaggatacatgtattcagtaacccaggaaaacatttcataa

SEQ ID NO: 50591 - DNA, 557 bp, Gossypium hirsutum
  Clone ID: LIB3828-034-Q6-K6-E5
acgacgcgttctgtcttttatactggggtgcactgtgaaaaacttaaacttagatgagttgctgaggacagctgaaaattacatatttccggggaaaactctagttaaggatatcgcctacatatcgcataatatattcttgtacaagctctatgcttgatctcatttttcaaattttggcgcaccaggggagatctcccttcatactcgattgacagtatctatacactaatactaagatacacccttttactagcaaaaaaataaatcattcttcgacaagggatatgaattattattggactaaagcattatatcaatgctgttaaaaaacccactgaatacaagttgtgctgggatataattcataattcactttgcaatgataactgaagaactttactgaaaggtccaaaaacgctcggatacaaactacatcacttatgggcaaattatctggaccgctgacactattcttaagaatcttgtacgatcaaaggggatgaaaaagtacagtgcctccagaagattaccattctcaggataaatgatgaaag

SEQ ID NO: 50592 - DNA, 607 bp, Gossypium hirsutum
  unsure (1)..(607): unsure at all n locations
  Clone ID: LIB3829-017-Q6-K6-A5
ttatgggatcaatgatgccaaactttatggaaggtcatattagctcaaaagagaaaattgacattgagatgggaaataggcttgctgaagatactggttattcacttcctgaaattttgagaaatttggaatttgatgattttgaggacgaattgatgataaagcaggaaggggaaagagatatggattcattgtttcttggagggcaagatatgaaaccatcagatgaagtctccattccggggggtgaaacagttagaactgagcaaagttcagcttctaaaaatggagatggagaatttatggaaagctacagtgcaagaaatgaaacagatacgtcagggaaaccaataatgtagcaattctcatccaacaaaattgtcgccacttcatgtagaactgtgatcttcgtgttctctctccttttaagttaaaattctagtgctttttttatttaaaactttggaggcaaacactggcgtaagtgataattaaacaagtttttgttaataacagctttgcttgggttgggttattttgaaattgatgtgaaggatctncttgtcttgtgaaatcgcagtggagtgcagctttggaggagtgcaag

SEQ ID NO: 50593 - DNA, 315 bp, Gossypium hirsutum
  Clone ID: LIB3829-017-Q6-K6-A7
tcggttacaacactgatttgcggggccaaagaattaaaaaagcttgtcaaccttagtggacaactcgacaagataaaacatgtgatctgtatggatgatgagattccaactgctgcaagtggtagatgggcagtcacttcttttgctgatgtccagagaaccggctatgaaaaccctgttgatgctgatttacctattgcagctgatgttgcagttataatgtatactagtggaagtactggattgcctaagggtgttatgctgacacatggcaatatactagctaccgttgctgcagtcaggacatttattcct

SEQ ID NO: 50594 - DNA, 596 bp, Gossypium hirsutum
  unsure (1)..(596): unsure at all n locations
  Clone ID: LIB3829-017-Q6-K6-B3
gnaaaacccaaaatctctgcaatttccccgccgtgcctgaaaaacgtaaacaaaaaaacaaaaaacccatgtcggctaggttactgaagaaagtcctgaaagaacaagaacaaaagaaacagcacgtaatcgaggaagatgagcaagacgagcttctaaacgacgacgaatcggtgtccccagattccggcgctggttcttctaagaaccctttcgacctcctcaacgaaggtgatgacgccgatgaagataacgccgaccaggtttatgctgatgagacctcaacccgaaaacaagaaccgccaccatcagtgaaaaatgctcttaattcggcttacacatctaataacaaatcgaagaaaaagaaacaaaagaaaggaaaagagggttctttgagtacgggtaaacgtgaaacacccttggatgtgaatttagaagctttagctttggatattgaatcttctagtcaacagtcgggtcttaataaacaacccggatttgaaaactttaagcaatctaaaccatctgtgttgcacgtggatcctaagtatctgaatgtcgagaatgagctgcggagaatatttggttcaaaggtg

SEQ ID NO: 50595 - DNA, 508 bp, Gossypium hirsutum
  unsure (1)..(508): unsure at all n locations
  Clone ID: LIB3829-017-Q6-K6-D10
gagaggtgtatccaggtgaagtgttggtggtggataaaaaagaggtgttcaatcagtttgcttgatgccccaccctgaaccaaaacaatgcatttttgagcatatatattttgctttgcctaattctgttgtttttggaaggtctgtttatgaatcaaggcatgcttttggggaaatacttgctaccgaagctcccgttgactgtgatgtcgtgattgcagttccggattctggcgtggtggctgcccttggttatgcaggcaaagcaggggtgccattccagcaaggcctgatcaggtctcactatgtaggaagaacttttatcgagccttcgcagaagattagagactttggagtgaagctaaagctttcaccggttcgtggtgtattggaaggtaagaggattgtggtggtggatgactcaattgtgagaggaaccacatcttcaaaaattgntaggttgattaaagaagcaggggctaaggaggttcacatgagaatcgcaagc

SEQ ID NO: 50596 - DNA, 568 bp, Gossypium hirsutum
  Clone ID: LIB3829-017-Q6-K6-D5
tccaaagcttcttctgggtctctttttcaacatgagaaaactacaaacaatgcatttgcatcccatagttcacatgtcaacagcttagaaccaaggatcatgcctcgctcgagaaaccatcagcggagattgaaactatgggagctttctccacgctagggttccctgactttcctggagctcgggagcatgctgtacaatgttgggttcctggttataatggcgacctgttgagcctgaatgttgttaatgagaatgtctcggacaagaaccatgatttctactcaaccaaacacaatgaagattttgctggtttggagcagcatattgaagatttgactcaggaaaagttttcattgtaacgagcactcgtggcctcacgtaccattgcggaatctatcgctgctgaaaaatcatccttgactgattgttgctatcaacagagaagtgttgtctaccagctaaaatccgatctggtgaagttgcaggaagaaatcaagcccaactggcagaacttgagtcttttaaaatggaattcacatatgcacgattggtatgtaatgctgct

SEQ ID NO: 50597 - DNA, 431 bp, Gossypium hirsutum
  Clone ID: LIB3829-017-Q6-K6-E2
tctcaatgtacaggaaaggacaacagaggacctgaactgctatcaccataatacacactctattcaaaaatgtcatgtgcgttgatggactgtgtagggtgtgagaaatgggcactttggggaaagctgcaagatcttgggctcggaactgccttgaatatacttttctctgttaatggcgaagaccactcgcctcacacattgaacatgcaacggctcgaacatgattgccctgattaatctactcaatctactatgctccatctataaaatttgtccatgaaatgggagcagctcttgtaaaactcaatgtaggaacagcaacttatactacgtttaacagactggttcaacatgtatgggcgtcgattgttaagacataggtcctgatccaactccgaagaactatattgctcttccgaaagctacat

SEQ ID NO: 50598 - DNA, 517 bp, Gossypium hirsutum
  unsure (1)..(517): unsure at all n locations
  Clone ID: LIB3829-017-Q6-K6-F7
cggnacgcgtgggcaagacgcgtggtgcggtcgcgtgagngaaaaattaaaatcctttgaaagaggagaagagaggagctcctccagctcacgcctacggccactgggcctgcacgcgcacacacgccgacgtacacggccgttggaaggctaaaagccttcatttttcttggctaatcgaatgtaatgccttcttccttttaaacatcaacaattttttttgcacaaacgattcgtatacacgttgaacaatacataacattagtataaaattaaatcacctttttttaaaaaaaactgcttgtatatctttgaatatatctgagtatatattgtttctttttatctaaaaaaaaggggcccttatacacattagtgaataggctcttatagactttagtgaatcgttacatttacaaagaaatctttgatttcttttgcatgtttatttctcttttctgctgcagctctgttttttttgcaggcgccatacaggaatccggtcatgactatttac

SEQ ID NO: 50599 - DNA, 611 bp, Gossypium hirsutum
  Clone ID: LIB3829-017-Q6-K6-F8
gcgttcgtgcagcttcaccgtattattatttgcacaatgtgctccctattttgatcaagcattctgtagttgaactagttgtttctgatggtggatgcttgcaggcaattcttccatcggatcttgaagagtatcaaagtcttagatgtagggttgcttttcatgccctgaggttccgacaagatgttcaggacctggcaactaatatattgcatagattaagggctcctggaagaccatttattgcttttgatcccggtatgacaagagatgctttagcctatcacggttgttctgaactcttccaggatgtgcatgctgagctcattcagcacagaagagcttggatgagaaaacgtgggataataaaggggcagctttctgtaaattctgctaagcaacgtctcaagggttcatgcccattgacgccagaagaggttggtattcttcttcgggcatatggatactcatgggatacaattatatatgtgtctggaggtgaagtttttggaggccagaggacattgatcccacttcacggattgtttgaaaatgttgttgataggacttccctcagcacaagctgggagctgagtagaatttatggtcgt

SEQ ID NO: 50600 - DNA, 366 bp, Gossypium hirsutum
  Clone ID: LIB3829-017-Q6-K6-G4
ctttactcctacaaggtcacgaggatggggtgacttgctccgatctgcacacgctcgacaaaccaggtacatcaagcactatgggggacagattgcttgttggtttcgagcatgcgtaatcagtacagttgtgccaagacaactcacttttgcggggctgtagcgaatggaaggcttcttgttgatggatcggaggacatgaataaaccgatagaaacgatgatatggctaacatgcacttcagccatgagtgtatatactgtattattcaacatgttcgtatgtatggtacaaccactgaaactatatactgatggcatgccatgctggaaatcaaacagcacagatgtaccaactatcccattg

SEQ ID NO: 50601 - DNA, 428 bp, Gossypium hirsutum
  Clone ID: LIB3829-018-Q6-K6-B6
gcagttcaatcctcaaagctcgtgtttctctatcccacctggtctgggacatggtggccaagcacctggtcttaatagtgttacctctgcaagcttacagcagcaaccaaactcaatccaccagcagtctggtcagcaggcattggcaacaagtgttccgaaggatgctgatgttggcgttgcaaaagttgaggaacaactgcagagtttacctgatggttcaagttctgaagctattccaacttctgggcttgccaaagatctcatgaatgaagatgatttgaatgctccatatgcagttgattctgctgctgctgcaataggtttttagcagcaacctgctggacttttacctgatatccctgcttttattatccatgtcctaccagtcttgcaggttttttcatctgcacacatgattactagct

SEQ ID NO: 50602 - DNA, 336 bp, Gossypium hirsutum
  Clone ID: LIB3829-018-Q6-K6-C10
caatgcccttgctacatttcaattgtgagcctattattacctctgctctgtgccaaacggttatatgcttaatgaatccgaaaatgtcacaaaatcaaagaatgattcttaaacatcattaatggttatgaagaagtcctaatcttataggaggaagttttgctggtctgctgtgtataagggtgtactaattatcctctgtggaaaacatttcaagaattatattttgcctactatattgtacgagtaacattgatcaagttttctggatgcctaaataacggtgctgttatggtcccattaatgaaattgggttattcttttttccgattgatg

SEQ ID NO: 50603 - DNA, 606 bp, Gossypium hirsutum
  unsure (1)..(606): unsure at all n locations
  Clone ID: LIB3829-018-Q6-K6-C7
gaaccattggcatgtgatcatggctaggaagtatagagaacaatcgagtgcctacaggaggcggaagctgagtcaatctgtttatagaaagatggaagaaactccgaacattgtctgcagagatgcaggaacaaaggcagaaccagccccctactgtctcaatatttcggatagacgactaggcattatctcccactatcagtttgggatcttcaacggtggtgatgcaggtggggttaatggtgggtcaaatgtttcaccccacatgaccagtgagagagaagcaatcctaagcagcgaggccccttatcgtaatgggttttgtgcacaagcacaaccgccaccttttgatttcttccctgatcttagcaatgacatgatgggcatgttcagccagaccagattttgggataggcccatcgatgaaacccaagtccgtggctactatccccagcgtcaacatcagcagctgcacccttcacacatgatgacaatgcaacagtcagagntcctcagcttccaaagtaacacagattccacagcatcaataacacctcaagtttcagccattgaaccttcatcattcgtggcaggaagcagtaacta

SEQ ID NO: 50604 - DNA, 453 bp, Gossypium hirsutum
  Clone ID: LIB3829-018-Q6-K6-D1
ggagtctccggaatattcttccgttagtcgcgatcgcgccgggcggtgatcggaatctgattggttttttgttcttctttttacttttttggtgtgtgcgaatcctttattttttgtcagcgaagatggtgaactctatggtagagagagctacgagtgacttgctgatcgggcctgattgggctaggaatatcgagatctgcgatatgcttaatcacgaccctgggcaagcaaaagatgttgtgaaaggcataaagaagaagcttggaagtaaaaatcctaaagttcaacttcttgcactaactctgctagaaactatcataaaaaactgtggggacattgtccacatgcacgctgcagagagggatgttcttcatgagatggtttgaatagtcaagaaaaagcccgactttcatgttaaagagaagatcattgttctgcttgacacttggc

SEQ ID NO: 50605 - DNA, 597 bp, Gossypium hirsutum
  Clone ID: LIB3829-018-Q6-K6-G12
ctgcgatgctttagctgaagaagtgcgagattcacctcggtttcaacgaatgttaacccagcggcagcatcctttagaaatgatttgatacatggggccaataacaatgggatgcaccaattttcatcagggtttaggccagagttcggtggtttagagctagtcgacaacctcaactcaaatgggcaaaagccaaggctacagttatggcttgacgaagctaattctcaagttaacccatttggtatccccagtaatgcaaacgctttcttagcaccaaaatctacaagctttcctgacttgggaatggcaccaatgaacatgtttggatcactgactacacaatggctcggcaagtacccagaagatgcatcatttgcaggtgcaaacctcaacatgtcagcattgcgacatggaccaaaacaagaagaagagaacaagggagatttgtctgaatccataacatctttgtattccaacaatagtctccaacaacaaaactacactcacatgtcagccactgcactcttgcaaaaagcagcccagatgggatctacaagaaacaacccagcaattaataacagtggctttgggtta

SEQ ID NO: 50606 - DNA, 175 bp, Gossypium hirsutum
  Clone ID: LIB3829-018-Q6-K6-H12
cgggggaacgaagctcattattcgatcagagaacaagccaattcattcattaggcagactcagagcagagctcatatctttctattcgagatccaaaacggaagtcgctacattagcgcctatcaccatgctaccattatcgatcttgcgaaaaagctcagagagaaaataccct

SEQ ID NO: 50607 - DNA, 334 bp, Gossypium hirsutum
  Clone ID: LIB3829-018-Q6-K6-H6
ggcaatgccatatgaagtggggagacttatcactctatgcaagggactgcgacaatgggagagttgaccctaaggactgtgctggagttatactttgtgctgctgaacgagccactcaagttgctttgcaggctatacaatgtttatgtggtaacggatatgtaaatgagtacacaaccggccgtctgcttttagatgcgaagctgtatgaaatcggagcaaggaacaagtgagataagaagaatggtgattggtcgtgagcttcaaaaggaggagttagagtcaaagctgtagataacaataccaaaaatctgaatgtagcgtacaataataa

SEQ ID NO: 50608 - DNA, 525 bp, Gossypium hirsutum
  Clone ID: LIB3829-018-Q6-K6-H7
cgtctcttaaaaaaaaaaaaaaaaaaaaaaaaagagagaaaaaaaaaaaaaaaaaaaaaaaaaaaaaaaaaaaaaaaaaaaaaaaaaaaaaaaaaaaaaaaaaggggcggccggttcgcgggaaaaagaaaaaaatattcttaaaccgttgggggggaaaaaaaaaatttggttttgagttctaattttggtttttcctttgggaggggccccttccttgcagcttaattttaaggccctcttttgttcccttcctccgtggtttttggcttttgggcccctttggggtttccagcctttcacaaatctttttggaccgatttttttgttccttaaaatcctaacccaaaatttttccggggcgagactagatctttttttaaaggaatcgccttaaccagtttgccttttacggtcatttgcaaaaaaccacttggattttcatttccaaacagcacaatttcgattttaattggaaaaaggaccaaaagggaaggccctaatggaaatgaccttgtttttaaa

SEQ ID NO: 50609 - DNA, 612 bp, Gossypium hirsutum
  Clone ID: LIB3829-019-Q6-K6-A10
ctcaaatctcttcaatctgggttccttggccggcatctctttaaagcaaagacatgcccatccagttcttctcccatcaggaatattgttgtgaatggttgactttacggccaaaaggttttcggtcagatcccagaccaccagaccagtcgcaaatgtggaactgctactatcgaacgctgcgtcgaaatagaccgccgttcctgccataaggcataactgaaacatcgacattgggcatcgttacctctcttgagaacccagggcagtcatgaaagatatggaggttgtattcttcccaggaacaacatcgggggcacctatcatctgatattattcttttgaatcggagattaacaaagtttggaataaaatcccaggagattctccagataatgattataattttagggggtagctgtaggccccatagtttcttgtagaattctttcatttcggtctgtattaaaaaattcctaagatccaggctagcattatgtaatagtttataagcactacgtaccgagaactcgcctgatagctctccctttcatacaagcatatcctcgtggtcagtctctgagagagggatctctacaaattctgagcaac

SEQ ID NO: 50610 - DNA, 216 bp, Gossypium hirsutum
  Clone ID: LIB3829-019-Q6-K6-A11
ctctcctggttttgaaatcttgtgttgtgcttgcaaacttcttgatgaggatactggttccatgcatttattttacatgaatggcagattaacaaagcctgccttgaatcagagggacaagagtactgtaaaaaggataaaatgtttggaagatgaaactatatcaaagcacacctgaaaggtgtttcaatctaatggtatatcatgttgtggttg

SEQ ID NO: 50611 - DNA, 602 bp, Gossypium hirsutum
  unsure (1)..(602): unsure at all n locations
  Clone ID: LIB3829-019-Q6-K6-A6
tctggaanagtgaggcagcagaagtgttcagatctccggcgagatccgggtcaaggaaccaggttgtgggtaggtccccgacccgaaaaattgaccaatcgcctggcagaagaaatggggttgtgaatggggggtcagcatcagtgaggttggttcatagcagggaacccacagtgagacgtgggtcaagacccgacccgacaaggaaggatccgggtgagagttcaggaaggaggtcaaggtcacctgctgtgaatagatctgtaatgggtcggagcccgtctggaagaaggaccaatcaatcccctggtagggccagacttgatccgggagagacgggtaatagcaaaaaagtggagcagcagcatggtgcaactactacaaccaccatggaaggaaaatggccaagtagcaataacaatgcagctacatctagtgctccaaatgaatcacttgaaaatcctcttgtttcccttgaatgtttcatctttctctagagatgaacgaagaagtgtatcttaagttcaatcaccttgtctaattattgtttgtttgtttaagattgtgaatattgattgaacattgaagtcagaggtcgttcg

SEQ ID NO: 50612 - DNA, 610 bp, Gossypium hirsutum
  Clone ID: LIB3829-019-Q6-K6-C4
gaagccatggctcctcttctgttagaagtcatctgtggtttgaaggtgttgactggaaagggatcagagatcggacttgtcctgttccacaagagttagcttctcgtgtagctcaacatttggaaatacattctgaggattgccctgttgctgttgcttccccacctcaggatatagcagaactcaatgttccggagtggcttgatgattggtagaagaacgatttatatgcatttccatcctttttgccgacagtttccaagtggagttctattccttgtggcgagactgactaccagtgcgtcagaaactaggcagagatttcattgcagtaattcaagtataaagttgccggccttagattgcttataattctgtgattcctttttttcaatgccatgaattcagagtagcattggaagaatatctcagctaggtgattgttctctgtttccaagttggccatataaccaattcagtggatagctccattatcaggcttttattttaaaatctccaatttctttttttacatatttcccacttttttaaataggtaaatatgtaaatgagggtttcttgtaaatcaagctatctacattggtagcac

SEQ ID NO: 50613 - DNA, 600 bp, Gossypium hirsutum
  Clone ID: LIB3829-019-Q6-K6-C5
ctctctctctcttttaagataatcaaattctctagagagaaaagaaaaaaaaaatggggcaccattcttgttgcaacaagcagaaggtgaagagaggactatggtcaccagaggaagatgagaaactgatcaactatattacaacctatggccatggttgctggagttcagtccctaaacttgcaggcctgcaaagatgtggaaagagctgcagattaagatggataaattacttaagacctgatttgaaacgtgggagtttctcaccacaagaagcagctctcatcattgaactccatagtattctaggcaacagatgggcacagatagcgaagcatctacctggaaggactgataatgaagtgaagaacttttggaattcaagtatcaagaagaagctaatctcccatgatcatgtcccagctttggcttctttcgctgatgttcatagctcaaaccatacggaggaagctggtttcatctctctaaatgcaaaccctaatttgatcctcactgctcaacaagaccagctttatctttcccccacagcacctgttctacaaagtttcggtcaccatgcagatttggttcaccatcatt

SEQ ID NO: 50614 - DNA, 596 bp, Gossypium hirsutum
  unsure (1)..(596): unsure at all n locations
  Clone ID: LIB3829-019-Q6-K6-C8
ctttttagaatttttttagtttctatcatgatatcagtcgctcggtgatccttgggcatggctatcacgcattctcctgattctgactctgttgagccaagtggctcggtgttcaccggtggtcggatcatcacctcctttcctcgacatgatgttgtcaagcttgacgaggttacgtttatttagtggcaacagcaggtacgctttatccttgctagctatgttggctgctccagcgaggtttgttcaagcctccgatggcactcttgttgccaatccgactgcatcgatcttcactcaacaagataatcttctcacctcgtggttgttgtctacgattagttcgtcgtttttatcctcctttacggacgtccgatttgcatgtgatgtatgaatgatggcaagtagtttgtttgcggccgacactagcgcaaagcagtctcaacttcaccatgaactccattctctcaagaaaggtagtctctccatccgtgcttatgttgataaaatcaaaggcctgtatgctcttcttgcagcatctggttctcaaatctcggaagacgagaggacggcggntntgcttgtgggcttgtcgt

SEQ ID NO: 50615 - DNA, 600 bp, Gossypium hirsutum
  unsure (1)..(600): unsure at all n locations
  Clone ID: LIB3829-019-Q6-K6-C9
cggncgcgtgggcttngaggtccacttggatttggtttgttgatgagctgccgcatagcacaggcctttcaactatactatgtatttgtcaagtgtacttaagggtgacaactttgagggaactgtgggtgcccaaagaggacaatttcggcatatgttcttatgacatggcccatgctcagcaggcggagttaggttgtgacataaaaaagcacacatgagggtgacagaactttatgaacttttgagtgcccaaagtggacaattccagcttatgctttcacaacactgccatgcttcgtgggttgggtcatgacaacaaaagagactcttttccccctttttgctagatagaagagatgattaacttacaaggaggcgtttaccaccaattagatctcatatgtttcttccattgattcttttgccatgggttgctggcgctgcagttattcatgagaagaagcctctcaattacagatgtcactttggaacttactggacaatacccgttgtatgtcttcactcattatatgttgctgttctgatggggttcacaagggcaattcggcatatagagtttaggtttcatgaactcag

SEQ ID NO: 50616 - DNA, 587 bp, Gossypium hirsutum
  Clone ID: LIB3829-019-Q6-K6-D2
aaaaaacgaaaaagcatcccttcctcatatctctctcctcctttggaactccaccgagcaacacaacccaaatatttgttattattatagatatgaacatagggagtatggattcttcttccggtcccaacaattcccttgctttctctctttccagccatcaccaccaccaaaatcatctcagcttcttctcttcttcttctaaccccactctctttcaagctttcaacacttccgcagccgccgccgtcccaacaacaacaccacccgcaaactcgttatcagccgaaaaagatgcaggtggcgaaggtccagctacaaccgctagtgcaacaacagacttgtccatgtttaaaggtggcccgaaactcgaggattttcttggcggttcttctactacacctggagttggaggtgcacctcaactgcagttgcttcatcatcataacttctctactcaaacacccgtgactgtttctgacaacgatatatatgattctgagctcaaaaccattgctgctatatttcttcgtggattttcctctgagcaaatcgatattcacaaacaacagcaacaagcacctata

SEQ ID NO: 50617 - DNA, 585 bp, Gossypium hirsutum
  unsure (1)..(585): unsure at all n locations
  Clone ID: LIB3829-019-Q6-K6-D7
ngattgtttcaattggatggaggcgttaccagaccacgcctgtttatgccattgaggaccaaaatggaagacatcgcatgctcaagtatactccagaacatatgcattgccttgctatgttttggggccctcttgctccacccaagactggagtgcttgctgttcagaatttatctaacaatcaggtcactttgctcaattttatgtacttttcatgttatcatccttataaaatatggaacaagtgaggatggtggtgagtgataatatagtcaagaatctgggaagtcttcacagtaccgtctggcagtttagtccctctcctaaaaacatagccaatttaatcttcgtacttttaaaacttaagcaaaaagatataatatgtaactgggtttggtgaatatttaaatattgttgatgtgccggtaaaatggtgaccatcggaaattaaagcctacatcaccacccagttatttattggttctggtggatcattgttatacagagaattaaatattcttcttttactaaattagatgtggcctctaatacaatgagaggtttaagtggtaaaacttttttgta

SEQ ID NO: 50618 - DNA, 221 bp, Gossypium hirsutum
  unsure (1)..(221): unsure at all n locations
  Clone ID: LIB3829-019-Q6-K6-E5
gccgcttgagcgtatcttagactgaactgattctttaggattgttttgttgngaagagtaacaataggcacatagtcacgcacttcgctattaaaatatgagcatatctcatgcattatttgatttgtaaaagtctatgtttgtgcacatttgatttggttgtatttgctcatcattcgatgaaagttgcaatgataccccctaaattaaatttctgttgt

SEQ ID NO: 50619 - DNA, 608 bp, Gossypium hirsutum
  unsure (1)..(608): unsure at all n locations
  Clone ID: LIB3829-019-Q6-K6-E9
gtggaccattacctatggnaacaaaatcctcgaccgtgattctctcgtccaagctataaaagaggtcgattctcttttcaacaaagatccttgggaactacccggttggtctaaaatacaatcagctgatcaagtgtggtatttcttttcccggcgaggagacaacaaacgggtgaagaggacaacggataaagggttctggaaagtgacgggaaagcctcggaaggtaaaggggaaaaaagggtttgctgccaagaaatctttggttttttatgagggtcgtacccctaatgcaaagtggacaccttgggtcatccacgagtatactttcacctctactcttgttgataacagagagggcatttttctctgtaaattgaagaaaaaagaagatgaaacagccaatgcttcaagtagtgaaagttgtcagccaagtctggttgcagacgaggagattcctgattactcaaccatgtttaatcctgacgagatgcttgacacattgaaagaacgagacagagagcatgagttggaggtggatgagcagcagcagccctcttgcttggaattcactcatttgcaggacgttaccactaactgtgatgggc

SEQ ID NO: 50620 - DNA, 604 bp, Gossypium hirsutum
  unsure (1)..(604): unsure at all n locations
  Clone ID: LIB3829-019-Q6-K6-F11
gcgtttcggnaaaattagaaagaacaatcgtggttggttttcatttagaggggaaataaggaatagcagccaatcagccccactttttgttgagaataaatctgagtcttctgagaaaattcaaccattaccgtcacgaaaatccagctcatatgtattacctacaccagttgctacaaaaggttctgtgggattgggtaaacctgctcgtcaatcttacaagacaagtagttattcatctccacttgaacttcataaatatcagaggcttttgagagatataaaaatttctggatctgctgttataaatgctcaggcagtactgagagagagcaataagcctgcttcatcaactcaactaccccctcctttggctgataaggttttactttcacgagttagtccagctgctgcttctgattccaagaaaattaaaagacaagccttttctggtccattgacaagtaaacagtggcctagcaaaccagtttcggttgaacatccccaattgttctctgggccaattttgagaaatccaatgtctcaactgcaagcagcatctccaaaagtatcaccaaatgcttcccctccatttgtttcctct

SEQ ID NO: 50621 - DNA, 595 bp, Gossypium hirsutum
  Clone ID: LIB3829-019-Q6-K6-F3
gcactgtaatgggtttttgcttatatctgccattaacgtttttatttgtgtttttgtaatgcagaaaatggggttatggacaatactggaagggtttttgctgcttgcaaatgcaatggcaatattaaacgaggatcgattccttgcacccagaggttggagtttctcggaattttctacagggcagaccaaatcatttaaaggccagcttattggtcttatttatgctacccaatacatgagacttcctcttattctactcaatgctatctgcattgttgtaatgttgatttctggttgatgattgcattgctctttcaaggtcagatgttcttgtttatgacttactattacgtgatagggatttaaatagcggtagctagctcaagtagtatcatatacccctataagtgacctatatgccataagtcgggtacaaactccaccaagggtgagccactcaagttgcctcttagtgggcgactgtatgcccacgtatagtcgaagtgctcccagctctgtgaaccaggttctcagggcagctgctcatggcacgttggctctcgacagagcacgggagacaaaatcctttctc

SEQ ID NO: 50622 - DNA, 599 bp, Gossypium hirsutum
  Clone ID: LIB3829-019-Q6-K6-G3
tcgctgattcgactattgggtcaagtagaagttctcacgggtcggctcataccgacattgctgcaaccacaagaggtgcttctgctgatagagtacagactcgtggtttagctcgtgcaaccggagatgcagtggctaatttgtactcggaactgcgggaagaagctcgagaccatgcccgattagataatgcatgtttcaaacaggtatcttgttataaaattgttgcacgtatttaaactaacacattcatagatttgacgttttgttagcatgcgatggaatgagttgttcgcctgctcaacttatccatacggttaattgaaataggcacgccgagcatttctcgtcggcaataaggctctagcaaagcaatgtagtttgtgcagttgtgcagctcacagaaaagctcgagaatctatctattgccaaaggaatcaggtttcggtttctccagagaatgtgcgagggaaagaacacatgatagacctgcatggattgcatgttagcgaagccattcatctgcttaatcatgaattatctgttctaaggagcacagcacgggcagcggatcaacatttgcaggtttacatatgcgt

SEQ ID NO: 50623 - DNA, 596 bp, Gossypium hirsutum
  Clone ID: LIB3829-019-Q6-K6-G7
gcgttcgtcgtgtgacaggacctgctccagcttttttggcccaacgaaaacatttccccagcattacggagcatttcaagggttagcagcccttggacccagtgtggttcgtttacttatactaccaaatcttgaagcgtatttgcagcttcttgaacctgaaataaaaagacacgaggcctggtgtgtttatggggccctgctgcgttcagctggactgtgcatgtatgatcggcttaaaatgttccccagtttgctagcacccccaactcgtcccgtctggaaaagcaacaacaaagttgcgacaaataaacgaaaagcaagcacggacaccttgatgcagcagcaaccacctgcgaagaaaatagcaactgagagtgcaataggtatgatgccaataaattccatgcaaactgatttacaaggggcagttagcggcttttctaccaccgtaggaggttccaatatcggtgtatcatcaatgtcacggccgttatcaaacgataacatgctaggaagggaggttgggggtcgagtttcaaagacatcaaccgttctagctcaggcttggaaggaagacacagacccggggaact

SEQ ID NO: 50624 - DNA, 606 bp, Gossypium hirsutum
  Clone ID: LIB3829-019-Q6-K6-H11
cttcttggtgtccttctgtgtaattattcatggactaagaaagaaatgttatgcatcacaattctcaggaatactgggaaagagctcgacacaagtggaagatctggtgtccagactagtattatctgcattgctgtttgattttgaatttacacatatgataccactttttaatctgaattttgaagggcttgtgtcttaattcctttatcgacttcaggaagacactaggtagaaattggtcaactctgataataaggttcgccaactagaagctcaagtttctgaagcaaaacaggcctcagcaaatgcaagaaaacaagtggaagaacttgaacatgaaattaaaggattgaggaaacatcttgagactgagaagcaggcaacccgagaagaagtatggagtaaagtttttgctcttgagcttgaaataaatgctgcaatgcgggatcttgattatgaaaagaggaggctgaaaggtgctagggaaagaattatgcttcgagaaactcagctacgagcattctattccacaaccgaggaaatctacatactgtttgcaaagcagcaggaacaactgaagccaatacagagaactctggaaga

SEQ ID NO: 50625 - DNA, 369 bp, Gossypium hirsutum
  Clone ID: LIB3829-020-Q6-K6-A8
ggtggctatcctcttcttcagagtcacagcgaggacatgtgacatttgtaattactcgcttatatctaaggttgactagtgtagggatataatttcaggagatctgccaaattattaatgtaattttttatggtagctataaatcctatagtttcctgtaaaagtctttgatttcgacctgtaataaataactattaggatccaagctagcatattgtaatagtttataggcccttcagacagaaaattctccagaaagttctcctttccacacttgaaaatcttcgtggtctgcttctgtaagaggaatctgcaatatcttttaggcaacttccgtttgaatggtattgttgattaactctattttcc

SEQ ID NO: 50626 - DNA, 612 bp, Gossypium hirsutum
  Clone ID: LIB3829-020-Q6-K6-B12
ttcacttgtgaaggaagattgatggctaagcaagcaaattttacattttcaaatggtaaacctgtgccttttgaagatcaagtagcagtagctttgagaaggctaagctccggtcaatcactagtgacggttggtgattcgttcgggctccaccactcaactgtctctcagttgacctggcgctttgtggaggctatggaagaaaggggtcttcaccacctgcaatggcctaccactgaagctgaaatgacagtaataaagtcgaaatttgaaaggattctaggtcttcctaattgctgtggtgtgatcgacactactcatgttatgatgtgtttgccttcatcagatcctgctagtaaagtgtggcttgaccacgagaagaatcacagcatggttttgcaggcaatcgtggaccctgaaatgaggttcagggacatagtaaccgggtggccaggtaaaatcaaagactggttggtgtttcagagttcaaatttctacaaactgtgtgataaaggagacaggttgaatggggaaaagctagagctcccggaaggatcggaaataagagaatacataataggggatttaggctatcctttattaccctatctt

SEQ ID NO: 50627 - DNA, 617 bp, Gossypium hirsutum
  Clone ID: LIB3829-020-Q6-K6-C11
attcaataagacatatattaactcaatataggagtgcattaccaaaacatttgcattcttattgtgcacctatactattagagttctgcaagctactaaggaaggttgttaacgaagatagtttgtatgaggcgtgccggagtgcacttgggatgttgttggaaagtgttggcacttccaggggtttaatgctgccagaggttaaagggttgattgtcatacaagatattttcccctttgttagtgagttggctgataagatatctaagaacttggaatccagtgtagattctaccagtagtggggaaccattatcgagtgatgtgagggatttcacagcattcttgaaccctttgcggtctaccattcttgagagagtggcgttccggattcccatatcagttaagtggaaaaagaaggataatagcaatcctccttatggggaagcagttgagtttcttcatactatatttaatgatttgttgggtaaaatggaaaattgccttatcagagtggaggaaaacttaaccgcaactggaagcagtgaaggtgaatatcttagttcagagtggtctcagtatcttgccattttgaaggactgaatgcatctcaaaact

SEQ ID NO: 50628 - DNA, 614 bp, Gossypium hirsutum
  Clone ID: LIB3829-020-Q6-K6-D11
gtgctcatcttcatagtttaaagtaaacggaaaaaaaaagggttttctgtgtatttatggtagcaatctgattgctgattttggaagtatcactgccttgcaggttccgaattcagagtgaagaaaaaaaatagagtttttatttccattttgaaaagcgtggtttgtttgttgctgatccttagaaacattgtctgaggattgagctacagtgggttttttctggagaaaaaaataaaagagagaattttggggggtacctgaatcttaaaaaggttggttcaatagtccttcaacttgttttagtttgctttctttgatccttagaaaaaaaaaggtggtttttcatttttgttcctttttcggcttgctgggtgccatagtccaatttcacttgattagctgaagtgatcattttgataaaaaattcatatctaaaatcatgagagaaggtaccgaaaacggggtttccgatgagaatcggtcggccgaggattggttatcgcacgcgcaaaagcttcttccgatggcagttgataaggcaagggaagtgaaaggggttcccggtaggtggaaggtgataatatcgaaactggagcgaatcccttcgtgct

SEQ ID NO: 50629 - DNA, 584 bp, Gossypium hirsutum
  unsure (1)..(584): unsure at all n locations
  Clone ID: LIB3829-020-Q6-K6-E10
ggaactttcccatgnagctttgttagatgaaagcaagattcatgggcaaactgttgtaagaatatgttatttatttgcaaaattgtgctctgtactgaagatcacccctggttctatccagtctagtgatggaaaagtccttgatgggtatgcaaatgccttcagatcatgttctggaaattctgtagaatcacttgacgggggtatcagaatttggacaaatagcccaagaaaagtagattgcaaggatttagttttcttggtggggattcaggaacaggccgtctgctggaatgcttaagagcctgcttcaagggtccattgatgttttctctgaagaatttgatgtctgtttagttgataagagctgtgccattgtggttttctttcatcctaatttatctcaagctttcctggatgtaatgaatagtgaagaaatcagtggatcattaaaggaattggtctcagaaggcttaagggcagcagattatgacacatacaagagggcctgtagtttgggtttatgggagacagatttagcaagttccttagacaaagcctctgcaactcctgatcacttatct

SEQ ID NO: 50630 - DNA, 598 bp, Gossypium hirsutum
  Clone ID: LIB3829-020-Q6-K6-F11
gcgttttgcaactctccttgttcttttggtgtgattctccaccatatctactaaaaaagattgaaagcttaagctcaatacaccatggttttctcttctgttccatatctagatcccccaaattggcaacaggcaccaagtcatcatcatcagcaagctggggttatcactagtgagagtcatgcatgatgattctcagcttccaccaccaccgccgccgccgccagtaccgggtgttggcggtggtggtattaggcctggttcgatgacggaacgagctaggctagctaaaataccacaacctgaatcagctctaaagtgtcctcgttgtgaatcaaccaacactaagttttgttatttcaacaattacagcctttctcagcctcgtcacttttgtaagacttgtagacggtactggacacgcggcggagctttaaggaacgtaccggtcggcggtggttgccggagaaacaaaagaagcaaaggaaataatagatcaaagtctccatcagttgttgccgaacggcaacatggttcaagttcatcttcaagtacgcttgtttctaatagttgcactgatatattaacccacatgaac

SEQ ID NO: 50631 - DNA, 600 bp, Gossypium hirsutum
  Clone ID: LIB3829-020-Q6-K6-G8
cgacaagtcacttgaagacctccggccccatcccaatctcaaggagctctttattggaggttggaggggtgatgccaagtttccaagttggctttctttgctcacaaatcttaccgtgattagaatatggggtcctagtaatttcaaacaaatcccgtcctttgcgcaattgctttgtcttcaaaagctgtcaattgttgatttaactgagctggagtacatggacgataatagcccaaaaggaagtcagggagaaccggagtcattcttcccatcgcttaagtctctttgcctcgagaattgcccaaatatgaagagttggtggaggaaaaggtccattgatgatgataacgaggatgacacaacagttataggaacatcaatgatggtatttccttgtctttcctctttagaaattgtaaattgccctttgacttcaatgccattgtatccttcactcgatgatgatctaaggttggtgaagagcagttcaaggccgttaaagcagaccatgaagatgaacatcactagtacgaccccatcaacttcaacatcttctcttcctctctccaaattgaaatctttccatgtgcacaaaat

SEQ ID NO: 50632 - DNA, 606 bp, Gossypium hirsutum
  Clone ID: LIB3829-020-Q6-K6-H1
gcaccctgctgtgtacaaggttgggttgcagtatttgtctggggatatacgtggtggcaatgcacgttgtattgcgatgtttcaagcgttcaaagaggctatcaaagattactcaactccacctgagaaaactctaattagagacttaactgcaaggattagtagttacgtttctttcttgattgaatgcaggccactctcaattagtatgggcaatgcaattaagtttctaaagaatcgaattgcaaaattaccattggctctgtctgaatcagaagcaaaatctacgcttatgttggatattgatcttttcataaatgaaaagatcatcctttcagagaaggtgatagtcaaacatgctgttacaaagattcaagatggtgacgttcttctcacatatggtgcatcctctgtggttgagatgattttattgcatgcccatgagcttggcaaacacttccatgttgtagtggtcgactctcgcccaaagcttgaagggcagctcttactacgtaggttggtgaggaagggccttagctgtacgtacacacatgtaaatgctgtttcttgtataatgcaagacgttactcgagtttttctgggtgc

SEQ ID NO: 50633 - DNA, 336 bp, Gossypium hirsutum
  unsure (1)..(336): unsure at all n locations
  Clone ID: LIB3829-021-Q6-K6-A9
aatcacagnntaatttagnaattttattatagnnaaaatgttaggnaggggcaacaacagttattattctgtnngcttccnncattttccttgggatggangaaggatgctnntcaatatcagnnaatcagnacnntaatggatnncaaaccaactnngcaattatttttggaaagcttnngccagctgnnggtgcaatgntnntgatccctgtnngaattannttttggnnnaaatgaaannnatcttgnnctcccatgnnnattcgacncnncaataanaagnaaggcagnagnnaaacagnaagaacattnnncaaaggcagcnnnaaaagct

SEQ ID NO: 50634 - DNA, 584 bp, Gossypium hirsutum
  Clone ID: LIB3829-021-Q6-K6-E9
gaaaggaaaggaaaggaagagatttgaaaatggagaagtggagagctacaaccaatctccggcgatcattgaaatcgattctcaaccgtcaattaaaatttagatatttaaatgaaaaaggagctgtcaatcgagcttcaatctgatcagagattgcaaaagtctaggacaagtgaatgcgattcagcacagatgtttcagttcagcgtcgacacttgttcagagaaatccttcattttcgacgttaaattccgatgacattagttattttaaggggttgctaggagaaaaaagtgttattcaagatgaggacaggctcgaaactgtaaatacggattggatgcataagtacaaaggctccagtaagcttttgcttctgcctcgaagtactgaggaggtggcacagattctcagatattgtaattcaaggtgtttggctgttgttcctcaagggggaatactggtcttgttggtggtagtgtgcctgtttttgatgaggtgattgtcaatgttagttcaatgactaatatcataagttttgacaaggtcagtggtatattggtatgtgaagcagggtgcatact

SEQ ID NO: 50635 - DNA, 597 bp, Gossypium hirsutum
  Clone ID: LIB3829-021-Q6-K6-H10
tcggtgatattctgtgccaaattaacttgtagcttgggcgggggtacccaaaaccaatgctcgccttccaacatgtactctgccagtgaaagatttaactgaggttctatctgtcgcccttatagacccagcaattaaaatcagacgcctgcttaattcaggcgtacccactattacacagggagcggcagacataccgaccccattcacagccaagcacaacctgagcagttcgctttatacactctgcttgacggacatattccaagaggaagatcatggaggagcttcttcggaagggacaagaagaggaaccagcaactacacgatcactatagaacccgcattaacagctgcggaagtctatacagcatagaagctactttctaagcttacaagaatgctgaaaacgcacttcggggcattcatccaaacctaaacgctaatagcgcaataagaagggcataaactacaaaatcctaacacacactgaatttactgctgacaactgagattgatttgtaatccatgatgctatttttatatttgttgttacgtttgattagaagatctgaaaccaatatacccaatacatag

SEQ ID NO: 50636 - DNA, 579 bp, Gossypium hirsutum
  Clone ID: LIB3829-022-Q6-K6-A12
cccagcgtccgtggtctgtgtctagtggaagaatggcaaattcaatccggcaggatttacgatctttgcgtgtctttagcgtggatccacctggttgcaaggacattgatgatgcactacactgtacagctcttcctaatgggaactatgaagttggagttcacattgctgatgtaacaaattttgttcaccctggcaccccgctagatggtgaagcttcccagaggggcacatctgtctaccttgttgagcgccggattgacatgcttcctaaacctttgacagaagatatatgttcacttagggctgatgtagaaaggctagccttttcagttatttgggaaatgacgcctgacgcagagattatctcgacaagattcacaaaaagtgttatcaaatcttgtgctgctttgtcttatgttgaagcccaggctaggatggatgatagtcgactgatggacccgttaactacagatttgagaaatatgaatgctttggctaagataatgaggcagagacgtatcgatagaggagccttaactcttgcttctgccgaagtcaaatttcaaattgatactg

SEQ ID NO: 50637 - DNA, 590 bp, Gossypium hirsutum
  Clone ID: LIB3829-022-Q6-K6-A8
gcgttctcccagcgtccgatttgaatgaagcctcaaataaagctaatgcttttgctgttgacttgttgagacgtacaatagttgtagtggaggattctttatttaatggcgcttcctcttttggatattattatgggtctgccaaggaacgtcttccaccagagatcaaagatgcattaactctttacgaagagagaaccggaaaagccttaaagcctgttggtgcagccctgcaacaggtttacaccggcattgagggggtggaaaggagtctagggtttgacccgagtgatcctattgtcccatttttccttctttttggcacctcagccactttatgggtgttttactgggtatgggcatatggtggttactctggggacttatctcctaagctaactttggagctcttgtctggaaaggagaatgctttccttattgatgtccggcctgaggtccttagagagagagatggcattcccgatcttcggcgagtagctcggtttcgttatgcatgtgtatctttacctgaggttaatggctttatgggtaaagtattaaagagtggaagggaccttgatgactccttg

SEQ ID NO: 50638 - DNA, 586 bp, Gossypium hirsutum
  Clone ID: LIB3829-022-Q6-K6-B12
gcgtgggttttgctgctgggggcgtggtgggggattcatggggtccaatcagactccagcagaagaaagttgatgttggtcatgacctctcagttgataatcagagcaacatggaaagtaaggaacaggaagtgcatggagattctcagagttctgatttgaatcgtgggggggaggggcacaagagaggcaagcctagagctaaaagaacacgctctgtgaaggcagttgtcaaagatgctgaagctattattgggaaaaccttagaatcaaatgaacttgagcatcctgatgaaagcaggggtgaatctggtcttgctgatgggagagcaactagaaatgcaaggaagcggaatcgtgctcaaacatctcaaactcaaacagcagacactgagcaagatggtgatgacagtgaaggacgttctgatagtgttgtggggggccagcgaagaaagaagcatcaaaaagtggttctggctatgccaatacctggcaggaaaagatataatctccgacggctcaaaattggggtcacagttgctaaagatacagcagatcatgttaacaactctgaagctcccgtgcc

SEQ ID NO: 50639 - DNA, 573 bp, Gossypium hirsutum
  Clone ID: LIB3829-022-Q6-K6-D10
ggcacttcaagtcggttcaagaaacttcatgcaatgccttgatgccaattctgagcatcccattcccatctctgctttttgctcccaaaccaactcttcatttacttctgtcctcaactccactgcacaaaacctcaggtacttgatgccgttagtgccaaagcccgaatttatcttcatacctgtctatgagtctcatgccaaatctgctgttatttgtgcaaaaaggcttgcaattcacctaagattccgcagcggaggacatgactatgagggcctctcatatgcatctgaaatagagacacctttcattttgatagatcttatccagcttcggtccattaatgtcgatatcgatgacaatagtgcttgggtgcaagctggtgccacggtgggggaagtttattatagaatctctgagaaaagcaagactcatggcttccctgccggtctttgctcaagcctaggcattggtggacatataacaggaggtgcatatggttccatgatgagaaagtacggtcttggtgcggacaatgtccttgatgctcgaattgttgatgttaatggcga

SEQ ID NO: 50640 - DNA, 304 bp, Gossypium hirsutum
  Clone ID: LIB3829-022-Q6-K6-E8
cggctatagaagctgggtctttttaactcctgatctctagctaggtttgttgtacagaaagtagtcagatccgatctctttgatgttgtggagccgattgaaggttctaattggttatttgtagcgtggttcataatcatttgcatttagagcaaatagcattagtttcttctttgattcatttttcttagatgtttggagaatatcatgtattgtgttggttgttactactttcggagtcggccctcattgaaaatgcttttgttaggtttgagcagttgctcgtttctttttatgccagaaa

SEQ ID NO: 50641 - DNA, 571 bp, Gossypium hirsutum
  unsure (1)..(571): unsure at all n locations
  Clone ID: LIB3829-022-Q6-K6-F8
gnaaccccaaaagtccattattacaatgattataaagcaaagtgcatatgaaccacactgttactaaaacaaaccctaaaacccccaaacacacactagtgttgtaataaccaaacaatgttgtccatcagctgcattgtcttgttcttcctcctctcctcattttttcccttcactatatccacattcaacctcaccgttcctatcccacatcccaatcccaacgaagttgctcaagaagttcaaaggagagtaaatgcttcgatttcaagaagggaaaccttacaaacaacccaaaaagatatatccagttgtttaacaggtaaccccattgatgattgttggaaatgtgaccctgattggcctaacaatcgacaacggttagccgattgtgccatcggtttcggtcaatacgctaagggaggcaaaggtggtgagtattacatcgtgacggattcgtccgatgacgatgccgtgacaccaaggccaggaacacttaggtatgcagtgatacaagaagagccattgtggattgtgttccctagtaatatgcacattaagctcaaacaag

SEQ ID NO: 50642 - DNA, 575 bp, Gossypium hirsutum
  unsure (1)..(575): unsure at all n locations
  Clone ID: LIB3829-022-Q6-K6-H8
tcgcggncgcgtgggnagnaaaaagcttttgcaagtcaaaattatcgaacatattaattgtgcctaaacttgtcgacgttattctgccacatgtcacttttctttctacatttaaatttcaggaacgcaaagatggacgggagaacatgcgctcactacgagatgatgtaaagaatagattgactgacaaacgtgtaaacgaatccggtgatagtagtgggtatgaaagtggtgcccaaactaatagatcattatggagataacatgtgaaggatttgaccgatatcttcgtaaaatagacacgtgaaagacattgtgaatccgatcaagttctagtggtagtgccaatcggtacgcaacaagttcaattttcttagtgatctcatatggcccaataaaccgtggagtcaatttgcctttacggccgaaccgaagaactttcttccaatgtgaaactttcaagaatgcattgtcacccacttgaaattctatttcttttcttttaagattattnaggattttctgtnnatcaaaagctgcttttaatcnacagaaatcctatataaatcttaaaa

SEQ ID NO: 50643 - DNA, 159 bp, Gossypium hirsutum
  unsure (1)..(159): unsure at all n locations
  Clone ID: LIB3829-023-Q6-K6-A8
cttccaatcctccccaccatagcgcagtgggatgctttaccctacaaaccttggnagctcaggcaggagttcgtcagtgatattcaaggcgtaacaagtatctgctggaggatgatctacatctcaaagccattcaagggaggccaaattaagcaagga

SEQ ID NO: 50644 - DNA, 565 bp, Gossypium hirsutum
  unsure (1)..(565): unsure at all n locations
  Clone ID: LIB3829-023-Q6-K6-B12
gttcattgttggctgctcagctaaggggattagggggggggaatcctcgtctgatagcgagaaaagttgagaagaagagaagtaagaaaactctgtttagttctgactcttttttcccaccgttctgttatgtgngaaaagttgtctgggttttctttgatcttgttttaggattggcggcgtgttttcagatctgtggtgggttctgagactaaaactacgtcggtttgattagattcatctctgaaattgaggtcttcatttttggaagccactggcacataatcagcgacagtattataatcagaaatcttcccaaccggcattgcaattgaactgactccagaaatgtcgttccgtagcatagttcgtgatgtgagggatagttttgggagcttatctaggcggagttttgatgttagattggtggggcatcatagaggaaaatctcatggtgctttacatgatctgcatgatgagccgcttgtaattcagaacggccgttgggctaatctccctcccgagctgcttactgatgtgatcaagaggttggaagagagtgaga

SEQ ID NO: 50645 - DNA, 252 bp, Gossypium hirsutum
  unsure (1)..(252): unsure at all n locations
  Clone ID: LIB3829-023-Q6-K6-C7
ccgggtcgnnacccacgcgtccgcccacgccgtccgnaaaaaaaaaaaaaaaaaaaaaaaaaaaaaaaaagaaaaaaaaaaaataaaaggtaaaaaacgttacgaacggaatgaaagggtacgaaatagttctatgtatagggatacactaaatttaattgggtggcccgtttttaatggattgatttttagtgggccaaacctttgcgactggcgaagttgggtgtaattgctgacctatactccattttg

SEQ ID NO: 50646 - DNA, 431 bp, Gossypium hirsutum
  unsure (1)..(431): unsure at all n locations
  Clone ID: LIB3829-023-Q6-K6-D10
gcgttcgcgtgnactgggctctcattcgttgcgcgaatccgcccgaatgccgaagccagctatgatggacttttcagccacccggacggacattggngaaagtacctacgaacaataagatgccgggtttagatgtgaagccttcaggtaactatttagagatcgatttcttttgatacttgtggttatttttggtttctcggttgaatgaatgtgcaccggtggtgctctttaaagcattttggtcatgcaatgaaagctatagaaaccgttagttccaaaaaaaaaaaaaaaaaaaaaaaaaaaaaaaaaaaaaaaaaaaaaaaaaaaaaaaaaaaaaaaaaaaaaaaaaaaaaaaaaaaaaaaaaaaaaaaaaaaaaaaaaaaaaaaaaaaaaaaaaaaaaaaaaaaaaaaaaaaaaaaaaagggggg

SEQ ID NO: 50647 - DNA, 190 bp, Gossypium hirsutum
  unsure (1)..(190): unsure at all n locations
  Clone ID: LIB3829-023-Q6-K6-D11
gcaagtagttcccttggttaatcttatgggagacgtanctgtaataaaaaaanagcaaagtgggatcccttggttaatcttgtggggggtgaaaaagtaccatattctactttgctcttcgcaatgtacagctntgtggcgccattttttttttttttttttcnacccaccccctctcgggggggggggg

SEQ ID NO: 50648 - DNA, 596 bp, Gossypium hirsutum
  unsure (1)..(596): unsure at all n locations
  Clone ID: LIB3829-023-Q6-K6-E12
cgtgggngaaaagttggtaagggggggggagcggggggaaaatggagcagaaagattgctccacgaaagtagacaaactgattgagaagcatgcctggattgctactgaaaggcaactttttggcagaagtgggacagattatgattttgcatcccgtgatcctcataaagcagggggggggcttgacaagcttcaaactgaacaatcaagccttgaaaaaagagtaaataagaaagtgatggcgatgtttgagaaagctgaagatgagtataatgatttgatgtcgaagaaaaacactgtggagaacgacaaatctaaaattaagaagacaattgaagagctagatgagaagaagaaagaaacactaaaggtcacttgggtcaaagttaaccatgattttgggtccatcttttctacgctgttgccgggaactctggcaaagctcgaaccaccagaaggctgcagcttcttagatggtcttgaggtccgtgttgcatttggtggtgtttggaaacagtccttgtctgagttgagtggaggtcaacggtctctacttgcactttcactaatcttggctctgctgctgtttaaacca

SEQ ID NO: 50649 - DNA, 570 bp, Gossypium hirsutum
  Clone ID: LIB3829-023-Q6-K6-F10
tctgttcaatgtcaaccgagttgacaatggggggaggcggggggtttacctacttgacactcttgacaaggatatcaattccttttccatgagagttagggagtggtactcttggcatttccccgagttggtaaagattgtcaacgataactatctctatgctagggttgctaagcttatggggggaggagtcaaagttgtctgaagaacatgtacctgcgttaactgagatactcggggatgaggacaaagcaaaagaagttgtagaagctggcaaagcatcaatgggacaggatttgacccctgttgatttgattaatgttcagctatttgctcagagggtaatggatcttgctgagtacagaaagaatctttatgattatttagtgactaagatgaatgacattgcaccaaatttggcatcattgatcggggaagttgttggggcccggttgatctctcatgctggtagtctcacgaatttggccaagtgcccctcttctactctccagattcttggagcagagaaggctcttttcagggcactgaaaactcgcggaaatacaccca

SEQ ID NO: 50650 - DNA, 515 bp, Gossypium hirsutum
  unsure (1)..(515): unsure at all n locations
  Clone ID: LIB3829-023-Q6-K6-F11
aattgctgtggtgtgtgagnntggggacctcggnagggtgcatgnatnngctgaaaggnagnngaaggcaaggnagnaatgnagnnattgcnncaattgnnttagggnagggacttattcttttgttgtattngnnttttannaaaaacagnaagaaagcgtgtgcggggtggagtttgtacccaaagttnngaagccccatcggtgagggccttctttagcatggtcacttgtnncaaagtaaaaggggacgaagtgctgtgcatttgaagcctctnnggtctgcaagattcaaatgtcatatacnnttgaggacnnggtggaagtattattataacnnacaactctgnannacttgtctgagctgtatcaacncnnggtgttaacccagttactacanntcctnnccaaatnnaatccaagnaaagaataaagnnggtcannggttgtntnnatgtatttcncnngtaaatgngnnggtcgtgnnnttgggaaanttgaaaaannnattggca

SEQ ID NO: 50651 - DNA, 458 bp, Gossypium hirsutum
  unsure (1)..(458): unsure at all n locations
  Clone ID: LIB3829-023-Q6-K6-F12
ttaagatcttttcccatagataaagccgcagtgcagaaaaaaatcaatgataaaagcggagattttgtgagatttggagatttgatgaagagaatttttttttttttgtgcatgnaagccnatttttttggggggggtggcggcaccgctgcagttttgagataggtcaatggagatggaagggaagcgaaagaaggagatagatgggaaggcttgggagacggaattgatgtaagagatgatggttggggtgtcccaaaagccagtggtaaggaggatggtgatggagtatcggttgttgtagtggtgaaagattattttgccaagctccaccattgagaacacatggcccaatcccggcgatgggtagagaacgatcgtctcttgcattgtttattttctctctctttttcttgaacgactgtgtttctcgaacattgatggcaccactaaatttc

SEQ ID NO: 50652 - DNA, 585 bp, Gossypium hirsutum
  Clone ID: LIB3829-023-Q6-K6-F9
aaagttcgaaactctctcagcttcttattctctttctacaatcgttgccatttgaatttccatttagctcgccggcattttgttttaattcaattgtagttacaattacacagtgatttgaatcgcaagagtcgctagagctctctgcaatggaatctgcacagcagcaaagaagagggggaggaggattggtatcgctatctccatcgcaaacgccacgttcaaacgataaatcggtgcgagatctgcgatcagccgattccaattcgagttccaaacaagataaaggcgttaacgttcaggttattttacgttgcaggccattgagtgaagatgaaacgagaatacatactccggtggtgatatcgtgtaatgaaagtagaagagaagtttgtgctgtacagaatattgctaataagcaaattgataggacctttctttttgacaaggtctttggtccgtcgtctcagcaaaaggagttatttgatctagctgtgtctcccattgtgaatgaagttcttgagggttataattgcactatctttgcatatggccagacgggaactggaaagacatacacaatgg

SEQ ID NO: 50653 - DNA, 575 bp, Gossypium hirsutum
  unsure (1)..(575): unsure at all n locations
  Clone ID: LIB3829-023-Q6-K6-G7
ccttcaancaacaacaacggtggagggcgcgggagagtccacgcacttacggcaggcggtgngagaccggcggattctggttgngatttggcggaaacctnnccttctaaaactgatttctccgtcactgccattgccggtaacgctttcttcgctaccgttttttacaccggtactaggtgagaaagaggggggatgaaaaactgatccatcgttgaatgctaaagaaaaattaaaataaaatctcagaaaaccctagtaaggacacgtagtgagagtagttgattaaataggaaaaaaataaaatcaaatcgtaatagatgaaagctcttagacgaagtcagacttcgtcttcatcttcgaactcgccttcatcgtcatcttcttcgtcgtcttcgtcatcgtcgtggacttatttacgttcggttcttttcgttgttacttcttcttcaccggctgcctgttcttccgctgatagtggtagactcaaatcaccttggtctcgccggagaaagaaacatgccctttcacctcagcagtggagaagtttgtttacccccgatggtagactccgg

SEQ ID NO: 50654 - DNA, 521 bp, Gossypium hirsutum
  unsure (1)..(521): unsure at all n locations
  Clone ID: LIB3829-024-Q6-K6-A10
ccggttcgacccagcttttttaatttttcaactttgnttaatgggctttggggggggggaagattatgaggccgttcgtatgttcgatgaatgactgaaaaagttatcaacctaatttgattgtttacagtacaatgcttaagggattgtgtaagaccggtaatactggtagagctgttaggtttctgaggctgagggaaagcagaggttatgaacccgatattgtagcatatagcactgtcattgactgcctttgtaagaacggtttgttacaggaggctctcaatctcttatctgaaatgaaggttaagggcattagaccagatatcattacttgcacttgcttaattcatggtatgtgttatttgtgccagcaggaggaggcaacaaggcttttaaatgaaatggctgataacaatattttacttgatattngtacatatactttattgattgatgctctttgcaaggtaaggaatgatttctaaagctgctcagatcgtttactcaatgtacaaagt

SEQ ID NO: 50655 - DNA, 578 bp, Gossypium hirsutum
  Clone ID: LIB3829-024-Q6-K6-B11
gcgttctttttgtctcaaactgctttccaatttcaagcgggggggctctttatctctctctaaagttgcaatttttactatttgaaaccttcaaaaacaaaaacaaaaacaaaaaatactagcaagaaggaagatagttagctcccctccccccttttgattaaaacccacgaaatctttttggaggagagcctacttgtttcttggcagagaatttttgatcaaattttcttgggagattcctgtcgaaagtttgggtatttcttggtggattttggtcgttaggttgaaagactaaaagggtttttattttatagaaagaaggaatagtatgaagatcaaagaagatgatcaagaagctgtgaagggcttttagctttagacaagggttctgttgctttgaatttctaggagagaaaagttaaagcttcctagccaatttggttgaagacttgagaaggatatttaagttcagagtaataacgaacaagcaaaacattatggttgcaaagggacgccagaatgccactgactctcagaaagtggaggtgggagagatagatactagtgcacctttc

SEQ ID NO: 50656 - DNA, 575 bp, Gossypium hirsutum
  unsure (1)..(575): unsure at all n locations
  Clone ID: LIB3829-024-Q6-K6-B9
tcgacaaacaagnctgggngaaagtttttgcatttggcggtgtctggtttccaaacaccggcttttcgaagagtggaccgacaagttaatcttatgaaacgactggtacatgcaaaaaatttcagcatggaagacattgttaatgctaaaaacaatgatgggaggactgctctccacatggccatcattgggaatgttcatactgatctagttgaactcctgatgtctgcaaaatcaatcaatgtgaacattcgtgatgcggatggaatgactccactcgatcttctgaaacaaaggccgcattcagcttcatcggatatacttattcgacacttgatttcagcaggtgggatgtttggttgtcaggattacactgcaagaagagcaatagcttcacacataaagatgcaaggccacgggagcagccctggaacttctttcaggatatccgacacccaaatattcttgtacaccggcgttgagacgacatcggatgctagcgatctcggcagtggaggaaagagtcgttcatcgtcaactgatttcgattcagctgatgaaaataggaagtcatc

SEQ ID NO: 50657 - DNA, 238 bp, Gossypium hirsutum
  unsure (1)..(238): unsure at all n locations
  Clone ID: LIB3829-024-Q6-K6-E10
cgncattgntatcattagtttgtggttttggttgttcttgtctttgttattcataattgcgataaacatgatgcaaccgaaacgtgtggatgtgaacctgcatttcttcttatgaatcagagatatagtaatcttactacaggcataggttttatgaagaatttcaacttaaaacttgttaatagacctaatattttgttgcctatctttctctttaagcatgagcttattccttttt

SEQ ID NO: 50658 - DNA, 593 bp, Gossypium hirsutum
  unsure (1)..(593): unsure at all n locations
  Clone ID: LIB3829-024-Q6-K6-F11
gcgttcggccctnctatgtagcacctgnagttgtaaacggggggacggtccagaagctgatgtgtggagtgctggggtgatcatctacattctcctgtgtggggtgcctccattttggggtgaaacggaagaagaaatatttgatgaggttttgaatggtgaacctgacttcacatctgatcctggggctagtatatctgaaagtgcgaaagatctattggcaaaaatgcttgttagaaaccccaagaagcggataactgcacacgaagtactacgacacagttgggttcaggctgatggggtggcaccggacagcccacttgattctttagtcctaggacgcatgaagcaattttcttcaatgaacaagctcaagaaaatggccttaagagtcattgcacaaaggctttctcaagaagaaatagcgggattgaaggaaatgtttaagatgatagacacggataatagtggtcaaatcacgtttgaagaactcaaagctggattgcaaagctttggtgctagtcttcctgaatcagaatttcaagctctaatgcaggctgcggacgtaaataacagtggttcaatcgattatc

SEQ ID NO: 50659 - DNA, 586 bp, Gossypium hirsutum
  unsure (1)..(586): unsure at all n locations
  Clone ID: LIB3829-025-Q6-K6-A10
ctctgnatggggcaatccgagtaaatccgtggaatattgatgctgtggctgaagctatggattctgcactaattgtctccgagggctgaaaagcaactgcggcaccgaaaagcactatagatatgtgagtacgcatgatgtggcatattgggcacgcagctttttgcaggatctcgagagggcatgtggggatcatttgaggcggaggtgctggggaatcggttttggtttagggttccgagtaatagctttggatccgaattttaggaagctttctgttgagcatattgtttcagcttacaggagaaccaagaaccgagcaattcttttggattacgatggcaccttgatgccgaccggctcattaaatactactcccaatatagaggctgtcggaatcttgaacaatctgtgccaagatcccaagaaccttgttttccttgttagtggaaaagatagaaagattctaaccgaatggttttcctgttgcaaaaagcttggacttgcagcagagaacggttattttatcaggccgaaccatgattcagattgggaaacatgtgtctcgctgcctgactttgattgg

SEQ ID NO: 50660 - DNA, 425 bp, Gossypium hirsutum
  unsure (1)..(425): unsure at all n locations
  Clone ID: LIB3829-025-Q6-K6-A9
gggtcgacccagcgtttgctgaagcttacaaatttgcttacgtgcggcggaggatcttttcttctcccagttgacagttcgagaaacttatctcttgctgcagaacttcagcttccagagatatcttccgtagaagagagagatgaatatgtgaacaatctcttatttaagctaggcttggtcagctgtgccgggggagtgattggtgatgccaaagttcgtgggatcagtggtggtgataaagaaacgcttatcactaggttgcgaactaattgcaagtccatctgtcatatttgctgatgaacccacaactggacttgatgctttccaagctgagaaagtaatggaaactctccgcctgcttgcacaagatggcnntactgccatgtgcctcttgcctgcttccttggggggtcaccgtctgc

SEQ ID NO: 50661 - DNA, 585 bp, Gossypium hirsutum
  Clone ID: LIB3829-025-Q6-K6-B11
gaaaaatgttaaataccttctgacttaagtttataccaaagatgattaagtggcagtaaagccggacgcgtgggcggacgcgtgggcggacgcgtgggttttttttttttttttttttttttttttttttttttttttttttttttttttttttttttttttttttttttttttttttttttttttttttttttttttttttttttttttattttattcaaattgttttataaagttatctatacttctgattttgtttttgtacttttttttttattaatttttttttttgagattaataagtttaaaaaaataaagtgcaaaattaaagtgaaaataaaaaacttcctttagggttttggcgccatttccaaacgtttttgattacattttcattgggatccctagattcttatttatatgggggtaatcggaaacctttaaaatggtttgcacggtaaaatattgcatttggagctgcttggggtctgggataccttcataaaaaataaaaatttggctgtcttgtgcaccgtgaaatgggggcggaaaacattttcattacccatggattttaaacctttt

SEQ ID NO: 50662 - DNA, 599 bp, Gossypium hirsutum
  unsure (1)..(599): unsure at all n locations
  Clone ID: LIB3829-025-Q6-K6-B7
gnaaaaaagagcagctagaaaatgttgggcagngaaaacanatgcaacaattaaatcttgaagcagatttgcaaagaagggagtccgaagttgattcaagcacttggacatcagctggagggattcantgaaaagtctaagaaagctttaatggaccttcttcaccaaaaacttggtattcaatcgacaaggtcatcagaaggagattatcagtatcctacttcatcttccagaggcagggaaagcttttggcctgtttctgagccacaagcttccaattttccttttactcatttctcgaatcaagaagttcacgtaaacaactcatatctggaaggccctcaaaattccaattcaggtgccttattgcaagatcatttgtttggagttgctgctaatggtggtgtcaaccaggtggttaactgtgaacgattgcctcataaatccaatccgggttcatttgctgaagatcaatcattgttgttgggcgctgaagatctgtcttctagtagttatgcagatgctagcttagtgtcaaaatctgctgtgaataaggaattgggcgaactggaggggaaggagcagaaaatggattgaaa

SEQ ID NO: 50663 - DNA, 505 bp, Gossypium hirsutum
  unsure (1)..(505): unsure at all n locations
  Clone ID: LIB3829-025-Q6-K6-C11
tttttctggncgcgtgggattttgcttgtgtttgttagtggttgagtgttgtcgggtcggggattagggcattgggcgctgccggcggtttctgtttggtaagataagaccggtcggttcgattggctgacgtggcgatcctggggtgtttgttgtttggcagggtataaagccttgctgtggtgtggggggtgagggtttaggtgtgcatcgtttgcgccacttatgagaccgttcatgatatgatgctcgctcgaatcttgtttatcatgcgctttgatttatcttcgctctctttatgttaaacccaatgctgcattctattcttacagtcctaaatagttgtcctttgttcatttgtgggtttaattaatgtgatttttttccctttcttttcttnatgagcgtttcggttcggttctgggattttcgtgtaatacatctccgcctttgtcttgaagactgtgtggaacaatgttctggtggcgtaggtttcttttatgat

SEQ ID NO: 50664 - DNA, 574 bp, Gossypium hirsutum
  unsure (1)..(574): unsure at all n locations
  Clone ID: LIB3829-025-Q6-K6-C2
gttcatcatcctcatcctgntcactgcaatattaagtgttggtttgacatatattcagctatccgtggnaatatcatcaatggtggtggagatctgtgttttgtgggggctcaaccgctatttttatgtttgcttattgtatctacttctacacaaggtcaagcatgagtggcttattgcagttctcatttgttttcggctacaatgcctgcatgtgctatgcattcttcttgatgcttggcacagtaggcttccgttcttcccttatgttcgttcgctacatttaccgagctgttaagagcgaatgactctgcctctgttcatgttcatgggaatggcataactttcttgtctttctgtcatggtgccatcactggaaccccttttcttgctaaccatattataaaaatcgagaaagaagaagacatggaaagattgtgaagattgtgatatgaacaaatatttcatctttggtatgagagaaaatcatggctaacgtttgatgcaaatttccctattgttccctctcttggttaagaattgtttgcagttcttcatttatctgtataacaat

SEQ ID NO: 50665 - DNA, 606 bp, Gossypium hirsutum
  unsure (1)..(606): unsure at all n locations
  Clone ID: LIB3829-025-Q6-K6-D5
cggncgcgtgggattttggtgcctttgacatcttgtcttgaggcaattgtaacattgtgataaccggtaagttctaaaagcataaatttgaaagcagctgtagggttgaattaatgatctataagtggttaagctgataacttacaataattgctttcatttcctgtccaattcaattctttgcagagtggatgaatcaaatgctattaacacatcagtaacaaaaccatgtcccaaagatgcaatttgcgataaagagaaatatattaatgctaaggtatctagttggattttttctattgatgctcatacatcaattttcatttttcaccatccatgcattcttcctcatcttcttctttcttgcattgtgccatggggcagctggctgggtttttcattgagcaggaaacatctttttgcattgtcattgttgccctctaaattgatttgtggattgttttagctgcttatgggagaagggaataaatcactacaagatatgatatgttgttcttcatatagaagatcatttcctgttggtttctttgttctttatgccgtaagtaatattcaaggctgaaaagcaggtgcacttgcaccaca

SEQ ID NO: 50666 - DNA, 585 bp, Gossypium hirsutum
  Clone ID: LIB3829-025-Q6-K6-D9
acacttgacccaagtctcttcctccctgcgaacaccttccttttcttcttcgtcgtcatcgttgccatcttcacttggatcttcgtattatcaagacgattcccctctcagtccggtgactccgttccgatattcaggcgtgccattttcatgggaacgtttaccagggatccctaagatgctacaaagccacaagaagaaagattccatcaagttgctgccattgccaccaccaacctccaaggaagcttcattcaaccgaaagaaatcttcctcttccacttccaccgccgtcgcggagagtttccgaaaggacccatttttcacagcgttggtggaatgttccaaggatgatgaagatgatgatgaacgatcatcaagcaaattcaggagtggagctaagattacaaggagtatcagtgacaggttcgggttcattaatctttacacttgttgtaaaagaacatgtgcagtttcagaatcaatagtctatcttccaaggcgtagcagcagaacaggaacagctaagtatggcctaatcaatcgtcgctctcgttaactgctccgcaacaccccattaattct

SEQ ID NO: 50667 - DNA, 224 bp, Gossypium hirsutum
  Clone ID: LIB3829-025-Q6-K6-E11
tcgaccctcacgaatacttcacgagcactgcaaagcttctccagtaataaaggtaagaatcgacttactgtaagagtttgaaaacggaaagtaacgagctttaaatactttagctaaaaggcaactgggacaattcagaatatgccaaacctgtttagctaacagagctttattgaatagaaacaaatccttgaaccccattccccctagccattttggtctac

SEQ ID NO: 50668 - DNA, 476 bp, Gossypium hirsutum
  Clone ID: LIB3829-025-Q6-K6-E12
gcgttcggttggtcatttgctgcagaaaacgtattaacaaatcggagcttgtggctcaacgactcatcaaacgatgggactttaatggaaagctaattcctcccctgtttgtttctagaagcagtggccatcagttgctgttgctaaatgcatgcgtgctattcagtggctgttctgctaaaattttgctgaagctatttttcgtcattgcacctaccagagaatcagttctgactggttggatagcagtgagcagtaatgttgctgtcatccatcatttcttttcataaactatccccggctacatcccagtgtctttgttctttgttccttggaattaaaaaactctgtaatctaacagtgtaacaataaattagctcatggaaaatgttgagattttcaaaaaaaaaaaaaaaaaaaaaaaaaaaaaaaaaaaaaaaaaaaaaaaaaaaaaaaaaaaataaaaaaaaaaacaa

SEQ ID NO: 50669 - DNA, 338 bp, Gossypium hirsutum
  Clone ID: LIB3829-025-Q6-K6-F10
tttctttttttttttcttaaaaaagaaaaaccaaaaccggttagaaacccaaaaacttaaaggaagggaaaaatattccaagggataagggcgaaaaaaccaaagggggaaaaatcggcccacaaagacctaaactaaaggggataaaaaaccacccattcagggggggccacaacaacagggacaaaacccaggggtagaccaaaaaagggaggcctttcagatgggaaacccgcagaactttgaaccccagcaaaccccctgttatttgggacaccctgggggaacaggggggcctgggattgactccttctggccgagatgggaatgagttgccc

SEQ ID NO: 50670 - DNA, 602 bp, Gossypium hirsutum
  Clone ID: LIB3829-025-Q6-K6-F4
atttgagcttttttaaaaaggtgataaaagattgttttttcaatgaagaggagacaaagggtagtgattttaagcttagctcaccggcctgaggcggaggctgaggcggaggcgcaagctggtgcggcgacgagtatagtaactaagggaagtagtgagagtagtattaggaaagaagaagttaggatttttggggaagctaaaattgatgcaggaaatggtgggggttctttttatgggaatggtggcagtggtggcggtggtggaggagacggcggttgtgatggaggtgatggtgaaaagggtgatcctgaagaagaagaatttggaccattaatgaagtttgaggatgtaatgaaggagacaaatgctagaggagctactcttccttcagacatgatggaggctgcaaagactgttgggattcgtaaattgcttcttcttcgatatttagatttgcagggatcaagttggcctttaggatttgcaatgaggtcatggggaatgcttagaaaccgaatgttagccgacccgtcttttcttttcaaaatcggaactgagatagtgattgattcgtgttgtgctaccttcgcggaagttca

SEQ ID NO: 50671 - DNA, 617 bp, Gossypium hirsutum
  Clone ID: LIB3829-025-Q6-K6-F5
gggtcgacccagcgttcgcgccatgctcgcgagcctccgattctccggcaattaccgcgaataaaccgctaatatgcgcggcagccaaatgcaggtgtctcctgatcaagcacagttactagcgatgttagtacagattcttggggctgcaagatgtattgaacttggtgtttacactggatactcatcattggctattgcattggctttaccagaatcaggctgtttagttgcctgtgaaagggatgccaaatcccttgaggttgcaaaaaggtactatgaactagccggtgtttcgcacaaggtaagtgtgaaacatggactagctgcagatgtcttgaaatctatgatttctaatggtgagacttgcagctatgattttgcatttgttgatgccgagaagaggatgaatcaagaatattttgaactgctactgcagctggttcgggttgggggagtgatcgtgattgataatgtcctttggcatggcaaagttgctgacccattggtaaatgatgtaaagactgtcagcattcggaatttcaatagaaacctaatggcagatgatcgagtaagcatcagtttggtacctattggagatggaatgacaatatgcc

SEQ ID NO: 50672 - DNA, 563 bp, Gossypium hirsutum
  Clone ID: LIB3829-025-Q6-K6-G11
acatttctacatcggagtaaatgctcaaattatttttgacaaaagatcaagatatacggctaggtgattttggtcttgctaaaatgttgacttctgatgaccttgcttcatctgttgtgggaactcctagttatatgtgccctgagctacttgctgatataccttatggttccaagtcagatatttggtctttaggatgctgcctgtatgaaatgactgctcacaaacctgcatttaaagcttttgatatgcgggctctgattaacaaaataaataggtctatagtggctcctttaccaaccatgtacaccagtgcatttcgaggacttataaaaagcatgctacgaaagaatcccgaacttagaccaagtgcttcagagttgctctctcatccacatcttcagccatatgttctcaaagttcatctgaaattaaatagcccacggtgcaacaatatacccactcggtggtctgatttaaattttgtaaagaaaactagatttgttgagcaagatgtcataggcagaaggcgatcattcagcaatgatagggctttgaacccc

SEQ ID NO: 50673 - DNA, 297 bp, Gossypium hirsutum
  Clone ID: LIB3829-025-Q6-K6-G3
tgtaaggaaaaaaaaaaaaaagcttctctggtgtctaagggcacctactctggtaggcataacctattccctctcttcttttagctttctgctgactaatcaccacacaacgtgaggggtaatgaaccctgcacgctgtacgaacctttcaataaaaatatattatgattgtgcagaatatacggtgggacctgcacatctcacaaatgaacctcgtgagtcgagaacgatctgtatcaaataacctgtcatttgagactgtaacttatattacaactttgaatcactacatctttc

SEQ ID NO: 50674 - DNA, 608 bp, Gossypium hirsutum
  Clone ID: LIB3829-025-Q6-K6-H10
aaaaacaaacttattaagttcttcgcagattttaaggtgttttagtgttcttttttgtttaggattctgggttttgtttattttttgtaatggaagtggaaagctgtgaaattggtggtggtggtggtggtggttcagccaccaaaaccggtggtttaagcggcggtgtgagagctgagatcgatacttcggcgccgtttgaatcagttaaagaggctgcttctcgatttggtggaatcggttattggaaaccctctcaacctaagctcatgtctgaaactgagcatgatggggaagaagttgacattgcgaaattggaggaacaagcggcgaaattggagaaagatctcattgttaaagaaagagaaacattggatgtgctgaaagaactcgaaacaacgaaattaaccgtcgaagaactaaaattaaagctgaagaaagaagcatccgaagtggatgtgaagaacacggatgcagagaaagagaatcgtcgtggtgaccatccgaacttggtgggaagtttaagcccctgtccttcggcagctccaggtttaatcttgatggagttgaaacaggcgaaactgaacctttcgaggacaactaatgat

SEQ ID NO: 50675 - DNA, 572 bp, Gossypium hirsutum
  unsure (1)..(572): unsure at all n locations
  Clone ID: LIB3829-025-Q6-K6-H9
ggctttgggtgtttntcgattcaatgcaacctaatgattaggtaataagtgcttgtttgtgtattgaattttgggggctgttttaattcaaacagaaaagaagctttatcacccatagagctttttgtgacgccttagctgaagaaagtgcaagactcacttcagttgcagccacaagcctaaatttcagaaacgatactgtgaatctgcctcatggatttgctggccgtggagttcaagatgttgctggcattcctcaatttggttcgggttttgctcaagatttcagtgggatgcctgcaccaggtaggtaactgcacagtattaatttgtttctcatctatctatctatttatctatctatctatatattgtgacaaattatgtggggggttattcgttgttattgaatttgtcactcaggtttgcctgagatggttcgaatggctccagccaatctctttggctcttcttcacactttcctggatttgaaaacggcggtgcaacttcatcaaattccaataatctctccttatcgcaactgccacaagggttaaaagaagaaggtcga

SEQ ID NO: 50676 - DNA, 477 bp, Gossypium hirsutum
  unsure (1)..(477): unsure at all n locations
  Clone ID: LIB3829-026-Q6-K6-B11
cggccttccgggtcgacccagcgttctaaaaaagggggtgctctgctagggtttcgaccctagccccccccccgtcgccgccgtcaagntctaccgccactaggccgtcccttggcctccgacgacgctccggcgacaccaggtgtgtaaagatgtgcgcgcaagctattgatcgtgggcgaagccactgcaacgtgggggaaggggaacgattgctgcgacgccgaagaaactgctactagggttaagttttttttgttgaaactgttcaatagcttgggctgtaatttgggctaacagctgggctggtaacttaggccacgttttattaaatttgtaattgtatttagttttagtttctgttttgggcttcgggcantanttatgtgtcacactaaatgaacccaaagtctaagtctcatgccacagttgctttgtttcattgcaggtccgattgacatgaattatgggggtatc

SEQ ID NO: 50677 - DNA, 597 bp, Gossypium hirsutum
  Clone ID: LIB3829-026-Q6-K6-B7
gtttcttttgttttcagaggctgatcccttgacggcattgattcatgctgttcaagtaatgaatttcctaaaaacattgatcttgaagaattacgagaaagggaggagttggctgccaagggcaggtcgctcccatcgtactcggactcacctactgccataactggcattcatacagaaaccataaacagtggggtacctcatgatgaagctctagatggaagtgcattaaaggaacctcatactgctaagttcttccggtctgccactctgagtagacttgaatgcagtgcttacgataaactatggagctttcagtacgagtgaaagatgggaatttgaatacatttcaggtaacagcatgccaaatgcgcacgaaatagggatggggactggtttaggttaaggaaatgtgtaaggtggatgatgcaggtgccctgtaaatagtaaaggatggagaaggtggggcgtggtatgccaaaacgttaaaatgttgatatggtggttattgatgatgagatgattgctggtatttcatgattcttagtgtttgagcaaaatttgtagcttttgggatttgtttgaaggcaccaactc

SEQ ID NO: 50678 - DNA, 517 bp, Gossypium hirsutum
  Clone ID: LIB3829-026-Q6-K6-B9
tactgccatctcgatcgataagatgtttgacaagttgtggggtttcggaaaaggcatgcagataacagaagttccgagacctctgcaagttcgcaaagcccaacttcgatggttccaggggataccaagtcttccggttcatcttcgagaaacaggagacactctatatcctagagagaaatgatcgaggttaatgagattcataaacagttgaaggaaaagattcaaactgttgagtgtaaaaagttgtaggattttgttgtagttgatgatgaaggttcttctcatatgtgaagtattcaaaaatagggtcaggtgcttttcgttctaacatcctattcaattgtatgatcatccatgtagttaattggaggattacttttcctttgaactttttgaaattggattccttgtgatgtatttttcttacattcaagttcagtgggtagagcaagattttacattgtaaaactaaaccactaaaatgcttggttcatgaaagtgtttggcttccctg

SEQ ID NO: 50679 - DNA, 582 bp, Gossypium hirsutum
  Clone ID: LIB3829-026-Q6-K6-C6
agaaaggtctgcccttatcgatgtaaggaacgattcgcctatcatcgggcttgcgatggggacaccattgtctgaaacatctaagcaatggagagccaataaaatgatgaagatgatgacccctggttctggtgaggcattactaaggagtcaagtcaagactctgttgcaaaaggtcgaagaagaagaacctgaggtttcgaatgttccgtcagggagctgtcattttcttcggggtcaaagctgtgtggtttctccaatgggacttgtagctcctactcctgcaaatacaccacaagttgaaggctcaatagtgatggctcttcctgttgttgaggaaaatttgaggatttctgaggtggtgagtatcatctttgatggagtaggtgttgaatcagagaaaagtgagataacaaggtctttgctggtagagttttctgagaaatcggaaacctcggaggattcatcagaatgttgttactctatggtgacccatgaatgtagtgcaggtaaagagaaggtatcatcatcatcatcatccattgatgatgataattcatctgtttggtcaatccaagtaaa

SEQ ID NO: 50680 - DNA, 582 bp, Gossypium hirsutum
  unsure (1)..(582): unsure at all n locations
  Clone ID: LIB3829-026-Q6-K6-C8
gcgttcggnaacgcataaaacataaaagagttgaaagctagcgctagcctagccgagtgttgcagcaatattagnngctgttgaaatccagtaggtgtttaggttaatcaggtttggggttggcattttggagttaagggatggaatcatcgtcatctgcttcgtttaaaagagctcgggcgcctgccaccggaaaccaagtaccttcatgcttggttgatggttgcactgcggacctcagcaaatgcagggactaccatcgacgccataaagtatgcgaagtccactctaagacccccaaagttactattaggggtcaagaacagcgcttttgccagcagtgtagcaggtttcattcgttggtggagttcgatgaagtgaaacgaagctgcaggaaacgtcttgatggacataaccgacgacggagaaagcctcaacccgatttcatgtctgtaaattcaggaaggtttccgtacaatcaccaaggtactcgatatttcccaatcggtagctctcaaatgcattcttggatgggaggtgtgaaagtggaaagtgatatgaagttgataaacttcagcggcg

SEQ ID NO: 50681 - DNA, 543 bp, Gossypium hirsutum
  Clone ID: LIB3829-026-Q6-K6-D12
gcgttcggtatcgttaaaccaaatctatctgttcaccctcgtggacgccctcatgctctgccctgcaaccacatgggccactaaccggatgtatagctaccctgaagcaactggctacttatgcggggccctgtcagatccggcgcccgtcatgtgtgattactacctcctccggtcaagcccgaagctgtagctcttacacaagtgaacattttccacaccacgcccgaacattcgatcatatacacttccattgctagggcggggatagaaatctgtcaagatctgaacactgatgtgaggaatcatagtaccgctgttgaccatctagagaattctgtcaccgcttaccttgcaggactgttccatgtttccaatctctggaccattaacgctgagacggatacactcatgcccctggatataaatctatgtaagacgattatgagttagagatccatgcacaactgatttcggctaggacacgcctaatgatatagatctaacctatggataaatccacgcgtgaatgctttctcatgg

SEQ ID NO: 50682 - DNA, 584 bp, Gossypium hirsutum
  Clone ID: LIB3829-026-Q6-K6-D9
tccgcttgcccctacagaaagctcagctcttgatcctgcaggtgatgctttcaatgaacaaattgatcaagcaatcagagattatgcaattgctcagcgtgaacagtgctatgagataattgctagtgctttacgttctctgaaggtgagggctcacagagcgaatttcggtctcctgctaggcctgttgcagtgcgatctgtccttgatcatgcttcacgaagaaatatatatgccagattgttcagcttagtgttcaatcacctgacagattgtttcatgagtacttgtacagaactatgattgatttatgtcttgagaatgagctgttggaatatgggggtcctgatttggtgccttttctgcagactgctggttgtgaacctgcacaagaggttcgagctctctctgcattgacatcagcaaccccttcagtgggtcaacctggagcttctattcattctaatcaagctaaatactttgatcttttggctcgatattatgtcttgaagcgacagcatttgcttgcagctcatgtattgttgaagctggctgaaagacgctcaattgatgggagcaatgct

SEQ ID NO: 50683 - DNA, 598 bp, Gossypium hirsutum
  Clone ID: LIB3829-026-Q6-K6-E1
cccggtcgcccagcgtccgcatagagtccgcttgtttctgaaccagagaaaataaacccaaaaaggaagagtaaagggaattagataagacgagccccaaagctcgtggaaacaggaaataaacactggtgctcccaggaacaaagaactagaggcacattgaatagcgttatgagtgaactgtaccatttaaaaaaggtggagctgtgaggtttacaaggaagaatgataatataaggccatttgaaagtggcgggtgaaacttctttagaattcttttctctcaaaactgattgcagaatactctgtttatggctcacattcgaagaaacaacctaacaatctagctatagggcgaatgtactatcaccatgtatacgatctactaaaggttggaggtgaaaattttaaatacattgaatcattcacttatgacaagaagataacacctcaggttggatctaatcctttcattgctttccatggactaagattcgagattgtatatgaactgaaacatttgaaagaagtttcgctagatcttttacgatgaaaggctgatgagaatataaaccttgctggatcggaccgtgcttac

SEQ ID NO: 50684 - DNA, 583 bp, Gossypium hirsutum
  unsure (1)..(583): unsure at all n locations
  Clone ID: LIB3829-026-Q6-K6-E11
cccacgccgtccggnnaataatagtcactcttgtggatggnaatgatacatgtttgggatagccaaacagggaagctgatatctgtattctcagaaccatccacagattccctgcatcttgtgagccctttatcttcttcaacaaatatcggtgctgatcatgttgacatgttgaactcaaacacttcttcaagtggagtacttagtagtccatttgatgaaagcttgtacacttgtatgcattatttagaggaggttgaaaagctcgtggtcggcactggaaatggttctctcagattccttgatgtttctcaaggtcgaaagcttcatttatggaaaggtgaattcagtgaatctgcttttccttctcttgtctctgccatatgctcatgtgggtctaacaaagagcaagggaacggagcttctgcttcaccaagttggattgccgctggattaagttctggtcactgtaggttatttgatgtgaggagtggatctgttactgcttgttggcgggctcatgatggatatgttacaaagttggctgccccagaagatcatctgctagtttcaagctctcttg

SEQ ID NO: 50685 - DNA, 562 bp, Gossypium hirsutum
  Clone ID: LIB3829-026-Q6-K6-E6
gctgctccgtcaagctgagccatctatcattgctgccactgggtccggcaccacccccgccgcccatgaaatctcttgtgcctctgggctcactacaacttcttcgcctacggaatcgtgtcagctgcacccagtagggattggtagcggcgtcgtggcggggatgtataccgtgacaacgccgccaccgagttgccggctggacttgtgccagccaatggggtttcagtattcaactgtagggagaaatgggtatcaacatatgccgtttacagcgttgcttttgcagccgacggcggctgcggaggaagagcagcaggtgggaaaggaagaggaggaagagaaaaggcatcaagagtagagatctcaaagtacagccatcagccacatatataaaataatatatttattgtcgagtagtatttgcatatttagtttagatttttagaatttgatcagatgatagatgctagacctttgagaaattggaaatggtttctttgtgtcatcgttgtaaattactgaggaatgcattggaaatgaagtattgccagtttttttt

SEQ ID NO: 50686 - DNA, 562 bp, Gossypium hirsutum
  unsure (1)..(562): unsure at all n locations
  Clone ID: LIB3829-026-Q6-K6-E9
gtggnaaatgagctaatgctgttccttctggcggcggcggtgctaaggtggaaggcaacaggatggagtttttggttcatacctgatatggatatggatacatgccaagttaccctggctacatgccgagttatcctggatatggatacccgggttatgggtacggatacgggcacccacacccgcatggacatgggcattgttacccggcctatgttccgaactatccagtgtttgttcacccacctcaccagatgtttaatgatgagaatcctaatgcttgtgccattttgtgaggataaatggggtttatggtatagtttatcggctaagtgggaagatctactagcactctctatgcccatcgatagactgttcattcactcaccaacagaaacaaatgggaagagctcacttggaaacgaaaattttgtgttaaaacttggagctttaaaacctctttgagttcccattacgttggtctctagggttttgatgttgttaaaaaggttgaatattggcatttttaatgtgattagtagtggtattttgctgtgtggcc

SEQ ID NO: 50687 - DNA, 595 bp, Gossypium hirsutum
  Clone ID: LIB3829-026-Q6-K6-F12
gcgttcggggccatgactgtcttcaagcagatgatggtgtagcatatctaatatattcatccgaagaaatagtgaacttcacattggaccactaaccaaggattatctagatgtcaagcctgatatgcgaaggattcttgtcgggcagcacagagaagcccctgctctgtttaagtacagggggacttattacatgatcacctctggttgcactggatgggcaccaaatgaagcacttgctcatgcagctgactcaatcatgggaccatgggagacgatgggaaacccctgcatcggagggaacaaaatgtttcgacttgcaacatttttcgcgcagagtacatttgtgatccctttgcctgggattccaggttcgtatattttcatggcagaccggtggaatccagctgacttaagtgactcgagatatgtatggttacctttaatagttggaggccctgctgatcggccttttgagttcaatttcggatttccactatggccgagggtttccatatattggcatcggaagtggagacttccctcgagttggagagtgacaaaatgattctcatttttcttctttccaaatatt

SEQ ID NO: 50688 - DNA, 567 bp, Gossypium hirsutum
  unsure (1)..(567): unsure at all n locations
  Clone ID: LIB3829-026-Q6-K6-F7
cttntagttgaggcacagnaatacacatttgaccttgtcaaactccttaaagactgaattcaatgtggtcatcacagcatgtgctatataaatatactccaaatttgcagaattaggcatggctggagaaaggagagtctcattaagcccacataaagttatgagtgcattgtcgctttatattcaaaattttgatttaacaagccagcaggatgcagctgaagcgtttctccatcttttgtcttcattaagagaagaattttctgatatatatcttcccaatcaaagtactctagcagatatttttgcttcgcaaactagtaggattctgactccagagaggaaggaggttcagaatgagcagaaaagatggcagcaacactatcttggaccttttgatggtataattggtagcattttatcttgccgcagttgttcatatcagatttctttggattttcaattttttcacagcttgcccctttttccagtgctttatggtgcttccaccattatggctggatgtaccttggaggattgcttatggcagtttgtccttgctgaaaa

SEQ ID NO: 50689 - DNA, 164 bp, Gossypium hirsutum
  Clone ID: LIB3829-026-Q6-K6-H1
tgaggccagtgaacatcagagtaccccacattagcctataactaaggaaagtgtgtgcctagggctctgtgttgcacttctgggcgccgcttgtttcgcgctgcttgctctgcccgggcgcgtgcgtgggctcgggctgggcggtccggtgggggggggggcgc

SEQ ID NO: 50690 - DNA, 186 bp, Gossypium hirsutum
  Clone ID: LIB3829-026-Q6-K6-H3
attttgcactaaatcctctcaattctccccagaccaccaccgatcacccctcacctacacctcaccgaccacctcaattgctctcatctcccacctgcccccccacaccaagcctctcataccgcacctgctcagaccaccccagctcacctctaatccgcaccccgcatgcctctcagaccccac

SEQ ID NO: 50691 - DNA, 587 bp, Gossypium hirsutum
  unsure (1)..(587): unsure at all n locations
  Clone ID: LIB3829-027-Q6-K6-B10
ggnaaattcattgccatctttgccctcaaaactgcgggggctgtaaatcctgatacaaaggaagcatcacaaactggtaaccttactatccggattgggaaagataaaggaagaaggcgaaggaaaaggaaaggtgggtttaaagaattgattgaagtttcaagtagtcaaagtggaaattctacaccttcatcccctcactcccccacatctgtaacatccaatcgcacatggccactctcccccgatgtggagcaacccattgaatctagaaatccttttacacatttggctaaccaaatccgcgagaaaggtaaagttcctcaacctatttcaaaagcaaatgtgttgggacctaaggtttctgtggaacatgtcagcaacaactggtattcttcacaagagcagcctagaataccaaggcaaaatgtttcacaacctgttctctcgtactctgctacttttccttgtgctagtagggcgaccaccagtacacggagctcctcttctcctttggcttcaatgtctgttattgctccttgtgctcgagctccagggtccaaactctctgaccagaaaatcataaa

SEQ ID NO: 50692 - DNA, 586 bp, Gossypium hirsutum
  unsure (1)..(586): unsure at all n locations
  Clone ID: LIB3829-027-Q6-K6-B4
canacccgttgcatgggactgggaaacctatgttaaacgcaaaacaactgaaatcccgagaaggctaagacccgtagagtgggatattgatgaaggggaaggaggattggactctgtgtctgtcaattcttccagtgttgctggttgtagtggtggttctggctcggatttaggccttgtgtctttgtctaaaaatttgaaatcggcatccattgattctttatctatgggggaggcaaaattgaccaaatttactttggaggcttctgaagctatcccagatgatataagcaataagaaagaagtttctgggattgagacaaccagtacttccttgacactcgtggcttctgttggctctggtgagccattactcagtttaaagcttggcaaacaaacatactttgaagatgttagtacgggaaccaatgctacggattcatcttattctgccactctgggaacatcatctcctttatctgcaaagagatccaaactgaattgtcgaagcacacatgctgtacgttgccaagtcgaaggttgtaaccttgacctttcttctgctcgagattaccatcggaaacac

SEQ ID NO: 50693 - DNA, 590 bp, Gossypium hirsutum
  Clone ID: LIB3829-027-Q6-K6-C8
gtgaaactttatcctgatcaacaagctctcttcataacttgcagacactaaacctcagacattgttgcaatcttcaaatgttacccaaaggtaccgatagaacttgaaaaatcttaggtacttggacatcaggaattgccatgaactaacttctatgcctgttgcattgggacaactgtcttttttgcgcaagcttagcatgttcattgtgggaaaggaagatggttgcggcattgatgagttgaaggggttggccctagagggggaattgagcatcaaaggacttcacaacgtgaagagttcaatggaagctagaaatgcaaatttgataaagaagcacaatttaagatcacttagcttatcttggcgattaagcagcaacaagagctctcatcatcaaaatgatgaagagattcttagtgctctccaacctcattcaaacttgaagaagttacgtataattgattaccaaggtttgatgtttccgtattggatgatggatctgcttctaccaaaccttgttgaaatctcactaggatactgtgaaagatgccatcagctaccacctctagggaaattgcgcttcctta

SEQ ID NO: 50694 - DNA, 590 bp, Gossypium hirsutum
  Clone ID: LIB3829-027-Q6-K6-D6
gtggtgccataatgataccaaacgacgagacttcctcaaggagataccaagctcactttacgatcttgtagacaagtgcttaacagtgaacccaagagtaagaattacagcagaggatgctctgaagcatgaattcttggcttcaatacacgaaaacttgagaaagcaaagagctttcaagcaggggctcagctctaactccgggaccaacagcagcaacaatcttttgctgggaggaaggatcagtaaatctttaaaggtttctctttaaaaagcctgatcaacttgcagtttttgggatctattctgctgtaaatgtaaatgcagtaacacatgcgcttacatgtgtcaatgttgtaaccaaaggtggggggggggatagatacttaacctattccttacgttaaacttgaacctttcactacgcgaagaattaagctgtaaaaaaagattgtgattctttttggtcggattctttgtttggcatggaaggggtagatggtgtagatatttgtaaagaaacgattacgtgatagtccatgagagatacaactacactatcagtaggagaaggttcatgtgcaattact

SEQ ID NO: 50695 - DNA, 469 bp, Gossypium hirsutum
  Clone ID: LIB3829-027-Q6-K6-E7
ctaagctgaacctgccgggtggctatggcatgcaaagttggcacaggacatcaccgcgcgagctcgggggttgactactgatccaccagcatgtcttaagtcctctgacacttcggggatcaacctgaccatcgatgcccttggtgatcatgctggctactgtctatgaccacacagttgtcttttagcatcatgctatcgcgtacatggaacaccaccatctttagaaggaggaccacccaaatctagtgaaagccgctggcatgaacgagtgaatatccattataacagctgcactctatgctttgagtgctaataagcggagactctctccagactactatgctaattcttcagctaaccatagcctatactccaggccattatggatctttgcttattgatgcctccacatgatttggacaaagcgtgtctggattgggagcgagaaaaattgccgcttcttctg

SEQ ID NO: 50696 - DNA, 561 bp, Gossypium hirsutum
  Clone ID: LIB3829-027-Q6-K6-F1
ttgttcctaccttatttccttgctgaatggatggggcctcaattgcctgctttttcggggaaaggtaaaacacatcatactaaacgttgtgtgtggtgaatctgaagtctgacatggatagccttgactgttaaggactggtggaatcactattaaaaagaacatacgaagcatattcaacatgatgaccaaattacgccataccatccctctgatgccgcttttgctgcagaaaccacggtagtatttgttgatcccattgaaaaaaatctcaacaatgccacataagtcaagtggctatatggcagatcctaactttgattatcatgttaccccaccatcgacaccatacattgaacaccagtagcaactataccttcatatgatatctaaacatgctaataaatatcaccatgatagatttcaggatttcaatcaatatgtggaccacatgattgaccattatgacattcctaaagctggtaccattttattaacgcaaaacgaaggtaatcttgtcagtggtttctgaaggaactcatctgtgccatgcaccaaatg

SEQ ID NO: 50697 - DNA, 577 bp, Gossypium hirsutum
  unsure (1)..(577): unsure at all n locations
  Clone ID: LIB3829-027-Q6-K6-F11
ggnanatagtgtggttcgatttaaatctttgacactcaagttcgagttatcgccaaatggtgcaccctaattggtcaaattcgtgggttctattggggagtcgtgaaagcttgttttacattctcccaaatggcagcctcccaactcgcgttacagaaaattggctcgtcaccttgtcatcttccatgggaggctcggctaaagatagccaaaggtgttgcacgagggctagcttatctccatgacaagaaacacgtacatgccaatttgaagccgagcaatatcttgttaggccccgacatggaaccgaagatcggagacttcggtctcgaaaggcttgtaacatgcgacacaagtaccaaagtcggggtctcggctcgaaacttcggtagcaaaaggtcgacggcatcgagagacagcttccaagacctaactggaccaagtccgagtccaagcccaagctcattcggattatcaccgtaccgagcccctgaatctctcaggagcctcaagcctaaccccaagtgggacgtttacgcgtttggtgtcattctgctagagcttctaacggggaaag

SEQ ID NO: 50698 - DNA, 599 bp, Gossypium hirsutum
  unsure (1)..(599): unsure at all n locations
  Clone ID: LIB3829-027-Q6-K6-G11
gcgttcggttgtttcagaaaactganacacaaagcctgctgttaaaattcctctggaacaggcacagggtttgaaatttgtgccaaggtttcaattgggaatctcataaatccggacgatggtatatggaactcaaagaaaaagcttcagaaatatcttcacttgggtttactgtgatttggctaccaccacccacagagtctgtgtcacctgaaggatacatgccgaaggacttgtataatctaaactccagatatggaactattgatgagctgaaggaacttgtaaaaagcctccatgaagttggtatgaaagttctcggtgatgttgtattgaatcatcgttgtgcacactttaaaaatcagaatggtgtatggaatatatttggtggtcgcttaaattgggatgatcgtgcagtggttgcagatgatcctcattttcagggacggggcaacaaaagtagtggagataacttccatgctgctccaaacattgatcattcccaagagtttgtgaggaaggatctgaaagaatggcttggctggctgagggaagaaattggttatcatggatggaggctggattttgtcagaggattt

SEQ ID NO: 50699 - DNA, 184 bp, Gossypium hirsutum
  unsure (1)..(184): unsure at all n locations
  Clone ID: LIB3829-027-Q6-K6-G2
cgccgactcggtgccacctcattggctgcattttggcgtgtattggcttgacaagtatggcttgnaaaaaaaaaaaaaaaaaaaaaaaaaaaaaaaaaaaaaaaaagggcgttaggcagctacgcctctcacgatctttttggactaatatactgcccgttacgcgactgaacctgctccacta

SEQ ID NO: 50700 - DNA, 309 bp, Gossypium hirsutum
  unsure (1)..(309): unsure at all n locations
  Clone ID: LIB3829-027-Q6-K6-H12
gcgttcgtataacanaaaatggnaatgcttgtgcttgcaattttgcatgtacaaagcttactgcttcttttgtttctttattcttcttcactgataagaattggagcttaaaaacccataaccaaacgaaggaatttttctttctttttaaactctggatctacaatgagggaagcaggctctctttttttttttggtggtgggtattgaatggtagagacaatgaggcaattttcttccatgttcaatgggttagcaaggtcaataagtgggaaaatttcanggaatggtgatgggagagaagctgct

SEQ ID NO: 50701 - DNA, 578 bp, Gossypium hirsutum
  Clone ID: LIB3829-027-Q6-K6-H6
gttctaatatcttcaaagtatgggtttcctggttttgacttgacagctactaccatgggtcagatgagtttcacctcaatgctgggtgcggctaaccaacagctccctggtttggaacttgggttgtctcaagaaggtcattttggggttctaaatcctcaagccttgacccagatttatcagcagatggggcaggcgagagtgcatcaacaacagcaacatcagaatcaccaccaccaccaccaccaccaccagcagcagccccctgctaaagatgattccgaaggatcaggcgagtaaagttatcaactttgggagcaagattaaaaagtagcatggctgagagaggatgacctccttttcttgtaatgcttttcaatattgtataattggagagaaaaaaaaatagtgagaaaaaatggataatttgcctctcagaaacctatggtgactggatggatatttttgcccccttctttctgcgctgcatcacccggatttccattacagaggtggagctttgcacagcctagtagcttggttttgggcttatcttctggtttgattcagaggtgtgt

SEQ ID NO: 50702 - DNA, 593 bp, Gossypium hirsutum
  unsure (1)..(593): unsure at all n locations
  Clone ID: LIB3829-028-Q6-K6-A6
gtttagggttttttttcattcgtttgtttctcacgcatcgcattaccttgacaaagagnaaaatatgaccaagtgtctacccaactgttgtagcgaagcaattaccagaacagtcatgttgaacaaagggccaaggagggaagacacagcaggtgctcatacgctgtagaagaactgtgctacagtcatgctccgtttagcgtggcactcagctggaacttttgatgttaagaccaagaccggaggtgcattctgaaccatgaagcatactgctgagctcgtacatgctgttaacaacgaggctaaatatagacgatagacttcttgagcctatcaaggatcagttacctaatctgacctacactgacttttatcatcttgctggtgtcgttgtcgttgagattactggtggacctgaaattcccttacatcccggaagataggacatgcctcacccccctactgagggccgtcttgctgatgctaccaagggttctgatcacttgaggcaggtgtttagtgctcaaatgggtcttattgaccaaaacattgttcgctctttctggtggtcacactctgagaaggtgccacaa

SEQ ID NO: 50703 - DNA, 615 bp, Gossypium hirsutum
  unsure (1)..(615): unsure at all n locations
  Clone ID: LIB3829-028-Q6-K6-B10
ctgccgccatcttcactgctggcacctgaactctaccagttctccccttcatttcacatatcttgatctgaactgctccattgtaactggatggctgttgcagcatctaagggactctttaatagtgaatttcatgngaaataagatgatggaaaggaaatcttctggaagaagacgtgtctttgtgcagactgaaacaggctctgttcttggtatagagttagataggagtgacaatgcccatactgtgaaaaggaaactacagattgctcttaatgttccaatagaggagaggtctctcatatttggggatgtagtgctgaagaatgatctaagtactgtcagaaatgattctccacttcttctcacgaaaaactttatgcacagaagctcatctacaccatgtctctcacctactggaaaggatgtacagcagagagatcagagtggtcccattgagatattagtatgttcagatcacttttccaggataagaaaacttgtaagaaaaattgtggaagcaatgaagtttgggattgatcccatccctgtttgtggaggtctaggcggtgcctactattttcgggattgccagggtgaaaactgtgcaattgt

SEQ ID NO: 50704 - DNA, 593 bp, Gossypium hirsutum
  unsure (1)..(593): unsure at all n locations
  Clone ID: LIB3829-028-Q6-K6-B4
gaactgcaagngccaaaaacaaatcttgagtgcaaacttgggatacgcgaggcaattcgccagttggattcacttagttcagtagggagcattgaaggctctgttattgctccagaggctctgtttaccatgaacatatattttgtgcaaagtgcgagttacgtgaggcttttccagataatgatatagtactttgtgatggaacatgcaaccgggccttccaccaaaagtgcctggatcctccactggacactgaacatatacctccgggagatcagggctggttttgcaaattttgtgaatgtaagatggaaattatagaagcaatgaatgcacatatcggcacccatttctctgttgacagccattggcaggatattttcaaagatgaagctgctttccctgatgatgcgaatgcatcactaaatccaggggatgaatggccttcagatgattctgaagatgatgattatgatccagagaggagggagaacagctgcaggatcagtggaacagccactgatggtgatgaatcggatgaaacagacaattcaaccagtttaagttggtctgtggatagtgaagatctttct

SEQ ID NO: 50705 - DNA, 580 bp, Gossypium hirsutum
  unsure (1)..(580): unsure at all n locations
  Clone ID: LIB3829-028-Q6-K6-D6
ggnaacatcatgatgcagcttccttatctagttgatttcttcggtgacgacaagtgaaaattgcagccgcagttgctaatacgccaaagacaggaagtgtaataccaagaaccacctttacgcaaaggcttcttgggaagcattttggaatggaccagcaattggaaccgaacccgtcaactcgttgtagggaaaaatcaaatgaataaagactgatcatttggagcaacgtggtcgggatttcaccagagagattgttgtgtgaaagattaatattctccagtgaaatcagtcttcccaactctggagggattttccctgaaattgaattgctgctgaggtctaatgaatactgaagaacatccaagctccctaactcacctggaaggtcaccagataacttgttgtggttcaagttcaagctcaacaacttgttgcagttcccaagctcttttggtgttgttccagtcaagctgtttttggacaaatctaaaaattgaagctccaatagaccaccgatggtacgaggtatcggtcctgacagatgattgttgctcaaattgagttcaaacaacttctt

SEQ ID NO: 50706 - DNA, 585 bp, Gossypium hirsutum
  unsure (1)..(585): unsure at all n locations
  Clone ID: LIB3829-028-Q6-K6-E1
gcaacatgcagttacattttctgctggtttatcatgtggagggttgaagccattttgtataattccttctgccttcctgcagagagcttatgatcaggttctctttctctttccatccctctgtgtgcaccaggcacctgtatgcatgagtctgaaaattcggtgttcctaagtgtcatgccataaggccttgttctactgcatagaagtagaaatggataaactattccacaatggatgaaatctttttatacttcaggttgtccatgatgtagatcggcagaggattcctgtgcgatttgtcattacgagtgcaggattggtaggatctgatggtccgttgcagtgtggggcatttgatataactttcatgtcatgtttgccaaacatgattgtcatggcagcatcggatgaggatgagctgatagacatggttgccactgctaccaggattgatgatcggccagtctgctttcggtacccaaggggtgccctagtgaggacagactatcctatacatggtnggaagtgctcttgagattggaacaggaaaagttcttgttgagggtaaagatgttgctttac

SEQ ID NO: 50707 - DNA, 599 bp, Gossypium hirsutum
  unsure (1)..(599): unsure at all n locations
  Clone ID: LIB3829-028-Q6-K6-F7
ctttccaatttgcctctgaccctgntgtaactgttcgaaccaaacacttggtgcaatatcttccttgatccgccacaacaaacccggtattgctgcatttcgacttgcaaatggttatgcagccttgagagatgctgtgggagctgatagtgcaagatttcaaaggaaagccttgaacttgattcaatatctactgcatgaaaattattcagattgcaatgttgtaaaagagctggggctccctcgtgtaatgttgcatcttgcctcgagtgaggatgcagaagtaagagaagctgctcttcgtggtctccttgagcttgcccgggacaagacaggtgggagtaatggtggtttaggtgaagaagatgagaagctgaagcaaattctcgaggatcgaattaaaggtatcagcttgatgtctcctgaagaccttggggctactagggaggaaaggcagcttgtggactgcctgtggagtacatgttataaggagccttcgtcccttcgagagaagggacttttatcacttcccggtgaagatgaccctccacctgatgttgccagcaagcattttgagcctcctctcaaaggttgggctg

SEQ ID NO: 50708 - DNA, 600 bp, Gossypium hirsutum
  Clone ID: LIB3829-028-Q6-K6-G5
ggtttttcattctgggcctctatccatcggcgatcaacttctaccatcgcctctgcaaactccggcacatcgttcactcaggaaaatctctgttctttgcttaatcccttcatttgctaactgttgtgctgctccattggccggtctctgcacatgatttaaggtataaaaccggaattccttgctcaaattgtttacatcttcaatatatgttgagatttcagatctatcaatctcatttctacttgcttttttatcacaataagaaagtccccttcaacttcaagacttctggtattcagatctaagcacatcttcaaggccatagcccaggccactacttcagccgtaatattctggtgaaaagtaattttttgaagctattacccttcctcttgaatcctttaacaaaatactagaacataaactctcttcatttttcctataagtagcattgaaattgacttttacacatgcgtttctcggacttttccaccatttcatggctccacatttcttaggtaaaattcttcccaagtcatccaactctctaatgtaattcttaataaaattcacagtaaatagctcatcttgactgcc

SEQ ID NO: 50709 - DNA, 504 bp, Gossypium hirsutum
  unsure (1)..(504): unsure at all n locations
  Clone ID: LIB3829-028-Q6-K6-H1
gcagaatattaataccaaaaaaactagtgcaattttcttatggcattagtgaaagtcttacatatatatatacatactacctagtagtaatatttattatctaataataatggtctagccaggatgggttgggtcatatatatgttcttcacttacatatagagctagaagaaaaaaaaaacactttcaccaccagaaatgaaggagaatttcctggttctttgtcttactctagctgcaaccaaatcccaaggtaactctctgtgttcactttggacactttcttacattaatgtaaacaaataattaaaaccctttcttctttatgtgatgagcaccacgaactaggaataagagaaatggaaagaaacaaanagagtcatttggaagaaagacaaagaagttattgtatttatgcattaaaagatctctcttttatatatatatatattgaattttatgacacctatactgtatgtacaatgtcaaatatcacaagtgatg

SEQ ID NO: 50710 - DNA, 544 bp, Gossypium hirsutum
  Clone ID: LIB3829-028-Q6-K6-H6
gtgggggcaacaaattattatttgcttgtattgagctttttgaagaacctgagattatatgataaacaaagtgggaccagttgacctaggaactactatggagcggttgaaccggaaattttttttgtttttatgaattttttgataatttgtttaatcaaactggttgaaccaacaaactggtatcaccggtccgattttgaaaactttggtcaaaaccttactagttcaaacagttgttttaggttctataaactgattcgttgtttgatttgtatctgaaaatctgcctactcttgtaatatctcgttatggttttagtccaatgaacatatagttgataaatcttttgtttttatacgatgtttttatgttgtttaagtacaaacgttgctgacatggatcacgtttttgtttgaagttgtttgagattagagcaacaaacatatcactgcacaaataatttctgctaacatttctggtgatatggttcttgctttggctttctcccacgagcttccttgttatggacttgaagtcggta

SEQ ID NO: 50711 - DNA, 598 bp, Gossypium hirsutum
  unsure (1)..(598): unsure at all n locations
  Clone ID: LIB3829-028-Q6-K6-H7
gggtttcaggctctcgaagaaccctcccgggngtcgaagcaggtactgatggtaatgccaaccagtcgtcttctgcgcccagtgcgttgtttgaagacaaacctcactcggctaatgatgcctggcgtaagctccattcagatccattgcttatgattcgccagcgcgaacaagaagcacttgctcgtatcaagaacaaccctgtccaaatggccatgattcgcaaatctgttgtagagaagaagcaaaaggaaaaatcccctgatcataaggaacaccgtaagaagcatcaccgtagtagttccaagcatcggaaacattcatcgtctaaacggcattcatattctgaagatgacacttctaaggaggacaaaaaagataaaaatcaccatcgcaagaggtcagattatgaggggcactatcgcagaacagaatcagattcagaacatgaattaaaggaaacagaaagggaagagaagagtcaccgcaggcagaaatatggatatgatgatcaagatgttgataagaggagccatgacaagtctaagcgtgataaatattcttctcaagcttcacgaagtatagatgcagataaaaa

SEQ ID NO: 50712 - DNA, 581 bp, Gossypium hirsutum
  unsure (1)..(581): unsure at all n locations
  Clone ID: LIB3829-029-Q6-K6-A10
tccaaaccccaaaactccagcaaaaggtattattccttaaggttccatcacactagtgttaattggtgatccaaaggaagcttaagtctcttaggttcatcatttgtttgctcctgttcttcttgggtcgtcctggctaaattccactcttcctccatttgtgtggtccatttatgggttgcaaagcatgtgtgtatgctttcaggtccaagtctactgcaagtatgttaaggaaccaagcccatgagtttgtacattcaccttccaccacaacccatgctactggatacatttggttgttagcatctctgccaacagccggtaacatttcacccttgtatggtcccttcaaaaagtagcaatctaaaccaaggttcttggacctcaactcatttgcatagtcccacagaagagcaaattccttcttcacattccttacaagctttttaataaccttatttttagcccttctacaccttgtcaagttaacagttacccacaactctgaagtaaccctctgtgttgtgaagtggncatccatgcaatggtagacatagatcacaaagatgcgagctcaccca

SEQ ID NO: 50713 - DNA, 531 bp, Gossypium hirsutum
  Clone ID: LIB3829-029-Q6-K6-A12
gaaaaaaaaaaaaaaaaaaaaaaaaaaaaaagaaaaaaaaaaaaaaagaaaaaaaaaaataataaaaggaaaaaaaaaaaaaaaaaaaaagaaagaagggggaaaaattttaagggggcatgttttaatacacctatgttggcggccgctttttgttcggggaggagttgctttatatttctggggcgggcgaagggttatttagccgtgccgtgcatttcaaaatttcgcgaggtggaaaaactttgtggttgcccgattcattcgcctttcacagagtggggtttttttgaatgggggttaaagacaagacttttcccaccgatttcttttccgaaaagggggacggctcctcgcactgagagggctaatctttgcagggggttttgggagcgctcctttggggtggttacctcgctttgtggcggctttattgggcttactcttagaagctttcatttttttttcccccatatggttgccattcactgcagaggtgtttctcgggggggtcttacttgggtgggtttt

SEQ ID NO: 50714 - DNA, 572 bp, Gossypium hirsutum
  Clone ID: LIB3829-029-Q6-K6-B7
cccaaatcctgaacgcttttgctctcactccactccttcctggccgattctctccaaaaccctaaacctgacatttccgcctattaccagacccgcgccgcccaccacgccgtcgtaacgagcgattggctgtcccaggcccaggctgccgttagcctccagaccaacgacgatgtctcgtcgggaagtgacggaagagtcgctccgactggtggaggaactggtggggataataagacttttagcgtcattgatgagttcaatagctggaggaaacagccggatttggcggaggctgtggcggctattcgcgctctcgctgctgttattagggctagccaagctactaccatgatggaacttgaaattgagcttaaaaaggcttctgattcgcttaaagcatgggacgcgacctcaatctctttgacagcaggttgcgatctcttcatgcgatatgtgactcgaacatcagctttagagtatgaggactttaattcagctaggtatcggttgattgaacgtgcagagaagtttggggaaatatcttacaaggcacgtcggattattgcaat

SEQ ID NO: 50715 - DNA, 154 bp, Gossypium hirsutum
  unsure (1)..(154): unsure at all n locations
  Clone ID: LIB3829-029-Q6-K6-C8
ggnaaatgtagctcctaaccagnataggttcattgattatgaggttggatccttcattattggtatataaatattatgagtcgggcataacaatgattgtaacttgtgagcaaggttattgtaccgtatcaatattgataaaattattgaagat

SEQ ID NO: 50716 - DNA, 226 bp, Gossypium hirsutum
  unsure (1)..(226): unsure at all n locations
  Clone ID: LIB3829-029-Q6-K6-E8
cggccgcgtgggnaaaaaaaaaaaaaaaaaaaaaaaaaaaaaaaaaaaaaaaaaaaaaaaaaaaaaaaaaaaaaaaaaaaaaaaaaaaaaaaaaaaaaagggcgggccgttttaaaagaaaccaagctttacatacgcttccttgccgacgccttaatatcttttataggactcacctaaatttcattgcattggcccggggaatttccaacggttgacattggga

SEQ ID NO: 50717 - DNA, 404 bp, Gossypium hirsutum
  Clone ID: LIB3829-029-Q6-N6-A7
aaaaaggaaaatgggttacttccagggccctcaataaaagcaaaattctcaaacattttgggaacacaacattgacagagaggacccaattaagggggaaagaaaacaaataaaaaaaaggaaaaggaaaatgaagggggggcatcatatgtatgaaattaaaaaccctcgaaaacagccaaagctggattttaaaacgggggcttcccccactgggggggcttcacaacttcccaggggaagcccgggtcgccccttccaaagggcccggaggcaggtgtcttaaaaaaccggccattgcccccccttttgaaacccaggttgggggggaccaaaccggccctgaagccaaagttctccttcacaatttggaggatttctttggcaggaatttttccagttcc

SEQ ID NO: 50718 - DNA, 418 bp, Gossypium hirsutum
  Clone ID: LIB3829-029-Q6-N6-B11
atactcactataaacataatcattaaaaatcggctcctaagaacaacaaagtatttcagcaatatcaccatagagagtattgcaaatggtgtctcctatgggtcctaatcactcaatttttttaactcacagtaagacaatatggacccaacacatttttcatcaagttttcatggaattcagaggaaataccttctgaatgaattgcaagaaccgttgcgagtaaaacgtagggtcgacggcagatatggatagtgaatcgaactgaagagatttataggcatgttcaatcttcttagtcatgttatactcttgtaaaatgtcaatgattcccagatataacacaacgtcatatgattcatggaacatgttttcttcttttcctggaatctgttcggctcttgctggcatgttcact

SEQ ID NO: 50719 - DNA, 444 bp, Gossypium hirsutum
  unsure (1)..(444): unsure at all n locations
  Clone ID: LIB3829-029-Q6-N6-D10
aaaatgaatcatagtttattacacaatcatcatcaatcatattttaacataaaacaagcttgaaaaggtttaaaagaaaaacctgtgcatacttgcccttctttcaacaaagaaaggtatcacattcacatacactcaccctttctttcaacaaagaaaggtatcacattcacatacttatatagtctacataccatcatcatcctcttaaggctttgcttgcaaaaggcaagccaaatcaatggtgatggattataagggatatgggaacctaaaaatctatcaaggtcagctttgatgatatttataacatgtcatgcagaataaatattgtctttagctaagctaaatttggttaagagggtgtataaatcctactgactaccttgcacttgctctatttggttatcattatttggggggtggncattcctactgggaatt

SEQ ID NO: 50720 - DNA, 593 bp, Gossypium hirsutum
  Clone ID: LIB3829-029-Q6-N6-E8
ttttttttttttttttttttttttttttttttttttttttttttttttttttttttttttttttttttttttttttttacccacctgtttgtgaacccgggggtaccgcccgggaaatcagaaccgggaccagggaggggaaaaaaagtccccaaagggaaggggaaaaaagggggggggaacaaagggaaaaagcggcccccgggggaaaagggaagcccggggcgactacccagggaaaaaaaacggggaaaaaaaaggggaaaaaccgggggggccaaagggggggacaacccaaagaaaagggggggggcgaaagggccgccttgcaaggagaaaaaacggggggaaaggggggtaaagggaggggccaaacgccggggaaagggggcccccggagagggcccccggggggctggcccttccaccaggggcaaagggcaaaaaccgaaaggccttccaagcaggggccttgaaagaggcaaccaggggggccccagcggggtttcaccaggggggaaaaaagccggggggggggggggggacaagggggaaaaaaaaaagaaagcggggcggggtggggggggggggcc

SEQ ID NO: 50721 - DNA, 483 bp, Gossypium hirsutum
  Clone ID: LIB3829-029-Q6-N6-F12
gatgtcaagtggttccttgaatatatttctcaaaagaaaatagaaaccgttgttgataatgatatttaccaacttgataacatttaagtgaggaaaaggctgcaaaaacaactgacgaatcatgctaaaattgaggccttacaatcgcgtatccggtttgcaaatatgttggaatgcagaatcctacaaataccgcgacgaaggaatacaaaagaagtgttaagtgcacataagaatgaatgcagagaatgccctttaatctgttaagagctgcagtgcttggctagcccacaaaggaagaggtgcttgaatcaggagagggaaaccagtaactggatgctgaaaagttaagctctcagcatgaagctcgtgggcttcatatgttctccctttccattcatagacaccctcatatttcacatcccctctaataggaaacccaagatattgggcatgcaatcgaatttgatgcgtccttccact

SEQ ID NO: 50722 - DNA, 388 bp, Gossypium hirsutum
  Clone ID: LIB3829-029-Q6-N6-H10
atcccgaattcaaccttgttctcttttaagtactataataatgtaaagctacagaaatttcctattataatttacagtaacagtactagattctgaacacacaagctttaacatttaaaagaaaaaaagctacaacttcctctatcatttccccaaattcagccttgaggagcattttccttcagcatttaagacacccattgatgcaaattccattaccagaacttctcagctcaactcctcctgcaccactattggtggtgcgtttggcttgggtcggaggcggcaggattcaggccttctttccccatttgttgcacttcaagtggagatagtatcttgatataccacacgttgttcacgaattcctgccaagggtcatcaccaa

SEQ ID NO: 50723 - DNA, 192 bp, Gossypium hirsutum
  Clone ID: LIB3829-030-Q6-K6-A12
gcttcaaaatcatggttggtgctccgttggttgcgtttgtaacaacacacatcttgtatctgaacttctacaaacttgattatggtctaaatatgaaagtttgtatggccaggggtgtggcgcaacttctcatatggggaatttgggccggcataagtagccatccatcacgctggaaggtttggctgtttg

SEQ ID NO: 50724 - DNA, 569 bp, Gossypium hirsutum
  Clone ID: LIB3829-030-Q6-K6-A9
ggctacccctggtcagttccagcttgttaataatgttgtggagaagctcggttatgaagttaaaaggtgagaattacagaaagagtcgtcaatacttactttgcgaaattgtatttgagcaagccagggtgaaaatgatgtcataattgtggatgcacgaccctcagatgccataaatgtggctaacagatgcaaggctccaatatatgtgaacaaacaaattgtcttggcagatgctattagaattggctacgggatgggcagagtgcgtgacaaaaagtctacttatgatgtatctcttgacagtgctgcagatggtcctgatttactattagaggagctggatctggtgaggaatatggatttagctgtcaaagaagaaagatacactgatgcagcaaagttaagagagaaattaatgaagctacgcgatcatggccagtaactgtttactgatgtatccacggttgtacactcattggtggtggttggcttgcttgtggtcgaattctttttgcatttttatgttgttagttctggtgtttcagttcatgctcaaaatgctgtag

SEQ ID NO: 50725 - DNA, 581 bp, Gossypium hirsutum
  Clone ID: LIB3829-030-Q6-K6-B11
agtttataacttaaaatgggcccaaactcaagccttgatgttcaagctcgagttcagcccgtattttaaatgggtctaattttttgccaaaatcatttttttaagcttaatatttttgcttaaaccctcccaaattttggacgaacaacccgacttatgaataggtttgtctagtctcactcccaccatgtgcatatgccatatgtgggttatgtcctattttttttttttcgaattagtctggatttttccgattcttcatctattgtgtgttgtattgattggattctacattgcaatcggtcaggcatatatttgtacttgtagtatacttgtaattgtagttttggcatttcaaattttcactaatgctaaaaggtcaggttttggtccctctattatgccaaattaaaatatgtggaccaaatctctaactttagcatagaagagggaccaaaatcataatttgaccatgttaataaataaatgtaattttagttgaagaacacaaaggaaggtgtctattaatgggattttaatggctttgttgcagattacagaggttagaccagatataagcc

SEQ ID NO: 50726 - DNA, 542 bp, Gossypium hirsutum
  Clone ID: LIB3829-030-Q6-K6-B12
cggccgcgtgggagatgaatgtgagtaatgacaagcaaaccgggaaaatgtggccaatacgtcttgaggacctcattttgtgggaggatgccaattgatgcactcagcagtgcactgtaacatcatattatatggagaccatggaccgcaacctctgatccacgtatgtctacaggcgcaatgactgtaattatgatcttagaggtggaactctatcggactctgctttcaaaggctatgaagcttaagacttagcgaggagtggatccaagctctaatcagacattactcagttcgaagtgcagtgttacgggataatggttgtttgtcagaatcaaaagctgaaaactgacgtaggacacggtgttttggttacagcagtaattaaaaggccagttactcgcttaaaatacatataaactgtgagtgatgcgttgcacattgatgaaagtggtgggaagcttagcatgaccatttttatgcatgaacgtgaactagatcatcttgactggacactgtttttggatctgtacggcacaaca

SEQ ID NO: 50727 - DNA, 385 bp, Gossypium hirsutum
  Clone ID: LIB3829-030-Q6-K6-B9
ggcccctacactttaggaattgcttctttacaaaaactagggatcgatctatctgtcatgggaagggatatcgacattggggatgatgctcattataatagcccgcttacttcttgttccgacatctctaccactaccaccgagggcacctccatgtcattctgcggtgcgggtcctaaacagagcaagaaggctgcaaaaaacagagcagctatgaaaggctcaaagaaagctgtaggagactcggaaaggaggcaaccgatataccgaggtgtacaaatgcgggatgggggacagagggtgtccgaagtcccacaaccaaaaaagaaatgccgcagatgggtgggggacttaccccgaccggaggaaatggcagcctcgagcc

SEQ ID NO: 50728 - DNA, 270 bp, Gossypium hirsutum
  Clone ID: LIB3829-030-Q6-K6-D9
ccctcaaactgctggcctactgcgggtgctttaaccaaattaaatacaaccttgacgatgcattatgcgattctactacatagcaacagcaaaacccttctgctgtgtctggtggaccgcttctcttatgcatgtaataccaagcaatggaacaaatgatcttttcctgagtgatactacatattatatgttaaccaggtgtaaaaacattatattggaaacacttcgaatatgacctttttatgtaataactgataaaaaaggccatgt

SEQ ID NO: 50729 - DNA, 228 bp, Gossypium hirsutum
  unsure (1)..(228): unsure at all n locations
  Clone ID: LIB3829-030-Q6-K6-E12
cgagattctttgagaaagattaacacaaaatattttttcctaccccgaaaanaacganatcgttagagagagaaagaaaggagaacaagatcgaaggtagaaagagggtcgattcttcgttgctgttatatttaaaaataaacgacaacgatgaagaacactgaaagactcgccaacttggctttagcagggttgacattggcaccacttgtccgtgaagtagatcct

SEQ ID NO: 50730 - DNA, 578 bp, Gossypium hirsutum
  Clone ID: LIB3829-030-Q6-K6-G8
gtcgtaatctgtttttgctttattcaatcatagttacgtacttcaataaaaacaaatgaattttaaggcagaattctgtagttttggcatctaatttggaagtatgaatgaaaatacgatatgggttttaagttttaactattaatctggttttgttaagttttatgcaattatagttaacataactcagtttccatgatatttagggatttgcttgattatcatcttgattcagtttttggctttgtagttcaatagctagttgagaaattgggggaaatggaaggggcagtaagggttcaaattctttctcaaatgggcatttcagaggttccgtcacaatacattcaaccccccaagaaccggcctggatctgtaactgaaaatatagctgatttgagctgcaaacatgttcctgccgttgatctatccagtgaaaaggagtccgtccttccagccattcgagaggcttgtagagattggggagcttttcatgttatcaaccatggggtacctacaaaactgttggatgatttgaggagagcctgtttttcttttttcaatgatttcccgatgga

SEQ ID NO: 50731 - DNA, 397 bp, Gossypium hirsutum
  Clone ID: LIB3829-030-Q6-N6-A11
aaggggaaatattgaaacttggaaaaaaataatatttgcccccaaaaaaggttaataaaatcatcataaaaaggattggtgttcaaacaaaacccttaaaacttcaacataaaaaaaaagtttttaaatagggggggggccccttttcctttgaaaatttggggaatggccccatttgttttttggaaactcccagggtttaacttgttttgggattcaaaaaatcctttttttttccaaaaagctccttccttttcactgaaatcggggcattaaggggaaagggggggattccttggcgtttttggcccaaagttttccttgtttttttgttgaacaaaaggaaaaaaaaggcaggtttttagggtttataaggaacgaaaaccgggggcttttt

SEQ ID NO: 50732 - DNA, 561 bp, Gossypium hirsutum
  unsure (1)..(561): unsure at all n locations
  Clone ID: LIB3829-030-Q6-N6-A12
gaatgtaaacgatacaaagcttgcttacatatttttccatccttcataatcatacagaagactgactaatcaagcaatgcaagtaaaaacaagcttagtttaaagattcaacacaaaaaatttacattgaaattggatagaagcctttgtgaatattaccgatcacctcggngaaaaacaaagaccggagcctaaaaaacttggagacttcgattacgacacatacccttgcattgcgaagaaaacaccaaccatatcggtaaacaaaatgtcaagcagtccggtgatcgttgcatcatgcacaagtgagttggatcgtttcaccattcagttcgtgcacgattggaatgaagaaatatcactttattttcttgaggagagttgaggtcctgaactcggcatcatcctggacaaagctccagcagaagtaagtaagagggatactgacagcatgccacagagcgtgtgcatctacaaaccctttataaggtgggaaagtctaatatttccaagaacacaacaaggcttccccacacaacaaacagccaaaccttccagcgt

SEQ ID NO: 50733 - DNA, 452 bp, Gossypium hirsutum
  Clone ID: LIB3829-030-Q6-N6-D12
gataatataaaaccttgaaataattgttttaagaaataacatcaattggcaaacagatttatattaaaaaaaataaaactaagaaaagagagaactaaatgtatgtaatgtttatttgactacatctcaagggccatctacctctaatcagtaatcaaatgtaatgtctcttcattggctgatttcctcaaccgatccgcagctttttcaacctccaagtcccagtttgttctggcagtgagaatgattagagttattgtttgtagaagaaccccaactaccatcccccaccatataccttttactcctaaacctaatttgaatccaagaacacatccaattggaagaccaataatgtaatatgtagtgagggtgacatatgctactatatgttggcatccactcccaatgggcactccctgaaaaaaagggctggattccatttcaagaaa

SEQ ID NO: 50734 - DNA, 361 bp, Gossypium hirsutum
  Clone ID: LIB3829-030-Q6-N6-D9
aaacagagaccataaacatctcttattcctctttacacaatatgagccactgggaaacataatttgaaaattttcgggggggaggggggcgggggaagttttgtggatgaaagaaaaccctaagattaagatacaatcatgcttcacggttagggagcctcttattcaatcccaactatcattacatacaagggtaaattcccttccctgcaatgaggggcttaggggggggcaatgacctaatttcaggggcagaactgggaaacagtatattcagcttgggcatgaggagggcacctcttggtggaatctcattcaaaaaaaaccgcggaacatcgggtttttgaaccactccataaca

SEQ ID NO: 50735 - DNA, 361 bp, Gossypium hirsutum
  Clone ID: LIB3829-030-Q6-N6-F9
agaggatgaggatagtgtggtgtccaccatattaaaatggcatataattcctggttgtaggccacagcttatatacatttgagcaggcaactagctaaggcaaaacaagtgctcgatattatgtcacacaggaagaaccgtgacataaagatacaaagaaagtgatggtcacttgaaactagaaacactggaacacacccagatcaaccagactgtccccatggacagcttctaacgcacgacaattgctgcccatgttttgtgccatgggggcctcaacaagagataattttgcatgatgaaaaaggacttaacaccatttgggtgccaaactagcataacctcaaacgggggttaaccc

SEQ ID NO: 50736 - DNA, 297 bp, Gossypium hirsutum
  unsure (1)..(297): unsure at all n locations
  Clone ID: LIB3829-031-Q6-K6-A7
gnaanactaaagcagcattattcagaatgcaggctatggaggaacatgtctatagaacattacaagtgaggatctgcaacaacatcaagttcctatcaataaagctctgctcattcatcaaatcaaaaatctcacaaatggagcatgttatgatataactatgatttttctcttcttgtacactattagatggttgaaaaaaaaagggaattttgttcatatttttaatggaacaagaatgtattttagaggaaaatgtgtgcagaaattagtggtctattaatttctttttgctct

SEQ ID NO: 50737 - DNA, 577 bp, Gossypium hirsutum
  unsure (1)..(577): unsure at all n locations
  Clone ID: LIB3829-031-Q6-K6-C11
ccgcccacgccgtccgtggnatcaaaccatgactagnaaggtgccagttgattcgctgataggtaagacaattgggctttacttctcagcacaatggtgctttccatgtgctaagttcactcccaaactgatatccatctaccagnaaaatcaagcaaagtttggaaggaaaagtggtggtgttgaagatttcgaaatagtttttgtgtcgaatgatcgagaccaaagtagctttgactcctactacggtaccatgccatggctagcgttgccttttggagacccaattattagaacccttgcaaagtacttcgacgtgcaaggcattccatgtttgataatcataggtcccgacggaaaaacagttaccaagcaaggtagaaatctcataaatttgtaccaggaaaatgcataccctttcactgatgcaaaactggagtcgctggagaaagaaatggaggaagaagccaagagattacccagatctaattatcatgcaggtcaccgccatgagcttactttggtatcggaagggaatggaggggggccgtttatatgctgcgattgtgatgagcaa

SEQ ID NO: 50738 - DNA, 604 bp, Gossypium hirsutum
  unsure (1)..(604): unsure at all n locations
  Clone ID: LIB3829-031-Q6-K6-F7
ttcagnatcatcacagctaattccacaacataactacaagcttgatgtgcatgctctgaacactcgtcaacctggtgagggaatttagagaatcaatccttggagttatgccacatcattgggataggagagaagatacattgttgaagttgtcacatttcaagcgacataagaggaaaacattgaaaagagtacctggaaagtcaacaacatatccttttcataagcctgaggaacaccatcctccagggaaggatgattcaaaaaaaatttcaaacttgattggaaaagctgccaagtatgccggttcagcaaaatctaagaagccagtggcttatattccaaccataacaaactacacccagctctggtgggttcctaacgttgttgtggcccatcaaaaggaagggattgaagctgttcatttggcatctggtcgaactgtatgcaagcttcatcttcaataaggaggccttcatgctgatatcaatggagatggagtcctggatcatgtccaggctgttggtggaaatggtgctgagcagacagttattagcggatcaatggaggtgctgcgaccttgttgggctgtggcaacctctgg

SEQ ID NO: 50739 - DNA, 568 bp, Gossypium hirsutum
  Clone ID: LIB3829-031-Q6-K6-G8
gcatttgctaagggtgctataccttcatccataggtcatcttacaagattgcattacctcaatttgtctaccaactttttctctggtgaaatcctggatattggagtcctcagcacttttaggaacaactcgtttattggcaatttggatctatgtggccaacaggttaacaagccttgtcaaacttcactgggatttcctgcagtcttacctcatgctgaaagtgatgaagtagcagttcctacgaaacgatcatctcattacataaaaggtgtgatgattggtgcaatgttgacaatggtccttgtgcttgtcatgctccttgcattcctctggatatatctactatcaaagaaggaaagggctgttaaaagatacacggaagttaaaaagcaactcaaccacgatacgagtactaaacttataacttttcatggggatctaccgtatccttcatgtgagattatagaaaagctggagtcccttgatgaagaagatgtcgtggggtctgggggatttggtacggtatatcgaatggtcatgaatgattgtcaaacatttgctgtta

SEQ ID NO: 50740 - DNA, 601 bp, Gossypium hirsutum
  unsure (1)..(601): unsure at all n locations
  Clone ID: LIB3829-031-Q6-K6-H10
gtcggctttgcccttatgagtgccgttcttttaccgccgaaatctccccggcttcttcccggggtttcctcactccattccgtgaggtgtgtattaatagtgggatattgttgggatatgtttcgaactatgcgttttcgaagctgccgattaagatcggatggcggttgatgctcggcgttggagccatctcatcgattttcttggcatttgcagttttagcaatgccggagtccccgcgttggttggtcatgcaaggtcaattggatgaagccaaggttgtgcttgataaaactttagacaccaaaaaagaagctcaacttcgacttgatgacatcaaagaagccgccaaaatcccccaagattccaccaccggcaacatcatcccaaaacaaacaaacggagaaggggtttggagagaattactattacaccccacacccgctgttaagcacgtcttgatttgtgccatcgtgattcatttcttccaacaatcatccgggatatccgccgttgttntgtacagtccaagnatttttgagaaagccgggatcacatcatcagatggtaagctactcgcaaccatagccatcgggttttc

SEQ ID NO: 50741 - DNA, 364 bp, Gossypium hirsutum
  Clone ID: LIB3829-031-Q6-N6-B9
atcactcaagtttcataagaacaattaatttcttgattttgcaaacagaaatatatatatatatatataacaaagaagaagtgaagaacctaatctccatttattaaatgtttattgatctgacatgctcatattttacatatatattttaaccatatgattgggtaatattaaccatgtcaaagattaaaaaagaagatattgcatgtactgaaaagaacgggctttttttagtagtactcccacgcgaatggctcctcgatcctgaaaccagcatcgactggacatacttgccacgttgaagaataagagcagagcccatcgcttcgatcgatggcatcaatcgtgagatcgggccaatcaa

SEQ ID NO: 50742 - DNA, 431 bp, Gossypium hirsutum
  Clone ID: LIB3829-031-Q6-N6-F11
gggaaaaatacttactgatatatgaatgtataacaatgctaatgctacttaccatttagttacaaagccaatctaacgcgatagctgctgcctttttaaatatgcaaggctgatacactaaacaccatggagtccaattcacaaacattgttacctttacaaatattgtaatattcgttttccccccaaatttctccccatgaattctttatgatccactaaggcttgtttttaaatctaaccggtgcttaaccagcggattcctaccctacaatgaggactccatggtgcaaatgtttcccacaaatatatgggcatgaaaccccctgaatggatgtctgcatgaaaacggaattgatacccactggaagagggccatgcttaaccaaatttgcagggacatggggctcatcaatggatatgacgctgaa

SEQ ID NO: 50743 - DNA, 577 bp, Gossypium hirsutum
  Clone ID: LIB3829-031-Q6-N6-G8
gaatgaagatccatctggtaataaaagtgaaaaaatgtctcaagcaatatttgttttcagcactgcagtttcaagtcactgtcacagcacaagtgacaaggattcaaaaccatgcacacatagatcaatttcgagataatatacaaaagccccctagagtgggacaaaatcgaagaacatcctacgaaagtcgagatgacagcagattttatgtgcaacaaccaccgttaaatcaatatttgtatgttcattcaacaataatctgaatgagactcgtaatcacttgggtaaggcgacatgacctcttgttccagtaactgaagtacctggcacattgttggccgttcatctggatttgcatcagtacacttcgctgctatttcgagaattgcttcgacagtttccatgatagcatcagtacaccctttatcaactatgtcttccagacggttctctctcaataaagtgtttgtccagccgacaacattcaagcccctctttgcaaaagttgggatcagttggccttttcccggttaccagctccagtaagagaactccaaagctgtagacatccgtc

SEQ ID NO: 50744 - DNA, 509 bp, Gossypium hirsutum
  Clone ID: LIB3829-031-Q6-N6-H10
agcaatatcttatcattcaatggtaacatcattcattttcttagatgcctccttccaacaaaccaatttaccaaaaagacattcaatttcgtcgagtgttttcccacgcgtctcaggcatacacacactagaaaaacacccatccaacggtggcaatgccagtaaataagaaaaaagcaccgccgatagtgatagctttgtacaaggaaataaatgtcattgagatgatcccgctcaccaccctattcaccgccactcccatactcaccccttatgcacgtagcctcaacggaaagatctccgacatgtaaacattggttatcggccccattccgatcgcaaaaaatgagacgaaagctaaaaccatcgtcatacacaagacaatggcccacgttagttttgtctcccaatggtcggcgatcgttagggaaaacccgagtgtcgctagcgacactaccatgcctccaacgctgcttaagagcaaaacacgacgaccgattttgtcaagt

SEQ ID NO: 50745 - DNA, 276 bp, Gossypium hirsutum
  Clone ID: LIB3829-031-Q6-N6-H9
atgccaaacgtttttattgtatatagcgaatataaacatttttttttattggcaccgcatgatctggattttgatactgaagtgtctggtcacccccatgaaatattatttatgataatttaacatagggactagccttagaaaagctttagaacaatgcggcttggtaaaacgtcatactcactagggtgcatttttatcacctcagtcataccgcgaacaactcaacaagtaattcactttttgctgccggatataaaacagagccctgggggg

SEQ ID NO: 50746 - DNA, 551 bp, Gossypium hirsutum
  unsure (1)..(551): unsure at all n locations
  Clone ID: LIB3829-032-Q6-K6-B10
ttttgattgattcgagcccgagacctgattcacttaaagagttttcaagcagaccatgcttgatcaagatatcatattcagaaagcaggtctgtgagctccatcgtttgtatagtgttcagaagactctaatgaaggatcttacaacaccggnnagcttgaaaagtacaattcatggaaagcaaatctacaatcttttccccaaaaaaacaagattgcccacaaattcaattcccctgttagactcgggagtatcttcaagtctggagttgttagaagggtggaaggacaataactataagtatcagcctaggcctttcgaccgtcaacttgtacctgatcggtatattcgccttggagataataataaccttccaaaaaaagtaaaggttggagatcacttaaaggaaactttgggagtaaattctgtccatgatggtggtttctcggatccactggagttgaggctttctctaagcctaggagtggccanaggggaaaaaggaagataaacagagaagcaggtgtgacaagaaaactaataccttctct

SEQ ID NO: 50747 - DNA, 593 bp, Gossypium hirsutum
  unsure (1)..(593): unsure at all n locations
  Clone ID: LIB3829-032-Q6-K6-B8
cagnaccatcttgtaatgctgctgttggcaaagaaatgatcaataaattggcaacttcagaagaaaaagaaaatattctcgttacctacttaggtcttatgttngaagaacaacaggaagaccaagtggtgtcctgctccggggtgtgaatatgctgttgattttaccgttggcagtggaaattttgatgtctcctgcaactgcgcatttagcttttgttggaattgtactgaagaagctcatcgccctgttgactgcgagactgtggcaaagtggattttgaagaatagtgcagagtcagaaaacatgaactggatactagctaactccaagccttgccccaaatgcaagcggccaattgaaaagaaccaagggtgtatgcacatgacatgtacaccgccttgtaaatttgagttttgctggttatgccttggtgcatgggcagaacatggtgagagaactggtggtttctatgcttgtaatcgttatgaagctgctaagcaagagggtgtgtatgatgaggctgaaagaaggcgagaaatggcaaagaactccttggagaaatacacccattattatgaacgttgggcaag

SEQ ID NO: 50748 - DNA, 593 bp, Gossypium hirsutum
  Clone ID: LIB3829-032-Q6-K6-D11
cataatacctttttttctagtttatatatctctgctcataaatcacaatacacagacacaattcttaagaaagaggagcatagggggggttggttgtttttgtttttgtcttgtgaccaatcttttaaatgaggtgtaagaaacatattgccgacttgagtagcggcgttggcttgtgtgccacttgtctccgggagcgtcttctggagctcatcgccgctcaggcgcaggctcaggcgcaagcccaacaggctcaattagcgcgctttgccatcgaagatggtctgaaacatgaccctccgccgctgattttccctcggtctgtttctccttatgtcagtcggcggaaatctgatgataatagtgccacgtggatccacaatcaacggttctacagcactcctcaggtgggcccaacttacagcaccacatccacctcctattttgaagccaccagatcgttcaaaaagaagaacaggttctcgcttttttcgaatctgctcaggtcgagatccgagaagttcaattccgatcctagggttcattttcatcgggactcgtgcgacgagccttccacatcatcggcatccccg

SEQ ID NO: 50749 - DNA, 473 bp, Gossypium hirsutum
  Clone ID: LIB3829-032-Q6-K6-D9
ctggtatgtatgggaagctgaaactgtactgaaagcggatatgtctggaacacagcatggtgataaatggctgcttacaagaaatactcgaatgaaccggatgaatatactgatcgtgatgatgaccatcaagtattgacaatatactggtatacaactggtatagcatgtataaatacacattatacagattatatggtaatgcagaaagcacgatctgtactgctcaacacgatgtgaggagtccatgggggttagcaccgatcatactaaatttgggattacttgctgatataaggccatgatacagatgaggggtaacggacagagaaagatcacaatatttccatgctgtgtatacaactctgatgtaccttaccaaaaacctttgtgtttaaccaagcacacctacgaagaacacactgttcaagcagcaagcaatgatcaaagaacatactaactgtgcacgatct

SEQ ID NO: 50750 - DNA, 614 bp, Gossypium hirsutum
  Clone ID: LIB3829-032-Q6-K6-E11
gggacacctgggtgccaaacgcttcttttctttgcttgtgctactgcttacatatctcagggtcttcattccgcacaggaatgatgcaacacctaacgactggatattttacttcgtacttagaataggtctgtacctacagagatgtaagaacgctgatcaaggagagcaagcataaatgtacatgtatcacagcgacgacgacaaacaatgttttatcttgcattgagaaccattatacatggatgggccttgctccatgtaatgctggactgtctttatctgcacataaaggaacttgatggaaatgtactctatccggaacatgctgctgaggaatttaatgtccattgttgccatggaacattctgtttgaagcgtaatgaactgtggctgggccttgggctgatattctcgatatggatgttttgatgggctgcgtaaacgtggttatgcactatctttgctctccctactggatgatacaacggttgatcgagcataactaatgatgtggtggggtatctttccgaccacaatgctacccttttatgagttgcttgacaggatatgccgtcgtgtgagattgaaaccgctggtgcacggtggcctac

SEQ ID NO: 50751 - DNA, 572 bp, Gossypium hirsutum
  Clone ID: LIB3829-032-Q6-K6-E12
gcgactctgcaccaatgaactgttttgaggtctccttcccctgaagatctggtctctgtgctgcaagttgtggtcacactggcctttgggtctgatactgtagctcagaagatgctgtgtaatgatattatgaaatcattagagatactgtttggccataaaaacccagaggtgcaaaggcttgctttgctatctgttgggaatttggccttttgccgagagaattataacattcttgtcacttctgaaaacttgagggaacttctcatgcggctgacggctacacccgagccacgagtaaataaagctgcagctcgtgctttggcaattcttggagaaaatgaaagcttgcgccgtgctattaaagggagacaggtaccgaaaacaggcatacgcatactttcgttggacggaggtggcatgaaaggtcttgcaactgtgcagatccttcaagaaattgaaaggggaacgggaaagcgaatgcatgagctatttgaccttatatgtgggacatcaacgggtggcattttcgcttctgcgcttggtattaaattgatgagctcagaccaatt
